United States Patent Application Publication US 2011/0183924 A1 - sequence listing, part 271

SEQ ID NO: 800432 - protein, 175 aa, Homo sapiens
MSAQQPSIIPFTAQAYEELSRQFDPQPVSGLPCESWCGEAAAVTEGVTCTQLAMQFISQYSPEDIVTAQIEGSSGALWRISPPSRAQMKRELYNGTADITLRFTWNFQRFVLDLGQCLGGWTHYSGSRCVPTPRDLAKGGTVEYANEKHMLALAPNSTARRQLASLLEGTSDQSV

SEQ ID NO: 800433 - protein, 2035 aa, Homo sapiens
MDLRPELPTTLGPVSLRQLGLEHTRYPCLDLGAMLLYTLTFWLLLRQFVKEKLLKWAESPAALTEVTVADTEPTRTQTLLQSLGELVKGVYAKYWIYVCAGMFIVVSFAGRLVVYKIVYMFLFLLCLTLFQVYYSLWRKLLKAFWWLVVAYTMLVLIAVYTFQFQDFPAYWRNLTGFTDEQLGDLGLEQFSVSELFSSILVPGFFLLACILQLHYFHRPFMQLTDMEHVSLPGTRLPRWAHRQDAVSGTPLLREEQQEHQQQQQEEEEEEDSRDEGLGVATPHQATQVPEGAAKWGLVAERLLELAAGFSDVLSRVQVFLRRLLELHVFKLVALYTVWVALKEVSVMNLLLVVLWAFALPYPRFRPMASCLSTVWTCVIIVCKMLYQLKVVNPQEYSSNCTEPFPNSTNLLPTEISQSLLYRGPVDPANWFGVRKGFPNLGYIQNHLQVLLLLVFEAIVYRRQEHYRRQHQLAPLPAQAVFASGTRQQLDQDLLGCLKYFINFFFYKFGLEICFLMAVNVIGQRMNFLVTLHGCWLVAILTRRHRQAIARLWPNYCLFLALFLLYQYLLCLGMPPALCIDYPWRWSRAVPMNSALIKWLYLPDFFRAPNSTNLISDFLLLLCASQQWQVFSAERTEEWQRMAGVNTDRLEPLRGEPNPVPNFIHCRSYLDMLKVAVFRYLFWLVLVVVFVTGATRISIFGLGYLLACFYLLLFGTALLQRDTRARLVLWDCLILYNVTVIISKNMLSLLACVFVEQMQTGFCWVIQLFSLVCTVKGYYDPKEMMDRDQDCLLPVEEAGIIWDSVCFFFLLLQRRVFLSHYYLHVRADLQATALLASRGFALYNAANLKSIDFHRRIEEKSLAQLKRQMERIRAKQEKHRQGRVDRSRPQDTLGPKDPGLEPGPDSPGGSSPPRRQWWRPWLDHATVIHSGDYFLFESDSEEEEEAVPEDPRPSAQSAFQLAYQAWVTNAQAVLRRRQQEQEQARQEQAGQLPTGGGPSQEVEPAEGPEEAAAGRSHVVQRVLSTAQFLWMLGQALVDELTRWLQEFTRHHGTMSDVLRAERYLLTQELLQGGEVHRGVLDQLYTSQAEATLPGPTEAPNAPSTVSSGLGAEEPLSSMTDDMGSPLSTGYHTRSGSEEAVTDPGEREAGASLYQGLMRTASELLLDRRLRIPELEEAELFAEGQGRALRLLRAVYQCVAAHSELLCYFIIILNHMVTASAGSLVLPVLVFLWAMLSIPRPSKRFWMTAIVFTEIAVVVKYLFQFGFFPWNSHVVLRRYENKPYFPPRILGLEKTDGYIKYDLVQLMALFFHRSQLLCYGLWDHEEDSPSKEHDKSGEEEQGAEEGPGVPAATTEDHIQVEARVGPTDGTPEPQVELRPRDTRRISLRFRRRKKEGPARKGAAAIEAEDREEEEGEEEKEAPTGREKRPSRSGGRVRAAGRRLQGFCLSLAQGTYRPLRRFFHDILHTKYRAATDVYALMFLADVVDFIIIIFGFWAFGKHSAATDITSSLSDDQVPEAFLVMLLIQFSTMVVDRALYLRKTVLGKLAFQVALVLAIHLWMFFILPAVTERMFNQNVVAQLWYFVKCIYFALSAYQIRCGYPTRILGNFLTKKYNHLNLFLFQGFRLVPFLVELRAVMDWVWTDTTLSLSSWMCVEDIYANIFIIKCSRETEKKYPQPKGQKKKKIVKYGMGGLIILFLIAIIWFPLLFMSLVRSVVGVVNQPIDVTVTLKLGGYEPLFTMSAQQPSIIPFTAQAYEELSRQFDPQPLAMQFISQYSPEDIVTAQIEGSSGALWRISPPSRAQMKRELYNGTADITLRFTWNFQRDLAKGGTVEYANEKHMLALAPNSTARRQLASLLEGTSDQSVVIPNLFPKYIRAPNGPEANPVKQLQPNEEADYLGVRIQLRREQGAGATGFLEWWVIELQECRTDCNLLPMVIFSDKVSPPSLGFLAGYGIMGLYVSIVLVIGKFVRGFFSEISHSIMFEELPCVDRILKLCQDIFLVRETRELELEEELYAKLIFLYRSPETMIKWTREKE

SEQ ID NO: 800434 - protein, 2060 aa, Homo sapiens
MDLRPELPTTLGPVSLRQLGLEHTRYPCLDLGAMLLYTLTFWLLLRQFVKEKLLKWAESPAALTEVTVADTEPTRTQTLLQSLGELVKGVYAKYWIYVCAGMFIVVSFAGRLVVYKIVYMFLFLLCLTLFQVYYSLWRKLLKAFWWLVVAYTMLVLIAVYTFQFQDFPAYWRNLTGFTDEQLGDLGLEQFSVSELFSSILVPGFFLLACILQLHYFHRPFMQLTDMEHVSLPGTRLPRWAHRQDAVSGTPLLREEQQEHQQQQQEEEEEEDSRDEGLGVATPHQATQVPEGAAKWGLVAERLLELAAGFSDVLSRVQVFLRRLLELHVFKLVALYTVWVALKEVSVMNLLLVVLWAFALPYPRFRPMASCLSTVWTCVIIVCKMLYQLKVVNPQEYSSNCTEPFPNSTNLLPTEISQSLLYRGPVDPANWFGVRKGFPNLGYIQNHLQVLLLLVFEAIVYRRQEHYRRQHQLAPLPAQAVFASGTRQQLDQDLLGCLKYFINFFFYKFGLEICFLMAVNVIGQRMNFLVTLHGCWLVAILTRRHRQAIARLWPNYCLFLALFLLYQYLLCLGMPPALCIDYPWRWSRAVPMNSALIKWLYLPDFFRAPNSTNLISDFLLLLCASQQWQVFSAERTEEWQRMAGVNTDRLEPLRGEPNPVPNFIHCRSYLDMLKVAVFRYLFWLVLVVVFVTGATRISIFGLGYLLACFYLLLFGTALLQRDTRARLVLWDCLILYNVTVIISKNMLSLLACVFVEQMQTGFCWVIQLFSLVCTVKGYYDPKEMMDRDQDCLLPVEEAGIIWDSVCFFFLLLQRRVFLSHYYLHVRADLQATALLASRGFALYNAANLKSIDFHRRIEEKSLAQLKRQMERIRAKQEKHRQGRVDRSRPQDTLGPKDPGLEPGPDSPGGSSPPRRQWWRPWLDHATVIHSGDYFLFESDSEEEEEAVPEDPRPSAQSAFQLAYQAWVTNAQAVLRRRQQEQEQARQEQAGQLPTGGGPSQEVEPAEGPEEAAAGRSHVVQRVLSTAQFLWMLGQALVDELTRWLQEFTRHHGTMSDVLRAERYLLTQELLQGGEVHRGVLDQLYTSQAEATLPGPTEAPNAPSTVSSVGLWLLELKPLKQHDMTDHWCMPPWVTCAIKTLHVACEEGMSPDPLGELLSARVASSCTHGDSIAGLCHADACVLVTWRLAAIPTKLGLDVRRSLFVPDGRRGRALRLLRAVYQCVAAHSELLCYFIIILNHMVTASAGSLVLPVLVFLWAMLSIPRPSKRFWMTAIVFTEIAVVVKYLFQFGFFPWNSHVVLRRYENKPYFPPRILGLEKTDGYIKYDLVQLMALFFHRSQLLCYGLWDHEEDSPSKEHDKSGEEEQGAEEGPGVPAATTEDHIQVEARVGPTDGTPEPQVELRPRDTRRISLRFRRRKKEGPARKGAAAIEAEDREEEEGEEEKEAPTGREKRPSRSGGRVRAAGRRLQGFCLSLAQGTYRPLRRFFHDILHTKYRAATDVYALMFLADVVDFIIIIFGFWAFGKHSAATDITSSLSDDQVPEAFLVMLLIQFSTMVVDRALYLRKTVLGKLAFQVALVLAIHLWMFFILPAVTERMFNQNVVAQLWYFVKCIYFALSAYQIRCGYPTRILGNFLTKKYNHLNLFLFQGFRLVPFLVELRAVMDWVWTDTTLSLSSWMCVEDIYANIFIIKCSRETEKKYPQPKGQKKKKIVKYGMGGLIILFLIAIIWFPLLFMSLVRSVVGVVNQPIDVTVTLKLGGYEPLFTMSAQQPSIIPFTAQAYEELSRQFDPQPLAMQFISQYSPEDIVTAQIEGSSGALWRISPPSRAQMKRELYNGTADITLRFTWNFQRDLAKGGTVEYANEKHMLALAPNSTARRQLASLLEGTSDQSVVIPNLFPKYIRAPNGPEANPVKQLQPNEEADYLGVRIQLRREQGAGATGFLEWWVIELQECRTDCNLLPMVIFSDKVSPPSLGFLAGYGIMGLYVSIVLVIGKFVRGFFSEISHSIMFEELPCVDRILKLCQDIFLVRETRELELEEELYAKLIFLYRSPETMIKWTREKE

SEQ ID NO: 800435 - protein, 1327 aa, Homo sapiens
HELPPVPSLLPVYSLLACVFVEQMQTGFCWVIQLFSLVCTVKGYYDPKEMMDRDQDCLLPVEEAGIIWDSVCFFFLLLQRRVFLSHYYLHVRADLQATALLASRGFALYNAANLKSIDFHRRIEEKSLAQLKRQMERIRAKQEKHRQGRVDRSRPQDTLGPKDPGLEPGPDSPGGSSPPRRQWWRPWLDHATVIHSGDYFLFESDSEEEEEAVPEDPRPSAQSAFQLAYQAWVTNAQAVLRRRQQEQEQARQEQAGQLPTGGGPSQEVEPAEGPEEAAAGRSHVVQRVLSTAQFLWMLGQALVDELTRWLQEFTRHHGTMSDVLRAERYLLTQELLQGGEVHRGVLDQLYTSQAEATLPGPTEAPNAPSTVSSVGLWLLELKPLKQHDMTDHWCMPPWVTCAIKTLHVACEEGMSPDPLGELLSARVASSCTHGDSIAGLCHADACVLVTWRLAAIPTKLGLDVRRSLFVPDGRRGRALRLLRAVYQCVAAHSELLCYFIIILNHMVTASAGSLVLPVLVFLWAMLSIPRPSKRFWMTAIVFTEIAVVVKYLFQFGFFPWNSHVVLRRYENKPYFPPRILGLEKTDGYIKYDLVQLMALFFHRSQLLCYGLWDHEEDSPSKEHDKSGEEEQGAEEGPGVPAATTEDHIQVEARVGPTDGTPEPQVELRPRDTRRISLRFRRRKKEGPARKGAAAIEAEDREEEEGEEEKEAPTGREKRPSRSGGRVRAAGRRLQGFCLSLAQGTYRPLRRFFHDILHTKYRAATDVYALMFLADVVDFIIIIFGFWAFGKHSAATDITSSLSDDQVPEAFLVMLLIQFSTMVVDRALYLRKTVLGKLAFQVALVLAIHLWMFFILPAVTERMFNQNVVAQLWYFVKCIYFALSAYQIRCGYPTRILGNFLTKKYNHLNLFLFQGFRLVPFLVELRAVMDWVWTDTTLSLSSWMCVEDIYANIFIIKCSRETEKKYPQPKGQKKKKIVKYGMGGLIILFLIAIIWFPLLFMSLVRSVVGVVNQPIDVTVTLKLGGYEPLFTMSAQQPSIIPFTAQAYEELSRQFDPQPLAMQFISQYSPEDIVTAQIEGSSGALWRISPPSRAQMKRELYNGTADITLRFTWNFQRDLAKGGTVEYANEKHMLALAPNSTARRQLASLLEGTSDQSVVIPNLFPKYIRAPNGPEANPVKQLQPNEEADYLGVRIQLRREQGAGATGFLEWWVIELQECRTDCNLLPMVIFSDKVSPPSLGFLAGYGIMGLYVSIVLVIGKFVRGFFSEISHSIMFEELPCVDRILKLCQDIFLVRETRELELEEELYAKLIFLYRSPETMIKWTREKE

SEQ ID NO: 800436 - protein, 2094 aa, Homo sapiens
MDLRPELPTTLGPVSLRQLGLEHTRYPCLDLGAMLLYTLTFWLLLRQFVKEKLLKWAESPAALTEVTVADTEPTRTQTLLQSLGELVKGVYAKYWIYVCAGMFIVVSFAGRLVVYKIVYMFLFLLCLTLFQVYYSLWRKLLKAFWWLVVAYTMLVLIAVYTFQFQDFPAYWRNLTGFTDEQLGDLGLEQFSVSELFSSILVPGFFLLACILQLHYFHRPFMQLTDMEHVSLPGTRLPRWAHRQDAVSGTPLLREEQQEHQQQQQEEEEEEDSRDEGLGVATPHQATQVPEGAAKWGLVAERLLELAAGFSDVLSRVQVFLRRLLELHVFKLVALYTVWVALKEVSVMNLLLVVLWAFALPYPRFRPMASCLSTVWTCVIIVCKMLYQLKVVNPQEYSSNCTEPFPNSTNLLPTEISQSLLYRGPVDPANWFGVRKGFPNLGYIQNHLQVLLLLVFEAIVYRRQEHYRRQHQLAPLPAQAVFASGTRQQLDQDLLGCLKYFINFFFYKFGLEICFLMAVNVIGQRMNFLVTLHGCWLVAILTRRHRQAIARLWPNYCLFLALFLLYQYLLCLGMPPALCIDYPWRWSRAVPMNSALIKWLYLPDFFRAPNSTNLISDFLLLLCASQQWQVFSAERTEEWQRMAGVNTDRLEPLRGEPNPVPNFIHCRSYLDMLKVAVFRYLFWLVLVVVFVTGATRISIFGLGYLLACFYLLLFGTALLQRDTRARLVLWDCLILYNVTVIISKNMLSLLACVFVEQMQTGFCWVIQLFSLVCTVKGYYDPKEMMDRDQDCLLPVEEAGIIWDSVCFFFLLLQRRVFLSHYYLHVRADLQATALLASRGFALYNAANLKSIDFHRRIEEKSLAQLKRQMERIRAKQEKHRQGRVDRSRPQDTLGPKDPGLEPGPDSPGGSSPPRRQWWRPWLDHATVIHSGDYFLFESDSEEEEEAVPEDPRPSAQSAFQLAYQAWVTNAQAVLRRRQQEQEQARQEQAGQLPTGGGPSQEVEPAEGPEEAAAGRSHVVQRVLSTAQFLWMLGQALVDELTRWLQEFTRHHGTMSDVLRAERYLLTQELLQGGEVHRGVLDQLYTSQAEATLPGPTEAPNAPSTVSSVGLWLLELKPLKQHDMTDHWCMPPWVTCAIKTLHVACEEGMSPDPLGELLSARVASSCTHGDSIAGLCHADACVLVTWRLAAIPTKLGLDVRRSLFVPDGRRGRALRLLRAVYQCVAAHSELLCYFIIILNHMVTASAGSLVLPVLVFLWAMLSIPRPSKRFWMTAIVFTEIAVVVKYLFQFGFFPWNSHVVLRRYENKPYFPPRILGLEKTDGYIKYDLVQLMALFFHRSQLLCYGLWDHEEDSPSKEHDKSGEEEQGAEEGPGVPAATTEDHIQVEARVGPTDGTPEPQVELRPRDTRRISLRFRRRKKEGPARKGAAAIEAEDREEEEGEEEKEAPTGREKRPSRSGGRVRAAGRRLQGFCLSLAQGTYRPLRRFFHDILHTKYRAATDVYALMFLADVVDFIIIIFGFWAFGVSQARDPNPVYAELSSHPHPLGLAPPDLCSPGHKKHSAATDITSSLSDDQVPEAFLVMLLIQFSTMVVDRALYLRKTVLGKLAFQVALVLAIHLWMFFILPAVTERMFNQNVVAQLWYFVKCIYFALSAYQIRCGYPTRILGNFLTKKYNHLNLFLFQGFRLVPFLVELRAVMDWVWTDTTLSLSSWMCVEDIYANIFIIKCSRETEKKYPQPKGQKKKKIVKYGMGGLIILFLIAIIWFPLLFMSLVRSVVGVVNQPIDVTVTLKLGGYEPLFTMSAQQPSIIPFTAQAYEELSRQFDPQPLAMQFISQYSPEDIVTAQIEGSSGALWRISPPSRAQMKRELYNGTADITLRFTWNFQRDLAKGGTVEYANEKHMLALAPNSTARRQLASLLEGTSDQSVVIPNLFPKYIRAPNGPEANPVKQLQPNEEADYLGVRIQLRREQGAGATGFLEWWVIELQECRTDCNLLPMVIFSDKVSPPSLGFLAGYGIMGLYVSIVLVIGKFVRGFFSEISHSIMFEELPCVDRILKLCQDIFLVRETRELELEEELYAKLIFLYRSPETMIKWTREKE

SEQ ID NO: 800437 - protein, 1648 aa, Homo sapiens
MDLRPELPTTLGPVSLRQLGLEHTRYPCLDLGAMLLYTLTFWLLLRQFVKEKLLKWAESPAALTEVTVADTEPTRTQTLLQSLGELVKGVYAKYWIYVCAGMFIVVSFAGRLVVYKIVYMFLFLLCLTLFQVYYSLWRKLLKAFWWLVVAYTMLVLIAVYTFQFQDFPAYWRNLTGFTDEQLGDLGLEQFSVSELFSSILVPGFFLLACILQLHYFHRPFMQLTDMEHVSLPGTRLPRWAHRQDAVSGTPLLREEQQEHQQQQQEEEEEEDSRDEGLGVATPHQATQVPEGAAKWGLVAERLLELAAGFSDVLSRVQVFLRRLLELHVFKLVALYTVWVALKEVSVMNLLLVVLWAFALPYPRFRPMASCLSTVWTCVIIVCKMLYQLKVVNPQEYSSNCTEPFPNSTNLLPTEISQSLLYRGPVDPANWFGVRKGFPNLGYIQNHLQVLLLLVFEAIVYRRQEHYRRQHQLAPLPAQAVFASGTRQQLDQDLLGCLKYFINFFFYKFGLEICFLMAVNVIGQRMNFLVTLHGCWLVAILTRRHRQAIARLWPNYCLFLALFLLYQYLLCLGMPPALCIDYPWRWSRAVPMNSALIKWLYLPDFFRAPNSTNLISDFLLLLCASQQWQVFSAERTEEWQRMAGVNTDRLEPLRGEPNPVPNFIHCRSYLDMLKVAVFRYLFWLVLVVVFVTGATRISIFGLGYLLACFYLLLFGTALLQRDTRARLVLWDCLILYNVTVIISKNMLSLLACVFVEQMQTGFCWVIQLFSLVCTVKGYYDPKEMMDRDQDCLLPVEEAGIIWDSVCFFFLLLQRRVFLSHYYLHVRADLQATALLASRGFALYNAANLKSIDFHRRIEEKSLAQLKRQMERIRAKQEKHRQGRVDRSRPQDTLGPKDPGLEPGPDSPGGSSPPRRQWWRPWLDHATVIHSGDYFLFESDSEEEEEAVPEDPRPSAQSAFQLAYQAWVTNAQAVLRRRQQEQEQARQEQAGQLPTGGGPSQEVEPAEGPEEAAAGRSHVVQRVLSTAQFLWMLGQALVDELTRWLQEFTRHHGTMSDVLRAERYLLTQELLQGGEVHRGVLDQLYTSQAEATLPGPTEAPNAPSTVSSVGLWLLELKPLKQHDMTDHWCMPPWVTCAIKTLHVACEEGMSPDPLGELLSARVASSCTHGDSIAGLCHADACVLVTWRLAAIPTKLGLDVRRSLFVPDGRRGRALRLLRAVYQCVAAHSELLCYFIIILNHMVTASAGSLVLPVLVFLWAMLSIPRPSKRFWMTAIVFTEIAVVVKYLFQFGFFPWNSHVVLRRYENKPYFPPRILGLEKTDGYIKYDLVQLMALFFHRSQLLCYGLWDHEEDSPSKEHDKSGEEEQGAEEGPGVPAATTEDHIQVEARVGPTDGTPEPQVELRPRDTRRISLRFRRRKKEGPARKGAAAIEAEDREEEEGEEEKEAPTGREKRPSRSGGRVRAAGRRLQGFCLSLAQGTYRPLRRFFHDILHTKYRAATDVYALMFLADVVDFIIIIFGFWAFGKHSAATDITSSLSDDQVPEAFLVMLLIQFSTMVVDRALYLRKTVLGKLAFQVALVLAIHLWMFFILPAVTERMFNQNVVAQLWYFVKCIYFALSAYQIRCGYPTRILGNFLTKKYNHLNLFLFQGG

SEQ ID NO: 800438 - protein, 2260 aa, Homo sapiens
MDLRPELPTTLGPVSLRQLGLEHTRYPCLDLGAMLLYTLTFWLLLRQFVKEKLLKWAESPAALTEVTVADTEPTRTQTLLQSLGELVKGVYAKYWIYVCAGMFIVVSFAGRLVVYKIVYMFLFLLCLTLFQVYYSLWRKLLKAFWWLVVAYTMLVLIAVYTFQFQDFPAYWRNLTGFTDEQLGDLGLEQFSVSELFSSILVPGFFLLACILQLHYFHRPFMQLTDMEHVSLPGTRLPRWAHRQDAVSGTPLLREEQQEHQQQQQEEEEEEDSRDEGLGVATPHQATQVPEGAAKWGLVAERLLELAAGFSDVLSRVQVFLRRLLELHVFKLVALYTVWVALKEVSVMNLLLVVLWAFALPYPRFRPMASCLSTVWTCVIIVCKMLYQLKVVNPQEYSSNCTEPFPNSTNLLPTEISQSLLYRGPVDPANWFGVRKGFPNLGYIQNHLQVLLLLVFEAIVYRRQEHYRRQHQLAPLPAQAVFASGTRQQLDQDLLGCLKYFINFFFYKFGLEICFLMAVNVIGQRMNFLVTLHGCWLVAILTRRHRQAIARLWPNYCLFLALFLLYQYLLCLGMPPALCIDYPWRWSRAVPMNSALIKWLYLPDFFRAPNSTNLISDFLLLLCASQQWQVFSAERTEEWQRMAGVNTDRLEPLRGEPNPVPNFIHCRSYLDMLKVAVFRYLFWLVLVVVFVTGATRISIFGLGYLLACFYLLLFGTALLQRDTRARLVLWDCLILYNVTVIISKNMLSLLACVFVEQMQTGFCWVIQLFSLVCTVKGYYDPKEMMDRDQDCLLPVEEAGIIWDSVCFFFLLLQRRVFLSHYYLHVRADLQATALLASRGFALYNAANLKSIDFHRRIEEKSLAQLKRQMERIRAKQEKHRQGRVDRSRPQDTLGPKDPGLEPGPDSPGGSSPPRRQWWRPWLDHATVIHSGDYFLFESDSEEEEEAVPEDPRPSAQSAFQLAYQAWVTNAQAVLRRRQQEQEQARQEQAGQLPTGGGPSQEVEPAEGPEEAAAGRSHVVQRVLSTAQFLWMLGQALVDELTRWLQEFTRHHGTMSDVLRAERYLLTQELLQGGEVHRGVLDQLYTSQAEATLPGPTEAPNAPSTVSSVGLWLLELKPLKQHDMTDHWCMPPWVTCAIKTLHVACEEGMSPDPLGELLSARVASSCTHGDSIAGLCHADACVLVTWRLAAIPTKLGLDVRRSLFVPDGRRGRALRLLRAVYQCVAAHSELLCYFIIILNHMVTASAGSLVLPVLVFLWAMLSIPRPSKRFWMTAIVFTEIAVVVKYLFQFGFFPWNSHVVLRRYENKPYFPPRILGLEKTDGYIKYDLVQLMALFFHRSQLLCYGLWDHEEDSPSKEHDKSGEEEQGAEEGPGVPAATTEDHIQVEARVGPTDGTPEPQVELRPRDTRRISLRFRRRKKEGPARKGAAAIEAEDREEEEGEEEKEAPTGREKRPSRSGGRVRAAGRRLQGFCLSLAQGTYRPLRRFFHDILHTKYRAATDVYALMFLADVVDFIIIIFGFWAFGKHSAATDITSSLSDDQVPEAFLVMLLIQFSTMVVDRALYLRKTVLGKLAFQVALVLAIHLWMFFILPAVTERMFNQNVVAQLWYFVKCIYFALSAYQIRCGYPTRILGNFLTKKYNHLNLFLFQGFRLVPFLVELRAVMDWVWTDTTLSLSSWMCVEDIYANIFIIKCSRETEKIHWLEMTELEEFSVILWLLEPYQLKFAENFSNSMDCLLNFLGVFGSTKYLFWKYLVYFVSFAKSRFMKICPFSSKSSIVLALKFRSLIHFEVNFGTWYEAGVAFHSPAWGGACTVLKKVVLPTERSQLPCLRSTTPEHEGSNWTLSSTPLACVCPPLLPPCHTEVRLGLFWAAGGAGECGCVTRRKGRAERMTCVVPPPEKYPQPKGQKKKKIVKYGMGGLIILFLIAIIWFPLLFMSLVRSVVGVVNQPIDVTVTLKLGGYEPLFTMSAQQPSIIPFTAQAYEELSRQFDPQPLAMQFISQYSPEDIVTAQIEGSSGALWRISPPSRAQMKRELYNGTADITLRFTWNFQRDLAKGGTVEYANEKHMLALAPNSTARRQLASLLEGTSDQSVVIPNLFPKYIRAPNGPEANPVKQLQPNEEADYLGVRIQLRREQGAGATGFLEWWVIELQECRTDCNLLPMVIFSDKVSPPSLGFLAGYGIMGLYVSIVLVIGKFVRGFFSEISHSIMFEELPCVDRILKLCQDIFLVRETRELELEEELYAKLIFLYRSPETMIKWTREKE

SEQ ID NO: 800439 - protein, 1714 aa, Homo sapiens; identical to SEQ ID NO: 800423

SEQ ID NO: 800440 - protein, 2070 aa, Homo sapiens
MDLRPELPTTLGPVSLRQLGLEHTRYPCLDLGAMLLYTLTFWLLLRQFVKEKLLKWAESPAALTEVTVADTEPTRTQTLLQSLGELVKGVYAKYWIYVCAGMFIVVSFAGRLVVYKIVYMFLFLLCLTLFQVYYSLWRKLLKAFWWLVVAYTMLVLIAVYTFQFQDFPAYWRNLTGFTDEQLGDLGLEQFSVSELFSSILVPGFFLLACILQLHYFHRPFMQLTDMEHVSLPGTRLPRWAHRQDAVSGTPLLREEQQEHQQQQQEEEEEEDSRDEGLGVATPHQATQVPEGAAKWGLVAERLLELAAGFSDVLSRVQVFLRRLLELHVFKLVALYTVWVALKEVSVMNLLLVVLWAFALPYPRFRPMASCLSTVWTCVIIVCKMLYQLKVVNPQEYSSNCTEPFPNSTNLLPTEISQSLLYRGPVDPANWFGVRKGFPNLGYIQNHLQVLLLLVFEAIVYRRQEHYRRQHQLAPLPAQAVFASGTRQQLDQDLLGCLKYFINFFFYKFGLEICFLMAVNVIGQRMNFLVTLHGCWLVAILTRRHRQAIARLWPNYCLFLALFLLYQYLLCLGMPPALCIDYPWRWSRAVPMNSALIKWLYLPDFFRAPNSTNLISDFLLLLCASQQWQVFSAERTEEWQRMAGVNTDRLEPLRGEPNPVPNFIHCRSYLDMLKVAVFRYLFWLVLVVVFVTGATRISIFGLGYLLACFYLLLFGTALLQRDTRARLVLWDCLILYNVTVIISKNMLSLLACVFVEQMQTGFCWVIQLFSLVCTVKGYYDPKEMMDRDQDCLLPVEEAGIIWDSVCFFFLLLQRRVFLSHYYLHVRADLQATALLASRGFALYNAANLKSIDFHRRIEEKSLAQLKRQMERIRAKQEKHRQGRVDRSRPQDTLGPKDPGLEPGPDSPGGSSPPRRQWWRPWLDHATVIHSGDYFLFESDSEEEEEAVPEDPRPSAQSAFQLAYQAWVTNAQAVLRRRQQEQEQARQEQAGQLPTGGGPSQEVEPAEGPEEAAAGRSHVVQRVLSTAQFLWMLGQALVDELTRWLQEFTRHHGTMSDVLRAERYLLTQELLQGGEVHRGVLDQLYTSQAEATLPGPTEAPNAPSTVSSVGLWLLELKPLKQHDMTDHWCMPPWVTCAIKTLHVACEEGMSPDPLGELLSARVASSCTHGDSIAGLCHADACVLVTWRLAAIPTKLGLDVRRSLFVPDGRRGRALRLLRAVYQCVAAHSELLCYFIIILNHMVTASAGSLVLPVLVFLWAMLSIPRPSKRFWMTAIVFTEIAVVVKYLFQFGFFPWNSHVVLRRYENKPYFPPRILGLEKTDGYIKYDLVQLMALFFHRSQLLCYGLWDHEEDSPSKEHDKSGEEEQGAEEGPGVPAATTEDHIQVEARVGPTDGTPEPQVELRPRDTRRISLRFRRRKKEGPARKGAAAIEAEDREEEEGEEEKEAPTGREKRPSRSGGRVRAAGRRLQGFCLSLAQGTYRPLRRFFHDILHTKYRAATDVYALMFLADVVDFIIIIFGFWAFGKHSAATDITSSLSDDQVPEAFLVMLLIQFSTMVVDRALYLRKTVLGKLAFQVALVLAIHLWMFFILPAVTERMFNQNVVAQLWYFVKCIYFALSAYQIRCGYPTRILGNFLTKKYNHLNLFLFQGFRLVPFLVELRAVMDWVWTDTTLSLSSWMCVEDIYANIFIIKCSRETEKVHKICPFSSKSSIVLALKFRSLIHFEKYPQPKGQKKKKIVKYGMGGLIILFLIAIIWFPLLFMSLVRSVVGVVNQPIDVTVTLKLGGYEPLFTMSAQQPSIIPFTAQAYEELSRQFDPQPLAMQFISQYSPEDIVTAQIEGSSGALWRISPPSRAQMKRELYNGTADITLRFTWNFQRDLAKGGTVEYANEKHMLALAPNSTARRQLASLLEGTSDQSVVIPNLFPKYIRAPNGPEANPVKQLQPNEEADYLGVRIQLRREQGAGATGFLEWWVIELQECRTDCNLLPMVIFSDKHHGAVRVHRAGHRQVRARILQRDLALHYVRGAAVRGPHPQALPGHLPGAGDSGAGAGGGVVRQAHLPLPLTGDHDQVDS

SEQ ID NO: 800441 - protein, 381 aa, Homo sapiens
QAGFEVRGSAKERKRDNKYPQPKGQKKKKIVKYGMGGLIILFLIAIIWFPLLFMSLVRSVVGVVNQPIDVTVTLKLGGYEPLFTMSAQQPSIIPFTAQAYEELSRQFDPQPLAMQFISQYSPEDIVTAQIEGSSGALWRISPPSRAQMKRELYNGTADITLRFTWNFQRDLAKGGTVEYANEKHMLALAPNSTARRQLASLLEGTSDQSVVIPNLFPKYIRAPNGPEANPVKQLQPNEEADYLGVRIQLRREQGAGATGFLEWWVIELQECRTDCNLLPMVIFSDKVSPPSLGFLAGYGIMGLYVSIVLVIGKFVRGFFSEISHSIMFEELPCVDRILKLCQDIFLVRETRELELEEELYAKLIFLYRSPETMIKWTREKE

SEQ ID NO: 800442 - protein, 1892 aa, Homo sapiens
MDLRPELPTTLGPVSLRQLGLEHTRYPCLDLGAMLLYTLTFWLLLRQFVKEKLLKWAESPAALTEVTVADTEPTRTQTLLQSLGELVKGVYAKYWIYVCAGMFIVVSFAGRLVVYKIVYMFLFLLCLTLFQVYYSLWRKLLKAFWWLVVAYTMLVLIAVYTFQFQDFPAYWRNLTGFTDEQLGDLGLEQFSVSELFSSILVPGFFLLACILQLHYFHRPFMQLTDMEHVSLPGTRLPRWAHRQDAVSGTPLLREEQQEHQQQQQEEEEEEDSRDEGLGVATPHQATQVPEGAAKWGLVAERLLELAAGFSDVLSRVQVFLRRLLELHVFKLVALYTVWVALKEVSVMNLLLVVLWAFALPYPRFRPMASCLSTVWTCVIIVCKMLYQLKVVNPQEYSSNCTEPFPNSTNLLPTEISQSLLYRGPVDPANWFGVRKGFPNLGYIQNHLQVLLLLVFEAIVYRRQEHYRRQHQLAPLPAQAVFASGTRQQLDQDLLGCLKYFINFFFYKFGLEICFLMAVNVIGQRMNFLVTLHGCWLVAILTRRHRQAIARLWPNYCLFLALFLLYQYLLCLGMPPALCIDYPWRWSRAVPMNSALIKWLYLPDFFRAPNSTNLISDFLLLLCASQQWQVFSAERTEEWQRMAGVNTDRLEPLRGEPNPVPNFIHCRSYLDMLKVAVFRYLFWLVLVVVFVTGATRISIFGLGYLLACFYLLLFGTALLQRDTRARLVLWDCLILYNVTVIISKNMLSLLACVFVEQMQTGFCWVIQLFSLVCTVKGYYDPKEMMDRDQDCLLPVEEAGIIWDSVCFFFLLLQRRVFLSHYYLHVRADLQATALLASRGFALYNAANLKSIDFHRRIEEKSLAQLKRQMERIRAKQEKHRQGRVDRSRPQDTLGPKDPGLEPGPDSPGGSSPPRRQWWRPWLDHATVIHSGDYFLFESDSEEEEEAVPEDPRPSAQSAFQLAYQAWVTNAQAVLRRRQQEQEQARQEQAGQLPTGGGPSQEVEPAEGPEEAAAGRSHVVQRVLSTAQFLWMLGQALVDELTRWLQEFTRHHGTMSDVLRAERYLLTQELLQGGEVHRGVLDQLYTSQAEATLPGPTEAPNAPSTVSSVGLWLLELKPLKQHDMTDHWCMPPWVTCAIKTLHVACEEGMSPDPLGELLSARVASSCTHGDSIAGLCHADACVLVTWRLAAIPTKLGLDVRRSLFVPDGRRGRALRLLRAVYQCVAAHSELLCYFIIILNHMVTASAGSLVLPVLVFLWAMLSIPRPSKRFWMTAIVFTEIAVVVKYLFQFGFFPWNSHVVLRRYENKPYFPPRILGLEKTDGYIKYDLVQLMALFFHRSQLLCYGLWDHEEDSPSKEHDKSGEEEQGAEEGPGVPAATTEDHIQVEARVGPTDGTPEPQVELRPRDTRRISLRFRRRKKEGPARKGAAAIEAEDREEEEGEEEKEAPTGREKRPSRSGGRVRAAGRRLQGFCLSLAQGTYRPLRRFFHDILHTKYRAATDVYALMFLADVVDFIIIIFGFWAFGKHSAATDITSSLSDDQVPEAFLVMLLIQFSTMVVDRALYLRKTVLGKLAFQVALVLAIHLWMFFILPAVTERMFNQNVVAQLWYFVKCIYFALSAYQIRCGYPTRILGNFLTKKYNHLNLFLFQGFRLVPFLVELRAVMDWVWTDTTLSLSSWMCVEDIYANIFIIKCSRETEKKYPQPKGQKKKKIVKYGMGGLIILFLIAIIWFPLLFMSLVRSVVGVVNQPIDVTVTLKLGGYEPLFTMSAQQPSIIPFTAQAYEELSRQFDPQPLAMQFISQYSPEDIVTAQIEGSSGALWRISPPSRAQMKRELYNGTADITLRFTWNFQRDLAKGGTVEYANEKHMLALAPNSTARRRWMQSGALDAVRGVGWR

SEQ ID NO: 800443 - protein, 1762 aa, Homo sapiens
MDLRPELPTTLGPVSLRQLGLEHTRYPCLDLGAMLLYTLTFWLLLRQFVKEKLLKWAESPAALTEVTVADTEPTRTQTLLQSLGELVKGVYAKYWIYVCAGMFIVVSFAGRLVVYKIVYMFLFLLCLTLFQVYYSLWRKLLKAFWWLVVAYTMLVLIAVYTFQFQDFPAYWRNLTGFTDEQLGDLGLEQFSVSELFSSILVPGFFLLACILQLHYFHRPFMQLTDMEHVSLPGTRLPRWAHRQDAVSGTPLLREEQQEHQQQQQEEEEEEDSRDEGLGVATPHQATQVPEGAAKWGLVAERLLELAAGFSDVLSRVQVFLRRLLELHVFKLVALYTVWVALKEVSVMNLLLVVLWAFALPYPRFRPMASCLSTVWTCVIIVCKMLYQLKVVNPQEYSSNCTEPFPNSTNLLPTEISQSLLYRGPVDPANWFGVRKGFPNLGYIQNHLQVLLLLVFEAIVYRRQEHYRRQHQLAPLPAQAVFASGTRQQLDQDLLGCLKYFINFFFYKFGLEICFLMAVNVIGQRMNFLVTLHGCWLVAILTRRHRQAIARLWPNYCLFLALFLLYQYLLCLGMPPALCIDYPWRWSRAVPMNSALIKWLYLPDFFRAPNSTNLISDFLLLLCASQQWQVFSAERTEEWQRMAGVNTDRLEPLRGEPNPVPNFIHCRSYLDMLKVAVFRYLFWLVLVVVFVTGATRISIFGLGYLLACFYLLLFGTALLQRDTRARLVLWDCLILYNVTVIISKNMLSLLACVFVEQMQTGFCWVIQLFSLVCTVKGYYDPKEMMDRDQDCLLPVEEAGIIWDSVCFFFLLLQRRVFLSHYYLHVRADLQATALLASRGFALYNAANLKSIDFHRRIEEKSLAQLKRQMERIRAKQEKHRQGRVDRSRPQDTLGPKDPGLEPGPDSPGGSSPPRRQWWRPWLDHATVIHSGDYFLFESDSEEEEEAVPEDPRPSAQSAFQLAYQAWVTNAQAVLRRRQQEQEQARQEQAGQLPTGGGPSQEVEPAEGPEEAAAGRSHVVQRVLSTAQFLWMLGQALVDELTRWLQEFTRHHGTMSDVLRAERYLLTQELLQGGEVHRGVLDQLYTSQAEATLPGPTEAPNAPSTVSSVGLWLLELKPLKQHDMTDHWCMPPWVTCAIKTLHVACEEGMSPDPLGELLSARVASSCTHGDSIAGLCHADACVLVTWRLAAIPTKLGLDVRRSLFVPDGRRGRALRLLRAVYQCVAAHSELLCYFIIILNHMVTASAGSLVLPVLVFLWAMLSIPRPSKRFWMTAIVFTEIAVVVKYLFQFGFFPWNSHVVLRRYENKPYFPPRILGLEKTDGYIKYDLVQLMALFFHRSQLLCYGLWDHEEDSPSKEHDKSGEEEQGAEEGPGVPAATTEDHIQVEARVGPTDGTPEPQVELRPRDTRRISLRFRRRKKEGPARKGAAAIEAEDREEEEGEEEKEAPTGREKRPSRSGGRVRAAGRRLQGFCLSLAQGTYRPLRRFFHDILHTKYRAATDVYALMFLADVVDFIIIIFGFWAFGKHSAATDITSSLSDDQVPEAFLVMLLIQFSTMVVDRALYLRKTVLGKLAFQVALVLAIHLWMFFILPAVTERMFNQNVVAQLWYFVKCIYFALSAYQIRCGYPTRILGNFLTKKYNHLNLFLFQGFRLVPFLVELRAVMDWVWTDTTLSLSSWMCVEDIYANIFIIKCSRETEKKYPQPKGQKKKKIVKYGMGGLIILFLIAIIWFPLLFMSLVRSVVGVVNQPIDVTVTLKLGGYERRP

SEQ ID NO: 800444 - protein, 1714 aa, Homo sapiens; identical to SEQ ID NO: 800423

SEQ ID NO: 800445 - protein, 168 aa, Homo sapiens
ADYLGVRIQLRREQGAGATGFLEWWVIELQECRTDCNLLPMVIFSDKVSPPSLGFLAGYGLSEWLGGTPQLGGLRAAPGLTSFPRSIMGLYVSIVLVIGKFVRGFFSEISHSIMFEELPCVDRILKLCQDIFLVRETRELELEEELYAKLIFLYRSPETMIKWTREKE

SEQ ID NO: 800446 - protein, 188 aa, Homo sapiens
YVCLSDPQLKGIVTRLYCRQGYYLQMHPDGALDGTKDDSTNSTLFNLIPVGLRVVAIQGVKTGLYIAMNGEGYLYPSELFTPECKFKESVFENYYVIYSSMLYRQQESGRAWFLGLNKEGQAMKGNRVKKTKPAAHFLPKPLEVAMYREPSLHDVGETVPKPGVTPSKSTSASAIMNGGKPVNKSKTT

SEQ ID NO: 800447 - protein, 247 aa, Homo sapiens
MAAAIASGLIRQKRQAREQHWDRPSASRRRSSPSKNRGLCNGNLVDIFSKVRIFGLKKRRLRRQDPQLKGIVTRLYCRQGYYLQMHPDGALDGTKDDSTNSTLFNLIPVGLRVVAIQGVKTGLYIAMNGEGYLYPSELFTPECKFKESVFENYYVIYSSMLYRQQESGRAWFLGLNKEGQAMKGNRVKKTKPAAHFLPKPLEVAMYREPSLHDVGETVPKPGVTPSKSTSASAIMNGGKPVNKSKTT

SEQ ID NO: 800448 - protein, 152 aa, Homo sapiens
MAAAIASGLIRQKRQAREQHWDRPSASRRRSSPSKNRGLCNGNLVDIFSKVRIFGLKKRRLRRQDPQLKGIVTRLYCRQGYYLQMHPDGALDGTKDDSTNSTLFNLIPVGLRVVAIQGVKTGLYIAMNGEGYLYPSVSKTPKISAIRSMHVK

SEQ ID NO: 800449 - protein, 98 aa, Homo sapiens
QRLMKQRSRHSIHLNLPNATAVKRSHRRSPWRQSPSDPGDPLLSGTVQPTPGDRGARQPLADPLETEGHTAAIFVDASSGQSGSAQAESQIIFRNTTG

SEQ ID NO: 800450 - protein, 109 aa, Homo sapiens [sequence omitted]

SEQ ID NO: 800451 - protein, 461 aa, Homo sapiens
MKAIKKSLTEEEYLYLDFSHQTEGCIFPLHTSVTLFLLSYCDCKIFKICLVVTKEVSRDSSLLRDDLIQDVEIQIISRQELPPIVQNCCLPAVVERSDNFCRAGLAVVLRHIIQKSYEADPLKKELLELLGFKKTCLKACAEVSQWTRLCELTIPLAIENFLRESSDQPPTIPVEILQLEKKLSEPVRVHNDDKLRRQKLKQQKADGVGPPLTKGKAKSKVHTQETSEGLDSSSKSLELKVAFSKLTVQEEPATTNREPSHIRKAKASDLPPLEHVFAEGLYFTLADIVLLPCIHHFLVIISRKFSEKLVEFPLLASWYQRIQEVPGVKTAASKCGIQFLHLPKLLTTSTEQHPNLCEVPGVEEQSDPLFIGGPRPTMAKLMEKGIEVMFSPHPCPTWTLDWNVLPAAVSPKEGKMSSDRALRKQQQLNNLVYVVTNQAKPGDRIVDFCSGGVFYLSFHPF

SEQ ID NO: 800452 - protein, 418 aa, Homo sapiens
  misc_feature (415)..(415): Xaa can be any naturally occurring amino acid
MKAIKKSLTEEEYLYLDFSHQTEGCIFPLHTSVTLFLLSYCDCKIFKICLVVTKEVSRDSSLLRDDLIQDVEIQIISRQELPPIVQNCCLPAVVERSDNFCRAGLAVVLRHIIQKSYEADPLKKELLELLGFKKTCLKACAEVSQWTRLCELTIPLAIENFLRESSDQPPTIPVEILQLEKKLSEPVRVHNDDKLRRQKLKQQKADGVGPPLTKGKAKSKVHTQETSEGLDSSSKSLELKVAFSKLTVQEEPATTNREPSHIRKAKASDLPPLEHVFAEGLYFTLADIVLLPCIHHFLVIISRKFSEKLVEFPLLASWYQRIQEVPGVKTAASKCGIQFLHLPKLLTTSTEQHPNLCEVPGVEEQSDPLFIGGPRPTMAKLMEKGIEVMFSPHPCPTWTLDWNVLPAPRKRQGGXPLE

SEQ ID NO: 800453 - protein, 436 aa, Homo sapiens
MKAIKKSLTEEEYLYLDFSHQTEGCIFPLHTSVTLFLLSYCDCKIFKICLVVTKEVSRDSSLLRDDLIQDVEIQIISRQELPPIVQNCCLPAVVERSDNFCRAGLAVVLRHIIQKSYEADPLKKELLELLGFKKTCLKACAEVSQWTRLCELTIPLAIENFLRESSDQPPTIPVEILQLEKKLSEPVRVHNDDKLRRQKLKQQKADGVGPPLTKGKAKSKVHTQETSEGLDSSSKSLELKVAFSKLTVQEEPATTNREPSHIRKAKASDLPPLEHVFAEGLYFTLADIVLLPCIHHFLVIISRKFSEKLVEFPLLASWYQRIQEVPGVKTAASKCGIQFLHLPKLLTTSTEQHPNLCEVPGVEEQSDPLFIGGPRPTMAKLMEKGIEVMFSPHPCPTWTLDWNVLPAAVSPKEGESTHLELRPAGFKSWLHHGVTM

SEQ ID NO: 800454 - protein, 438 aa, Homo sapiens
MKAIKKSLTEEEYLYLDFSHQTEGCIFPLHTSVTLFLLSYCDCKIFKICLVVTKEVSRDSSLLRDDLIQDVEIQIISRQELPPIVQNCCLPAVVERSDNFCRAGLAVVLRHIIQKSYEADPLKKELLELLGFKKTCLKACAEVSQWTRLCELTIPLAIENFLRESSDQPPTIPVEILQLEKKLSEPVRVHNDDKLRRQKLKQQKADGVGPPLTKGKAKSKVHTQETSEGLDSSSKSLELKVAFSKLTVQEEPATTNREPSHIRKAKASDLPPLEHVFAEGLYFTLADIVLLPCIHHFLVIISRKFSEKLVEFPLLASWYQRIQEVPGVKTAASKCGIQFLHLPKLLTTSTEQHPNLCEVPGVEEQSDPLFIGGPRPTMAKLMEKGIEVMFSPHPCPTWTLDWNVLPAAVSPKEGFEQLTACDWLKLGCNDWLRLGYLL

SEQ ID NO: 800455 - protein, 418 aa, Homo sapiens; identical to SEQ ID NO: 800452
  misc_feature (415)..(415): Xaa can be any naturally occurring amino acid

SEQ ID NO: 800456 - protein, 233 aa, Homo sapiens
MEPTAPSLTEEDLTEVKKDALENLRVYLCEKIIAERHFDHLRAKKILSREDTEEISCRTSSRKRAGKLLDYLQENPKGLDTLVESIRREKTQNFLIQKITDEVLKLRNIKLEHLKGLKCSSCEPFPDGATNNLSRSNSDESNFSEKLRASTVMYHPEGESSTTPFFSTNSSLNLPVLEVGRTENTIFSSTTLPRPGDPGAPPLPPDLQLEEEGTCANSSEMFLPLRSRTVSRQ

SEQ ID NO: 800457 - protein, 233 aa, Homo sapiens; identical to SEQ ID NO: 800456

SEQ ID NO: 800458 - protein, 233 aa, Homo sapiens; identical to SEQ ID NO: 800456

SEQ ID NO: 800459 - protein, 233 aa, Homo sapiens; identical to SEQ ID NO: 800456

SEQ ID NO: 800460 - protein, 104 aa, Homo sapiens
APSQGGAAQPELPDPEEAPSPASTMEPTAPSLTEEDLTEVKKDVSNAAVPRAGGGGLQPSGRRKRKPGVRGQGGSSRSEERKVLAQEDCGEPCIRGTLVAVILQ

SEQ ID NO: 800461 - protein, 662 aa, Homo sapiens
PFPPRPAWRSGLSSRRTLRMAPKSGQEVEETEEEALLSPTEQESVSGHLGPPAGAPAAPETPTCLPDTTPHPTPVVCSADPQLALESLDPRTLRLLWRQRELEIQALRWAIQNGEDARLCHILEEVAGLPPKRSSHSQEKLLQNQVQKLIQELKEQKERAQWEKEHLEERLLQTTRTLQEMEAELQNLQKSCLLQLARSSWVGRMLRSQTGSVEVVTAETLMDPSDLSENIQAPTGEGFRLEDVDWNSVARRYPNLFTNMEPSSKQQPRPWPQLDTGSPESSGKHSERHHKTVEWGSLPCLNTSSSGGADSDSSSCRPGLPSFVQVIGHPPRDHRASSEQALVQAGSYSRDSEDLQKTHSPRHGEPVLSPQPCTDPDHWSPELLQSPTGLKIVAVSCREKFVRIFNPSQESTADLSGMVLKQLVRGFPERLYRFPPGTLLAPRHHVTVWGEATRSAKKPLRASSSREPVPLLSIRGCATLLLSPKGEVLSEHRIPRRETPAPRVFADGTDLSIDRFPLPEAGPGADTRKPPRPPRPLRKGRVREPRVSRRRPGTRGLLPPVSSGKLFHAREGPARPENPEIPAPQHLPAIPGDPTLPSPPAEAGLGLEDCRLQKEHRVRVCRKSVDRSCPLVALSVQNTAESRFGFRFLSCLPVTADTCRGA

SEQ ID NO: 800462 - protein, 662 aa, Homo sapiens; identical to SEQ ID NO: 800461

SEQ ID NO: 800463 - protein, 294 aa, Homo sapiens
SCAGGPAASPHSVSSLPSPTGLKIVAVSCREKFVRIFNPSQESTADLSGMVLKQLVRGFPERLYRFPPGTLLAPRHHVTVWGEATRSAKKPLRASSSREPVPLLSIRGCATLLLSPKGEVLSEHRIPRRETPAPRVFADGTDLSIDRFPLPEAGPGADTRKPPRPPRPLRKGRVREPRVSRRRPGTRGLLPPVSSGKLFHAREGPARPENPEIPAPQHLPAIPGDPTLPSPPAEAGLGLEDCRLQKEHRVRVCRKSVDRSCPLVALSVQNTAESRFGFRFLSCLPVTADTCRGA

SEQ ID NO: 800464 - protein, 244 aa, Homo sapiens
MRWLRPAGRRREQESVSGHLGPPAGAPAAPETPTCLPDTTPHPTPVVCSADPQLALESLDPRTLRLLWRQRELEIQALRWAIQNGEDARLCHILEEVAGLPPKRSSHSQEKLLQNQVQKLIQELKEQKERAQWEKEHLEERLLQTTRTLQEMEAELQNLQKSCLLQLARSSWVGRMLRSQTGSVEVVTAETLMDPSDLSENIQAPTGEGFRLEDVDWNSVARRYPNLFTNMEPSSKRVPEERGP

SEQ ID NO: 800465 - protein, 633 aa, Homo sapiens
MRWLRPAGRRREQESVSGHLGPPAGAPAAPETPTCLPDTTPHPTPVVCSADPQLALESLDPRTLRLLWRQRELEIQALRWAIQNGEDARLCHILEEVAGLPPKRSSHSQEKLLQNQVQKLIQELKEQKERAQWEKEHLEERLLQTTRTLQEMEAELQNLQKSCLLQLARSSWVGRMLRSQTGSVEVVTAETLMDPSDLSENIQAPTGEGFRLEDVDWNSVARRYPNLFTNMEPSSKQQPRPWPQLDTGSPESSGKHSERHHKTVEWGSLPCLNTSSSGGADSDSSSCRPGLPSFVQVIGHPPRDHRASSEQALVQAGSYSRDSEDLQKTHSPRHGEPVLSPQPCTDPDHWSPELLQSPTGLKIVAVSCREKFVRIFNPSQESTADLSGMVLKQLVRGFPERLYRFPPGTLLAPRHHVTVWGEATRSAKKPLRASSSREPVPLLSIRGCATLLLSPKGEVLSEHRIPRRETPAPRVFADGTDLSIDRFPLPEAGPGADTRKPPRPPRPLRKGRVREPRVSRRRPGTRGLLPPVSSGKLFHAREGPARPENPEIPAPQHLPAIPGDPTLPSPPAEAGLGLEDCRLQKEHRVRVCRKSVDRSCPLVALSVQNTAESRFGFRFLSCLPVTADTCRGA

SEQ ID NO: 800466 - protein, 662 aa, Homo sapiens; identical to SEQ ID NO: 800461

SEQ ID NO: 800467 - protein, 62 aa, Homo sapiens
MCLLLPGQGFRLEDVDWNSVARRYPNLFTNMEPSSKQKVTAQSRDSPGARREGSPWQVKTQD

SEQ ID NO: 800468 - protein, 247 aa, Homo sapiens
MAAEADGPLKRLLVPILLPEKCYDQLFVQWDLLHVPCLKILLSKGLGLGIVAGSLLVKLPQVFKILGAKSAEGLSLQSVMLELVALTGTMVYSITNNFPFSSWGEALFLMLQTITICFLVMHYRGQTVKGVAFLACYGLVLLVLLSPLTPLTVVTLLQASNVPAVVVGRLLQAATNYHNGHTGQLSAITVFLLFGGSLARIFTSIQETGDPLMAGTFVVSSLCNGLIAAQLLFYWNAKPPHKQKKAQ

SEQ ID NO: 800469 - protein, 134 aa, Homo sapiens
MGLRLRPASQALTHSCQAGRLSSSWGVCTQSLCSVGWSRTPAPRAGRRWPGCLFPVRSGKVRRPSSWPCAEAGTCSRGSRAGVGRGAAWPPPRRAASRPRPAASTARPGAWRSRSCASWGSAAPSGGAERSSTP

SEQ ID NO: 800470 - protein, 247 aa, Homo sapiens; identical to SEQ ID NO: 800468

SEQ ID NO: 800471 - protein, 168 aa, Homo sapiens
MLELVALTGTMVYSITNNFPFSSWGEALFLMLQTITICFLVMHYRGQTVKGVAFLACYGLVLLVLLSPLTPLTVVTLLQASNVPAVVVGRLLQAATNYHNGHTGQLSAITVFLLFGGSLARIFTSIQETGDPLMAGTFVVSSLCNGLIAAQLLFYWNAKPPHKQKKAQ

SEQ ID NO: 800472 - protein, 160 aa, Homo sapiens
MLRPTFRSVGLASRSWGEALFLMLQTITICFLVMHYRGQTVKGVAFLACYGLVLLVLLSPLTPLTVVTLLQASNVPAVVVGRLLQAATNYHNGHTGQLSAITVFLLFGGSLARIFTSIQETGDPLMAGTFVVSSLCNGLIAAQLLFYWNAKPPHKQKKAQ

SEQ ID NO: 800473 - protein, 182 aa, Homo sapiens
MLRPTFRSVGLASRPLPQDSPQQRPGAGHCGWLTSSSWGEALFLMLQTITICFLVMHYRGQTVKGVAFLACYGLVLLVLLSPLTPLTVVTLLQASNVPAVVVGRLLQAATNYHNGHTGQLSAITVFLLFGGSLARIFTSIQETGDPLMAGTFVVSSLCNGLIAAQLLFYWNAKPPHKQKKAQ

SEQ ID NO: 800474 - protein, 109 aa, Homo sapiens
MAAEADGPLKRLLVPILLPEKCYDQLFVQWDLLHVPCLKILLSKGLGLGIVAGSLLVKLPQVFKILGAKSAEGLSLQSVMLELVALTGTMVYSITNNFPFRPAFLPPNS

SEQ ID NO: 800475 - protein, 260 aa, Homo sapiens
MAAEADGPLKRLLVPILLPEKCYDQLFVQWDLLHVPCLKILLSKGLGLGIVAGSLLVKLPQVFKILGAKSAEGLSLQSVMLELVALTGTMVYSITNNFPFSSWGEALFLMLQTITICFLVMHYRGQTVKASPGSHQLPQRAHRPALSHHSLPAVWGLPGPNLHFHSGNRRSPDGWDLCGLLSLQRPHRRPAALLLECKASPQAEKGAVEPATGVIPFPLIHPTSGFSPSEPACWCDLLILHSSALADFLSQGFLLVETNG

SEQ ID NO: 800476 - protein, 120 aa, Homo sapiens
MAAEADGPLKRLLVPILLPEKCYDQLFVQWDLLHVPCLKILLSKGLGLGIVAGSLLVKLPQVFKILGAKSAEGLSLQSVMLELVALTGTMVYSITNNFPFSSWGEALFLMLQTITICFLV

SEQ ID NO: 800477 - protein, 264 aa, Homo sapiens
  misc_feature (2)..(2): Xaa can be any naturally occurring amino acid
  misc_feature (4)..(4): Xaa can be any naturally occurring amino acid
  misc_feature (11)..(12): Xaa can be any naturally occurring amino acid
PXPXSEPPRAXXPLELAYGGGADGPLKRLLVPILLPEKCYDQLFVQWDLLHVPCLKILLSKGLGLGIVAGSLLVKLPQVFKILGAKSAEGLSLQSVMLELVALTGTMVYSITNNFPFSSWGEALFLMLQTITICFLVMHYRGQTVKGVAFLACYGLVLLVLLSPLTPLTVVTLLQASNVPAVVVGRLLQAATNYHNGHTGQLSAITVFLLFGGSLARIFTSIQETGDPLMAGTFVVSSLCNGLIAAQLLFYWNAKPPHKQKKAQ

SEQ ID NO: 800478 - protein, 138 aa, Homo sapiens
MLQTITICFLVMHYRGQTVKGVAFLACYGLVLLVLLSPLTPLTVVTLLQASNVPAVVVGRLLQAATNYHNGHTGQLSAITVFLLFGGSLARIFTSIQETGDPLMAGTFVVSSLCNGLIAAQLLFYWNAKPPHKQKKAQ

SEQ ID NO: 800479 - protein, 294 aa, Homo sapiens
MAAEADGPLKRLLVPILLPEKCYDQLFVQWDLLHVPCLKILLSKGLGLGIVAGSLLVKLPQVFKILGAKSAEGLSLQSVMLELVALTGTMVYSITNNFPFSSWGEALFLMLQTITICFLVMHYRGQTVKGVAFLACYGLVLLVLLSPLTPLTVVTLLQASNVPAVVVGRVGTRSKGQDVVGAGSGGRVEDQSVGVLYLGEHGKSSGDRAKGLNSSPLLQAATNYHNGHTGQLSAITVFLLFGGSLARIFTSIQETGDPLMAGTFVVSSLCNGLIAAQLLFYWNAKPPHKQKKAQ

SEQ ID NO: 800480 - protein, 192 aa, Homo sapiens
MAAEADGPLKRLLVPILLPEKCYDQLFVQWDLLHVPCLKILLSKGLGLGIVAGSLLVKLPQVFKILGAKSAEGLSLQSVMLELVALTGTMVYSITNNFPFSSWGEALFLMLQTITICFLVMHYRGQTVKGAGDLPKSRLCGSWEPCWELSFSRQPPTTTTGTQASSQPSQSSCCLGAPWPESSLPFRKPEIP

SEQ ID NO: 800481 - protein, 119 aa, Homo sapiens
MAAEADGPLKRLLVPILLPEKCYDQLFVQWDLLHVPCLKILLSKGLGLGIVAGSLLVKLPQVFKILGAKSAEGLSLQSVMLELVALTGTMVYSITNNFPFRLRGPPFHPKGNTHNSNGD

SEQ ID NO: 800482 - protein, 188 aa, Homo sapiens
ASTAQILGNNESIEPYTSNIYTRRVLSGEFQIVNPHLLKDLTERGLWHEEMKNQIIACNGSIQSIPEIPDDLKQLYKTVWEISQKTVLKMAAERGAFIDQSQSLNIHIAEPNYGKLTSMHFYGWKQGLKTGMYYLRTRPAANPIQFTLNKEKLKDKEKVSKEEEEKERNTAAMVCSLENRDECLMCGS

SEQ ID NO: 800483 - protein, 128 aa, Homo sapiens
ESWFQTSEGHGQQTVVSPFLALLTLEPTFRHLLRIMQVSTAALAVLLCTMALCNQVLSASLAADTPTACCFSYTSRQIPQNFIADYFETSSQCSKPGVIFLTKRSRQVCADPSEEWVQKYVSDLELSA

SEQ ID NO: 800484 - protein, 125 aa, Homo sapiens
GELVSDFRRTRAADSGQSFLGSADTRAHIPSPAQNHAGLHCCPCCPPLHHGSLQPGPLCITSLSFVVGITTLWPWLDHINLFLWPKSPQEKRELLKGLPNILVFLFKTFIFISRRGLSPLVSSCC

SEQ ID NO: 800485 - protein, 171 aa, Homo sapiens
GELVSDFRRTRAADSGQSFLGSADTRAHIPSPAQNHAGLHCCPCCPPLHHGSLQPGPLCITSLSFVVGITTLWPWLDHINLFLWPKSPQEKRELLKGLPNILVFLFKTFIFISRRGLSPLVSRYENLGRGRGVTVPFTDRKTGFETNQLARGRIQGCLLPSGVCCSLSSSL

SEQ ID NO: 800486 - protein, 123 aa, Homo sapiens
MEVGRVRVGAETGQKAILERPSLQEPIGDTGRRAPRCDLTWSWSEACVTESGRAAPAQRKGTGRRRQRDTLRAPLPGVTERSSLDGDRQGAPERGASPELPRTESRMVGPWWAQDSPAGFPSA

SEQ ID NO: 800487 - protein, 171 aa, Homo sapiens; identical to SEQ ID NO: 800485

SEQ ID NO: 800488 - protein, 117 aa, Homo sapiens
GELVSDFRRTRAADSGQSFLGSADTRAHIPSPAQNHAGLHCCPCCPPLHLAADTPTACCFSYTSRQIPQNFIADYFETSSQCSKPGVIFLTKRSRQVCADPSEEWVQKYVSDLELSA

SEQ ID NO: 800489 - protein, 171 aa, Homo sapiens; identical to SEQ ID NO: 800485

SEQ ID NO: 800490 - protein, 111 aa, Homo sapiens
PFPFPIREDHCWGSQKTERVASDRAPRVCELAHLLQQERWNLSSEEYACSGNQPAILPDGIKKLKFTRSPHLESEKPDPSPIMIPQVTTCCLLANSFPCPFCVYEAPVSAS

SEQ ID NO: 800491 - protein, 90 aa, Homo sapiens
RGVRRGDGRWAAAELRVPPRPQRPGRPLWAACGGGAVAKLSACVDHPRIPVWCCPSSRLPHSHWLGDSCLLRRVVEAQKMMRLLNCGGID

SEQ ID NO: 800492 - protein, 419 aa, Homo sapiens
MELKVWVDGVQRIVCGVTEVTTCQEVVIALAQAIGRTGRYTLIEKWRDTERHLAPHENPIISLNKWGQYASDVQLILRRTGPSLSERPTSDSVARIPERTLYRQSLPPLAKLRPQIDKSIKRREPKRKSLTFTGGAKGLMDIFGKGKETEFKQKVLNNCKTTADELKKLIRLQTEKLQSIEKQLESNEIEIRFWEQKYNSNLEEEIVRLEQKIKRNDVEIEEEEFWENELQIEQENEKQLKDQLQEIRQKITECENKLKDYLAQIRTMESGLEAEKLQREVQEAQVNEEEVKGKIGKVKGEIDIQGQQSLRLENGIKAVERSLGQATKRLQDKEQELEQLTKELRQVNLQQFIQQTGTKVTVLPAEPIEIEASHADIEREAPFQSGSLKRPGSSRQLPSNLRILQNPISSGFNPEGIYV

SEQ ID NO: 800493 - protein, 419 aa, Homo sapiens; identical to SEQ ID NO: 800492

SEQ ID NO: 800494 - protein, 419 aa, Homo sapiens; identical to SEQ ID NO: 800492

SEQ ID NO: 800495 - protein, 419 aa, Homo sapiens; identical to SEQ ID NO: 800492

SEQ ID NO: 800496 - protein, 419 aa, Homo sapiens; identical to SEQ ID NO: 800492

SEQ ID NO: 800497 - protein, 419 aa, Homo sapiens; identical to SEQ ID NO: 800492

SEQ ID NO: 800498 - protein, 419 aa, Homo sapiens; identical to SEQ ID NO: 800492

SEQ ID NO: 800499 - protein, 419 aa, Homo sapiens; identical to SEQ ID NO: 800492

SEQ ID NO: 800500 - protein, 419 aa, Homo sapiens; identical to SEQ ID NO: 800492

SEQ ID NO: 800501 - protein, 210 aa, Homo sapiens [sequence omitted]

SEQ ID NO: 800502 - protein, 244 aa, Homo sapiens
LVHPLGDLVHVARRVEALLAGPALLQLGAVSVAFAEEVLVAQWGPVHRVLVVQALLSAGHHLVNAGLDLGALVLAEEAHLADAALHLARLLLLLQLLLLIVAALGVRVLLILALGPGHRVRFGGSGGCGCGGYGGCGSGGGLPAARLIVVPGRHGLELLTQVLSAEPPCVSGGPGGGRRGSGRGVGPQERRVMQRWRQRGFFLLHLLHVPRGRGAGSASCRGGLLRRRGPTPDQTLGRPARPAL

SEQ ID NO: 800503 - protein, 159 aa, Homo sapiens
MPRRAAAETRPDSRPDPRTPGPARTLKLSARRHGQPARRPPAPLLSGLLTAHAQCCRPPRLRALRACACVQAGSAEAPAQAQTGTACRPPPLPHSLRGFKGTLSNSNLSSRRAASRTEGLPLQGCAHIANSVAVPRHGIVRTPADASTPGRIHQGTATT

SEQ ID NO: 800504 - protein, 439 aa, Homo sapiens
MREWGTRRGASRVRAWGRASGAAGHATVATTGLLPPPPSPRPAGQGRRQRLMPRRAAAETRPDSRPDPRTPGPARTLKLSARRHGQPARRPPAPLLSGLLFDSQPHLLLASPAEPHRSDTMEKVKVESTDLVVLALVTRADFELGKVDIVAINDTFIDLVSSIDHIDIMHCNAETEACINEYHHISRQILKSSGDRGLVRRESTASFTTMEKAGLICRGSQKVIISAPSAVAPKFVMGVNHEKYDNSLKIISNASCTTNCFSTLAKVIHDNFGIVKELMTTVHAITATQKTVDGPPGNCGVMARGSPELHPCLYLVAAKAVGKVIPELNGKLTGMAFRVPTANVSVVDLTCRLEKPAKYDDIKKVVKQASEGPLKGILGYTEHQVVSSDFNSYTHSSTFDAGAGIALNDHFVKLISWYDNEFGYSNRVVDLMAHMASKE

SEQ ID NO: 800505 - protein, 181 aa, Homo sapiens
LVHPLGDLVHVARRVEALLAGPALLQLGAVSVAFAEEVLVAQWGPVHRVLVVQALLSAGHHLVNAGLDLGALVLAEEAHLADAALHLARLLLLLQLLLLIVAALGVRVLLILALGPGHRMEFRSVARLECNGAISAHCNLRLPGLSDSPASASRVAETTGMHHHAQLIFVFLVETGFHHVG

SEQ ID NO: 800506 - protein, 227 aa, Homo sapiens
QAPEPLSSLKSMAERAAISSGIEDPVPTLHLTERDIILSSTSAPPASAQPPLQLSEVNIPLSLGVCPLGPVALTKEQLYQQAMEEAAWHHMPHPSDSERIRQYLPRNPCPTPPYHHQMPPPHSDTVEFYQRLSTETLFFIFYYLEGTKAQYLAAKALKKQSWRFHTKYMMWFQRHEEPKTITDEFEQVRAPPSLPAARVGVESPGSRQPLLASAPLPPPFSWRSPSA

SEQ ID NO: 800507 - protein, 219 aa, Homo sapiens
QAPEPLSSLKSMAERAAISSGIEDPVPTLHLTERDIILSSTSAPPASAQPPLQLSEVNIPLSLGVCPLGPVALTKEQLYQQAMEEAAWHHMPHPSDSERIRQYLPRNPCPTPPYHHQMPPPHSDTVEFYQRLSTETLFFIFYYLEGTKAQYLAAKALKKQSWRFHTKYMMWFQRHEEPKTITDEFEQGTYIYFDYEKWGQRKKEGFTFEYRYLEDRDLQ

SEQ ID NO: 800508 - protein, 102 aa, Homo sapiens
VDCGEWVVGPPRPPNRAGESIWGLCQAALAPAAQVLRPGLLFPPQAPEPLSSLKSMAERAAISSGIEDPVPTLHLTERGEGPRMVGKQRAKEEGLPLTHPHH

SEQ ID NO: 800509 - protein, 89 aa, Homo sapiens
GRNGDPAGGDGGGTRGDGYWASHESLRPLEAGSLAANSSEEAALLPGARWFAEACYEELVQVKRLLSGNRLRVAAAGMEPTRIFCKHLY

SEQ ID NO: 800510 - protein, 146 aa, Homo sapiens
MPRPATTTAAAAAAATAGPQSAAAATARLPAQQSVPLPADAQPGLHQLHLAQIQGIIVRLVVVFVLLLLGAAVLLTALLVLVELVVVALVRVHGATRGGPADAGRGGERAGTPRPRLSLRLRLMSGRRPGSGPASRGSSPGAAVGV

SEQ ID NO: 800511 - protein, 660 aa, Homo sapiens
TPGPEAPPPAAMSSFGAGKTKEVIFSVEDGSVKMFLRGRPVPMMIPDELAPTYSLDTRSELPSCRLKLEWVYGYRGRDCRANLYLLPTGEIVYFVASVAVLYSVEEQRQRHYLGHNDDIKCLAIHPDMVTIATGQVAGTTKEGKPLPPHVRIWDSVSLSTLHVLGLGVFDRAVCCVGFSKSNGGNLLCAVDESNDHMLSVWDWAKETKVVDVKCSNEAVLVATFHPTDPTVLITCGKSHIYFWTLEGGSLSKRQGLFEKHEKPKYVLCVTFLEGGDVVTGDSGGNLYVWGKGGNRITQAVLGAHDGGVFGLCALRDGTLVSGGGRDRRVVLWGSDYSKLQEVEVPEDFGPVRTVAEGHGDTLYVGTTRNSILQGSVHTGFSLLVQGHVEELWGLATHPSRAQFVTCGQDKLVHLWSSDSHQPLWSRIIEDPARSAGFHPSGSVLAVGTVTGRWLLLDTETHDLVAIHTDGNEQISVVSFSPDGAYLAVGSHDNLVYVYTVDQGGRKVSRLGKCSGHSSFITHLDWAQDSSCFVTNSGDYEILYWDPATCKQITSADAVRNMEWATATCVLGFGVFGIWSEGADGTDINAVARSHDGKLLASADDFGKVHLFSYPCCQPRALSHKYGGHSSHVTNVAFLWDDSMALTTGGKDTSVLQWRVV

SEQ ID NO: 800512 - protein, 864 aa, Homo sapiens
GAANPGPRIVLGGLAGGVPTPLSGHPGDDPSAGPGAGRLMPGELSWGCWNEGRCYGNGRQGLVGGTGPGLDRGGRRWLWWGDGGARPAFCGLYDTSSLLRYCNDDNLSGTSGMEVDDRVSALEQRLQLQEDELAVLKAALADALRRLRACEEQGAALRARGTPKGRAPPRLGTTASVCQLLKGLPTRTPLNGSGPPRRVGGYATSPSSPKKEATSGRSSVRRYLSPERLASVRREDPRSRTTSSSSNCSAKKEGKTKEVIFSVEDGSVKMFLRGRPVPMMIPDELAPTYSLDTRSELPSCRLKLEWVYGYRGRDCRANLYLLPTGEIVYFVASVAVLYSVEEQRQRHYLGHNDDIKCLAIHPDMVTIATGQVAGTTKEGKPLPPHVRIWDSVSLSTLHVLGLGVFDRAVCCVGFSKSCSNEAVLVATFHPTDPTVLITCGKSHIYFWTLEGGSLSKRQGLFEKHEKPKYVLCVTFLEGGDVVTGDSGGNLYVWGKGGNRITQAVLGAHDGGVFGLCALRDGTLVSGGGRDRRVVLWGSDYSKLQEVEVPEDFGPVRTVAEGHGDTLYVGTTRNSILQGSVHTGFSLLVQGHVEELWGLATHPSRAQFVTCGQDKLVHLWSSDSHQPLWSRIIEDPARSAGFHPSGSVLAVGTVTGRWLLLDTETHDLVAIHTDGNEQISVVSFSPDGAYLAVGSHDNLVYVYTVDQGGRKVSRLGKCSGHSSFITHLDWAQDSSCFVTNSGDYEILYWDPATCKQITSADAVRNMEWATATCVLGFGVFGIWSEGADGTDINAVARSHDGKLLASADDFGKVHLFSYPCCQPRALSHKYGGHSSHVTNVAFLWDDSMALTTGGKDTSVLQWRVV

SEQ ID NO: 800513 - protein, 851 aa, Homo sapiens
GAANPGPRIVLGGLAGGVPTPLSGHPGDDPSAGPGAGRLMPGELSWGCWNEGRCYGNGRQGLVGGTGPGLDRGGRRWLWWGDGGARPAFCGLYDTSSLLRYCNDDNLSGTSGMEVDDRVSALEQRLQLQEDELAVLKAALADALRRLRACEEQGAALRARGTPKGRAPPRLGTTASVCQLLKGLPTRTPLNGSGPPRRVGGYATSPSSPKKEATSGRSSVRRYLSPERLASVRREDPRSRTTSSSSNCSAKKEGKTKEVIFSVEDGSVKMFLRGRPVPMMIPDELAPTYSLDTRSELPSCRLKLEWVYGYRGRDCRANLYLLPTGEIVYFVASVAVLYSVEEQRQRHYLGHNDDIKCLAIHPDMVTIATGQVAGTTKEGKPLPPHVRIWDSVSLSTLHVLGLGVFDRAVCCVGFSKSNGGNLLCAVDESNDHMLSVWDWAKETKVVDVKKHEKPKYVLCVTFLEGGDVVTGDSGGNLYVWGKGGNRITQAVLGAHDGGVFGLCALRDGTLVSGGGRDRRVVLWGSDYSKLQEVEVPEDFGPVRTVAEGHGDTLYVGTTRNSILQGSVHTGFSLLVQGHVEELWGLATHPSRAQFVTCGQDKLVHLWSSDSHQPLWSRIIEDPARSAGFHPSGSVLAVGTVTGRWLLLDTETHDLVAIHTDGNEQISVVSFSPDGAYLAVGSHDNLVYVYTVDQGGRKVSRLGKCSGHSSFITHLDWAQDSSCFVTNSGDYEILYWDPATCKQITSADAVRNMEWATATCVLGFGVFGIWSEGADGTDINAVARSHDGKLLASADDFGKVHLFSYPCCQPRALSHKYGGHSSHVTNVAFLWDDSMALTTGGKDTSVLQWRVV

SEQ ID NO: 800514 - protein, 807 aa, Homo sapiens
MGVIPEGPLWVSGSDDNLSGTSGMEVDDRVSALEQRLQLQEDELAVLKAALADALRRLRACEEQGAALRARGTPKGRAPPRLGTTASVCQLLKGLPTRTPLNGSGPPRRVGGYATSPSSPKKEATSGRSSVRRYLSPERLASVRREDPRSRTTSSSSNCSAKKEGKTKEVIFSVEDGSVKMFLRGRPVPMMIPDELAPTYSLDTRSELPSCRLKLEWVYGYRGRDCRANLYLLPTGEIVYFVASVAVLYSVEEQRQRHYLGHNDDIKCLAIHPDMVTIATGQVAGTTKEGKPLPPHVRIWDSVSLSTLHVLGLGVFDRAVCCVGFSKSNGGNLLCAVDESNDHMLSVWDWAKETKVVDVKCSNEAVLVATFHPTDPTVLITCGKSHIYFWTLEGGSLSKRQGLFEKHEKPKYVLCVTFLEGGDVVTGDSGGNLYVWGKGGNRITQAVLGAHDGGVFGLCALRDGTLVSGGGRDRRVVLWGSDYSKLQEVEVPEDFGPVRTVAEGHGDTLYVGTTRNSILQGSVHTGFSLLVQGHVEELWGLATHPSRAQFVTCGQDKLVHLWSSDSHQPLWSRIIEDPARSAGFHPSGSVLAVGTVTGRWLLLDTETHDLVAIHTDGNEQISVVSFSPDGAYLAVGSHDNLVYVYTVDQGGRKVSRLGKCSGHSSFITHLDWAQDSSCFVTNSGDYEILYWDPATCKQITSADAVRNMEWATATCVLGFGVFGIWSEGADGTDINAVARSHDGKLLASADDFGKVHLFSYPCCQPRALSHKYGGHSSHVTNVAFLWDDSMALTTGGKDTSVLQWRVV

SEQ ID NO: 800515 - protein, 627 aa, Homo sapiens
MFLRGRPVPMMIPDELAPTYSLDTRSELPSCRLKLEWVYGYRGRDCRANLYLLPTGEIVYFVASVAVLYSVEEQRQRHYLGHNDDIKCLAIHPDMVTIATGQVAGTTKEGKPLPPHVRIWDSVSLSTLHVLGLGVFDRAVCCVGFSKSNGGNLLCAVDESNDHMLSVWDWAKETKVVDVKCSNEAVLVATFHPTDPTVLITCGKSHIYFWTLEGGSLSKRQGLFEKHEKPKYVLCVTFLEGGDVVTGDSGGNLYVWGKGGNRITQAVLGAHDGGVFGLCALRDGTLVSGGGRDRRVVLWGSDYSKLQEVEVPEDFGPVRTVAEGHGDTLYVGTTRNSILQGSVHTGFSLLVQGHVEELWGLATHPSRAQFVTCGQDKLVHLWSSDSHQPLWSRIIEDPARSAGFHPSGSVLAVGTVTGRWLLLDTETHDLVAIHTDGNEQISVVSFSPDGAYLAVGSHDNLVYVYTVDQGGRKVSRLGKCSGHSSFITHLDWAQDSSCFVTNSGDYEILYWDPATCKQITSADAVRNMEWATATCVLGFGVFGIWSEGADGTDINAVARSHDGKLLASADDFGKVHLFSYPCCQPRALSHKYGGHSSHVTNVAFLWDDSMALTTGGKDTSVLQWRVV

SEQ ID NO: 800516 - protein, 766 aa, Homo sapiens
GAANPGPRIVLGGLAGGVPTPLSGHPGDDPSAGPGAGRLMPGELSWGCWNEGRCYGNGRQGLVGGTGPGLDRGGRRWLWWGDGGARPAFCGLYDTSSLLRYCNDDNLSGTSGMEVDDRVSALEQRLQLQEDELAVLKAALADALRRLRACEEQGAALRARGTPKGRAPPRLGTTASVCQLLKGLPTRTPLNGSGPPRRVGGYATSPSSPKKEATSGRSSVRRYLSPERLASVRREDPRSRTTSSSSNCSAKKEGKTKEVIFSVEDGSVKMFLRGRPVPMMIPDELAPTYSLDTRSELPSCRLKLEWVYGYRGRDCRANLYLLPTGEIVYFVASVAVLYSVEEQRQRHYLGHNDDIKCLAIHPDMVTIATGQVAGTTKEGKPLPPHVRIWDSVSLSTLHVLGLGVFDRAVCCVGFSKSNGGNLLCAVDESNDHMLSVWDWAKETKVVDVKVPEDFGPVRTVAEGHGDTLYVGTTRNSILQGSVHTGFSLLVQGHVEELWGLATHPSRAQFVTCGQDKLVHLWSSDSHQPLWSRIIEDPARSAGFHPSGSVLAVGTVTGRWLLLDTETHDLVAIHTDGNEQISVVSFSPDGAYLAVGSHDNLVYVYTVDQGGRKVSRLGKCSGHSSFITHLDWAQDSSCFVTNSGDYEILYWDPATCKQITSADAVRNMEWATATCVLGFGVFGIWSEGADGTDINAVARSHDGKLLASADDFGKVHLFSYPCCQPRALSHKYGGHSSHVTNVAFLWDDSMALTTGGKDTSVLQWRVV

SEQ ID NO: 800517 - protein, 556 aa, Homo sapiens
GASLLLVATSHTIFKCGLAIHPDMVTIATGQVAGTTKEGKPLPPHVRIWDSVSLSTLHVLGLGVFDRAVCCVGFSKSNGGNLLCAVDESNDHMLSVWDWAKETKVVDVKCSNEAVLVATFHPTDPTVLITCGKSHIYFWTLEGGSLSKRQGLFEKHEKPKYVLCVTFLEGGDVVTGDSGGNLYVWGKGGNRITQAVLGAHDGGVFGLCALRDGTLVSGGGRDRRVVLWGSDYSKLQEVEVPEDFGPVRTVAEGHGDTLYVGTTRNSILQGSVHTGFSLLVQGHVEELWGLATHPSRAQFVTCGQDKLVHLWSSDSHQPLWSRIIEDPARSAGFHPSGSVLAVGTVTGRWLLLDTETHDLVAIHTDGNEQISVVSFSPDGAYLAVGSHDNLVYVYTVDQGGRKVSRLGKCSGHSSFITHLDWAQDSSCFVTNSGDYEILYWDPATCKQITSADAVRNMEWATATCVLGFGVFGIWSEGADGTDINAVARSHDGKLLASADDFGKVHLFSYPCCQPRALSHKYGGHSSHVTNVAFLWDDSMALTTGGKDTSVLQWRVV

SEQ ID NO: 800518 - protein, 753 aa, Homo sapiens
MATGGRAWLGGPGPGWDRGGRRWLWWGDGGARPAFCGLYDTSSLLRYCNDDNLSGTSGMEVDDRVSALEQRLQLQEDELAVLKAALADALRRLRACEEQGAALRARGTPKGRAPPRLGTTASVCQLLKGLPTRTPLNGSGPPRRVGGYATSPSSPKKEATSGRSSVRRYLSPERLASVRREDPRSRTTSSSSNCSAKKEGKTKEVIFSVEDGSVKMFLRGRPVPMMIPDELAPTYSLDTRSELPSCRLKLEWVYGYRGRDCRANLYLLPTGEIVYFVASVAVLYSVEEQRQRHYLGHNDDIKCLAIHPDMVTIATGQVAGTTKEGKPLPPHVRIWDSVSLSTLHVLGLGVFDRAVCCVGFSKSNGGNLLCAVDESNDHMLSVWDWAKETKVVDVKKHEKPKYVLCVTFLEGGDVVTGDSGGNLYVWGKGGNRITQAVLGAHDGGVFGLCALRDGTLVSGGGRDRRVVLWGSDYSKLQEVEVPEDFGPVRTVAEGHGDTLYVGTTRNSILQGSVHTGFSLLVQDPARSAGFHPSGSVLAVGTVTGRWLLLDTETHDLVAIHTDGNEQISVVSFSPDGAYLAVGSHDNLVYVYTVDQGGRKVSRLGKCSGHSSFITHLDWAQDSSCFVTNSGDYEILYWDPATCKQITSADAVRNMEWATATCVLGFGVFGIWSEGADGTDINAVARSHDGKLLASADDFGKVHLFSYPCCQPRALSHKYGGHSSHVTNVAFLWDDSMALTTGGKDTSVLQWRVV

SEQ ID NO: 800519 - protein, 967 aa, Homo sapiens
GAANPGPRIVLGGLAGGVPTPLSGHPGDDPSAGPGAGRLMPGELSWGCWNEGRCYGNGRQGLVGGTGPGLDRGGRRWLWWGDGGARPAFCGLYDTSSLLRYCNDDNLSGTSGMEVDDRVSALEQRLQLQEDELAVLKAALADALRRLRACEEQGAALRARGTPKGRAPPRLGTTASVCQLLKGLPTRTPLNGSGPPRRVGGYATSPSSPKKEATSGRSSVRRYLSPERLASVRREDPRSRTTSSSSNCSAKKEGKTKEVIFSVEDGSVKMFLRGRPVPMMIPDELAPTYSLDTRSELPSCRLKLEWVYGYRGRDCRANLYLLPTGEIVYFVASVAVLYSVEEQRQRHYLGHNDDIKCLAIHPDMVTIATGQVAGTTKEGKPLPPHVRIWDSVSLSTLHVLGLGVFDRAVCCVGFSKSNGGNLLCAVDESNDHMLSVWDWAKETKVVDVKCSNEAVLVATFHPTDPTVLITCGKSHIYFWTLEGGSLSKRQGLFEKHEKPKYVLCVTFLEGGDVVTGDSGGNLYVWGKGGNRITQAVLGAHDGGVFGLCALRDGTLVSGGGRDRRVVLWGSDYSKLQEVEVPEDFGPVRTVAEGHGDTLYVGTTRNSILQGSVHTGFSLLVQGHVEELWGLATHPSRAQFVTCGQDKLVHLWSSDSHQPLWSRIIEDPARSAGFHPSGSVLAVGTVTGRWLLLDTETHDLVAIHTDGNEQISVVSFSPDGAYLAVGSHDNLVYVYTVDQGGRKVSRLGKCSGHSSFITHLDWAQDSSCFVTNSGDYEILYLEMGFHHLGQAGLELLTSGDSSQMLWLMLPPGITDVSHHARPDAGLKVDAPAYAAGCEDPKHVMPSQPVLTGDPATCKQITSADAVRNMEWATATCVLGFGVFGIWSEGADGTDINAVARSHDGKLLASADDFGKVHLFSYPCCQPRALSHKYGGHSSHVTNVAFLWDDSMALTTGGKDTSVLQWRVV

SEQ ID NO: 800520 - protein, 465 aa, Homo sapiens
RLGSGLGVNGRGRPGQVAGTTKEGKPLPPHVRIWDSVSLSTLHVLGLGVFDRAVCCVGFSKSCSNEAVLVATFHPTDPTVLITCGKSHIYFWTLEGGSLSKRQGLFEKHEKPKYVLCVTFLEGGDVVTGDSGGNLYVWGKGGNRITQAVLGAHDGGVFGLCALRDGTLVSGGGRDRRVVLWGSDYSKLQEVEVPEDFGPVRTVAEGHGDTLYVGTTRNSILQGSVHTGFSLLVQDPARSAGFHPSGSVLAVGTVTGRWLLLDTETHDLVAIHTDGNEQISVVSFSPDGAYLAVGSHDNLVYVYTVDQGGRKVSRLGKCSGHSSFITHLDWAQDSSCFVTNSGDYEILYWDPATCKQITSADAVRNMEWATATCVLGFGVFGIWSEGADGTDINAVARSHDGKLLASADDFGKVHLFSYPCCQPRALSHKYGGHSSHVTNVAFLWDDSMALTTGGKDTSVLQWRVV

SEQ ID NO: 800521 - protein, 263 aa, Homo sapiens
LEGNGTISAHCNLRLPGSSDSSASASRELGLQDPARSAGFHPSGSVLAVGTVTGRWLLLDTETHDLVAIHTDGNEQISVVSFSPDGAYLAVGSHDNLVYVYTVDQGGRKVSRLGKCSGHSSFITHLDWAQDSSCFVTNSGDYEILYWDPATCKQITSADAVRNMEWATATCVLGFGVFGIWSEGADGTDINAVARSHDGKLLASADDFGKVHLFSYPCCQPRALSHKYGGHSSHVTNVAFLWDDSMALTTGGKDTSVLQWRVV

SEQ ID NO: 800522 - protein, 152 aa, Homo sapiens
GRLLLLNSRPRRPHLDWAQDSSCFVTNSGDYEILYWDPATCKQITSADAVRNMEWATATCVLGFGVFGIWSEGADGTDINAVARSHDGKLLASADDFGKVHLFSYPCCQPRALSHKYGGHSSHVTNVAFLWDDSMALTTGGKDTSVLQWRVV

SEQ ID NO: 800523 - protein, 433 aa, Homo sapiens
MATGGRAWLGGPGPGWDRGGRRWLWWGDGGARPAFCGLYDTSSLLRYCNDDNLSGTSGMEVDDRVSALEQRLQLQEDELAVLKAALADALRRLRACEEQGAALRARGTPKGRAPPRLGTTASVCQLLKGLPTRTPLNGSGPPRRVGGYATSPSSPKKEATSGRSSVRRYLSPERLASVRREDPRSRTTSSSSNCSAKKEGKTKEVIFSVEDGSVKMFLRGRPVPMMIPDELAPTYSLDTRSELPSCRLKLEWVYGYRGRDCRANLYLLPTGEIVYFVASVAVLYSVEEQRQRHYLGHNDDIKCLAIHPDMVTIATGQVAGTTKEGKPLPPHVRIWDSVSLSTLHVLGLGVFDRAVCCVGFSKSNGGNLLCAVDESNDHMLSVWDWAKETKVVDVKCSNEAVLVATFHPTDPTVLISRRGREFIEVGDPGISDR

SEQ ID NO: 800524 - protein, 533 aa, Homo sapiens
MVTIATGQVAGTTKEGKPLPPHVRIWDSVSLSTLHVLGLGVFDRAVCCVGFSKSNGGNLLCAVDESNDHMLSVWDWAKETKVVDVKCSNEAVLVATFHPTDPTVLITCGKSHIYFWTLEGGSLSKRQGLFEKHEKPKYVLCVTFLEGGDVVTGDSGGNLYVWGKGGNRITQAVLGAHDGGVFGLCALRDGTLVSGGGRDRRVVLWGSDYSKLQEVEVPEDFGPVRTVAEGHGDTLYVGTTRNSILQGSVHTGFSLLVQGHVEELWGLATHPSRAQFVTCGQDKLVHLWSSDSHQPLWSRIIEDPARSAGFHPSGSVLAVGTVTGRWLLLDTETHDLVAIHTDGNEQISVVSFSPDGAYLAVGSHDNLVYVYTVDQGGRKVSRLGKCSGHSSFITHLDWAQDSSCFVTNSGDYEILYWDPATCKQITSADAVRNMEWATATCVLGFGVFGIWSEGADGTDINAVARSHDGKLLASADDFGKVHLFSYPCCQPRALSHKYGGHSSHVTNVAFLWDDSMALTTGGKDTSVLQWRVV

SEQ ID NO: 800525 - protein, 896 aa, Homo sapiens
GAANPGPRIVLGGLAGGVPTPLSGHPGDDPSAGPGAGRLMPGELSWGCWNEGRCYGNGRQGLVGGTGPGLDRGGRRWLWWGDGGARPAFCGLYDTSSLLRYCNDDNLSGTSGMEVDDRVSALEQRLQLQEDELAVLKAALADALRRLRACEEQGAALRARGTPKGRAPPRLGTTASVCQLLKGLPTRTPLNGSGPPRRVGGYATSPSSPKKEATSGRSSVRRYLSPERLASVRREDPRSRTTSSSSNCSAKKEGKTKEVIFSVEDGSVKMFLRGRPVPMMIPDELAPTYSLDTRSELPSCRLKLEWVYGYRGRDCRANLYLLPTGEIVYFVASVAVLYSVEEQRQRHYLGHNDDIKCLAIHPDMVTIATGQVAGTTKEGKPLPPHVRIWDSVSLSTLHVLGLGVFDRAVCCVGFSKSNGGNLLCAVDESNDHMLSVWDWAKETKVVDVKCSNEAVLVATFHPTDPTVLITCGKSHIYFWTLEGGSLSKRQGLFEKHEKPKYVLCVTFLEGGDVVTGDSGGNLYVWGKGGNRITQAVLGAHDGGVFGLCALRDGTLVSGGGRDRRVVLWGSDYSKLQEVEVPEDFGPVRTVAEGHGDTLYVGTTRNSILQGSVHTGFSLLVQGHVEELWGLATHPSRAQFVTCGQDKLVHLWSSDSHQPLWSRIIEDPARSAGFHPSGSVLAVGTVTGRWLLLDTETHDLVAIHTDGNEQISVVSFSPDGAYLAVGSHDNLVYVYTVDQGGRKVSRLGKCSGHSSFITHLDWAQDSSCFVTNSGDYEILYWDPATCKQITSADAVRNMEWATATCVLGFGVFGIWSEGADGTDINAVARSHDGKLLASADDFGKVHLFSYPCCQPRALSHKYGGHSSHVTNVAFLWDDSMALTTGGKDTSVLQWRVV

SEQ ID NO: 800526 - protein, 929 aa, Homo sapiens
GAANPGPRIVLGGLAGGVPTPLSGHPGDDPSAGPGAGRLMPGELSWGCWNEGRCYGNGRQGLVGGTGPGLDRGGRRWLWWGDGGARPAFCGLYDTSSLLRYCNDDNLSGTSGMEVDDRVSALEQRLQLQEDELAVLKAALADALRRLRACEEQGAALRARGTPKGRAPPRLGTTASVCQLLKGLPTRTPLNGSGPPRRVGGYATSPSSPKKEATSGRSSVRRYLSPERLASVRREDPRSRTTSSSSNCSAKKEGKTKEVIFSVEDGSVKMFLRGRPVPMMIPDELAPTYSLDTRSELPSCRLKLEWVYGYRGRDCRANLYLLPTGEIVYFVASVAVLYSVEEQRQRHYLGHNDDIKCLAIHPDMVTIATGQVAGTTKEGKPLPPHVRIWDSVSLSTLHVLGLGVFDRAVCCVGFSKSNGGNLLCAVDESNDHMLSVWDWAKETKVVDVKAGVQWHNLGSLQPPPPRFQQILLTQPPEELRLQCSNEAVLVATFHPTDPTVLITCGKSHIYFWTLEGGSLSKRQGLFEKHEKPKYVLCVTFLEGGDVVTGDSGGNLYVWGKGGNRITQAVLGAHDGGVFGLCALRDGTLVSGGGRDRRVVLWGSDYSKLQEVEVPEDFGPVRTVAEGHGDTLYVGTTRNSILQGSVHTGFSLLVQGHVEELWGLATHPSRAQFVTCGQDKLVHLWSSDSHQPLWSRIIEDPARSAGFHPSGSVLAVGTVTGRWLLLDTETHDLVAIHTDGNEQISVVSFSPDGAYLAVGSHDNLVYVYTVDQGGRKVSRLGKCSGHSSFITHLDWAQDSSCFVTNSGDYEILYWDPATCKQITSADAVRNMEWATATCVLGFGVFGIWSEGADGTDINAVARSHDGKLLASADDFGKVHLFSYPCCQPRALSHKYGGHSSHVTNVAFLWDDSMALTTGGKDTSVLQWRVV

SEQ ID NO: 800527 - protein, 803 aa, Homo sapiens
KLVLVWSFRDHDNLSGTSGMEVDDRVSALEQRLQLQEDELAVLKAALADALRRLRACEEQGAALRARGTPKGRAPPRLGTTASVCQLLKGLPTRTPLNGSGPPRRVGGYATSPSSPKKEATSGRSSVRRYLSPERLASVRREDPRSRTTSSSSNCSAKKEGKTKEVIFSVEDGSVKMFLRGRPVPMMIPDELAPTYSLDTRSELPSCRLKLEWVYGYRGRDCRANLYLLPTGEIVYFVASVAVLYSVEEQRQRHYLGHNDDIKCLAIHPDMVTIATGQVAGTTKEGKPLPPHVRIWDSVSLSTLHVLGLGVFDRAVCCVGFSKSNGGNLLCAVDESNDHMLSVWDWAKETKVVDVKCSNEAVLVATFHPTDPTVLITCGKSHIYFWTLEGGSLSKRQGLFEKHEKPKYVLCVTFLEGGDVVTGDSGGNLYVWGKGGNRITQAVLGAHDGGVFGLCALRDGTLVSGGGRDRRVVLWGSDYSKLQEVEVPEDFGPVRTVAEGHGDTLYVGTTRNSILQGSVHTGFSLLVQGHVEELWGLATHPSRAQFVTCGQDKLVHLWSSDSHQPLWSRIIEDPARSAGFHPSGSVLAVGTVTGRWLLLDTETHDLVAIHTDGNEQISVVSFSPDGAYLAVGSHDNLVYVYTVDQGGRKVSRLGKCSGHSSFITHLDWAQDSSCFVTNSGDYEILYWDPATCKQITSADAVRNMEWATATCVLGFGVFGIWSEGADGTDINAVARSHDGKLLASADDFGKVHLFSYPCCQPRALSHKYGGHSSHVTNVAFLWDDSMALTTGGKDTSVLQWRVV

SEQ ID NO: 800528 - protein, 896 aa, Homo sapiens; identical to SEQ ID NO: 800525

SEQ ID NO: 800529 - protein, 627 aa, Homo sapiens; identical to SEQ ID NO: 800515

SEQ ID NO: 800530 - protein, 509 aa, Homo sapiens
RLGSGLGVNGRGRPGQVAGTTKEGKPLPPHVRIWDSVSLSTLHVLGLGVFDRAVCCVGFSKSCSNEAVLVATFHPTDPTVLITCGKSHIYFWTLEGGSLSKRQGLFEKHEKPKYVLCVTFLEGGDVVTGDSGGNLYVWGKGGNRITQAVLGAHDGGVFGLCALRDGTLVSGGGRDRRVVLWGSDYSKLQEVEVPEDFGPVRTVAEGHGDTLYVGTTRNSILQGSVHTGFSLLVQGHVEELWGLATHPSRAQFVTCGQDKLVHLWSSDSHQPLWSRIIEDPARSAGFHPSGSVLAVGTVTGRWLLLDTETHDLVAIHTDGNEQISVVSFSPDGAYLAVGSHDNLVYVYTVDQGGRKVSRLGKCSGHSSFITHLDWAQDSSCFVTNSGDYEILYWDPATCKQITSADAVRNMEWATATCVLGFGVFGIWSEGADGTDINAVARSHDGKLLASADDFGKVHLFSYPCCQPRALSHKYGGHSSHVTNVAFLWDDSMALTTGGKDTSVLQWRVV

SEQ ID NO: 800531 - protein, 742 aa, Homo sapiens
GAANPGPRIVLGGLAGGVPTPLSGHPGDDPSAGPGAGRLMPGELSWGCWNEGRCYGNGRQGLVGGTGPGLDRGGRRWLWWGDGGARPAFCGLYDTSSLLRYCNDDNLSGTSGMEVDDRVSALEQRLQLQEDELAVLKAALADALRRLRACEEQGAALRARGTPKGRAPPRLGTTASVCQLLKGLPTRTPLNGSGPPRRVGGYATSPSSPKKEATSGRSSVRRYLSPERLASVRREDPRSRTTSSSSNCSAKKEGKTKEVIFSVEDGSVKMFLRGRPVPMMIPDELAPTYSLDTRSELPSCRLKLEWVYGYRGRDCRANLYLLPTGEIVYFVASVAVLYSVEEQRQRHYLGHNDDIKCLAIHPDMVTIATGQVAGTTKEGKPLPPHVRIWDSVSLSTLHVLGLGVFDRAVCCVGFSKSNGGNLLCAVDESNDHMLSVWDWAKETKVVDVKCSNEAVLVATFHPTDPTVLITCGKSHIYFWTLEGGSLSKRQGLFEKHEKPKYVLCVTFLEGGDVVTGDSGGNLYVWGKGGNRITQAVLGAHDGGVFGLCALRDGTLVSGGGRDRRVVLWGSDYSKLQEVEVPEDFGPVRTVAEGHGDTLYVGTTRNSILQGSVHTGFSLLVQGHVEELWGLATHPSRAQFVTCGQDKLVHLWSSDSHQPLWSRIIEDPARSAGFHPSGSVLAVGTVTGRWLLLDTETHDLVAIHTDGNEQISVVSFSPGPFQFYHPPGLGPGQQLLCHQLRGL

SEQ ID NO: 800532 - protein, 333 aa, Homo sapiens
MGSDAQLRPPSDILGKVFPGSRWGRVSCWGSSSICLALVLSGKRPGLLSPPAVLPFHQGHVEELWGLATHPSRAQFVTCGQDKLVHLWSSDSHQPLWSRIIEDPARSAGFHPSGSVLAVGTVTGRWLLLDTETHDLVAIHTDGNEQISVVSFSPDGAYLAVGSHDNLVYVYTVDQGGRKVSRLGKCSGHSSFITHLDWAQDSSCFVTNSGDYEILYWDPATCKQITSADAVRNMEWATATCVLGFGVFGIWSEGADGTDINAVARSHDGKLLASADDFGKVHLFSYPCCQPRALSHKYGGHSSHVTNVAFLWDDSMALTTGGKDTSVLQWRVV

SEQ ID NO: 800533 - protein, 226 aa, Homo sapiens
MIWLERTSITHSTTVTGRWLLLDTETHDLVAIHTDGNEQISVVSFSPDGAYLAVGSHDNLVYVYTVDQGGRKVSRLGKCSGHSSFITHLDWAQDSSCFVTNSGDYEILYWDPATCKQITSADAVRNMEWATATCVLGFGVFGIWSEGADGTDINAVARSHDGKLLASADDFGKVHLFSYPCCQPRALSHKYGGHSSHVTNVAFLWDDSMALTTGGKDTSVLQWRVV

SEQ ID NO: 800534 - protein, 158 aa, Homo sapiens
ARRNVKPLREGFGHSSFITHLDWAQDSSCFVTNSGDYEILYWDPATCKQITSADAVRNMEWATATCVLGFGVFGIWSEGADGTDINAVARSHDGKLLASADDFGKVHLFSYPCCQPRALSHKYGGHSSHVTNVAFLWDDSMALTTGGKDTSVLQWRVV

SEQ ID NO: 800535 - protein, 586 aa, Homo sapiens
MATGGRAWLGGPGPGWDRGGRRWLWWGDGGARPAFCGLYDTSSLLRYCNDDNLSGTSGMEVDDRVSALEQRLQLQEDELAVLKAALADALRRLRACEEQGAALRARGTPKGRAPPRLGTTASVCQLLKGLPTRTPLNGSGPPRRVGGYATSPSSPKKEATSGRSSVRRYLSPERLASVRREDPRSRTTSSSSNCSAKKEGKTKEVIFSVEDGSVKMFLRGRPVPMMIPDELAPTYSLDTRSELPSCRLKLEWVYGYRGRDCRANLYLLPTGEIVYFVASVAVLYSVEEQRQRHYLGHNDDIKCLAIHPDMVTIATGQVAGTTKEGKPLPPHVRIWDSVSLSTLHVLGLGVFDRAVCCVGFSKSNGGNLLCAVDESNDHMLSVWDWAKETKVVDVKKHEKPKYVLCVTFLEGGDVVTGDSGGNLYVWGKGGNRITQAVLGAHDGGVFGLCALRDGTLVSGGGRDRRVVLWGSDYSKLQEVEVPEDFGPVRTVAEGHGDTLYVGTTRNSILQGSVHTGFSLLVQACLRCSLPPCLPPSLVLRSSYWRKSQQALCFLFPTAWAGSCPHICSGTSCRTAPSPSAVYTFTL

SEQ ID NO: 800536 - protein, 116 aa, Homo sapiens
MKGLRSLAATTLALFLVFVFLGNSSCAPQRLLERRNWTPQAMLYLKGAQGRRFISDQSRRKDLSDRPLPERRSPNPQLLTIPEAATILLASLQKSPEDEEKNFDQTRFLEDSLLNW

SEQ ID NO: 800537 - protein, 116 aa, Homo sapiens; identical to SEQ ID NO: 800536

SEQ ID NO: 800538 - protein, 104 aa, Homo sapiens
CAGSAGNSAAPRDPILEQPAPSPRPGTALCREELRFKRGLSRARLSLSPRSRFCRGSPLHLRPEPEKGPLRPATAGKTKPKSPTTNYSGGSNHLTGVPSEITRR

SEQ ID NO: 800539 - protein, 104 aa, Homo sapiens; identical to SEQ ID NO: 800538

SEQ ID NO: 800540 - protein, 116 aa, Homo sapiens; identical to SEQ ID NO: 800536

SEQ ID NO: 800541 - protein, 76 aa, Homo sapiens
WQQQQLDAERRSWELARPAPRQWWQGRPRLALRLPKPYWLAAVQPALWLPGCAEVPRELGPEVQLRGKDEAQIPNY

SEQ ID NO: 800542 - protein, 114 aa, Homo sapiens
MKGLRSLAATTLALFLVFVFLGNSSCAPQRLLERRNWTPQAMLYLKGAQGRRFISDQSRRKDLSDRPLPERRSPNPQLLTIPEAATILLASLQKSPEDDENNHHQPSLLEGRMR

SEQ ID NO: 800543 - protein, 641 aa, Homo sapiens
MAVDCPGDLGTRMMPIRRSAQLERIRQQQEDMRRRREEEGKKQELDLNSSMRLKKLAQIPPKTGIDNPMFDTEEGIVLESPHYAVKILEIEDLFSSLKHIQHTLVDSQSQEDISLLLQLVQNKDFQNAFKIHNAITVHMNKASPPFPLISNAQDLAQEVQTVLKPVHHKEGQELTALLNTPHIQALLLAHDKVAEQEMQLEPITDERVYESIGQYGGETVKIVRIEKARDIPLGATVRNEMDSVIISRIVKGGAAEKSGLLHEGDEVLEINGIEIRGKDVNEVFDLLSDMHGTLTFVLIPSQQIKPPPAKETVIHVKAHFDYDPSDDPYVPCRELGLSFQKGDILHVISQEDPNWWQAYREGDEDNQPLAGLVPGKSFQQQREAMKQTIEEDKEPEKSGKLWCAKKNKKKRKKVLYNANKNDDYDNEEILTYEEMSLYHQPANRKRPIILIGPQNCGQNELRQRLMNKEKDRFASAVPHTTRSRRDQEVAGRDYHFVSRQAFEADIAAGKFIEHGEFEKNLYGTSIDSVRQVINSGKICLLSLRTQSLKTLRNSDLKPYIIFIAPPSQERLRALLAKEGKNPKPEELREIIEKTREMEQNNGHYFDTAIVNSDLDKAYQELLRLINKLDTEPQWVPSTWLR

SEQ ID NO: 800544 - protein, 675 aa, Homo sapiens
MTTSHMNGHVTEESDSEVKNVDLASPEEHQKHREMAVDCPGDLGTRMMPIRRSAQLERIRQQQEDMRRRREEEGKKQELDLNSSMRLKKLAQIPPKTGIDNPMFDTEEGIVLESPHYAVKILEIEDLFSSLKHIQHTLVDSQSQEDISLLLQLVQNKDFQNAFKIHNAITVHMNKASPPFPLISNAQDLAQEVQTVLKPVHHKEGQELTALLNTPHIQALLLAHDKVAEQEMQLEPITDERVYESIGQYGGETVKIVRIEKARDIPLGATVRNEMDSVIISRIVKGGAAEKSGLLHEGDEVLEINGIEIRGKDVNEVFDLLSDMHGTLTFVLIPSQQIKPPPAKETVIHVKAHFDYDPSDDPYVPCRELGLSFQKGDILHVISQEDPNWWQAYREGDEDNQPLAGLVPGKSFQQQREAMKQTIEEDKEPEKSGKLWCAKKNKKKRKKVLYNANKNDDYDNEEILTYEEMSLYHQPANRKRPIILIGPQNCGQNELRQRLMNKEKDRFASAVPHTTRSRRDQEVAGRDYHFVSRQAFEADIAAGKFIEHGEFEKNLYGTSIDSVRQVINSGKICLLSLRTQSLKTLRNSDLKPYIIFIAPPSQERLRALLAKEGKNPKPEELREIIEKTREMEQNNGHYFDTAIVNSDLDKAYQELLRLINKLDTEPQWVPSTWLR

SEQ ID NO: 800545 - protein, 641 aa, Homo sapiens; identical to SEQ ID NO: 800543

SEQ ID NO: 800546 - protein, 641 aa, Homo sapiens; identical to SEQ ID NO: 800543

SEQ ID NO: 800547 - protein, 124 aa, Homo sapiens
MTTSHMNGHVTEESDSEVKNVDLASPEEHQKHREMAVDCPGDLGTRMMPIRRSAQLERIRQQQEDMRRRREEEGKKQELDLNSSMRLKKLAQIPPKTGIDNPMFDTEEGIVLESPHYAVKILGK

SEQ ID NO: 800548 - protein, 641 aa, Homo sapiens; identical to SEQ ID NO: 800543

SEQ ID NO: 800549 - protein, 675 aa, Homo sapiens; identical to SEQ ID NO: 800544

SEQ ID NO: 800550 - protein, 503 aa, Homo sapiens
MNKASPPFPLISNAQDLAQEVQTVLKPVHHKEGQELTALLNTPHIQALLLAHDKVAEQEMQLEPITDERVYESIGQYGGETVKIVRIEKARDIPLGATVRNEMDSVIISRIVKGGAAEKSGLLHEGDEVLEINGIEIRGKDVNEVFDLLSDMHGTLTFVLIPSQQIKPPPAKETVIHVKAHFDYDPSDDPYVPCRELGLSFQKGDILHVISQEDPNWWQAYREGDEDNQPLAGLVPGKSFQQQREAMKQTIEEDKEPEKSGKLWCAKKNKKKRKKVLYNANKNDDYDNEEILTYEEMSLYHQPANRKRPIILIGPQNCGQNELRQRLMNKEKDRFASAVPHTTRSRRDQEVAGRDYHFVSRQAFEADIAAGKFIEHGEFEKNLYGTSIDSVRQVINSGKICLLSLRTQSLKTLRNSDLKPYIIFIAPPSQERLRALLAKEGKNPKPEELREIIEKTREMEQNNGHYFDTAIVNSDLDKAYQELLRLINKLDTEPQWVPSTWLR

SEQ ID NO: 800551 - protein, 470 aa, Homo sapiens
DQRIPVRRRLSYAALLLAHDKVAEQEMQLEPITDERVYESIGQYGGETVKIVRIEKARDIPLGATVRNEMDSVIISRIVKGGAAEKSGLLHEGDEVLEINGIEIRGKDVNEVFDLLSDMHGTLTFVLIPSQQIKPPPAKETVIHVKAHFDYDPSDDPYVPCRELGLSFQKGDILHVISQEDPNWWQAYREGDEDNQPLAGLVPGKSFQQQREAMKQTIEEDKEPEKSGKLWCAKKNKKKRKKVLYNANKNDDYDNEEILTYEEMSLYHQPANRKRPIILIGPQNCGQNELRQRLMNKEKDRFASAVPHTTRSRRDQEVAGRDYHFVSRQAFEADIAAGKFIEHGEFEKNLYGTSIDSVRQVINSGKICLLSLRTQSLKTLRNSDLKPYIIFIAPPSQERLRALLAKEGKNPKPEELREIIEKTREMEQNNGHYFDTAIVNSDLDKAYQELLRLINKLDTEPQWVPSTWLR

SEQ ID NO: 800552 - protein, 110 aa, Homo sapiens
GGRREAAIFRRRWPRRFRAARLEPEAGPPSGTRNHSLPAFRSCIPEARLKLAGTLPACPVPTGTPVADTGCGESECWRAAVPAAAPADSFPPPPAFPCPADVMRSVEPQG

SEQ ID NO: 800553 - protein, 103 aa, Homo sapiens [sequence omitted]

SEQ ID NO: 800554 - protein, 130 aa, Homo sapiens
GEAMPRPASARARCAHTLACAHCLALPSEMNPAPQMEMQKSPVFCDAHAGSCRPELFLFGHLGSSSYDPLLKSGIRPQEMTGKKMPVINIEDLTEKDKLKMEVDQLKKEVTLERMLIPARHLQNQSLMDY

SEQ ID NO: 800555 - protein, 321 aa, Homo sapiens
MAADVTGKSDPFCVVELNNDRLLTHTVYKNLNPEWNKVFTFNIKDIHSVLEVTVYDEDRDRSADFLGKVAIPLLSIQNGEQKAYVLKNRQLTGPTKGVIYLEIDVIFNAVKASLRTLIPKEQKYIEEENRLSKQLLLRNFIRMKRCVMVLVNAAYYVNSCFDWDSPPRSLAAFVVVEDMLEDEEEEDDKDDKDSEKKGFINKIYAIQEVCVSVQNILDEVASFGERIKNTFNWTVPFLSWLAIVALCVFTAILYCIPLRYIVLVWGINKFTKKLRSPYAIDNNELLDFLSRVPSDVQVVQYQELKPDPSHSPYKRKKNNLG

SEQ ID NO: 800556 - protein, 321 aa, Homo sapiens; identical to SEQ ID NO: 800555

SEQ ID NO: 800557 - protein, 333 aa, Homo sapiens
TRWLLRREVTERGAGIGPCWGRCVVIGRRPGGARVRHGCASGSSGWRPVLWAGAFTMASAELDYTIEIPDQPCWSQKNSPSPGGKEAETRQPVVILLGWGGCKDKNLAKYSAIYHKRGCIVIRYTAPWHMVFFSESLGIPSLRVLAQKLLELLFDYEIEKEPLLFHVFSNGGVMLYRYVLELLQTRRFCRLRVVGTIFDSAPGDSNLVGALRALAAILERRAAMLRLLLLVAFALVVVLFHVLLAPITALFHTHFYDRLQDAGSRWPELYLYSRADEVVLARDIERMVEARLARRVLARSVDFVSSAHVSHLRDYPTYYTSLCVDFMRNCVRC

SEQ ID NO: 800558 - protein, 153 aa, Homo sapiens
TRWLLRREVTERGAGIGPCWGRCVVIGRRPGGARVRHGCASGSSGWRPVLWAGAFTMASAELDYTIEIPDQPCWSQKNSPSPGGKEAETRQPVVILLGWGGCKDKNLAKYSAIYHKRKLLELLFDYEIEKEAGSCWAQAIPTCSPQSATKAQL

SEQ ID NO: 800559 - protein, 160 aa, Homo sapiens
MLYRYVLELLQTRRFCRLRVVGTIFDSAPGDSNLVGALRALAAILERRAAMLRLLLLVAFALVVVLFHVLLAPITALFHTHFYDRLQDAGSRWPELYLYSRADEVVLARDIERMVEARLARRVLARSVDFVSSAHVSHLRDYPTYYTSLCVDFMRNCVRC

SEQ ID NO: 800560 - protein, 194 aa, Homo sapiens
TRWLLRREVTERGAGIGPCWGRCVVIGRRPGGARVRHGCASGSSGWRPVLWAGAFTMASAELDYTIEIPDQPCWSQKNSPSPGGKEAETRQPVVILLGWGGCKDKNLAKYSAIYHKRKLLELLFDYEIEKEPLLFHVFSNGGVMLYRYVLELLQTRRFCRLRVVGTIFDSAPGDSNLATGRGLSLARALPLLEG

SEQ ID NO: 800561 - protein, 257 aa, Homo sapiens
TRWLLRREVTERGAGIGPCWGRCVVIGRRPGGARVRHGCASGSSGWRPVLWAGAFTMASAELDYTIEIPDQPCWSQKNSPSPGGKEAETRQPVVILLGWGGCKDKNLAKYSAIYHKRGCIVIRYTAPWHMVFFSESLGIPSLRVLAQKLLELLFDYEIEKEPLLFHVFSNGGVMLYRYVLELLQTRRFCRLRVVGTIFDSAPGDSNLVFCMASCLLLSPLLVDGISAGTEGQLTLRPDWAAQVLTRLGCHLQCITRS

SEQ ID NO: 800562 - protein, 142 aa, Homo sapiens
MHITGRQHGHKGAPPAAVPTWWNGWMTSHQPRPLGFQQMDTQQRPGTRVPMSTCQLLVPRKPPSRRVVARIRFCPHHSYSSKRLLFSCSMSTASSSAMQEPSLCEEQSRIMLGPGHPHLLPTVCNEGTALAPAVVCQVGPQL

SEQ ID NO: 800563 - protein, 142 aa, Homo sapiens; identical to SEQ ID NO: 800562

SEQ ID NO: 800564 - protein, 303 aa, Homo sapiens
TRWLLRREVTERGAGIGPCWGRCVVIGRRPGGARVRHGCASGSSGWRPVLWAGAFTMASAELDYTIEIPDQPCWSQKNSPSPGGKEAETRQPVVILLGWGGCKDKNLAKYSAIYHKRKLLELLFDYEIEKEPLLFHVFSNGGVMLYRYVLELLQTRRFCRLRVVGTIFDSAPGDSNLVGALRALAAILERRAAMLRLLLLVAFALVVVLFHVLLAPITALFHTHFYDRLQDAGSRWPELYLYSRADEVVLARDIERMVEARLARRVLARSVDFVSSAHVSHLRDYPTYYTSLCVDFMRNCVRC

SEQ ID NO: 800565 - protein, 333 aa, Homo sapiens; identical to SEQ ID NO: 800557

SEQ ID NO: 800566 - protein, 167 aa, Homo sapiens
TRWLLRREVTERGAGIGPCWGRCVVIGRRPGGARVRHGCASGSSGWRPVLWAGAFTMASAELDYTIEIPDQPCWSQKNSPSPGGKEAETRQPVVILLGWGGCKDKNLAKYSAIYHKRVFCMASCLLLSPLLVDGISAGTEGQLTLRPDWAAQVLTRLGCHLQCITRS

SEQ ID NO: 800567 - protein, 151 aa, Homo sapiens
MVDLKVAAYLDPQIRALWETKGPARESSGQSKKSPQMDCLDPKSSCWHFRNFTYDEAGGPREAVSKLQELCHLWLKPEIHSKEQILELLVLEQFLTILPRETQTQMQKHHPQSIEEAVALVEHLQRESGQTWNGVRRKIPDMYSEIGCRWI

SEQ ID NO: 800568 - protein, 145 aa, Homo sapiens
VPLGAGIRPGGARRPRSQKPQPGPAVPQRRAPPAPDRAATRLSHPALHVKSPLRAWHAGKAVSGDPVRGRTVNGCRLSSSPLCTQPQRAHFSELRIPSQLLKVADGKVSSFRNCRIRSCSARTANAYPKMWNPDLPMRGARLEVA

SEQ ID NO: 800569 - protein, 206 aa, Homo sapiens
RLGFESAADCSRKCRSLSQGMELSCPGSRCPVQEQRARWERKRACTARELLETERRYQEQLGLVATYFLGILKAKGTLRPPERQALFGSWELIYGASQELLPYLEGGCWGQGLEGFCRHLELYNQFAANSERSQTTLQEQLKKNKGFRRFVRLQEGRPEFGGLQLQDLLPLPLQRLQQYENLVVALAENTGPNSPDHQQLTPVLPS

SEQ ID NO: 800570 - protein, 352 aa, Homo sapiens
RLGFESAADCSRKCRSLSQGMELSCPGSRCPVQEQRARWERKRACTARELLETERRYQEQLGLVATYFLGILKAKGTLRPPERQALFGSWELIYGASQELLPYLEGGCWGQGLEGFCRHLELYNQFAANSERSQTTLQEQLKKNKGFRRFVRLQEGRPEFGGLQLQDLLPLPLQRLQQYENLVVALAENTGPNSPDHQQLTRAARLISETAQRVHTIGQKQKNDQHLRRVQALLSGRQAKGLTSGRWFLRQGWLLVVPPHGEPRPRMFFLFTDVLLMAKPRPPLHLLRSGTFACKALYPMAQCHLSRVFGHSGGPVVGLSFPHEKLLLMSTDQEELSRWYHSLTWAISSQKN

SEQ ID NO: 800571 - protein, 114 aa, Homo sapiens
MVHSFMFRSSCWAPARVVTLKKCPLSGSQPMSPFLPPATNSPKIHRIIALLTAQKGGPAGPSGCSGAALSGPAVVSTGPAVALGIREKRGQKWLCIFCCPLNSPDPAQTSAKPT

SEQ ID NO: 800572 - protein, 90 aa, Homo sapiens
MTLSSTDMYTVSLLLCLFFKKSDPDPGPFQNNLFHNHGTQSQSCMGSKVGDVIPGAARLISETAQRVHTIGQKQKNDQHLRRVQALLSGR

SEQ ID NO: 800573 - protein, 352 aa, Homo sapiens; identical to SEQ ID NO: 800570

SEQ ID NO: 800574 - protein, 352 aa, Homo sapiens; identical to SEQ ID NO: 800570

SEQ ID NO: 800575 - protein, 352 aa, Homo sapiens; identical to SEQ ID NO: 800570

SEQ ID NO: 800576 - protein, 255 aa, Homo sapiens
MAGQPPPAEDARVRRVTAQPPVGAHSCPLLLRVPELIRLPGAPGGTGDHFVSPLLHREADHPALQPLRTAGDHRILPVCLPEASDDFCPGIRCWVTGWGYTREGEPLPPPYSLREVKVSVVDTETCRRDYPGPGGSILQPDMLCARGPGDACQDDSGGPLVCQVNGAWVQAGIVSWGEGCGRPNRPGVYTRVPAYVNWIRRHITASGGSESGYPRLPLLAGFFLPGLFLLLVSCVLLAKCLLHPSADGTPFPAPD

SEQ ID NO: 800577 - protein, 226 aa, Homo sapiens
MAGQPPPAEDARVRRVTAQPPVGAHSCPLLLRVPELIRLPGAPGGTGDHFVSPLLHREADHPALQPLRTAGDHRILPVCLPEASDDFCPGIRCWVTGWGYTREGEPLPPPYSLREVKVSVVDTETCRRDYPGPGGSILQPDMLCARGPGDACQDDSGGPLVCQVNGAWVQAGIVSWGEGCGRPNRPGVYTRVPAYVNWIRFQRPLRQPLQAGALCPLPGGPAMNYM

SEQ ID NO: 800578 - protein, 321 aa, Homo sapiens
MALGACGLLLLLAVPGVSLRTLQPGCGRPQVSDAGGRIVGGHAAPAGAWPWQASLRLRRMHVCGGSLLSPQWVLTAAHCFSGSLNSSDYQVHLGELEITLSPHFSTVRQIILHSSPSGQPGTSGDIALVELSVPVTLSSRILPVCLPEASDDFCPGIRCWVTGWGYTREGEPLPPPYSLREVKVSVVDTETCRRDYPGPGGSILQPDMLCARGPGDACQDDSGGPLVCQVNGAWVQAGIVSWGEGCGRPNRPGVYTRVPAYVNWIRRHITASGGSESGYPRLPLLAGFFLPGLFLLLVSCVLLAKCLLHPSADGTPFPAPD

SEQ ID NO: 800579 - protein, 1807 aa, Homo sapiens
GSPQRLCDLAGPSSTESESRKRSISKRKSHLDLLKLIMDGMTEACIKGGIEACYAAVSCVCTLLGALDELSQGKGLSEGQVQLLLLRLEELKDGAEWSRDSMEINEADFRWQRRVLSSEHTPWESGNERSLDISISVTTDTGQTTLEGELGQTTPEDHSGNHKNSLKSPAIPEGKETLSKVLETEAVDQPDVVQRSHTVPYPDITNFLSVDCRTRSYGSRYSESNFSVDDQDLSRTEFDSCDQYSMAAEKDSGRSDVSDIGSDNCSLADEEQTPRDCLGHRSLRTAALSLKLLKNQEADQHSARLFIQSLEGLLPRLLSLSNVEEVDTALQNFASTFCSGMMHSPGFDGNSSLSFQMLMNADSLYTAAHCALLLNLKLSHGDYYRKRPTLAPGVMKDFMKQVQTSGVLMVFSQAWIEELYHQVLDRNMLGEAGYWGSPEDNSLPLITMLTDIDGLESSAIGGQLMASAATESPFAQSRRIDDSTVAGVAFARYILVGCWKNLIDTLSTPLTGRMAGSSKGLAFILGAEGIKEQNQKERDAICMSLDGLRKAARLSCALGVAANCASALAQMAAASCVQEEKEEREAQEPSDAITQVKLKVEQKLEQIGKVQGVWLHTAHVLCMEAILSVGLEMGSHNPDCWPHVFRVCEYVGTLEHNHFSDGASQPPLTISQPQKATGSAGLLGDPECEGSPPEHSPEQGRSLSTAPVVQPLSIQDLVREGSRGRASDFRGGSLMSGSSAAKVVLTLSTQADRLFEDATDKLNLMALGGFLYQLKKASQSQLFHSVTDTVDYSLAMPGEVKSTQDRKSALHLFRLGNAMLRIVRSKARPLLHVMRCWSLVAPHLVEAACHKERHVSQKAVSFIHDILTEVLTDWNEPPHFHFNEALFRPFERIMQLELCDEDVQDQVVTSIGELVEVCSTQIQSGWRPLFSALETVHGGNKSEMKEYLVGDYSMGKGQAPVFDVFEAFLNTDNIQVFANAATSYIMCLMKFVKGLGEVDCKEIGDCAPAPGAPSTDLCLPALDYLRRCSQLLAKIYKMPLKPIFLSGRLAGLPRRLQEQSASSEDGIESVLSDFDDDTGLIEVWIILLEQLTAAVSNCPRQHQPPTLDLLFELLRDVTKTPGPGFGIYAVVHLLLPVMSVWLRRSHKDHSYWDMASANFKHAIGLSCELVVEHIQSFLHSDIRYESMINTMLKDLFELLVACVAKPTETISRVGCSCIRYVLVTAGPVFTEEMWRLACCALQDAFSATLKPVKDLLGCFHSGTESFSGEGCQVRVAAPSSSPSAEAEYWRIRAMAQQVFMLDTQCSPKTPNNFDHAQSCQLIIELPPDEKPNGHTKKSVSFREIVVSLLSHQVLLQNLYDILLEEFVKGPSPGEEKTIQVPEAKLAGFLRYISMQNLAVIFDLLLDSYRTAREFDTSPGLKCLLKKVSGIGGAANLYRQSAMSFNIYFHALVCAVLTNQETITAEQVKKVLFEDDERSTDSSQQCSSEDEDIFEETAQVSPPRGKEKRQWRARMPLLSVQPVSNADWVWLVKRLHKLCMELCNNYIQMHLDLENCMEEPPIFKGDPFFILPSFQSESSTPSTGGFSGKETPSEDDRSQSREHMGESLSLKAGGGDLLLPPSPKVEKKDPSRKKEWWENAGNKIYTMAADKTISKLMTEYKKRKQQHNLSAFPKEVKVEKKGEPLGPRGQDSPLLQRPQHLMDQGQMRHSFSAGPELLRQDKRPRSGSTGSSLSVSVRDAEAQIQAWTNMVLTVLNQIQILPDQTFTALQPAVFPCISQLTCHVTDIRVRQAVREWLGRVGRVYDIIV

SEQ ID NO: 800580 - protein, 1807 aa, Homo sapiens; identical to SEQ ID NO: 800579

SEQ ID NO: 800581 - protein, 1807 aa, Homo sapiens; identical to SEQ ID NO: 800579

SEQ ID NO: 800582 - protein, 1175 aa, Homo sapiens
  misc_feature (1125)..(1125): Xaa can be any naturally occurring amino acid
GSPQRLCDLAGPSSTESESRKRSISKRKSHLDLLKLIMDGMTEACIKGGIEACYAAVSCVCTLLGALDELSQGKGLSEGQVQLLLLRLEELKDGAEWSRDSMEINEADFRWQRRVLSSEHTPWESGNERSLDISISVTTDTGQTTLEGELGQTTPEDHSGNHKNSLKSPAIPEGKETLSKVLETEAVDQPDVVQRSHTVPYPDITNFLSVDCRTRSYGSRYSESNFSVDDQDLSRTEFDSCDQYSMAAEKDSGRSDVSDIGSDNCSLADEEQTPRDCLGHRSLRTAALSLKLLKNQEADQHSARLFIQSLEGLLPRLLSLSNVEEVDTALQNFASTFCSGMMHSPGFDGNSSLSFQMLMNADSLYTAAHCALLLNLKLSHGDYYRKRPTLAPGVMKDFMKQVQTSGVLMVFSQAWIEELYHQVLDRNMLGEAGYWGSPEDNSLPLITMLTDIDGLESSAIGGQLMASAATESPFAQSRRIDDSTVAGVAFARYILVGCWKNLIDTLSTPLTGRMAGSSKGLAFILGAEGIKEQNQKERDAICMSLDGLRKAARLSCALGVAANCASALAQMAAASCVQEEKEEREAQEPSDAITQVKLKVEQKLEQIGKVQGVWLHTAHVLCMEAILSVGLEMGSHNPDCWPHVFRVCEYVGTLEHNHFSDGASQPPLTISQPQKATGSAGLLGDPECEGSPPEHSPEQGRSLSTAPVVQPLSIQDLVREGSRGRASDFRGGSLMSGSSAAKVVLTLSTQADRLFEDATDKLNLMALGGFLYQLKKASQSQLFHSVTDTVDYSLAMPGEVKSTQDRKSALHLFRLGNAMLRIVRSKARPLLHVMRCWSLVAPHLVEAACHKERHVSQKAVSFIHDILTEVLTDWNEPPHFHFNEALFRPFERIMQLELCDEDVQDQVVTSIGELVEVCSTQIQSGWRPLFSALETVHGGNKSEMKEYLVGDYSMGKGQAPVFDVFEAFLNTDNIQVFANAATSYIMCLMKFVKGLGEVDCKEIGDCAPAPGAPSTDLCLPALDYLRRCSQLLAKIYKMPLKPIFLSGRLAGLPRRLQEQSASSEDGIESVLSDFDDDTGLIEVWIILLEQLTAAVSNCPRQHQPPTLDLLFELLRDVTKTPGPGXVVFYAGVPELRIPLIHWSLGLFPCVEQPPPPPPPPPPPPSPPPPPPPPPP

SEQ ID NO: 800583 - protein, 282 aa, Homo sapiens [sequence omitted]

SEQ ID NO: 800584 - protein, 276 aa, Homo sapiens
MRGMKLLGALLALAALLQGAVSLKIAAFNIQTFGETKMSNATLVSYIVQILSRYDIALVQEVRDSHLTAVGKLLDNLNQDAPDTYHYVVSEPLGRNSYKERYLFVYRPDQVSAVDSYYYDDGCEPCGNDTFNREPAIVRFFSRFTEVREFAIVPLHAAPGDAVAEIDALYDVYLDVQEKWGLEDVMLMGDFNAGCSYVRPSQWSSIRLWTSPTFQWLIPDSADTTATPTHCAYDRIVVAGMLLRGAVVPDSALPFNFQAAYGLSDQLVCVLPCTAT

SEQ ID NO: 800585 - protein, 222 aa, Homo sapiens
MRGMKLLGALLALAALLQGAVSLKIAAFNIQTFGETKMSNATLVSYIVQILSRYDIALVQEVRDSHLTAVGKLLDNLNQDAPDTYHYVVSEPLGRNSYKERYLFVYRPDQVSAVDSYYYDDGCEPCGNDTFNREPAIVRFFSRFTEVREFAIVPLHAAPGDAVAEIDALYDVYLDVQEEMGLGGRHVDGRLQCGLQLCETLPVVIHPPVDKPHLPVADPRQR

SEQ ID NO: 800586 - protein, 134 aa, Homo sapiens
MNQEGRRVLGHRAVMAVSHQGAPFATLDVALASLSKVTLGPPDKRQGDWSPAPPSRTYLAHPCPILEDGGHHTCKGHGIGTFGLVIRHFKTKCKRDYQVQFLQQQETCAYRKKHVLATHLCGKPHRAIVFCTLR

SEQ ID NO: 800587 - protein, 213 aa, Homo sapiens
MPPSSATLCRDAPDTYHYVVSEPLGRNSYKERYLFVYRPDQVSAVDSYYYDDGCEPCGNDTFNREPAIVRFFSRFTEVREFAIVPLHAAPGDAVAEIDALYDVYLDVQEKWGLEDVMLMGDFNAGCSYVRPSQWSSIRLWTSPTFQWLIPDSADTTATPTHCAYDRIVVAGMLLRGAVVPDSALPFNFQAAYGLSDQLAQAISDHYPVEVMLK

SEQ ID NO: 800588 - protein, 222 aa, Homo sapiens; identical to SEQ ID NO: 800585

SEQ ID NO: 800589 - protein, 90 aa, Homo sapiens
VREFAIVPLHAAPGDAVAEIDALYDVYLDVQEEMGLGGEALPGAVGTSGLRMSQGHRQRFLVGRHVDGRLQCGLQLCETLPVVIHPPVDK

SEQ ID NO: 800590 - protein, 122 aa, Homo sapiens
MKITRGVHRQVPSCQQLLQKPMFFFSPILRHSQNWSERGVKWDTSFKVGKPKKGASTSSLSSFSPAFFGRIRGTGAALGKVCPTRVSQLVARRGGGEGGSSSEPVTARMIEPASRLPRSPRT

SEQ ID NO: 800591 - protein, 146 aa, Homo sapiens [sequence omitted]

SEQ ID NO: 800592 - protein, 122 aa, Homo sapiens; identical to SEQ ID NO: 800590

SEQ ID NO: 800593 - protein, 146 aa, Homo sapiens [sequence omitted]

SEQ ID NO: 800594 - protein, 336 aa, Homo sapiens
GRRQLVRLDNHGGGSGRPPRLSAPPAAPLTQVPCAPRLLREGRSHRPTWCAPWPLTPPPFPCPTLAPGPAHGGPRGTKRAAPGSPPTDAVTFQNVLKATHSDSRPREAGRPRGAGPRGDSLLLAARRAGTVTLGGDWSGSAMANPPLSKDPLFSLADLLNDRAVCHLRCSRDPQRPPHPAGPFPPNGCGWIIEGVEGRLGHGHERRGRDVANGDQESEWTRQTLPRARTGSLPASSTHGSSPPGWCPHFTVEEAETKVTQRARGRAGSDSIHSQDALTRIFHLAGAWRGRNGEVRECCRGDIGTRSCSELKCSRQRAPVGLSWPGRRGPLGSTRGL

SEQ ID NO: 800595 - protein, 282 aa, Homo sapiens
GRRQLVRLDNHGGGSGRPPRLSAPPAAPLTQVPCAPRLLREGRSHRPTWCAPWPLTPPPFPCPTLAPGPAHGGPRGTKRAAPGSPPTDAVTFQNVLKATHSDSRPREAGRPRGAGPRGDSLLLAARRAGTVTLGGDWSGSAMANPPLSKDPLFSLADLLNDRAVCHLRCSRDPQRPPHPAGPFPPNGCGWIIEGVEGRLGHGHERRGRDVANGDQESEWTRQTLPRARTGSLPASSTHGSSPPGWCPHFTVEEAETKGLGGDGTVRSENAAEGTLGPGLAVS

SEQ ID NO: 800596 - protein, 98 aa, Homo sapiens
RMPVNPRAPSPARWFSSPPSLGGVGLGVFCFHYCTPSPKDNGTALLHSALPQTGDRSCSSPGWTPNLHIRTAMDHGAMKVKTGALITHGSHFVAQAGV

SEQ ID NO: 800597 - protein, 110 aa, Homo sapiens
GFSQNTQDSGQGLEGAPGSMLGNTHGLIGAGWACQPSRGPRVPTKGLLLQRPLCWQGLHYHHLPGLHPSIRVAAVAPEETRLCLKVLPSAPAGALPAGVARIHTESTDLP

SEQ ID NO: 800598 - protein, 284 aa, Homo sapiens
KHLGVSTVERGQKISEQIVIGTPGTVLDWCSKLKFIDPKKIKVFVLDEADVMIATQGHQDQSIRIQRMLPRNCQMLLFSATFEDSVWKFAQKVVPDPNVIKLKREEETLDTIKQYYVLCSSRDEKFQALCNLYGAITIAQAMIFCHTRKTASWLAAELSKEGHQVALLSGEMMVEQRAAVIERFREGKEKVLVTTNVCARGIDVEQVSVVINFDLPVDKDGNPDNETYLHRIGRTGRFGKRGLAVNMVDSKHSMNILNRIQEHFNKKIERLDTDDLDEIEKIAN

SEQ ID NO: 800599 - protein, 284 aa, Homo sapiens; identical to SEQ ID NO: 800598

SEQ ID NO: 800600 - protein, 767 aa, Homo sapiens
RRRALCWAPAAPATACGARGTMISTKEKNKIPKDSMTLLPCFYFVELPIVASSIVSLYFLELTDLFKPAKVGFQCYDRTLSMPYVETNEELIPLLMLLSLAFAAPAASIMVAEGMLYCLQSRLWGRAGGPAGAEGSINAGGCNFNSFLRRTVRFVGVHVFGLCATALVTDVIQLATGYHTPFFLTVCKPNYTLLGTSCEVNPYITQDICSGHDIHAILSARKTFPSQHATLSAFAAVYVSVSPAPHCPSQALLLTRGEPSLTPTPMPQMYFNSVISDTTKLLKPILVFAFAIAAGVCGLTQITQYRSHPVDVYAGFLIGAGIAAYLACHAVGNFQAPPAEKPAAPAPAKDALRALTQRGHDSVYQQNKSVSTDELGPPGRLEGAPRPVAREKTSLGSLKRASVDVDLLAPRSPMAKENMVTFSHTLPRASAPSLDDPARRHMTIHVPLDASRSKQLISEWKQKSLEGRGLGLPDDASPGHLRAPAEPMAEEEEEEEDEEEEEEEEEEEDEGPAPPSLYPTVQARPGLGPRVILPPRAGPPPLVHIPEEGAQTGAGLSPKSGAGVRAKWLMMAEKSGAAVANPPRLLQVIAMSKAPGAPGPKAAETASSSSASSDSSQYRSPSDRDSASIVTIDAHAPHHPVVHLSAGGAPWEWKAAGGGAKAEADGGYELGDLARGFRGGAKPPGVSPGSSVSDVDQEEPRFGAVATVNLATGEGLPPLGAADGALGPGSRESTLRRHAGGLGLAEREAEAEAEGYFRKMQARRFPD

SEQ ID NO: 800601 - protein, 696 aa, Homo sapiens
RRRALCWAPAAPATACGARGTMISTKEKNKIPKDSMTLLPCFYFVELPIVASSIVSLYFLELTDLFKPAKVGFQCYDRTLSMPYVETNEELIPLLMLLSLAFAAPAASIMVAEGMLYCLQSRLWGRAGGPAGAEGSINAGGCNFNSFLRRTVRFVGVHVFGLCATALVTDVIQLATGYHTPFFLTVCKPNYTLLGTSCEVNPYITQDICSGHDIHAILSARKTFPSQHATLSAFAAVYVSMYFNSVISDTTKLLKPILVFAFAIAAGVCGLTQITQYRSHPVDVYAGFLIGAGIAAYLACHAVGNFQAPPAEKPAAPAPAKDALRALTQRGHDSVYQQNKSVSTDELGPPGRLEGAPRPVAREKDPARRHMTIHVPLDASRSKQLISEWKQKSLEGRGLGLPDDASPGHLRAPAEPMAEEEEEEEDEEEEEEEEEEEDEGPAPPSLYPTVQARPGLGPRVILPPRAGPPPLVHIPEEGAQTGAGLSPKSGAGVRAKWLMMAEKSGAAVANPPRLLQVIAMSKAPGAPGPKAAETASSSSASSDSSQYRSPSDRDSASIVTIDAHAPHHPVVHLSAGGAPWEWKAAGGGAKAEADGGYELGDLARGFRGGAKPPGVSPGSSVSDVDQEEPRFGAVATVNLATGEGLPPLGAADGALGPGSRESTLRRHAGGLGLAEREAEAEAEGYFRKMQARRFPD

SEQ ID NO: 800602 - protein, 696 aa, Homo sapiens; identical to SEQ ID NO: 800601

SEQ ID NO: 800603 - protein, 310 aa, Homo sapiens
DPRVGLVLDREQTSLGSLKRASVDVDLLAPRSPMAKENMVTFSHTLPRASAPSLDDPARRHMTIHVPLDASRSKQLISEWKQKSLEGRGLGLPDDASPGHLRAPAEPMAEEEEEEEDEEEEEEEEEEEDEGPAPPSLYPTVQARPGLGPRVILPPRAGPPPLVHIPEEGAQTGAGLSPKSGAGVRAKWLMMAEKSGAAVANPPRLLQVIAMSKAPGAPGPKAAETASSSSASSDSSQYARRRIAACDMSAARHAGTVAGPGMEGGGGSGGEERGRRSGAPGSFGEERGANAEARWRKPPRAGETTAAAGL

SEQ ID NO: 800604 - protein, 617 aa, Homo sapiens
RRRALCWAPAAPATACGARGTMISTKEKNKIPKDSMTLLPCFYFVELPIVASSIVSLYFLELTDLFKPAKVGFQCYDRTLSMPYVETNEELIPLLMLLSLAFAAPAASIMVAEGMLYCLQSRLWGRAGGPAGAEGSINAGGCNFNSFLRRTVRFVGVHVFGLCATALVTDVIQLATGYHTPFFLTVCKPNYTLLGTSCEVNPYITQDICSGHDIHAILSARKTFPSQHATLSAFAAVYVSMYFNSVISDTTKLLKPILVFAFAIAAGVCGLTQITQYRSHPVDVYAGFLIGAGIAAYLACHAVGNFQAPPAEKPAAPAPAKDALRALTQRGHDSVYQQNKSVSTDELGPPGRLEGAPRPVAREKTSLGSLKRASVDVDLLAPRSPMAKENMVTFSHTLPRASAPSLDDPARRHMTIHVPLDASRSKQLISEWKQKSLEGRGLGLPDDASPGHLRAPAEPMAEEEEEEEDEEEEEEEEEEEDEGPAPPSLYPTVQARPGLGPRVILPPRAGPPPLVHIPEEGAQTGAGLSPKSGAGVRAKWLMMAEKSGAAVANPPRLLQVIAIPRCGATRAAWGWRSARRRRRPRATSARCRRAASPTSAAGPGAGGGRAEGAGGRA

SEQ ID NO: 800605 - protein, 259 aa, Homo sapiens
RRRALCWAPAAPATACGARGTMISTKEKNKIPKDSMTLLPCFYFVELPIVASSIVSLYFLELTDLFKPAKVGFQCYDRTLSMPYVETNEELIPLLMLLSLAFAAPAASIMVAEGMLYCLQSRLWGRAGGPAGAEGSINAGGCNFNSFLRRTVRFVGVHVFGLCATALVTDVIQLATGYHTPFFLTVCKPNYTLLGTSCEVNPYITQDICSGHDIHAILSARKTFPSQHATAGGLGLAEREAEAEAEGYFRKMQARRFPD

SEQ ID NO: 800606 - protein, 1135 aa, Homo sapiens
MGDFAAPAAAANGSSICINSSLNSSLGGAGIGVNNTPNSTPAAPSSNHPAAGGCGGSGGPGGGSAAVPKHSTVVERLRQRIEGCRRHHVNCENRYQQAQVEQLELERRDTVSLYQRTLEQRAKKSGAGTGKQQHPSKPQQDAEAASAEQRNHTLIMLQETVKRKLEGARSPLNGDQQNGACDGNFSPTSKRIRKDISAGMEAINNLPSNMPLPSASPLHQLDLKPSLPLQNSGTHTPGLLEDLSKNGRLPEIKLPVNGCSDLEDSFTILQSKDLKQEPLDDPTCIDTSETSLSNQNKLFSDINLNDQEWQELIDELANTVPEDDIQDLFNEDFEEKKEPEFSQPATETPLSQESASVKSDPSHSPFAHVSMGSPQARPSSSGPPFSTVSTATSLPSVASTPAAPNPASSPANCAVQSPQTPNQAHTPGQAPPRPGNGYLLNPAAVTVAGSASGPVAVPSSDMSPAEQLKQMAAQQQQRAKLMQQKEQQQQQQQQQQQQQQQQQQQQQHSNQTSNWSPLGPPSSPYGAAFTAEKPNSPMMYPQAFNNQNPIVPPMANNLQKTTMNNYLPQNHMNMINQQPNNLGTNSLNKQHNILTYGNTKPLTHFNADLSQRMTPPVANPNKNPLMPYIQQQQQQQQQQQQQQQQQQPPPPQLQAPRAHLSEDQKRLLLMKQKGVMNQPMAYAALPSHGQEQHPVGLPRTTGPMQSSVPPGSGGMVSGASPAGPGFLGSQPQAAIMKQMLIDQRAQLIEQQKQQFLREQRRSSSSSSSRFWRNSSCSNHIYPGSTSSHSWNPYPVQQVNQFQGSPQDIAAVRSQAALQSMRTSRLMAQNAGMMGIGPSQNPGTMATAAAQSEMGLAPYSTTPTSQPGMYNMSTGMTQMLQHPNQSGMSITHNQAQGPRQPASGQGVGMVSGFGQSMLVNSAITQQHPQMKGPVGQALPRPQAPPRLQSLMGTVQQGAQSWQQRSLQGMPGRTSGELGPFNNGASYPLQAGQPRLTKQHFPQGLSQSVVDANTGTVRTLNPAAMGRQMMPSLPGQQGTSQARPMVMSGLSQGVPGMPAFSQPPAQQQIPSGSFAPSSQSQAYERNAPQDVSYNYSGDGAGGSFPGLPDGADLVDSIIKGGPGDEWMQELDELFGNP

SEQ ID NO: 800607 - protein, 1135 aa, Homo sapiens; identical to SEQ ID NO: 800606

SEQ ID NO: 800608 - protein, 739 aa, Homo sapiens
MGDFAAPAAAANGSSICINSSLNSSLGGAGIGVNNTPNSTPAAPSSNHPAAGGCGGSGGPGGGSAAVPKHSTVVERLRQRIEGCRRHHVNCENRYQQAQVEQLELERRDTVSLYQRTLEQRAKKSGAGTGKQQHPSKPQQDAEAASAEQRNHTLIMLQETVKRKLEGARSPLNGDQQNGACDGNFSPTSKRIRKDISAGMEAINNLPSNMPLPSASPLHQLDLKPSLPLQNSGTHTPGLLEDLSKNGRLPEIKLPVNGCSDLEDSFTILQSKDLKQEPLDDPTCIDTSETSLSNQNKLFSDINLNDQEWQELIDELANTVPEDDIQDLFNEDFEEKKEPEFSQPATETPLSQESASVKSDPSHSPFAHVSMGSPQARPSSSGPPFSTVSTATSLPSVASTPAAPNPASSPANCAVQSPQTPNQAHTPGQAPPRPGNGYLLNPAAVTVAGSASGPVAVPSSDMSPAEQLKQMAAQQQQRAKLMQQKQQQQQQQQQQQQQHSNQTSNWSPLGPPSSPYGAAFTAEKPNSPMMYPQAFNNQNPIVPPMANNLQKTTMNNYLPQNHMNMINQQPNNLGTNSLNKQHNILTYGNTKPLTHFNADLSQRMTPPVANPNKNPLMPYIQQQQQQQQQQQQQQQQQQPPPPQLQAPRAHLSEDQKRLLLMKQKGVMNQPMAYAALPSHGQVSVKVTHSSSSSCGAFQDCRCVMFYKASTVVGSNCLQKTSLQHPQVVARFGVFFFHFS

SEQ ID NO: 800609 - protein, 724 aa, Homo sapiens
KLTARYEAGFESAEAPGQAPPRPGNGYLLNPAAVTVAGSASGPVAVPSSDMSPAEQLKQMAAQQQQRAKLMQQKAQQQQQQQQQQQQQQQQQQQQQHSNQTSNWSPLGPPSSPYGAAFTAEKPNSPMMYPQAFNNQNPIVPPMANNLQKTTMNNYLPQNHMNMINQQPNNLGTNSLNKQHNILTYGNTKPLTHFNADLSQRMTPPVANPNKNPLMPYIQQQQQQQQQQQQQQQQQQPPPPQLQAPRAHLSEDQKRLLLMKQKGVMNQPMAYAALPSHGQEQHPVGLPRTTGPMQSSVPPGSGGMVSGASPAGPGFLGSQPQAAIMKQMLIDQRAQLIEQQKQQFLREQRRSSSSSSSRFWRNSSCSNHIYPGSTSSHSGIQYPVQQVNQFQGSPQDIAAVRSQAALQSMRTSRLMAQNAGMMGIGPSQNPGTMATAAAQSEMGLAPYSTTPTSQPGMYNMSTGMTQMLQHPNQSGMSITHNQAQGPRQPASGQGVGMVSGFGQSMLVNSAITQQHPQMKGPVGQALPRPQAPPRLQSLMGTVQQGAQSWQQRSLQGMPGRTSGELGPFNNGASYPLQAGQPRLTKQHFPQGLSQSVVDANTGTVRTLNPAAMGRQMMPSLPGQQGTSQARPMVMSGLSQGVPGMPAFSQPPAQQQIPSGSFAPSSQSQAYERNAPQDVSYNYSGDGAGGSFPGLPDGADLVDSIIKGGPGDEWMQELDELFGNP

SEQ ID NO: 800610 - protein, 774 aa, Homo sapiens
MGDFAAPAAAANGSSICINSSLNSSLGGAGIGVNNTPNSTPAAPSSNHPAAGGCGGSGGPGGGSAAVPKHSTVVERLRQRIEGCRRHHVNCENRYQQAQVEQLELERRDTVSLYQRTLEQRAKKSGAGTGKQQHPSKPQQDAEAASAEQRNHTLIMLQETVKRKLEGARSPLNGDQQNGACDGNFSPTSKRIRKDISAGMEAINNLPSNMPLPSASPLHQLDLKPSLPLQNSGTHTPGLLEDLSKNGRLPEIKLPVNGCSDLEDSFTILQSKDLKQEPLDDPTCIDTSETSLSNQNKLFSDINLNDQEWQELIDELANTVPEDDIQDLFNEDFEEKKEPEFSQPATETPLSQESASVKSDPSHSPFAHVSMGSPQARPSSSGPPFSTVSTATSLPSVASTPAAPNPASSPANCAVQSPQTPNQAHTPGQAPPRPGNGYLLNPAAVTVAGSASGPVAVPSSDMSPAEQLKQMAAQQQQRAKLMQQKEQQQQQQQQQQQQQQQQQQQQQHSNQTSNWSPLGPPSSPYGAAFTAEKPNSPMMYPQAFNNQNPIVPPMANNLQKTTMNNYLPQNHMNMINQQPNNLGTNSLNKQHNILTYGNTKPLTHFNADLSQRMTPPVANPNKNPLMPYIQQQQQQQQQQQQQQQQQQPPPPQLQAPRAHLSEDQKRLLLMKQKGVMNQPMAYAALPSHGQEQHPVGLPRTTGPMQSSVPPGSGGMVSGASPAGPGFLGSQPQAAIMKQMLIDQRAQLIEQQKQQFLREQRRSSSSSSSRFWRNR

SEQ ID NO: 800611 - protein, 525 aa, Homo sapiens
MEFCVEDSTDVHVLIEDHRIVFSCKNADGVELYNEIEFYAKVNSKDSQDKRSSRSITCFVRKWKEKVAWPRLTKEDIKPVWLSVDFDNWRDWEGDEEMELAHVEHYAELLKKVSTKRPPPAMDDLDFTTTVVSCCPAELQTEGSNGKKEVLSGFQVVLEDTVLFPEGGGQPDDRGTINDISVLRVTRRGEQADHFTQTPLDPGSQVLVRVDWERRFDHMQQHSGQHLITAVADHLFKLKTTSWELGRFRSAIELDTPSMTAEQVAAIEQSVNEKIRDRLPVNVRELSLDDPEVEQVSGRGLPDDHAGPIRVVNIEGVDSNMCCGTHVSNLSDLQVIKILGTEKGKKNRTNLIFLSGNRVLKWMERSHGTEKALTALLKCGAEDHVEAVKKLQNSTKILQKNNLNLLRDLAVHIAHSLRNSPDWGGVVILHRKEGDSEFMNIIANEIGSEETLLFLTVGDEKGGGLFLLAGPPASVETLGPRVAEVLEGKGAGKKGRFQGKATKMSRRMEAQALLQDYISTQSAKE

SEQ ID NO: 800612 - protein, 412 aa, Homo sapiens
MAFWCQRDSYAREFTTTVVSCCPAELQTEGSNGKKEVLSGFQVVLEDTVLFPEGGGQPDDRGTINDISVLRVTRRGEQADHFTQTPLDPGSQVLVRVDWERRFDHMQQHSGQHLITAVADHLFKLKTTSWELGRFRSAIELDTPSMTAEQVAAIEQSVNEKIRDRLPVNVRELSLDDPEVEQVSGRGLPDDHAGPIRVVNIEGVDSNMCCGTHVSNLSDLQVIKILGTEKGKKNRTNLIFLSGNRVLKWMERSHGTEKALTALLKCGAEDHVEAVKKLQNSTKILQKNNLNLLRDLAVHIAHSLRNSPDWGGVVILHRKEGDSEFMNIIANEIGSEETLLFLTVGDEKGGGLFLLAGPPASVETLGPRVAEVLEGKGAGKKGRFQGKATKMSRRMEAQALLQDYISTQSAKE

SEQ ID NO: 800613 - protein, 586 aa, Homo sapiens
MFSLPLNCSPDHIRRGSCWGRPQDLKIAAPAWNSKCHPGAGAAMARQHARTLWYDRPRYVFMEFCVEDSTDVHVLIEDHRIVFSCKNADGVELYNEIEFYAKVNSKDSQDKRSSRSITCFVRKWKEKVAWPRLTKEDIKPVWLSVDFDNWRDWEGDEEMELAHVEHYAELLKKVSTKRPPPAMDDLDFTTTVVSCCPAELQTEGSNGKKEVLSGFQVVLEDTVLFPEGGGQPDDRGTINDISVLRVTRRGEQADHFTQTPLDPGSQVLVRVDWERRFDHMQQHSGQHLITAVADHLFKLKTTSWELGRFRSAIELDTPSMTAEQVAAIEQSVNEKIRDRLPVNVRELSLDDPEVEQVSGRGLPDDHAGPIRVVNIEGVDSNMCCGTHVSNLSDLQVIKILGTEKGKKNRTNLIFLSGNRVLKWMERSHGTEKALTALLKCGAEDHVEAVKKLQNSTKILQKNNLNLLRDLAVHIAHSLRNSPDWGGVVILHRKEGDSEFMNIIANEIGSEETLLFLTVGDEKGGGLFLLAGPPASVETLGPRVAEVLEGKGAGKKGRFQGKATKMSRRMEAQALLQDYISTQSAKE

SEQ ID NO: 800614 - protein, 495 aa, Homo sapiens
MEFCVEDSTDVHVLIEDHRIVFSCKNADGVELYNEIEFYAKVNSKDSQDKRSSRSITCFVRKWKEKVAWPRLTKEDIKLLKKVSTKRPPPAMDDLDFTTTVVSCCPAELQTEGSNGKKEVLSGFQVVLEDTVLFPEGGGQPDDRGTINDISVLRVTRRGEQADHFTQTPLDPGSQVLVRVDWERRFDHMQQHSGQHLITAVADHLFKLKTTSWELGRFRSAIELDTPSMTAEQVAAIEQSVNEKIRDRLPVNVRELSLDDPEVEQVSGRGLPDDHAGPIRVVNIEGVDSNMCCGTHVSNLSDLQVIKILGTEKGKKNRTNLIFLSGNRVLKWMERSHGTEKALTALLKCGAEDHVEAVKKLQNSTKILQKNNLNLLRDLAVHIAHSLRNSPDWGGVVILHRKEGDSEFMNIIANEIGSEETLLFLTVGDEKGGGLFLLAGPPASVETLGPRVAEVLEGKGAGKKGRFQGKATKMSRRMEAQALLQDYISTQSAKE

SEQ ID NO: 800615 - protein, 323 aa, Homo sapiens
MAFWCQRDSYAREFTTTVVSCCPAELQTEGSNGKKEVLSGFQVVLEDTVLFPEGGGQPDDRGTINDISVLRVTRRGEQADHFTQTPLDPGSQVLVRVDWERRFDHMQQHSGQHLITAVADHLFKLKTTSWELGRFRSAIELDTPSMTAEQVAAIEQSVNEKIRDRLPVNVRELSLDDPEVEQVSGRGLPDDHAGPIRVVNIEGVDSNMCCGTHVSNLSDLQVIKILGTEKGKKNRTNLIFLSGNRVLKWMERSHGTEKALTALLKCGAEDHVEAVKKLQNSTKILQKNNLNLLRDLAVHIAHSLRNSPDWGGVVILHRRPSCS

SEQ ID NO: 800616 - protein, 323 aa, Homo sapiens; identical to SEQ ID NO: 800615

SEQ ID NO: 800617 - protein, 267 aa, Homo sapiens [sequence omitted]

SEQ ID NO: 800618 - protein, 303 aa, Homo sapiens
MFSLPLNCSPDHIRRGSCWGRPQDLKIAAPAWNSKCHPGAGAAMARQHARTLWYDRPRYVFMEFCVEDSTDVHVLIEDHRIVFSCKNADGVELYNEIEFYAKVNSKDSQDKRSSRSITCFVRKWKEKVAWPRLTKEDIKPVWLSVDFDNWRDWEGDEEMELAHVEHYAELLKKVSTKRPPPAMDDLDFTTTVVSCCPAELQTEGSNGKKEVLSGFQVVLEDTVLFPEGGGQPDDRGTINDISVLRVTRRGEQADHFTQTPLDPGSQVLVRVDWERRFDHMQQHSGQHLITAVADHLFKLKTTS

SEQ ID NO: 800619 - protein, 246 aa, Homo sapiens
LEREQMIEPGGSEVEQVSGRGLPDDHAGPIRVVNIEGVDSNMCCGTHVSNLSDLQVIKILGTEKGKKNRTNLIFLSGNRVLKWMERSHGTEKALTALLKCGAEDHVEAVKKLQNSTKILQKNNLNLLRDLAVHIAHSLRNSPDWGGVVILHRKEGDSEFMNIIANEIGSEETLLFLTVGDEKGGGLFLLAGPPASVETLGPRVAEVLEGKGAGKKGRFQGKATKMSRRMEAQALLQDYISTQSAKE

SEQ ID NO: 800620 - protein, 303 aa, Homo sapiens; identical to SEQ ID NO: 800618

SEQ ID NO: 800621 - protein, 278 aa, Homo sapiens
MAFWCQRDSYAREFTTTVVSCCPAELQTEGSNGKKEVLSGFQVVLEDTVLFPEGGGQPDDRGTINDISVLRVTRRGEQADHFTQTPLDPGSQVLVRVDWERRFDHMQQHSGQHLITAVADHLFKLKTTSWELGRFRSAIELDTPSMTAEQVAAIEQSVNEKIRDRLPVNVRELSLDDPEVEQVSGRGLPDDHAGPIRVVNIEGVDSNMCCGTHVSNLSDLQVIKILGTEKGKKNRTNLIFLSGNRVLKWMERSHGTEKALTALLKSMPVSVPSITSHF

SEQ ID NO: 800622 - protein, 119 aa, Homo sapiens
GCAGPSLVRRQRTGLGEGGVVILHRKEGDSEFMNIIANEIGSEETLLFLTVGDEKGGGLFLLAGPPASVETLGPRVAEVLEGKGAGKKGRFQGKATKMSRRMEAQALLQDYISTQSAKE

SEQ ID NO: 800623 - protein, 199 aa, Homo sapiens
MFSLPLNCSPDHIRRGSCWGRPQDLKIAAPAWNSKCHPGAGAAMARQHARTLWYDRPRYVFMEFCVEDSTDVHVLIEDHRIVFSCKNADGVELYNEIEFYAKVNSKDSQDKRSSRSITCFVRKWKEKVAWPRLTKEDIKPVWLSVDFDNWRDWEGDEEMELAHVEHYAELLKKVSTKRPPPAMDDLDDDSDSADDATSN

SEQ ID NO: 800624 - protein, 313 aa, Homo sapiens
MFSLPLNCSPDHIRRGSCWGRPQDLKIAAPAWNSKCHPGAGAAMARQHARTLWYDRPRYVFMEFCVEDSTDVHVLIEDHRIVFSCKNADGVELYNEIEFYAKVNSKDSQDKRSSRSITCFVRKWKEKVAWPRLTKEDIKPVWLSVDFDNWRDWEGDEEMELAHVEHYAELLKKVSTKRPPPAMDDLDFTTTVVSCCPAELQTEGSNGKKEVLSGFQVVLEDTVLFPEGGGQPDDRGTINDISVLRVTRRGEQADHFTQTPLDPGSQVLVRVDWERRFDHMQQHSGQHLITAVADHLFKLKTTSWVKQLLNLRA

SEQ ID NO: 800625 - protein, 89 aa, Homo sapiens
FTYFHQPDDRGTINDISVLRVTRRGEQADHFTQTPLDPGSQVLVRVDWERRFDHMQQHSGQHLITAVADHLFKLKTTSCADHARSCSSR

SEQ ID NO: 800626 - protein, 412 aa, Homo sapiens; identical to SEQ ID NO: 800612

SEQ ID NO: 800627 - protein, 412 aa, Homo sapiens
QASLRVRLLTRLQFTTTVVSCCPAELQTEGSNGKKEVLSGFQVVLEDTVLFPEGGGQPDDRGTINDISVLRVTRRGEQADHFTQTPLDPGSQVLVRVDWERRFDHMQQHSGQHLITAVADHLFKLKTTSWELGRFRSAIELDTPSMTAEQVAAIEQSVNEKIRDRLPVNVRELSLDDPEVEQVSGRGLPDDHAGPIRVVNIEGVDSNMCCGTHVSNLSDLQVIKILGTEKGKKNRTNLIFLSGNRVLKWMERSHGTEKALTALLKCGAEDHVEAVKKLQNSTKILQKNNLNLLRDLAVHIAHSLRNSPDWGGVVILHRKEGDSEFMNIIANEIGSEETLLFLTVGDEKGGGLFLLAGPPASVETLGPRVAEVLEGKGAGKKGRFQGKATKMSRRMEAQALLQDYISTQSAKE

SEQ ID NO: 800628 - protein, 277 aa, Homo sapiens
MAFWCQRDSYAREFTTTVVSCCPAELQTEGSNGKKEVLSGFQVVLEDTVLFPEGGGQPDDRGTINDISVLRVTRRGEQADHFTQTPLDPGSQVLVRVDWERRFDHMQQHSGQHLITAVADHLFKLKTTSWELGRFRSAIELDTPSMTAEQVAAIEQSVNEKIRDRLPVNVRELSLDDPEVEQVSGRGLPDDHAGPIRVVNIEGVDSNMCCGTHVSNLSDLQVIKILGTEKGKKNRTNLIFLSGNRVLKWMERSHGTEKALTALLNCLRDLLRISPGP

SEQ ID NO: 800629 - protein, 362 aa, Homo sapiens
MAFWCQRDSYAREFTTTVVSCCPAELQTEGSNGKKEVLSGFQVVLEDTVLFPEGGGQPDDRGTINDISVLRVTRRGEQADHFTQTPLDPGSQVLVRVDWERRFDHMQQHSGQHLITAVADHLFKLKTTSWELGRFRSAIELDTPSMTAEQVAAIEQSVNEKIRDRLPVNVRELSLDDPEVEQVSGRGLPDDHAGPIRVVNIEGVDSNMCCGTHVSNLSDLQVIKILGTEKGKKNRTNLIFLSGNRVLKWMERSHGTEKALTALLKCGAEDHVEAVKKLQNSTKILQKNNLNLLRDLAVHIAHSLRNSPDWGGVVILHRVAEVLEGKGAGKKGRFQGKATKMSRRMEAQALLQDYISTQSAKE

SEQ ID NO: 800630 - protein, 318 aa, Homo sapiens
MAFWCQRDSYAREFTTTVVSCCPAELQTEGSNGKKEVLSGFQVVLEDTVLFPEGGGQPDDRGTINDISVLRVTRRGEQADHFTQTPLDPGSQVLVRVDWERRFDHMQQHSGQHLITAVADHLFKLKTTSWELGRFRSAIELDTPSMTAEQVAAIEQSVNEKIRDRLPVNVRELSLDDPEVEQVSGRGLPDDHAGPIRVVNIEGVDSNMCCGTHVSNLSDLQVIKILGTEKGKKNRTNLIFLSGNRVLKWMERSHGTEKALTALLKCGAEDHVEAVKKLQNSTKILQKNNLNLLRDLAVHIAHSLRNSPDWGGVVILHR

SEQ ID NO: 800631 - protein, 267 aa, Homo sapiens [sequence omitted]

SEQ ID NO: 800632 - protein, 334 aa, Homo sapiens
MAFWCQRDSYAREFTTTVVSCCPAELQTEGSNGKKEVLSGFQVVLEDTVLFPEGGGQPDDRGTINDISVLRVTRRGEQADHFTQTPLDPGSQVLVRVDWERRFDHMQQHSGQHLITAVADHLFKLKTTSWELGRFRSAIELDTPSMTAEQVAAIEQSVNEKIRDRLPVNVRELSLDDPEVEQVSGRGLPDDHAGPIRVVNIEGVDSNMCCGTHVSNLSDLQVIKILGTEKGKKNRTNLIFLSGNRVLKWMERSHGTEKALTALLNVGDEKGGGLFLLAGPPASVETLGPRVAEVLEGKGAGKKGRFQGKATKMSRRMEAQALLQDYISTQSAKE

SEQ ID NO: 800633 - protein, 367 aa, Homo sapiens
MFSLPLNCSPDHIRRGSCWGRPQDLKIAAPAWNSKCHPGAGAAMARQHARTLWYDRPRYVFMEFCVEDSTDVHVLIEDHRIVFSCKNADGVELYNEIEFYAKVNSKDSQDKRSSRSITCFVRKWKEKVAWPRLTKEDIKPVWLSVDFDNWRDWEGDEEMELAHVEHYAELLKKVSTKRPPPAMDDLDFTTTVVSCCPAELQTEGSNGKKEVLSGFQVVLEDTVLFPEGGGQPDDRGTINDISVLRVTRRGEQADHFTQTPLDPGSQVLVRVDWERRFDHMQQHSGQHLITAVADHLFKLKTTSWELGRFRSAIELDTPSMTAEQVAAIEQSVNEKIRDRLPVNVRELSLDDPEVEQVVGAEGSCGKP

SEQ ID NO: 800634 - protein, 199 aa, Homo sapiens; identical to SEQ ID NO: 800623

SEQ ID NO: 800635 - protein, 308 aa, Homo sapiens
MFSLPLNCSPDHIRRGSCWGRPQDLKIAAPAWNSKCHPGAGAAMARQHARTLWYDRPRYVFMEFCVEDSTDVHVLIEDHRIVFSCKNADGVELYNEIEFYAKVNSKDSQDKRSSRSITCFVRKWKEKVAWPRLTKEDIKPVWLSVDFDNWRDWEGDEEMELAHVEHYAELLKKVSTKRPPPAMDDLDFTTTVVSCCPAELQTEGSNGKKEVLSGFQVVLEDTVLFPEGGGQPDDRGTINDISVLRVTRRGEQADHFTQTPLDPGSQVLVRVDWERRFDHMQQHSGKGWDGGHNTGAVAMYGDAVMTET

SEQ ID NO: 800636 - protein, 126 aa, Homo sapiens
MWPQVPSSKNIVATCRSCARVYETIPHSHSHRPQSIGPEGAPTIGGELSFRIHPKVPLVPIPTTPPGLARATSPHMTPQERQPCILTQPAACPALPYKTVEERTSEPPLKPFVLFFLGTGTNLFAQ

SEQ ID NO: 800637 - protein, 919 aa, Homo sapiens
FAARAAGLSQEPRDPRGCGPGAAAAEPGDPQPRRRRRRRQQLEQRLPPPPGRSSPRPLAASSPSGGGRRVSPAQSAPGPAGPLRPAPRKNCIENLMDEDEKDRAKRASRNKSEKKRRDQFNVLIKELSSMLPGNTRKMDKTTVLEKVIGFLQKHNEVSAQTEICDIQQDWKPSFLSNEEFTQLMLEALDGFIIAVTTDGSIIYVSDSITPLLGHLPSDVMDQNLLNFLPEQEHSEVYKILSSHMLVTDSPSPEYLKSDSDLEFYCHLLRGSLNPKEFPTYEYIKFVGNFRSYNNVPSPSCNGFDNTLSRPCRVPLGKEVCFIATVRLATPQFLKEMCIVDEPLEEFTSRHSLEWKFLFLDHRAPPIIGYLPFEVLGTSGYDYYHIDDLELLARCHQHLMQFGKGKSCCYRFLTKGQQWIWLQTHYYITYHQWNSKPEFIVCTHSVVSYADVRVERRQELALEDPPSEALHSSALKDKGSSLEPRQHFNALDVGASGLNTSHSPSASSRSSHKSSHTAMSEPTSTPTKLMAEASTPALPRSATLPQELPVPGLSQAATMPAPLPSPSSCDLTQQLLPQTVLQSTPAPMAQFSAQFSMFQTIKDQLEQRTRILQANIRWQQEELHKIQEQLCLVQDSNVQMFLQQPAVSLSFSSTQRPEAQQQLQQRSAAVTQPQLGAGPQLPGQISSAQVTSQHLLRESSVISTQGPKPMRSSQLMQSSGRSGSSLVSPFSSATAALPPSLNLTTPASTSQDASQCQPSPDFSHDRQLRLLLSQPIQPMMPGSCDARQPSEVSRTGRQVKYAQSQTVFQNPDAHPANSSSAPMPVLLMGQAVLHPSFPASQPSPLQPAQARQQPPQHYLQVQAPTSLHSEQQDSLLLSTYSQQPGTLGYPQPPPAQPQPLRPPRRVSSLSESSGLQQPPR

SEQ ID NO: 800638 - protein, 919 aa, Homo sapiens; identical to SEQ ID NO: 800637

SEQ ID NO: 800639 - protein, 919 aa, Homo sapiens; identical to SEQ ID NO: 800637

SEQ ID NO: 800640 - protein, 945 aa, Homo sapiens
FAARAAGLSQEPRDPRGCGPGAAAAEPGDPQPRRRRRRRQQLEQRLPPPPGRSSPRPLAASSPSGGGRRVSPAQSAPGPAGPLRPAPRKNCIENLMDEDEKDRAKRASRNKSEKKRRDQFNVLIKELSSMLPGNTRKMDKTTVLEKVIGFLQKHNEVSAQTEICDIQQDWKPSFLSNEEFTQLMLEALDGFIIAVTTDGSIIYVSDSITPLLGHLPSDVMDQNLLNFLPEQEHSEVYKILSSHMLVTDSPSPEYLKSDSDLEFYCHLLRGSLNPKEFPTYEYIKFVGNFRSYNNEGQSVLHSCPGGRDQVPQRRLCEATAVPSPSCNGFDNTLSRPCRVPLGKEVCFIATVRLATPQFLKEMCIVDEPLEEFTSRHSLEWKFLFLDHRAPPIIGYLPFEVLGTSGYDYYHIDDLELLARCHQHLMQFGKGKSCCYRFLTKGQQWIWLQTHYYITYHQWNSKPEFIVCTHSVVSYADVRVERRQELALEDPPSEALHSSALKDKGSSLEPRQHFNALDVGASGLNTSHSPSASSRSSHKSSHTAMSEPTSTPTKLMAEASTPALPRSATLPQELPVPGLSQAATMPAPLPSPSSCDLTQQLLPQTVLQSTPAPMAQFSAQFSMFQTIKDQLEQRTRILQANIRWQQEELHKIQEQLCLVQDSNVQMFLQQPAVSLSFSSTQRPEAQQQLQQRSAAVTQPQLGAGPQLPGQISSAQVTSQHLLRESSVISTQGPKPMRSSQLMQSSGRSGSSLVSPFSSATAALPPSLNLTTPASTSQDASQCQPSPDFSHDRQLRLLLSQPIQPMMPGSCDARQPSEVSRTGRQVKYAQSQTVFQNPDAHPANSSSAPMPVLLMGQAVLHPSFPASQPSPLQPAQARQQPPQHYLQVQAPTSLHSEQQDSLLLSTYSQQPGTLGYPQPPPAQPQPLRPPRRVSSLSESSGLQQPPR

SEQ ID NO: 800641 - protein, 873 aa, Homo sapiens
FAARAAGLSQEPRDPRGCGPGAAAAEPGDPQPRRRRRRRQQLEQRLPPPPGRSSPRPLAASSPSGGGRRVSPAQSAPGPAGPLRPAPRKNCIENLMDEDEKDRAKRASRNKSEKKRRDQFNVLIKELSSMLPGNTRKMDKTTVLEKVIGFLQKHNEVSAQTEICDIQQDWKPSFLSNEEFTQLMLEALDGFIIAVTTDGSIIYVSDSITPLLGHLPSDVMDQNLLNFLPEQEHSEVYKILSSHMLVTDSPSPEYLKSDSDLEFYCHLLRGSLNPKEFPTYEYIKFVGNFRSYNNVPSPSCNGFDNTLSRPCRVPLGKEVCFIATVRLATPQFLKEMCIVDEPLEEFTSRHSLEWKFLFLDHRAPPIIGYLPFEVLGTSGYDYYHIDDLELLARCHQHLMQFGKGKSCCYRFLTKGQQWIWLQTHYYITYHQWNSKPEFIVCTHSVVSYADVRVERRQELALEDPPSEALHSSALKDKGSSLEPRQHFNALDVGASGLNTSHSPSASSRSSHKSSHTAMSEPTSTPTKLMAEASTPALPRSATLPQELPVPGLSQAATMPAPLPSPSSCDLTQQLLPQTVLQSTPAPMAQFSAQFSMFQTIKDQLEQRTRILQANIRWQQEELHKIQEQLCLVQDSNVQMFLQQPAVSLSFSSTQRPEAQQQLQQRSAAVTQPQLGAGPQLPGQISSAQVTSQHLLRESSVISTQDASQCQPSPDFSHDRQLRLLLSQPIQPMMPGSCDARQPSEVSRTGRQVKYAQSQTVFQNPDAHPANSSSAPMPVLLMGQAVLHPSFPASQPSPLQPAQARQQPPQHYLQVQAPTSLHSEQQDSLLLSTYSQQPGTLGYPQPPPAQPQPLRPPRRVSSLSESSGLQQPPR

SEQ ID NO: 800642 - protein, 563 aa, Homo sapiens
FAARAAGLSQEPRDPRGCGPGAAAAEPGDPQPRRRRRRRQQLEQRLPPPPGRSSPRPLAASSPSGGGRRVSPAQSAPGPAGPLRPAPRKNCIENLMDEDEKDRAKRASRNKSEKKRRDQFNVLIKELSSMLPGNTRKMDKTTVLEKVIGFLQKHNEVSAQTEICDIQQDWKPSFLSNEEFTQLMLEALDGFIIAVTTDGSIIYVSDSITPLLGHLPSDVMDQNLLNFLPEQEHSEVYKILSSHMLVTDSPSPEYLKSDSDLEFYCHLLRGSLNPKEFPTYEYIKFVGNFRSYNNEGQSVLHSCPGGRDQVPQRRLCEATAVPSPSCNGFDNTLSRPCRVPLGKEVCFIATVRLATPQFLKEMCIVDEPLEEFTSRHSLEWKFLFLDHRAPPIIGYLPFEVLGTSGYDYYHIDDLELLARCHQHLMQFGKGKSCCYRFLTKGQQWIWLQTHYYITYHQWNSKPEFIVCTHSVVSYADVRVERRQELALEDPPSEALHSSALKDKGSSLEPRQHFNALDVGASGLNTSHSPSASSRSSHKSSHTAMSEPTSVAEPAHPAHDARVL

SEQ ID NO: 800643 - protein, 294 aa, Homo sapiens
MTPTSQAFLFCSQMFLQQPAVSLSFSSTQRPEAQQQLQQRSAAVTQPQLGAGPQLPGQISSAQVTSQHLLRESSVISTQGPKPMRSSQLMQSSGRSGSSLVSPFSSATAALPPSLNLTTPASTSQDASQCQPSPDFSHDRQLRLLLSQPIQPMMPGSCDARQPSEVSRTGRQVKYAQSQTVFQNPDAHPANSSSAPMPVLLMGQAVLHPSFPASQPSPLQPAQARQQPPQHYLQVQAPTSLHSEQQDSLLLSTYSQQPGTLGYPQPPPAQPQPLRPPRRVSSLSESSGLQQPPR

SEQ ID NO: 800644 - protein, 716 aa, Homo sapiens
FAARAAGLSQEPRDPRGCGPGAAAAEPGDPQPRRRRRRRQQLEQRLPPPPGRSSPRPLAASSPSGGGRRVSPAQSAPGPAGPLRPAPRKNCIENLMDEDEKDRAKRASRNKSEKKRRDQFNVLIKELSSMLPGNTRKMDKTTVLEKVIGFLQKHNEVSAQTEICDIQQDWKPSFLSNEEFTQLMLEALDGFIIAVTTDGSIIYVSDSITPLLGHLPSDVMDQNLLNFLPEQEHSEVYKILSSHMLVTDSPSPEYLKSDSDLEFYCHLLRGSLNPKEFPTYEYIKFVGNFRSYNNVPSPSCNGFDNTLSRPCRVPLGKEVCFIATVRLATPQFLKEMCIVDEPLEEFTSRHSLEWKFLFLDHRAPPIIGYLPFEVLGTSGYDYYHIDDLELLARCHQHLMQFGKGKSCCYRFLTKGQQWIWLQTHYYITYHQWNSKPEFIVCTHSVVSYADVRVERRQELALEDPPSEALHSSALKDKGSSLEPRQHFNALDVGASGLNTSHSPSASSRSSHKSSHTAMSEPTSTPTKLMAEASTPALPRSATLPQELPVPGLSQAATMPAPLPSPSSCDLTQQLLPQTVLQSTPAPMAQFSAQFSMFQTIKDQLEQRTRILQANIRWQQEELHKIQEQLCLVQDSNVQMFLQQPAVSLSFSSTQRPEAQQQLQQRSAAVTQPQLGAGPQLPGQISSAQVTSQHLLRESSVISTQVNVLLASFTPCL

SEQ ID NO: 800645 - protein, 390 aa, Homo sapiens
FAARAAGLSQEPRDPRGCGPGAAAAEPGDPQPRRRRRRRQQLEQRLPPPPGRSSPRPLAASSPSGGGRRVSPAQSAPGPAGPLRPAPRKNCIENLMDEDEKDRAKRASRNKSEKKRRDQFNVLIKELSSMLPGNTRKMDKTTVLEKVIGFLQKHNEVSAQTEICDIQQDWKPSFLSNEEFTQLMLEALDGFIIAVTTDGSIIYVSDSITPLLGHLPSDVMDQNLLNFLPEQEHSEVYKILSSHMLVTDSPSPEYLKSDSDLEFYCHLLRGSLNPKEFPTYEYIKFVGNFRSYNNVPSPSCNGFDNTLSRPCRVPLGKEVCFIATVRLATPQFLKEMCIVDEPLEEFTSRHSLEWKFLFLDHRAPPIIGYLPFEVLGTSGYDYSGRYRARS

SEQ ID NO: 800646 - protein, 51 aa, Homo sapiens
MFFGSTLKFSAQFSMFQTIKDQLEQRTRILQANIRWQQEELHKIQEQLCLV

SEQ ID NO: 800647 - protein, 179 aa, Homo sapiens
CLMCVFQDKGSSLEPRQHFNALDVGASGLNTSHSPSASSRSSHKSSHTAMSEPTSTPTKLMAEASTPALPRSATLPQELPVPGLSQAATMPAPLPSPSSCDLTQQLLPQTVLQSTPAPMAQFSAQFSMFQTIKDQLEQRTRILQANIRWQQEELHKIQEQLCLVQDSNVQAHLLTASTY

SEQ ID NO: 800648 - protein, 919 aa, Homo sapiens; identical to SEQ ID NO: 800637

SEQ ID NO: 800649 - protein, 865 aa, Homo sapiens
FAARAAGLSQEPRDPRGCGPGAAAAEPGDPQPRRRRRRRQQLEQRLPPPPGRSSPRPLAASSPSGGGRRVSPAQSAPGPAGPLRPAPRKNCIENLMDEDEKDRAKRASRNKSEKKRRDQFNVLIKELSSMLPGNTRKMDKTTVLEKVIGFLQKHNEVSAQTEICDIQQDWKPSFLSNEEFTQLMLEALDGFIIAVTTDGSIIYVSDSITPLLGHLPSDVMDQNLLNFLPEQEHSEVYKILSSHMLVTDSPSPEYLKSDSDLEFYCHLLRGSLNPKEFPTYEYIKFVGNFRSYNNVPSPSCNGFDNTLSRPCRVPLGKEVCFIATVRLATPQFLKEMCIVDEPLEEFTSRHSLEWKFLFLDHRAPPIIGYLPFEVLGTSGYDYYHIDDLELLARCHQHLMQFGKGKSCCYRFLTKGQQWIWLQTHYYITYHQWNSKPEFIVCTHSVVSYADVRVERRQELALEDPPSEALHSSALKDKGSSLEPRQHFNALDVGASGLNTSHSPSASSRSSHKSSHTAMSEPTSTPTKLMAEASTPALPRSATLPQELPVPGLSQAATMPAPLPSPSSCDLTQQLLPQTVLQSTPAPMAQFSAQFSMFQTIKDQLEQRTRILQANIRWQQEELHKIQEQLCLVQDSNVQMFLQQPAVSLSFSSTQRPEAQQQLQQRSAAVTQPQLGAGPQLPGQISSAQVTSQHLLRESSVISTQGPKPMRSSQLMQSSGRSGSSLVSPFSSATAALPPSLNLTTPASTSQDASQCQPSPDFSHDRQLRLLLSQPIQPMMPGSCDARQPSEVSRTGRQVKYAQSQTVFQNPDAHPANSSSAPMPVLLMGQAVLHPSFPASQPSPLQPAQARQQPPQHYLQVLGHTL

SEQ ID NO: 800650 - protein, 816 aa, Homo sapiens
FAARAAGLSQEPRDPRGCGPGAAAAEPGDPQPRRRRRRRQQLEQRLPPPPGRSSPRPLAASSPSGGGRRVSPAQSAPGPAGPLRPAPRKNCIENLMDEDEKDRAKRASRNKSEKKRRDQFNVLIKELSSMLPGNTRKMDKTTVLEKVIGFLQKHNEVSAQTEICDIQQDWKPSFLSNEEFTQLMLEALDGFIIAVTTDGSIIYVSDSITPLLGHLPSDVMDQNLLNFLPEQEHSEVYKILSSHMLVTDSPSPEYLKSDSDLEFYCHLLRGSLNPKEFPTYEYIKFVGNFRSYNNVMQFGKGKSCCYRFLTKGQQWIWLQTHYYITYHQWNSKPEFIVCTHSVVSYADVRVERRQELALEDPPSEALHSSALKDKGSSLEPRQHFNALDVGASGLNTSHSPSASSRSSHKSSHTAMSEPTSTPTKLMAEASTPALPRSATLPQELPVPGLSQAATMPAPLPSPSSCDLTQQLLPQTVLQSTPAPMAQFSAQFSMFQTIKDQLEQRTRILQANIRWQQEELHKIQEQLCLVQDSNVQMFLQQPAVSLSFSSTQRPEAQQQLQQRSAAVTQPQLGAGPQLPGQISSAQVTSQHLLRESSVISTQGPKPMRSSQLMQSSGRSGSSLVSPFSSATAALPPSLNLTTPASTSQDASQCQPSPDFSHDRQLRLLLSQPIQPMMPGSCDARQPSEVSRTGRQVKYAQSQTVFQNPDAHPANSSSAPMPVLLMGQAVLHPSFPASQPSPLQPAQARQQPPQHYLQVQAPTSLHSEQQDSLLLSTYSQQPGTLGYPQPPPAQPQPLRPPRRVSSLSESSGLQQPPR

SEQ ID NO: 800651 - protein, 964 aa, Homo sapiens
  misc_feature (550)..(550): Xaa can be any naturally occurring amino acid
FAARAAGLSQEPRDPRGCGPGAAAAEPGDPQPRRRRRRRQQLEQRLPPPPGRSSPRPLAASSPSGGGRRVSPAQSAPGPAGPLRPAPRKNCIENLMDEDEKDRAKRASRNKSEKKRRDQFNVLIKELSSMLPGNTRKMDKTTVLEKVIGFLQKHNEVSAQTEICDIQQDWKPSFLSNEEFTQLMLEALDGFIIAVTTDGSIIYVSDSITPLLGHLPSDVMDQNLLNFLPEQEHSEVYKILSSHMLVTDSPSPEYLKSDSDLEFYCHLLRGSLNPKEFPTYEYIKFVGNFRSYNNEGQSVLHSCPGGRDQVPQRRLCEATAVPSPSCNGFDNTLSRPCRVPLGKEVCFIATVRLATPQFLKEMCIVDEPLEEFTSRHSLEWKFLFLDHRAPPIIGYLPFEVLGTSGYDYYHIDDLELLARCHQHLMQFGKGKSCCYRFLTKGQQWIWLQTHYYITYHQWNSKPEFIVCTHSVVSYADVRVERRQELALEDPPSEALHSSALKDKGSSLEPRQHFNALDVGASGLNTSHSPSASSRSSHKSSHTAMSEPTCXPNFGFSKGKKNPPKPPKPTPTKLMAEASTPALPRSATLPQELPVPGLSQAATMPAPLPSPSSCDLTQQLLPQTVLQSTPAPMAQFSAQFSMFQTIKDQLEQRTRILQANIRWQQEELHKIQEQLCLVQDSNVQMFLQQPAVSLSFSSTQRPEAQQQLQQRSAAVTQPQLGAGPQLPGQISSAQVTSQHLLRESSVISTQGPKPMRSSQLMQSSGRSGSSLVSPFSSATAALPPSLNLTTPASTSQDASQCQPSPDFSHDRQLRLLLSQPIQPMMPGSCDARQPSEVSRTGRQVKYAQSQTVFQNPDAHPANSSSAPMPVLLMGQAVLHPSFPASQPSPLQPAQARQQPPQHYLQVQAPTSLHSEQQDSLLLSTYSQQPGTLGYPQPPPAQPQPLRPPRRVSSLSESSGLQQPPR

SEQ ID NO: 800652 - protein, 238 aa, Homo sapiens
EVSWRDGPGLSPSLTFLIEMMLQGPKPMRSSQLMQSSGRSGSSLVSPFSSATAALPPSLNLTTPASTSQDASQCQPSPDFSHDRQLRLLLSQPIQPMMPGSCDARQPSEVSRTGRQVKYAQSQTVFQNPDAHPANSSSAPMPVLLMGQAVLHPSFPASQPSPLQPAQARQQPPQHYLQVQAPTSLHSEQQDSLLLSTYSQQPGTLGYPQPPPAQPQPLRPPRRVSSLSESSGLQQPPR

SEQ ID NO: 800653 - protein, 207 aa, Homo sapiens
FAARAAGLSQEPRDPRGCGPGAAAAEPGDPQPRRRRRRRQQLEQRLPPPPGRSSPRPLAASSPSGGGRRVSPAQSAPGPAGPLRPAPRKNCIENLMDEDEKDRAKRASRNKSEKKRRDQFNVLIKELSSMLPGNTRKMDKTTVLEKVIGFLQKHNEVSAQTEICDIQQDWKPSFLSNEEFTQLMLESHFRDCEESRCHVLVARMFPF

SEQ ID NO: 800654 - protein, 385 aa, Homo sapiens
FAARAAGLSQEPRDPRGCGPGAAAAEPGDPQPRRRRRRRQQLEQRLPPPPGRSSPRPLAASSPSGGGRRVSPAQSAPGPAGPLRPAPRKNCIENLMDEDEKDRAKRASRNKSEKKRRDQFNVLIKELSSMLPGNTRKMDKTTVLEKVIGFLQKHNEVSAQTEICDIQQDWKPSFLSNEEFTQLMLEALDGFIIAVTTDGSIIYVSDSITPLLGHLPSDVMDQNLLNFLPEQEHSEVYKILSSHMLVTDSPSPEYLKSDSDLEFYCHLLRGSLNPKEFPTYEYIKFVGNFRSYNNVMQFGKGKSCCYRFLTKGQQWIWLQTHYYITYHQWNSKPEFIVCTHSVVSYADVRVERRQELALEDPPSEALHSSALKDKPKPGTAQRELV

SEQ ID NO: 800655 - protein, 122 aa, Homo sapiens
MVPGPPESVVRFFLWFCFLLPPTRKASCDPRDLKSCNRPCVWSRLLKPNSSLSNLETAYFPQNLRFLRPWYFSRSHLNYHQKAPARWEWLYSIYRKGTKAQRRNVLRSPCAPPQPSWPCSVI

SEQ ID NO: 800656 - protein, 109 aa, Homo sapiens [sequence omitted]

SEQ ID NO: 800657 - protein, 122 aa, Homo sapiens; identical to SEQ ID NO: 800655

SEQ ID NO: 800658 - protein, 273 aa, Homo sapiens
CQSLDSYDAMNILPKKSWHVRNKDNVARVRRDEAQAREEEKERERRVLLAQQEARTEFLRKKARHQNSLPELEAAEAGAPGSGPVDLFRELLEEGKGVIRGNKEYEEEKRQEKERQEKALGILTYLGQSAAEAQTQPPWYQLPPGRGGPPPGPAPDEKIKSRLDPLREMQKHLGKKRQHGGDEGSRSRKEKEGSEKQRPKEPPSLDQLRAERLRREAAERSRAEALLARVQGRALQEGQPEEDETDDRRRRYNSQFNPQLARRPRQQDPHLTH

SEQ ID NO: 800659 - protein, 703 aa, Homo sapiens
MLRGRSLSVTSLGGLPQWEVEELPVEELLLFEVAWEVTNKVGGIYTVIQTKAKTTADEWGENYFLIGPYFEHNMKTQVEQCEPVNDAVRRAVDAMNKHGCQVHFGRWLIEGSPYVVLFDIGYSAWNLDRWKGDLWEACSVGIPYHDREANDMLIFGSLTAWFLKEVTDHADGKYVVAQFHEWQAGIGLILSRARKLPIATIFTTHATLLGRYLCAANIDFYNHLDKFNIDKEAGERQIYHRYCMERASVHCAHVFTTVSEITAIEAEHMLKRKPDVVTPNGLNVKKFSAVHEFQNLHAMYKARIQDFVRGHFYGHLDFDLEKTLFLFIAGRYEFSNKGADIFLESLSRLNFLLRMHKSDITVMVFFIMPAKTNNFNVETLKGQAVRKQLWDVAHSVKEKFGKKLYDALLRGEIPDLNDILDRDDLTIMKRAIFSTQRQSLPPVTTHNMIDDSTDPILSTIRRIGLFNNRTDRVKVILHPEFLSSTSPLLPMDYEEFVRGCHLGVFPSYYEPWGYTPAECTVMGIPSVTTNLSGFGCFMQEHVADPTAYGIYIVDRRFRSPDDSCNQLTKFLYGFCKQSRRQRIIQRNRTERLSDLLDWRYLGRYYQHARHLTLSRAFPDKFHVELTSPPTTEGFKYPRPSSVPPSPSGSQASSPQSSDVEDEVEDERYDEEEEAERDRLNIKSPFSLSHVPHGKKKLHGEYKN

SEQ ID NO: 800660 - protein, 690 aa, Homo sapiens
MLRGRSLSVTSLGGLPQWEVEELPVEELLLFEVAWEVTNKVGGIYTVIQTKAKTTADEWGENYFLIGPYFEHNMKTQVEQCEPVNDAVRRAVDAMNKHGCQVHFGRWLIEGSPYVVLFDIGYSAWNLDRWKGDLWEACSVGIPYHDREANDMLIFGSLTAWFLKEVTDHADGKYVVAQFHEWQAGIGLILSRARKLPIATIFTTHATLLGRYLCAANIDFYNHLDKFNIDKEAGERQIYHRYCMERASVHCAHVFTTVSEITAIEAEHMLKRKPSAVHEFQNLHAMYKARIQDFVRGHFYGHLDFDLEKTLFLFIAGRYEFSNKGADIFLESLSRLNFLLRMHKSDITVMVFFIMPAKTNNFNVETLKGQAVRKQLWDVAHSVKEKFGKKLYDALLRGEIPDLNDILDRDDLTIMKRAIFSTQRQSLPPVTTHNMIDDSTDPILSTIRRIGLFNNRTDRVKVILHPEFLSSTSPLLPMDYEEFVRGCHLGVFPSYYEPWGYTPAECTVMGIPSVTTNLSGFGCFMQEHVADPTAYGIYIVDRRFRSPDDSCNQLTKFLYGFCKQSRRQRIIQRNRTERLSDLLDWRYLGRYYQHARHLTLSRAFPDKFHVELTSPPTTEGFKYPRPSSVPPSPSGSQASSPQSSDVEDEVEDERYDEEEEAERDRLNIKSPFSLSHVPHGKKKLHGEYKN

SEQ ID NO: 800661 - protein, 358 aa, Homo sapiens
MLRGRSLSVTSLGGLPQWEVEELPVEELLLFEVAWEVTNKVGGIYTVIQTKAKTTADEWGENYFLIGPYFEHNMKTQVEQCEPVNDAVRRAVDAMNKHGCQVHFGRWLIEGSPYVVLFDIGYSAWNLDRWKGDLWEACSVGIPYHDREANDMLIFGSLTAWFLKEVTDHADGKYVVAQFHEWQAGIGLILSRARKLPIATIFTTHATLLGRYLCAANIDFYNHLDKFNIDKEAGERQIYHRYCMERASVHCAHVFTTVSEITAIEAEHMLKRKPDVVTPNGLNVKKFSAVHEFQNLHAMYKARIQDFVRGHFYGHLDFDLEKTLFLFIAGRYEFSNKGADIFLESLSRLNFLLRVRKL

SEQ ID NO: 800662 - protein, 703 aa, Homo sapiens; identical to SEQ ID NO: 800659

SEQ ID NO: 800663 - protein, 366 aa, Homo sapiens
MPMISVLGKMFLWQREGPGGRWTCQTSRRVSSDPAWAVEWIELPRGLSLSSLGSARTLRGWSRSSRPSSVDSQDLPEVNVGDTVAMLPKSRRALTIQEIAALARSSLHGISQVVKDHVTKPTAMAQGRVAHLIEWKGWSKPSDSPAALESAFSSYSDLSEGEQEARFAAGVAEQFAIAEAKLRAWSSVDGEDSTDDSYDEDFAGGMDTDMAGQLPLGPHLQDLFTGHRFSRPVRQGSVEPESDCSQTVSPDTLCSSLCSLEDGLLGSPARLASQLLGDELLLAKLPPSRESAFRSLGPLEAQDSLYNSPLTESCLSPAEEEPAPCKDCQPLCPPLTGSWERQRQASDLASSGVVSLDEDEAEPEEQ

SEQ ID NO: 800664 - protein, 281 aa, Homo sapiens
MLPKSRRALTIQEIAALARSSLHGISQVVKDHVTKPTAMAQGRVAHLIEWKGWSKPSDSPAALESAFSSYSDLSEGEQEARFAAGVAEQFAIAEAKLRAWSSVDGEDSTDDSYDEDFAGGMDTDMAGQLPLGPHLQDLFTGHRFSRPVRQGSVEPESDCSQTVSPDTLCSSLCSLEDGLLGSPARLASQLLGDELLLAKLPPSRESAFRSLGPLEAQDSLYNSPLTESCLSPAEEEPAPCKDCQPLCPPLTGSWERQRQASDLASSGVVSLDEDEAEPEEQ

SEQ ID NO: 800665 - protein, 281 aa, Homo sapiens; identical to SEQ ID NO: 800664

SEQ ID NO: 800666 - protein, 324 aa, Homo sapiens
AKRGRESKLRNTQQVLPRLGLAGGYWRHPGGPVSQVNVGDTVAMLPKSRRALTIQEIAALARSSLHGISQVVKDHVTKPTAMAQGRVAHLIEWKGWSKPSDSPAALESAFSSYSDLSEGEQEARFAAGVAEQFAIAEAKLRAWSSVDGEDSTDDSYDEDFAGGMDTDMAGQLPLGPHLQDLFTGHRFSRPVRQGSVEPESDCSQTVSPDTLCSSLCSLEDGLLGSPARLASQLLGDELLLAKLPPSRESAFRSLGPLEAQDSLYNSPLTESCLSPAEEEPAPCKDCQPLCPPLTGSWERQRQASDLASSGVVSLDEDEAEPEEQ

SEQ ID NO: 800667 - protein, 281 aa, Homo sapiens
MPMISVLGKMFLWQREGPGGRWTCQTSRRVSSDPAWAVEWIELPRGLSLSSLGSARTLRGWSRSSRPSSVDSQDLPEVNVGDTVAMLPKSRRALTIQEIAALARSSLHGISQVVKDHVTKPTAMAQGRVAHLIEWKGWSKPSDSPAALESAFSSYSDLSEGEQEARFAAGVAEQFAIAEAKLRAWSSVDGEDSTDDSYDEDFAGGMDTGEGHPGLGLWWTHLIDLGILSEPHPEHSQPLQGEGEGQTQSRQAWTLQGQEGCPHSWVGNEQTEMDSFLSHRC

SEQ ID NO: 800668 - protein, 281 aa, Homo sapiens; identical to SEQ ID NO: 800664

SEQ ID NO: 800669 - protein, 204 aa, Homo sapiens
MHSVPATGVAEQFAIAEAKLRAWSSVDGEDSTDDSYDEDFAGGMDTDMAGQLPLGPHLQDLFTGHRFSRPVRQGSVEPESDCSQTVSPDTLCSSLCSLEDGLLGSPARLASQLLGDELLLAKLPPSRESAFRSLGPLEAQDSLYNSPLTESCLSPAEEEPAPCKDCQPLCPPLTGSWERQRQASDLASSGVVSLDEDEAEPEEQ

SEQ ID NO: 800670 - protein, 281 aa, Homo sapiens; identical to SEQ ID NO: 800664

SEQ ID NO: 800671 - protein, 288 aa, Homo sapiens
EGSQKDCYRDTMLDSYENTVPQGSFLQLSMMPQRAGNDPPGVSNASEMEMEISNMREKFLMSVTKLVESKSYNSKVFSKEKYFQTIKEVKEAKEKGKKSSRDYRRAAKYDVISVQGTEKLIEATHGERDRIRYYVHKEELFDILHDTHLSIGHGGRTRMLKELQGKYGNVTKEVIVLYLTLCKQCHQKNPVPKRGLAPKPMTFKDIDSTCQVEILDMQSSADGEFKFILYYQDHSTKFIILRPLRTKQAHEVVSVLLDIFTILGTPSVLDSDSGVEFTNQVVHELNEL

SEQ ID NO: 800672 - protein, 258 aa, Homo sapiens
MPQRAGNDPPGVSNASEMEMEISNMREKFLMSVTKLVESKSYNSKVFSKEKYFQTIKEVKEAKEKGKKSSRDYRRAAKYDVISVQGTEKLIEATHGERDRIRYYVHKEELFDILHDTHLSIGHGGRTRMLKELQGKYGNVTKEVIVLYLTLCKQCHQKNPVPKRGLAPKPMTFKDIDSTCQVEILDMQSSADGEFKFILYYQDHSTKFIILRPLRTKQAHEVVSVLLDIFTILGTPSVLDSDSGVEFTNQVVHELNEL

SEQ ID NO: 800673 - protein, 258 aa, Homo sapiens; identical to SEQ ID NO: 800672

SEQ ID NO: 800674 - protein, 678 aa, Homo sapiens
GQILGRMEEHTEAGSAPEMGAQKALIDNPADILVIAAYFLLVIGVGLWSMCRTNRGTVGGYFLAGRSMVWWPVGASLFASNIGSGHFVGLAGTGAASGLAVAGFEWNALFVVLLLGWLFAPVYLTAGVITMPQYLRKRFGGRRIRLYLSVLSLFLYIFTKISVDMFSGAVFIQQALGWNIYASVIALLGITMIYTVTGGLAALMYTDTVQTFVILGGACILMGYAFHEVGGYSGLFDKYLGAATSLTVSEDPAVGNISSFCYRPRPDSYHLLRHPVTGDLPWPALLLGLTIVSGWYWCSDQVIVQRCLAGKSLTHIKAGCILCGYLKLTPMFLMVMPGMISRILYPDEVACVVPEVCRRVCGTEVGCSNIAYPRLVVKLMPNGLRGLMLAVMLAALMSSLASIFNSSSTLFTMDIYTRLRPRAGDRELLLVGRLWVVFIVVVSVAWLPVVQAAQGGQLFDYIQAVSSYLAPPVSAVFVLALFVPRVNEQGAFWGLIGGLLMGLARLIPEFSFGSGSCVQPSACPAFLCGVHYLYFAIVLFFCSGLLTLTVSLCTAPIPRKHLHRLVFSLRHSKEEREDLDADEQQGSSLPVQNGCPESAMEMNEPQAPAPSLFRQCLLWFCGMSRGGVGSPPPLTQEEAAAAARRLEDISEDPSWARVVNLNALLMMAVAVFLWGFYA

SEQ ID NO: 800675 - protein, 548 aa, Homo sapiens
MPQYLRKRFGGRRIRLYLSVLSLFLYIFTKISVDMFSGAVFIQQALGWNIYASVIALLGITMIYTVTGGLAALMYTDTVQTFVILGGACILMGYAFHEVGGYSGLFDKYLGAATSLTVSEDPAVGNISSFCYRPRPDSYHLLRHPVTGDLPWPALLLGLTIVSGWYWCSDQVIVQRCLAGKSLTHIKAGCILCGYLKLTPMFLMVMPGMISRILYPDEVACVVPEVCRRVCGTEVGCSNIAYPRLVVKLMPNGLRGLMLAVMLAALMSSLASIFNSSSTLFTMDIYTRLRPRAGDRELLLVGRLWVVFIVVVSVAWLPVVQAAQGGQLFDYIQAVSSYLAPPVSAVFVLALFVPRVNEQGAFWGLIGGLLMGLARLIPEFSFGSGSCVQPSACPAFLCGVHYLYFAIVLFFCSGLLTLTVSLCTAPIPRKHLHRLVFSLRHSKEEREDLDADEQQGSSLPVQNGCPESAMEMNEPQAPAPSLFRQCLLWFCGMSRGGVGSPPPLTQEEAAAAARRLEDISEDPSWARVVNLNALLMMAVAVFLWGFYA

SEQ ID NO: 800676 - protein, 282 aa, Homo sapiens
MPQYLRKRFGGRRIRLYLSVLSLFLYIFTKISVDMFSGAVFIQQALGWNIYASVIALLGITMIYTVTGGLAALMYTDTVQTFVILGGACILMGYAFHEVGGYSGLFDKYLGAATSLTVSEDPAVGNISSFCYRPRPDSYHLLRHPVTGDLPWPALLLGLTIVSGWYWCSDQVIVQRCLAGKSLTHIKAGCILCGYLKLTPMFLMVMPGMISRILYPDEVACVVPEVCRRVWMSMVKSVLLLLKMEASEDMSAASMTASMSPRRPLGMSFTTSRGMAMLEQVV

SEQ ID NO: 800677 - protein, 155 aa, Homo sapiens
MPQYLRKRFGGRRIRLYLSVLSLFLYIFTKISVDMFSGAVFIQQALGWNIYASVIALLGITMIYTVTGGLAALMYTDTVQTFVILGGACILMGYAFHEEKYKYAFEMTSFKEKSPELPTPVVGYYSKTTQEPKLSYCLIKCNHSSFLKTHSCYSH

SEQ ID NO: 800678 - protein, 667 aa, Homo sapiens
MRPGGLVGSVPLSPCAEPTEALWAATSWQDAAWCGGRETGWAGNGRGLEKQPCSLPPLATQVGASLFASNIGSGHFVGLAGTGAASGLAVAGFEWNALFVVLLLGWLFAPVYLTAGVITMPQYLRKRFGGRRIRLYLSVLSLFLYIFTKISVDMFSGAVFIQQALGWNIYASVIALLGITMIYTVTGGLAALMYTDTVQTFVILGGACILMGYAFHEVGGYSGLFDKYLGAATSLTVSEDPAVGNISSFCYRPRPDSYHLLRHPVTGDLPWPALLLGLTIVSGWYWCSDQVIVQRCLAGKSLTHIKAGCILCGYLKLTPMFLMVMPGMISRILYPDEVACVVPEVCRRVCGTEVGCSNIAYPRLVVKLMPNGLRGLMLAVMLAALMSSLASIFNSSSTLFTMDIYTRLRPRAGDRELLLVGRLWVVFIVVVSVAWLPVVQAAQGGQLFDYIQAVSSYLAPPVSAVFVLALFVPRVNEQGAFWGLIGGLLMGLARLIPEFSFGSGSCVQPSACPAFLCGVHYLYFAIVLFFCSGLLTLTVSLCTAPIPRKHLHRLVFSLRHSKEEREDLDADEQQGSSLPVQNGCPESAMEMNEPQAPAPSLFRQCLLWFCGMSRGGVGSPPPLTQEEAAAAARRLEDISEDPSWARVVNLNALLMMAVAVFLWGFYA

SEQ ID NO: 800679 - protein, 629 aa, Homo sapiens
MCRTNRGTVGGYFLAGRSMVWWPVGASLFASNIGSGHFVGLAGTGAASGLAVAGFEWNALFVVLLLGWLFAPVYLTAGVITMPQYLRKRFGGRRIRLYLSVLSLFLYIFTKISVDMFSGAVFIQQALGWNIYASVIALLGITMIYTVTGGLAALMYTDTVQTFVILGGACILMGYAFHEVGGYSGLFDKYLGAATSLTVSEDPAVGNISSFCYRPRPDSYHLLRHPVTGDLPWPALLLGLTIVSGWYWCSDQVIVQRCLAGKSLTHIKAGCILCGYLKLTPMFLMVMPGMISRILYPDEVACVVPEVCRRVCGTEVGCSNIAYPRLVVKLMPNGLRGLMLAVMLAALMSSLASIFNSSSTLFTMDIYTRLRPRAGDRELLLVGRLWVVFIVVVSVAWLPVVQAAQGGQLFDYIQAVSSYLAPPVSAVFVLALFVPRVNEQGAFWGLIGGLLMGLARLIPEFSFGSGSCVQPSACPAFLCGVHYLYFAIVLFFCSGLLTLTVSLCTAPIPRKHLHRLVFSLRHSKEEREDLDADEQQGSSLPVQNGCPESAMEMNEPQAPAPSLFRQCLLWFCGMSRGGVGSPPPLTQEEAAAAARRLEDISEDPSWARVVNLNALLMMAVAVFLWGFYA

SEQ ID NO: 800680 - protein, 199 aa, Homo sapiens
MFLMVMPGMISRILYPGNIPAPPLSCASNRAPVAQFRHPPKTRQFGPGVPPPSGGRTPPLLGFPVPTSWDSQTRPRPNGAVASLWQDEVACVVPEVCRRVCGTEVGCSNIAYPRLVVKLMPNGKGSPGPQAQARCGARCWEGSSLAQLQPPWTPSGPSLTAAVRPAGLRGLMLAVMLAALMSSLASIFNSSSTLFTMDI

SEQ ID NO: 800681 - protein, 780 aa, Homo sapiens
MKPGATGESDLAEVLPQHKFDSKSLEAYLNQHLSGFGAEREATLTIAQYRAGKSNPTFYLQKGFQTYVLRKKPPGSLLPKAHQIDREFKVQKALFSIGFPVPKPILYCSDTSVIGTEFYVMEHVQGRIFRDLTIPGLSPAERSAIYVATVETLAQLHSLNIQSLQLEGYGIGAGYCKRQVSTWTKQYQAAAHQDIPAMQQLSEWLMKNLPDNDNEENLIHGDFRLDNIVFHPKECRVIAVLDWELSTIGHPLSDLAHFSLFYFWPRTVPMINQGSYSENSGIPSMEELISIYCRCRGINSILPNWNFFLALSYFKMAGIAQGVYSRYLLGNNSSEDSFLFANIVQPLAETGLQLSKRTFSTVLPQIDTTGQLFVQTRKGQEVLIKVKHFMKQHILPAEKEVTEFYVQNENSVDKWGKPLVIDKLKEMAKVEGLWNLFLPAVSGLSHVDYALIAEETGKCFFAPDVFNCQAPDTGNMEVLHLYGSEEQKKQWLEPLLQGNITSCFCMTEPDVASSDATNIECSIQRDEDSYVINGKKWWSSGAGNPKCKIAIVLGRTQNTSLSRHKQHSMILVPMNTPGVKIIRPLSVFGYTDNFHGGHFEIHFNQVRVPATNLILGEGRGFEISQGRLGPGRIHHCMRTVGLAERALQIMCERATQRIAFKKKLYAHEVVAHWIAESRIAIEKIRLLTLKAAHSMDTLGSAGAKKEIAMIKVAAPRAVSKIVDWAIQVCGGAGVSQDYPLANMYAITRVLRLADGPDEVHLSAIATMELRDQAKRLTAKI

SEQ ID NO: 800682 - protein, 660 aa, Homo sapiens
MEHVQGRIFRDLTIPGLSPAERSAIYVATVETLAQLHSLNIQSLQLEGYGIGAGYCKRQVSTWTKQYQAAAHQDIPAMQQLSEWLMKNLPDNDNEENLIHGDFRLDNIVFHPKECRVIAVLDWELSTIGHPLSDLAHFSLFYFWPRTVPMINQGSYSENSGIPSMEELISIYCRCRGINSILPNWNFFLALSYFKMAGIAQGVYSRYLLGNNSSEDSFLFANIVQPLAETGLQLSKRTFSTVLPQIDTTGQLFVQTRKGQEVLIKVKHFMKQHILPAEKEVTEFYVQNENSVDKWGKPLVIDKLKEMAKVEGLWNLFLPAVSGLSHVDYALIAEETGKCFFAPDVFNCQAPDTGNMEVLHLYGSEEQKKQWLEPLLQGNITSCFCMTEPDVASSDATNIECSIQRDEDSYVINGKKWWSSGAGNPKCKIAIVLGRTQNTSLSRHKQHSMILVPMNTPGVKIIRPLSVFGYTDNFHGGHFEIHFNQVRVPATNLILGEGRGFEISQGRLGPGRIHHCMRTVGLAERALQIMCERATQRIAFKKKLYAHEVVAHWIAESRIAIEKIRLLTLKAAHSMDTLGSAGAKKEIAMIKVAAPRAVSKIVDWAIQVCGGAGVSQDYPLANMYAITRVLRLADGPDEVHLSAIATMELRDQAKRLTAKI

SEQ ID NO: 800683 - protein, 563 aa, Homo sapiens
MKPGATGESDLAEVLPQHKFDSKSLEAYLNQHLSGFGAEREATLTIAQYRAGKSNPTFYLQKGFQTYVLRKKPPGSLLPKAHQIDREFKVQKALFSIGFPVPKPILYCSDTSVIGTEFYVMEHVQGRIFRDLTIPGLSPAERSAIYVATVETLAQLHSLNIQSLQLEGYGIGAGYCKRQVSTWTKQYQAAAHQDIPAMQQLSEWLMKNLPDNDNEENLIHGDFRLDNIVFHPKECRVIAVLDWELSTIGHPLSDLAHFSLFYFWPRTVPMINQGSYSENSGIPSMEELISIYCRCRGINSILPNWNFFLALSYFKMAGIAQGVYSRYLLGNNSSEDSFLFANIVQPLAETGLQLSKRTFSTVLPQIDTTGQLFVQTRKGQEVLIKVKHFMKQHILPAEKEVTEFYVQNENSVDKWGKPLVIDKLKEMAKVEGLWNLFLPAVSGLSHVDYALIAEETGKCFFAPDVFNCQAPDTGNMEVLHLYGSEEQKKQWLEPLLQGNITSCFCMTEPDVASSDATNIECSIQRDEDSYVINGKKWWSSGAGNPKCKIAIVLGRTQNTSLSR

SEQ ID NO: 800684 - protein, 563 aa, Homo sapiens; identical to SEQ ID NO: 800683

SEQ ID NO: 800685 - protein, 563 aa, Homo sapiens; identical to SEQ ID NO: 800683

SEQ ID NO: 800686 - protein, 546 aa, Homo sapiens
MKPGATGESDLAEVLPQHKFDSKSLEAYLNQHLSGFGAEREATLTIAQYRAGKSNPTFYLQKGFQTYVLRKKPPGSLLPKAHQIDREFKVQKALFSIGFPVPKPILYCSDTSVIGTEFYVMEHVQGRIFRDLTIPGLSPAERSAIYVATVETLAQLHSLNIQSLQLEGYGIGAGYCKRQVSTWTKQYQAAAHQDIPAMQQLSEWLMKNLPDNDNEENLIHGDFRLDNIVFHPKECRVIAVLDWELSTIGHPLSDLAHFSLFYFWPRTVPMINQGSYSENSGIPSMEELISIYCRCRGINSILPNWNFFLALSYFKMAGIAQGVYSRYLLGNNSSEDSFLFANIVQPLAETGLQLSKRTFSTVLPQIDTTGQLFVQTRKGQEVLIKVKHFMKQHILPAEKEVTEFYVQNENSVDKWGKPLVIDKLKEMAKVEGLWNLFLPAVSGLSHVDYALIAEETGKCFFAPDVFNCQAPDTGNMEVLHLYGSEEQKKQWLEPLLQGNITSCFCMTEPDVASSDATNIECSIQRDEDSYVINGKKWWSSAKKRRL

SEQ ID NO: 800687 - protein, 283 aa, Homo sapiens
MKPGATGESDLAEVLPQHKFDSKSLEAYLNQHLSGFGAEREATLTIAQYRAGKSNPTFYLQKGFQTYVLRKKPPGSLLPKAHQIDREFKVQKALFSIGFPVPKPILYCSDTSVIGTEFYVMEHVQGRIFRDLTIPGLSPAERSAIYVATVETLAQLHSLNIQSLQLEGYGIGAGYCKRQVSTWTKQYQAAAHQDIPAMQQLSEWLMKNLPDNDNEENLIHGDFRLDNIVFHPKECSSYKQLLDGEPATMVLLGDLSISVLLGPGRPWYTRFLGNRGPPGATRP

SEQ ID NO: 800688 - protein, 762 aa, Homo sapiens
MKPGATGESDLAEVLPQHKFDSKSLEAYLNQHLSGFGAEREATLTIAQYRAGKSNPTFYLQKGFQTYVLRKIQKALFSIGFPVPKPILYCSDTSVIGTEFYVMEHVQGRIFRDLTIPGLSPAERSAIYVATVETLAQLHSLNIQSLQLEGYGIGAGYCKRQVSTWTKQYQAAAHQDIPAMQQLSEWLMKNLPDNDNEENLIHGDFRLDNIVFHPKECRVIAVLDWELSTIGHPLSDLAHFSLFYFWPRTVPMINQGSYSENSGIPSMEELISIYCRCRGINSILPNWNFFLALSYFKMAGIAQGVYSRYLLGNNSSEDSFLFANIVQPLAETGLQLSKRTFSTVLPQIDTTGQLFVQTRKGQEVLIKVKHFMKQHILPAEKEVTEFYVQNENSVDKWGKPLVIDKLKEMAKVEGLWNLFLPAVSGLSHVDYALIAEETGKCFFAPDVFNCQAPDTGNMEVLHLYGSEEQKKQWLEPLLQGNITSCFCMTEPDVASSDATNIECSIQRDEDSYVINGKKWWSSGAGNPKCKIAIVLGRTQNTSLSRHKQHSMILVPMNTPGVKIIRPLSVFGYTDNFHGGHFEIHFNQVRVPATNLILGEGRGFEISQGRLGPGRIHHCMRTVGLAERALQIMCERATQRIAFKKKLYAHEVVAHWIAESRIAIEKIRLLTLKAAHSMDTLGSAGAKKEIAMIKVAAPRAVSKIVDWAIQVCGGAGVSQDYPLANMYAITRVLRLADGPDEVHLSAIATMELRDQAKRLTAKI

SEQ ID NO: 800689 - protein, 411 aa, Homo sapiens
MKPGATGESDLAEVLPQHKFDSKSLEAYLNQHLSGFGAEREATLTIAQYRAGKSNPTFYLQKGFQTYVLRKKPPGSLLPKAHQIDREFKVQKALFSIGFPVPKPILYCSDTSVIGTEFYVMEHVQGRIFRDLTIPGLSPAERSAIYVATVETLAQLHSLNIQSLQLEGYGIGAGYCKRQVSTWTKQYQAAAHQDIPAMQQLSEWLMKNLPDNDNEENLIHGDFRLDNIVFHPKECRVIAVLDWELSTIGHPLSDLAHFSLFYFWPRTVPMINQGSYSENSGIPSMEELISIYCRCRGINSILPNWNFFLALSYFKMAGIAQGVYSRYLLGNNSSEDSFLFANIVQPLAETGLQLSKRTFSTVLPQIDTTGQLFVQTRKGQEVLIKVKHFMKQHILPAEKQLSADSATWTMP

SEQ ID NO: 800690 - protein, 563 aa, Homo sapiens; identical to SEQ ID NO: 800683

SEQ ID NO: 800691 - protein, 476 aa, Homo sapiens
MKPGATGESDLAEVLPQHKFDSKSLEAYLNQHLSGFGAEREATLTIAQYRAGKSNPTFYLQKGFQTYVLRKKPPGSLLPKAHQIDREFKVQKALFSIGFPVPKPILYCSDTSVIGTEFYVMEHVQGRIFRDLTIPGLSPAERSAIYVATVETLAQLHSLNIQSLQLEGYGIGAGYCKRQVSTWTKQYQAAAHQDIPAMQQLSEWLMKNLPDNDNEENLIHGDFRLDNIVFHPKECRVIAVLDWELSTIGHPLSDLAHFSLFYFWPRTVPMINQGSYSENSGIPSMEELISIYCRCRGINSILPNWNFFLALSYFKMAGIAQGVYSRYLLGNNSSEDSFLFANIVQPLAETGLQLSKRTFSTVLPQIDTTGQLFVQTRKGQEVLIKVKHFMKQHILPAEKEVTEFYVQNENSVDKWGKPLVIDKLKEMAKVEGLWNLFLPAVSGLSHVDYALIAEETGKCFFAPDVFNCQAPGYYIN

SEQ ID NO: 800692 - protein, 176 aa, Homo sapiens
MGPAEAGRRGAASPVPPPLVRVAPSLFLGSARAAGAEEQLARAGVTLCVNVSRQQPGPRAPGVAELRVPVFDDPAEDLLAHLEPTCAAMEAAVRAGGACLVYCKNGRSRSAAVCTAYLMRHRGLSLAKAFQMVKSARPVAEPNPGFWSQLQKYEEALQAQSCLQGEPPALGLGPEA

SEQ ID NO: 800693 - protein, 260 aa, Homo sapiens [sequence omitted]

SEQ ID NO: 800694 - protein, 176 aa, Homo sapiens; identical to SEQ ID NO: 800692

SEQ ID NO: 800695 - protein, 245 aa, Homo sapiens
MGPAEAGRRGAASPVPPPLVRVAPSLFLGSARAAGAEEQLARAGVTLCVNVSRQQPGPRAPGVAELRVPVFDDPAEDLLAHLEPTCAAMEAAVRAGGACLVYCKNGRSRSAAVCTVIPVNVGQPAGAQSLDDGSFQTGVKRASLSAGMHETLIPRRLRGLSSISMRSPSCLRSVPAWEESPQSFGFGAPLEVAVAQAFAYGHDLHFVMDREVGPLCRSRNTMIGLVYSLVKKTLTRVLHLSLYPD

SEQ ID NO: 800696 - protein, 252 aa, Homo sapiens [sequence omitted]

SEQ ID NO: 800697 - protein, 260 aa, Homo sapiens [sequence omitted]

SEQ ID NO: 800698 - protein, 124 aa, Homo sapiens
WVDRGCGLTVASNTIDTLNMQVDQFESEVESLSVQTRKKKGDKDKQDRIEGLKRHIEKHRYHVRMLETILRMLDNDSILVDAIRKIKDDVEYYVDSSQDPDFEENEFLYDDLDLEDIREALGLI

SEQ ID NO: 800699 - protein, 763 aa, Homo sapiens
MADKRKLQGEIDRCLKKVSEGVEQFEDIWQKLHNAANANQKEKYEADLKKEIKKLQRLRDQIKTWVASNEIKDKRQLIDNRKLIETQMERFKVVERETKTKAYSKEGLGLAQKVDPAQKEKEEVGQWLTNTIDTLNMQVDQFESEVESLSVQTRKKKGDKDKQDRIEGLKRHIEKHRYHVRMLETILRMLDNDSILVDAIRKIKDDVEYYVDSSQDPDFEENEFLYDDLDLEDIPQALVATSPPSHSHMEDEIFNQSSSTPTSTTSSSPIPPSPANCTTENSEDDKKRGRSTDSEVSQSPAKNGSKPVHSNQHPQSPAVPPTYPSGPPPAASALSTTPGNNGVPAPAAPPSALGPKASPAPSHNSGTPAPYAQAVAPPAPSGPSTTQPRPPSVQPSGGGGGGSGGGGSSSSSNSSAGGGAGKQNGATSYSSVVADSPAEVALSSSGGNNASSQALGPPSGPHNPPPSTSKEPSAAAPTGAGGVAPGSGNNSGGPSLLVPLPVNPPSSPTPSFSDAKAAGALLNGPPQFSTAPEIKAPEPLSSLKSMAERAAISSGIEDPVPTLHLTERDIILSSTSAPPASAQPPLQLSEVNIPLSLGVCPLGPVPLTKEQLYQQAMEEAAWHHMPHPSDSERIRQYLPRNPCPTPPYHHQMPPPHSDTVEFYQRLSTETLFFIFYYLEVQQGPRGSLGPPGFAATAAVPPRAGGGEGTKAQYLAAKALKKQSWRFHTKYMMWFQRHEEPKTITDEFEQVRAPPPLFPLLGLG

SEQ ID NO: 800700 - protein, 724 aa, Homo sapiens
PTRPGKMADKRKLQGEIDRCLKKVSEGVEQFEDIWQKLHNAANANQKEKYEADLKKEIKKLQRLRDQIKTWVASNEIKDKRQLIDNRKLIETQMERFKVVERETKTKAYSKEGLGLAQKVDPAQKEKEEVGQWLTNTIDTLNMQVDQFESEVESLSVQTRKKKGDKDKQDRIEGLKRHIEKHRYHVRMLETILRMLDNDSILVDAIRKIKDDVEYYVDSSQDPDFEENEFLYDDLDLEDIPQALVATSPPSHSHMEDEIFNQSSSTPTSTTSSSPIPPSPANCTTENSEDDKKRGRSTDSEVSQSPAKNGSKPVHSNQHPQSPAVPPTYPSGPPPAASALSTTPGNNGVPAPAAPPSALGPKASPAPSHNSGTPAPYAQAVAPPAPSGPSTTQPRPPSVQPSGGGGGGSGGGGSSSSSNSSAGGGAGKQNGATSYSSVVADSPAEVALSSSGGNNASSQALGPPSGPHNPPPSTSKEPSAAAPTGAGGVAPGSGNNSGGPSLLVPLPVNPPSSPTPSFSDAKAAGALLNGPPQFSTAPEIKAPEPLSSLKSMAERAAISSGIEDPVPTLHLTERDIILSSTSAPPASAQPPLQLSEVNIPLSLGVCPLGPVPLTKEQLYQQAMEEAAWHHMPHPSDSERIRQYLPRNPCPTPPYHHQMPPPHSDTVEFYQRLSTETLFFIFYYLEVQQGPRGSLGPPGFAATAAVPPRAGGVRALRHSIWQPRP

SEQ ID NO: 800701 - protein, 609 aa, Homo sapiens
MADKRKLQGEIDRCLKKVSEGVEQFEDIWQKLHNAANANQKEKYEADLKKEIKKLQRLRDQIKTWVASNEIKDKRQLIDNRKLIETQMERFKVVERETKTKAYSKEGLGLAQKVDPAQKEKEEVGQWLTNTIDTLNMQVDQFESEVESLSVQTRKKKGDKDKQDRIEGLKRHIEKHRYHVRMLETILRMLDNDSILVDAIRKIKDDVEYYVDSSQDPDFEENEFLYDDLDLEDIPQALVATSPPSHSHMEDEIFNQSSSTPTSTTSSSPIPPSPANCTTENSEDDKKRGRSTDSEVSQSPAKNGSKPVHSNQHPQSPAVPPTYPSGPPPAASALSTTPGNNGVPAPAAPPSALGPKASPAPSHNSGTPAPYAQAVAPPAPSGPSTTQPRPPSVQPSGGGGGGSGGGGSSSSSNSSAGGGAGKQNGATSYSSVVADSPAEVALSSSGGNNASSQALGPPSGPHNPPPSTSKEPSAAAPTGAGGVAPGSGNNSGGPSLLVPLPVNPPSSPTPSFSDAKAAGALLNGPPQFSTAPEIKAPEPLSSLKSMAERAAISSGIEDPVPTLHLTERDIILSSTSAPPASAQPPLQLSEVNIPLSLGVCPLGPVPLPR

SEQ ID NO: 800702 - protein, 247 aa, Homo sapiens
MADKRKLQGEIDRCLKKVSEGVEQFEDIWQKLHNAANANQKEKYEADLKKEIKKLQRLRDQIKTWVASNEIKDKRQLIDNRKLIETQMERFKVVERETKTKAYSKEGLGLAQKVDPAQKEKEEVGQWLTNTIDTLNMQVDQFESEVESLSVQTRKKKGDKDKQDRIEGLKRHIEKHRYHVRMLETILRMLDNDSILVDAIRKIKDDVEYYVDSSQDPDFEENEFLYDDLDLEDIPQALVATSPPSRQ

SEQ ID NO: 800703 - protein, 753 aa, Homo sapiens
MADKRKLQGEIDRCLKKVSEGVEQFEDIWQKLHNAANANQKEKYEADLKKEIKKLQRLRDQIKTWVASNEIKDKRQLIDNRKLIETQMERFKVVERETKTKAYSKEGLGLAQKVDPAQKEKEEVGQWLTNTIDTLNMQVDQFESEVESLSVQTRKKKGDKDKQDRIEGLKRHIEKHRYHVRMLETILRMLDNDSILVDAIRKIKDDVEYYVDSSQDPDFEENEFLYDDLDLEDIPQALVATSPPSHSHMEDEIFNQSSSTPTSTTSSSPIPPSPANCTTENSEDDKKRGRSTDSEVSQSPAKNGSKPVHSNQHPQSPAVPPTYPSGPPPAASALSTTPGNNGVPAPAAPPSALGPKASPAPSHNSGTPAPYAQAVAPPAPSGPSTTQPRPPSVQPSGGGGGGSGGGGSSSSSNSSAGGGAGKQNGATSYSSVVADSPAEVALSSSGGNNASSQALGPPSGPHNPPPSTSKEPSAAAPTGAGGVAPGSGNNSGGPSLLVPLPVNPPSSPTPSFSDAKAAGALLNGPPQFSTAPEIKAPEPLSSLKSMAERAAISSGIEDPVPTLHLTERDIILSSTSAPPASAQPPLQLSEVNIPLSLGVCPLGPVPLTKEQLYQQAMEEAAWHHMPHPSDSERIRQYLPRNPCPTPPYHHQMPPPHSDTVEFYQRLSTETLFFIFYYLEGTKAQYLAAKALKKQSWRFHTKYMMWFQRHEEPKTITDEFEQGTYIYFDYEKWGQRKKEGFTFEYRYLEDRDLQ

SEQ ID NO: 800704 - protein, 763 aa, Homo sapiens; identical to SEQ ID NO: 800699

SEQ ID NO: 800705 - protein, 771 aa, Homo sapiens
MADKRKLQGEIDRCLKKVSEGVEQFEDIWQKLHNAANANQKEKYEADLKKEIKKLQRLRDQIKTWVASNEIKDKRQLIDNRKLIETQMERFKVVERETKTKAYSKEGLGLAQKVDPAQKEKEEVGQWLTNTIDTLNMQVDQFESEVESLSVQTRKKKGDKDEGPSRCSAAPEPGPGLRQQKQDRIEGLKRHIEKHRYHVRMLETILRMLDNDSILVDAIRKIKDDVEYYVDSSQDPDFEENEFLYDDLDLEDIPQALVATSPPSHSHMEDEIFNQSSSTPTSTTSSSPIPPSPANCTTENSEDDKKRGRSTDSEVSQSPAKNGSKPVHSNQHPQSPAVPPTYPSGPPPAASALSTTPGNNGVPAPAAPPSALGPKASPAPSHNSGTPAPYAQAVAPPAPSGPSTTQPRPPSVQPSGGGGGGSGGGGSSSSSNSSAGGGAGKQNGATSYSSVVADSPAEVALSSSGGNNASSQALGPPSGPHNPPPSTSKEPSAAAPTGAGGVAPGSGNNSGGPSLLVPLPVNPPSSPTPSFSDAKAAGALLNGPPQFSTAPEIKAPEPLSSLKSMAERAAISSGIEDPVPTLHLTERDIILSSTSAPPASAQPPLQLSEVNIPLSLGVCPLGPVPLTKEQLYQQAMEEAAWHHMPHPSDSERIRQYLPRNPCPTPPYHHQMPPPHSDTVEFYQRLSTETLFFIFYYLEPRDVRTAWVDSEAGPLRHTSAPLPVAHWLTRGPSPALLQQPQSRPTPLCSSAHSQASLETTGELSSPLPTPLL

SEQ ID NO: 800706 - protein, 515 aa, Homo sapiens
MEDEIFNQSSSTPTSTTSSSPIPPSPANCTTENSEDDKKRGRSTDSEVSQSPAKNGSKPVHSNQHPQSPAVPPTYPSGPPPAASALSTTPGNNGVPAPAAPPSALGPKASPAPSHNSGTPAPYAQAVAPPAPSGPSTTQPRPPSVQPSGGGGGGSGGGGSSSSSNSSAGGGAGKQNGATSYSSVVADSPAEVALSSSGGNNASSQALGPPSGPHNPPPSTSKEPSAAAPTGAGGVAPGSGNNSGGPSLLVPLPVNPPSSPTPSFSDAKAAGALLNGPPQFSTAPEIKAPEPLSSLKSMAERAAISSGIEDPVPTLHLTERDIILSSTSAPPASAQPPLQLSEVNIPLSLGVCPLGPVPLTKEQLYQQAMEEAAWHHMPHPSDSERIRQYLPRNPCPTPPYHHQMPPPHSDTVEFYQRLSTETLFFIFYYLEVQQGPRGSLGPPGFAATAAVPPRAGGGEGTKAQYLAAKALKKQSWRFHTKYMMWFQRHEEPKTITDEFEQVRAPPPLFPLLGLG

SEQ ID NO: 800707 - protein, 156 aa, Homo sapiens
MADKRKLQGEIDRCLKKVSEGVEQFEDIWQKLHNAANANQKEKYEADLKKEIKKLQRLRDQIKTWVASNEIKDKRQLIDNRKLIETQMERFKVVERETKTKAYSKEGLGLAQKVDPAQKEKEEVGQWLTNTIDTLNMQVDQFESEVESLSVQTHGG

SEQ ID NO: 800708 - protein, 595 aa, Homo sapiens
HEAQDEGGHCWGSASGRRTLRRRRAAQRCGGGARADAGPMARTTSQLYDAVPIQSSVVLCSCPSPSMVRTQTESSTPPGIPGGSRQGPAMDGTAAEPRPGAGSLQHAQPPPQPRKKRPEDFKFGKILGEGSFSTVVLARELATSREYAIKILEKRHIIKENKVPYVTRERDVMSRLDHPFFVKLYFTFQDDEKLYFGLSYAKNGELLKYIRKIGSFDETCTRFYTAEIVSALEYLHGKGIIHRDLKPENILLNEDMHIQITDFGTAKVLSPESKQARANSFVGTAQYVSPELLTEKSACKSSDLWALGCIIYQLVAGLPPFRAGNEYLIFQKIIKLEYDFPEKFFPKARDLVEKLLVLDATKRLGCEEMEGYGPLKAHPFFESVTWENLHQQTPPKLTAYLPAMSEDDEDCYGNYDNLLSQFGCMQVSSSSSSHSLSASDTGLPQRSGSNIEQYIHDLDSNSFELDLQFSEDEKRLLLEKQAGGNPWHQFVENNLILKMGPVDKRKGLFARRRQLLLTEGPHLYYVDPVNKVLKGEIPWSQELRPEAKNFKTFFVHTPNRTYYLMDPSGNAHKWCRKIQEVWRQRYQSHPDAAVQ

SEQ ID NO: 800709 - protein, 595 aa, Homo sapiens; identical to SEQ ID NO: 800708

SEQ ID NO: 800710 - protein, 595 aa, Homo sapiens; identical to SEQ ID NO: 800708

SEQ ID NO: 800711 - protein, 468 aa, Homo sapiens
HEAQDEGGHCWGSASGRRTLRRRRAAQRCGGGARADAGPMARTTSQLYDAVPIQSSVVLCSCPSPSMVRTQTESSTPPGIPGGSRQGPAMDGTAAEPRPGAGSLQHAQPPPQPRKKRPEDFKFGKILGEGSFSTVVLARELATSREYATRANSFVGTAQYVSPELLTEKSACKSSDLWALGCIIYQLVAGLPPFRAGNEYLIFQKIIKLEYDFPEKFFPKARDLVEKLLVLDATKRLGCEEMEGYGPLKAHPFFESVTWENLHQQTPPKLTAYLPAMSEDDEDCYGNYDNLLSQFGCMQVSSSSSSHSLSASDTGLPQRSGSNIEQYIHDLDSNSFELDLQFSEDEKRLLLEKQAGGNPWHQFVENNLILKMGPVDKRKGLFARRRQLLLTEGPHLYYVDPVNKVLKGEIPWSQELRPEAKNFKTFFVHTPNRTYYLMDPSGNAHKWCRKIQEVWRQRYQSHPDAAVQ

SEQ ID NO: 800712 - protein, 121 aa, Homo sapiens
MHPPPGVWLLHLHTPLRGFCLPLPLRSQEAVPGRGRRHLSPQLLTPHPLTSSPFVKYTQDETCTQWLTAARFVTARGGEHRTPSEGEGISTARPPTHPRAGTRLSHKEVRSSDPGHSADAP

SEQ ID NO: 800713 - protein, 131 aa, Homo sapiens
MSRSVRDTRHRRVRCDPTSVFWVKGTMSAEGSCGWKRGGSITGVGSYPEGRDLGNPGTAMTPPRLFLGCGLLLAGTQGVNDGDHAVGRMGAAHYPVTALQNLLQQASVALWCDSLWNLLMPTLSAGPGSER

SEQ ID NO: 800714 - protein, 480 aa, Homo sapiens
MGPGPPAAGAAPSPRPLSLVARLSYAVGHFLNDLCASMWFTYLLLYLHSVRAYSSRGAGLLLLLGQVADGLCTPLVGYEADRAASCCARYGPRKAWHLVGTVCVLLSFPFIFSPCLGCGAATPEWAALLYYGPFIVIFQFGWASTQISHLSLIPELVTNDHEKVELTALRYAFTVVANITVYGAAWLLLHLQGSSRVEPTQDISISDQLGGQDVPVFRNLSLLVVGVGAVFSLLFHLGTRERRRPHAEEPGEHTPLLAPATAQPLLLWKHWLREPAFYQVGILYMTTRLIVNLSQTYMAMYLTYSLHLPKKFIATIPLVMYLSGFLSSFLMKPINKCIGRNMTYFSGLLVILAFAAWVALAEGLGVAVYAAAVLLGAGCATILVTSLAMTADLIGPHTNSGAFVYGSMSFLDKVANGLAVMAIQSLHPCPSELCCRACVSFYHWAMVAVTGGVGVAAALCLCSLLLWPTRLRRWDRDARP

SEQ ID NO: 800715 - protein, 480 aa, Homo sapiens; identical to SEQ ID NO: 800714

SEQ ID NO: 800716 - protein, 473 aa, Homo sapiens
MGPGPPAAGAAPSPRPLSLVARLSYAVGHFLNDLCASMWFTYLLLYLHSVRAYSSRGAGLLLLLGQVADGLCTPLVGYEADRAASCCARYGPRKAWHLVGTVCVLLSFPFIFSPCLGCGAATPEWAALLYYGPFIVIFQFGWASTQISHLSLIPELVTNDHEKVELTALRYAFTVVANITVYGAAWLLLHLQGSSRVEPTQDISISDQLGGQDVPVFRNLSLLVVGVGAVFSLLFHLGTRERRRPHAEEPGEHTPLLAPATAQPLLLWKHWLREPAFYQVGILYMTTRLIVNLSQTYMAMYLTYSLHLPKKFIATIPLVMYLSGFLSSFLMKPINKCIGRNMTYFSGLLVILAFAAWVALAEGLGVAVYAAAVLLGAGCATILVTSLAMTADLIGPHTNSGAFVYGSMSFLDKVANGLAVMAIQSLHPCPSELCCRACVSFYHWAMVAVTGGVGVAAALCLCSLLLWPTRLRR

SEQ ID NO: 800717 - protein, 480 aa, Homo sapiens; identical to SEQ ID NO: 800714

SEQ ID NO: 800718 - protein, 538 aa, Homo sapiens
MGPGPPAAGAAPSPRPLSLVARLSYAVGHFLNDLCASMWFTYLLLYLHSVRAYSSRGAGLLLLLGQVADGLCTPLVGYEADRAASCCARYGPRKAWHLVGTVCVLLSFPFIFSPCLGCGAATPEWAALLYYGPFIVIFQFGWASTQISHLSLIPELVTNDHEKVELTALRYAFTVVANITVYGAAWLLLHLQGSSRVEPTQDISISDQLGGQDVPVFRNLSLLVVGVGAVFSLLFHLGTRERRRPHAEEPGEHTPLLAPATAQPLLLWKHWLREPAFYQVGILYMTTRLIVNLSQTYMAMYLTYSLHLPKKFIATIPLVMYLSGFLSSFLMKPINKCIGRNMTYFSGLLVILAFAAWVALAEGLGVAVYAAAVLLGAGCATILVTSLAMTADLIGPHTNSGAFVYGSMSFLDKVANGLAVMAIQSLHPCPSELCCRACVSFYHWAMVAVTGGVGVAAALCLCSLLLWPTRLRRSFLAWRRGRGEDKGPGYSWIPTVLVQPPRPTSPFLWEAPLAWRCTRKKWSGAGTKPWPREDWGTH

SEQ ID NO: 800719 - protein, 527 aa, Homo sapiens
PPIAPPPPPLLLVEAWFNRPRADVGEGAAVRERDAGCPARGGGPRRLPPRHPRRPGQGTLRGARGWGARLSYAVGHFLNDLCASMWFTYLLLYLHSVRAYSSRGAGLLLLLGQVADGLCTPLVGYEADRAASCCARYGPRKAWHLVGTVCVLLSFPFIFSPCLGCGAATPEWAALLYYGPFIVIFQFGWASTQISHLSLIPELVTNDHEKVELTALRYAFTVVANITVYGAAWLLLHLQGSSRVEPTQDISISDQLGGQDVPVFRNLSLLVVGVGAVFSLLFHLGTRERRRPHAEEPGEHTPLLAPATAQPLLLWKHWLREPAFYQVGILYMTTRLIVNLSQTYMAMYLTYSLHLPKKFIATIPLVMYLSGFLSSFLMKPINKCIGRNMTYFSGLLVILAFAAWVALAEGLGVAVYAAAVLLGAGCATILVTSLAMTADLIGPHTNSGAFVYGSMSFLDKVANGLAVMAIQSLHPCPSELCCRACVSFYHWAMVAVTGGVGVAAALCLCSLLLWPTRLRRWDRDARP

SEQ ID NO: 800720 - protein, 196 aa, Homo sapiens [sequence omitted]

SEQ ID NO: 800721 - protein, 581 aa, Homo sapiens
LSTGLALTSVVGVASAWWAWFSAGERAHRTKGRVPPPRSGSGRDLRVGRAGIVRWAGPGLRVAEDLSGAWQLARGGVSASRGKWAVGGSHKQFKSSLGRGFEAGAGARGLPQLSAGTLTSSSWDPFSPARGPSPRSCLTVTTKPPCWPGALPPAGLEPRIRGQPRPKNLPSPKSPPQGVLTPDGGAAARVHEPEEAGSDGGTVCVLLSFPFIFSPCLGCGAATPEWAALLYYGPFIVIFQFGWASTQISHLSLIPELVTNDHEKVELTALRYAFTVVANITVYGAAWLLLHLQGSSRVEPTQDISISDQLGGQDVPVFRNLSLLVVGVGAVFSLLFHLGTRERRRPHAEEPGEHTPLLAPATAQPLLLWKHWLREPAFYQVGILYMTTRLIVNLSQTYMAMYLTYSLHLPKKFIATIPLVMYLSGFLSSFLMKPINKCIGRNMTYFSGLLVILAFAAWVALAEGLGVAVYAAAVLLGAGCATILVTSLAMTADLIGPHTNSGAFVYGSMSFLDKVANGLAVMAIQSLHPCPSELCCRACVSFYHWAMVAVTGGVGVAAALCLCSLLLWPTRLRRWDRDARP

SEQ ID NO: 800722 - protein, 568 aa, Homo sapiens
LLLLDLLRAHLIGFRLLVRPQLLHVLLLLSLGLIQVPLLFRWLQLAPLGAQHLGDLGKGQIRVARADLLAPLVQEAHVARDRCLGPIRQNLLPLLALGPAAFLHRLLLVGPLLARAWTLAALLLDSHHEAPMLARSLAARRPGAKDTAVSPVPRISPPPKAQPQGVLTPDGGAAARVHEPEEAGSDGGTVCVLLSFPFIFSPCLGCGAATPEWAALLYYGPFIVIFQFGWASTQISHLSLIPELVTNDHEKVELTALRYAFTVVANITVYGAAWLLLHLQGSSRVEPTQDISISDQLGGQDVPVFRNLSLLVVGVGAVFSLLFHLGTRERRRPHAEEPGEHTPLLAPATAQPLLLWKHWLREPAFYQVGILYMTTRLIVNLSQTYMAMYLTYSLHLPKKFIATIPLVMYLSGFLSSFLMKPINKCIGRNMTYFSGLLVILAFAAWVALAEGLGVAVYAAAVLLGAGCATILVTSLAMTADLIGPHTNSGAFVYGSMSFLDKVANGLAVMAIQSLHPCPSELCCRACVSFYHWAMVAVTGGVGVAAALCLCSLLLWPTRLRRWDRDARP

SEQ ID NO: 800723 - protein, 538 aa, Homo sapiens; identical to SEQ ID NO: 800718

SEQ ID NO: 800724 - protein, 106 aa, Homo sapiens
VQNPHAYILVTSLAMTADLIGPHTNSGAFVYGSMSFLDKVANGLAVMAIQSLHPCPSELCCRACVSFYHWAMVAVTGGVGVAAALCLCSLLLWPTRLRRWDRDARP

SEQ ID NO: 800725 - protein, 175 aa, Homo sapiens
MCPHLLAVGQQGAPGSPRAVSPWPRWPCPPGLPRTHPAPSLTVFLAPDWPVFPQRAPPPGAGGLVLGRDDGVMPGGLPQVLGVGCGGAGAGGHSCPPLAGPLPRAGGGALTRWHAALTVLVAAVPAVVGLAEGAGRGPWQVVPGFPGVRVGQACVPQLGRLRPVPWACTSSVWPA

SEQ ID NO: 800726 - protein, 68 aa, Homo sapiens
VLVFETDLRSVAQAGVQWCDSWIPTVLVQPPRPTSPFLWEAPLAWRCTRKKWSGAGTKPWPREDWGTH

SEQ ID NO: 800727 - protein, 99 aa, Homo sapiens
LSPGAISLGDPDCRPSLLRDCVHAGGVSICASVSLSPPSMSSPWEPWLVRDSPATDHSAFHRHRLRPAVLPLHLQPLPGLWGGHARVGCPPLLRPVHRD

SEQ ID NO: 800728 - protein, 143 aa, Homo sapiens
MVLADAAKMRSPRVRMAPNPVPGTLIRRGKLGRRQEGRVKTEAETGGQGVPGVAQSHHGLQEVWDRLSQPQKGPAPHRPGFQRANISVAEAPSAFAVLGDGRRHICSWPVSRSVAPTVSGHWPEGNRKSWRGRHTHEPFRNNE

SEQ ID NO: 800729 - protein, 480 aa, Homo sapiens; identical to SEQ ID NO: 800714

SEQ ID NO: 800730 - protein, 480 aa, Homo sapiens; identical to SEQ ID NO: 800714

SEQ ID NO: 800731 - protein, 480 aa, Homo sapiens; identical to SEQ ID NO: 800714

SEQ ID NO: 800732 - protein, 501 aa, Homo sapiens
MGPGPPAAGAAPSPRPLSLVARLSYAVGHFLNDLCASMWFTYLLLYLHSVRAYSSRGAGLLLLLGQVADGLCTPLVGYEADRAASCCARYGPRKAWHLVGTVCVLLSFPFIFSPCLGCGAATPEWAALLYYGPFIVIFQFGWASTQISHLSLIPELVTNDHEKVELTALRYAFTVVANITVYGAAWLLLHLQGSSRVEPTQDISISDQLGGQDVPVFRNLSLLVVGVGAVFSLLFHLGTRERRRPHAEEPGEHTPLLAPATAQPLLLWKHWLREPAFYQVGILYMTTRLIVNLSQTYMAMYLTYSLHLPKKFIATIPLVMYLSGFLSSFLMKPINKCIGRNMTYFSGLLVILAFAAWVALAEGLGVAVYAAAVLLGAGCATILVTSLAMTADLIGPHTNSGAFVYGSMSFLDKVANGLAVMAIQSLHPCPSELCCRACVSFYHWAMVAVTGGVGVAAALCLCSLLLWPTRLRRCESWPTPPSPDTDPHSLMPFPPLPCRGP

SEQ ID NO: 800733 - protein, 473 aa, Homo sapiens; identical to SEQ ID NO: 800716

SEQ ID NO: 800734 - protein, 537 aa, Homo sapiens
MLQKFNFRGAGAPKVQDGTRPQRVDPQPLVHGVGCGRAAPLVQEAHVARDRCLGPIRQNLLPLLALGPAAFLHRLLLVGPLLARAWTLAALLLDSHHEAPMLARSLAARRPGAKDTAVSPVPRISPPPKAQPQGVLTPDGGAAARVHEPEEAGSDEGTVCVLLSFPFIFSPCLGCGAATPEWAALLYYGPFIVIFQFGWASTQISHLSLIPELVTNDHEKVELTALRYAFTVVANITVYGAAWLLLHLQGSSRVEPTQDISISDQLGGQDVPVFRNLSLLVVGVGAVFSLLFHLGTRERRRPHAEEPGEHTPLLAPATAQPLLLWKHWLREPAFYQVGILYMTTRLIVNLSQTYMAMYLTYSLHLPKKFIATIPLVMYLSGFLSSFLMKPINKCIGRNMTYFSGLLVILAFAAWVALAEGLGVAVYAAAVLLGAGCATILVTSLAMTADLIGPHTNSGAFVYGSMSFLDKVANGLAVMAIQSLHPCPSELCCRACVSFYHWAMVAVTGGVGVAAALCLCSLLLWPTRLRRWDRDARP

SEQ ID NO: 800735 - protein, 423 aa, Homo sapiens
MGPGPPAAGAAPSPRPLSLVARLSYAVGHFLNDLCASMWFTYLLLYLHSVRAYSSRGAGLLLLLGQVADGLCTPLVGYEADRAASCCARYGPRKAWHLVGTVCVLLSFPFIFSPCLGCGAATPEWAALLYYGPFIVIFQFGWASTQISHLSLIPELVTNDHEKVELTALRYAFTVVANITVYGAAWLLLHLQGSSRVEPTQDISISDQLGGQDVPVFRNLSLLVVGVGAVFSLLFHLGTRERRRPHAEEPGEHTPLLAPATAQPLLLWKHWLREPAFYQVGILYMTTRLIVNLSQTYMAMYLTYSLHLPKKFIATIPLVMYLSGFLSSFLMKPINKCIGRNNSGAFVYGSMSFLDKVANGLAVMAIQSLHPCPSELCCRACVSFYHWAMVAVTGGVGVAAALCLCSLLLWPTRLRRWDRDARP

SEQ ID NO: 800736 - protein, 196 aa, Homo sapiens [sequence omitted]

SEQ ID NO: 800737 - protein, 393 aa, Homo sapiens
MLQKFNFRGAGAPKVQDGTRPQRVDPQPLVHGVGCGRAAPLVQEAHVARDRCLGPIRQNLLPLLALGPAAFLHRLLLVGPLLARAWTLAALLLDSHHEAPMLARSLAARRPGAKDTAVSPVPRISPPPKAHPRAFGPPTAGLQRECMSPRRQGLMGLECSHRISAHCNLELLGSSDSPASASEQLGPQNLSLLVVGVGAVFSLLFHLGTRERRRPHAEEPGEHTPLLAPATAQPLLLWKHWLREPAFYQVGILYMTTRLIVNLSQTYMAMYLTYSLHLPKKFIATIPLVMYLSGFLSSFLMKPINKCIGRNNSGAFVYGSMSFLDKVANGLAVMAIQSLHPCPSELCCRACVSFYHWAMVAVTGGVGVAAALCLCSLLLWPTRLRRWDRDARP

SEQ ID NO: 800738 - protein, 175 aa, Homo sapiens; identical to SEQ ID NO: 800725

SEQ ID NO: 800739 - protein, 150 aa, Homo sapiens
GCSLDSAWPSHCTLVLGTKGGAAGHSFPALGNVRAGETEASTGFLEATQCGSGWNHLSVRGSPGLSDGVATWGGSDPGSWRLVESLPACPARYAFTVVANITVYGAAWLLLHLQGSSRVEPTQDISISDQLGGQDVPVFRVSWSPGGSPE

SEQ ID NO: 800740 - protein, 222 aa, Homo sapiens
TLERSRSTCIVMVDGVFQGVVERNMRDKLFLTGKLGSKLDILVENMGRLSFGSNSSDFKGLLKPPILGQTILTQWMMFPLKIDNLVKWWFPLQLPKWPYPQAPSGPTFYSKTFPILGSVGDTFLYLPGWTKGQVWINGFNLGRYWTKQGPQQTLYVPRFLLFPRGALNKITLLELEDVPLQPQVQFLDKPILNSTSTLHRTHINSLSADTLSASEPMELSGH

SEQ ID NO: 800741 - protein, 411 aa, Homo sapiens
MTKIFTLLRKYEPHGPLVNSEYYTGWLDYWGQNHSTRSVSAVTKGLENMLKLGASVNMYMFHGGTNFGYWNGADKKGRFLPITTSYDYDAPISEAGDPTPKLFALRDVISKFQEVPLGPLPPPSPKMMLGPVTLHLVGHLLAFLDLLCPRGPIHSILPMTFEAVKQDHGFMLYRTYMTHTIFEPTPFWVPNNGVHDRAYVMVDGVFQGVVERNMRDKLFLTGKLGSKLDILVENMGRLSFGSNSSDFKGLLKPPILGQTILTQWMMFPLKIDNLVKWWFPLQLPKWPYPQAPSGPTFYSKTFPILGSVGDTFLYLPGWTKGQVWINGFNLGRYWTKQGPQQTLYVPRFLLFPRGALNKITLLELEDVPLQPQVQFLDKPILNSTSTLHRTHINSLSADTLSASEPMELSGH

SEQ ID NO: 800742 - protein, 447 aa, Homo sapiens
HKIVYEVRPRVVNSSEGIRVFIYNVGNYHYDIQTDNMTKIFTLLRKYEPHGPLVNSEYYTGWLDYWGQNHSTRSVSAVTKGLENMLKLGASVNMYMFHGGTNFGYWNGADKKGRFLPITTSYDYDAPISEAGDPTPKLFALRDVISKFQEVPLGPLPPPSPKMMLGPVTLHLVGHLLAFLDLLCPRGPIHSILPMTFEAVKQDHGFMLYRTYMTHTIFEPTPFWVPNNGVHDRAYVMVDGVFQGVVERNMRDKLFLTGKLGSKLDILVENMGRLSFGSNSSDFKGLLKPPILGQTILTQWMMFPLKIDNLVKWWFPLQLPKWPYPQAPSGPTFYSKTFPILGSVGDTFLYLPGWTKGQVWINGFNLGRYWTKQGPQQTLYVPRFLLFPRGALNKITLLELEDVPLQPQVQFLDKPILNSTSTLHRTHINSLSADTLSASEPMELSGH

SEQ ID NO: 800743 - protein, 411 aa, Homo sapiens; identical to SEQ ID NO: 800741

SEQ ID NO: 800744 - protein, 470 aa, Homo sapiens
NEYGSYRACDFSYMRHLAGLFRALLGEKILLFTTDGPEGLKCGSLRGLYTTVDFGPADNMTKIFTLLRKYEPHGPLVNSEYYTGWLDYWGQNHSTRSVSAVTKGLENMLKLGASVNMYMFHGGTNFGYWNGADKKGRFLPITTSYDYDAPISEAGDPTPKLFALRDVISKFQEVPLGPLPPPSPKMMLGPVTLHLVGHLLAFLDLLCPRGPIHSILPMTFEAVKQDHGFMLYRTYMTHTIFEPTPFWVPNNGVHDRAYVMVDGVFQGVVERNMRDKLFLTGKLGSKLDILVENMGRLSFGSNSSDFKGLLKPPILGQTILTQWMMFPLKIDNLVKWWFPLQLPKWPYPQAPSGPTFYSKTFPILGSVGDTFLYLPGWTKGQVWINGFNLGRYWTKQGPQQTLYVPRFLLFPRGALNKITLLELEDVPLQPQVQFLDKPILNSTSTLHRTHINSLSADTLSASEPMELSGH

SEQ ID NO: 800745 - protein, 774 aa, Homo sapiens
MLQQVNGHNPGSDGQAREYLREDLQEFLGGEVLLYKLDDLTRVNPVTLETVLRCLQARYMADTFYTNAGCTLVALNPFKPVPQLYSPELMREYHAAPQPQKLKPHVFTVGEQTYRNVKSLIEPVNQSIVVSGESGAGKTWTSRCLMKFYAVVATSPASWESHKIAERIEQRILNSNPVMEAFGNACTLRNNNSSRFGKFIQLQLNRAQQMTGAAVQTYLLEKTRVACQASSERNFHIFYQICKGASEDERLQWHLPEGAAFSWLPNPERSLEEDCFEVTREAMLHLGIDTPTQNNIFKVLAGLLHLGNIQFAASEDEAQPCQPMDDAKYSVRTAASLLGLPEDVLLEMVQIRTIRAGRQQQVFRKPCARAECDTRRDCLAKLIYARLFDWLVSVINSSICADTDSWTTFIGLLDVYGFESFPDNSLEQLCINYANEKLQVLSQLEACGLVETIHISAAGFPIRVSHRNFVERYKLLRRLHPCTSSGPDSPYPAKGLPEWCPHSEEATLEPLIQDILHTLPVLTQAAAITGDSAEAMPAPMHCGRTKVFMTDSMLELLECGRARVLEQCARCIQGGWRRHRHREQERQWRAVMLIQAAIRSWLTRKHIQRLHAAATVIKRAWQKWRIRMACLAAKELDGVEEKHFSQAPCSLSTSPLQTRLLEAIIRLWPLGLVLANTAMGVGSFQRKLVVWACLQLPRGSPSSYTVQTAQDQAGVTSIRALPQGSIKFHCRKSPLRYADICPEPSPYSITGFNQILLERHRLIHVTSSAFTGLG

SEQ ID NO: 800746 - protein, 317 aa, Homo sapiens
MLQQVNGHNPGSDGQAREYLREDLQEFLGGEVLLYKLDDLTRVNPVTLETVLRCLQARYMADTFYTNAGCTLVALNPFKPVPQLYSPELMREYHAAPQPQKLKPHVFTVGEQTYRNVKSLIEPVNQSIVVSGESGAGKTWTSRCLMKFYAVVATSPASWESHKIAERIEQRILNSNPVMEAFGNACTLRNNNSSRFGKFIQLQLNRAQQMTGAAVQTYLLEKTRVACQASSERNFHIFYQICKGASEDERLQWHLPEGAAFSWLPNPERSLEEDCFEVTREAMLHLGIDTPTQNNIFKVRRKATPLKFGRDDGQPFA

SEQ ID NO: 800747 - protein, 79 aa, Homo sapiens
MVDPAINWFFLKMNGELEQTKDKREQAQNELSAWKFTPDSQTGKKLMAKCRMLIQENQELGRQLSQERMAQLVEIRVPS

SEQ ID NO: 800748 - protein, 996 aa, Homo sapiens
MESHSVDKAGLKLLTSSDPSASASQGAFTGVNGHNPGSDGQAREYLREDLQEFLGGEVLLYKLDDLTRVNPVTLETVLRCLQARYMADTFYTNAGCTLVALNPFKPVPQLYSPELMREYHAAPQPQKLKPHVFTVGEQTYRNVKSLIEPVNQSIVVSGESGAGKTWTSRCLMKFYAVVATSPASWESHKIAERIEQRILNSNPVMEAFGNACTLRNNNSSRFGKFIQLQLNRAQQMTGAAVQTYLLEKTRVACQASSERNFHIFYQICKGASEDERLQWHLPEGAAFSWLPNPERSLEEDCFEVTREAMLHLGIDTPTQNNIFKVLAGLLHLGNIQFAASEDEAQPCQPMDDAKYSVRTAASLLGLPEDVLLEMVQIRTIRAGRQQQVFRKPCARAECDTRRDCLAKLIYARLFDWLVSVINSSICADTDSWTTFIGLLDVYGFESFPDNSLEQLCINYANEKLQQHFVAHYLRAQQEEYAVEGLEWSFINYQDNQPCLDLIEGSPISICSLINEECRLNRPSSAAQLQTRIETALAGSPCLGHNKLSREPSFIVVHYAGPVRYHTAGLVEKNKDPIPPELTRLLQQSQDPLLMGLFPTNPKEKTQEEPPGQSRAPVLTVVSKFKASLEQLLQVLHSTTPHYIRCIKPNSQGQAQTFLQEEVLSQLEACGLVETIHISAAGFPIRVSHRNFVERYKLLRRLHPCTSSGPDSPYPAKGLPEWCPHSEEATLEPLIQDILHTLPVLTQAAAITGDSAEAMPAPMHCGRTKVFMTDSMLELLECGRARVLEQCARCIQGGWRRHRHREQERQWRAVMLIQAAIRSWLTRKHIQRLHAAATVIKRAWQKWRIRMACLAAKELDGVEEKHFSQAPCSLSTSPLQTRLLEAIIRLWPLGLVLANTAMGVGSFQRKLVVWACLQLPRGSPSSYTVQTAQDQAGVTSIRALPQGSIKFHCRKSPLRYADICPEPSPYSITGFNQILLERHRLIHVTSSAFTGLG

SEQ ID NO: 800749 - protein, 683 aa, Homo sapiens
MPSELDLTQKMFPGTWFPHRRCLSEPENSDSKMGLMLWAVFTLHLGFLLALSSTGEWGRDEEPPWVEGGEGMFCPPQVSCSLSLMPRLPSIRHWQGPSHPGFLGPLFPICSLQWPHGFSAIFPGLLDVYGFESFPDNSLEQLCINYANEKLQQHFVAHYLRAQQEEYAVEGLEWSFINYQDNQPCLDLIEGSPISICSLINEECRLNRPSSAAQLQTRIETALAGSPCLGHNKLSREPSFIVVHYAGPVRYHTAGLVEKNKDPIPPELTRLLQQSQDPLLMGLFPTNPKEKTQEEPPGQSRAPVLTVVSKFKASLEQLLQVLHSTTPHYIRCIKPNSQGQAQTFLQEEVLSQLEACGLVETIHISAAGFPIRVSHRNFVERYKLLRRLHPCTSSGPDSPYPAKGLPEWCPHSEEATLEPLIQDILHTLPVLTQAAAITGDSAEAMPAPMHCGRTKVFMTDSMLELLECGRARVLEQCARCIQGGWRRHRHREQERQWRAVMLIQAAIRSWLTRKHIQRLHAAATVIKRAWQKWRIRMACLAAKELDGVEEKHFSQAPCSLSTSPLQTRLLEAIIRLWPLGLVLANTAMGVGSFQRKLVVWACLQLPRGSPSSYTVQTAQDQAGVTSIRALPQGSIKFHCRKSPLRYADICPEPSPYSITGFNQILLERHRLIHVTSSAFTGLG

SEQ ID NO: 800750 - protein, 970 aa, Homo sapiens
MLQQVNGHNPGSDGQAREYLREDLQEFLGGEVLLYKLDDLTRVNPVTLETVLRCLQARYMADTFYTNAGCTLVALNPFKPVPQLYSPELMREYHAAPQPQKLKPHVFTVGEQTYRNVKSLIEPVNQSIVVSGESGAGKTWTSRCLMKFYAVVATSPASWESHKIAERIEQRILNSNPVMEAFGNACTLRNNNSSRFGKFIQLQLNRAQQMTGAAVQTYLLEKTRVACQASSERNFHIFYQICKGASEDERLQWHLPEGAAFSWLPNPERSLEEDCFEVTREAMLHLGIDTPTQNNIFKVLAGLLHLGNIQFAASEDEAQPCQPMDDAKYSVRTAASLLGLPEDVLLEMVQIRTIRAGRQQQVFRKPCARAECDTRRDCLAKLIYARLFDWLVSVINSSICADTDSWTTFIGLLDVYGFESFPDNSLEQLCINYANEKLQQHFVAHYLRAQQEEYAVEGLEWSFINYQDNQPCLDLIEGSPISICSLINEECRLNRPSSAAQLQTRIETALAGSPCLGHNKLSREPSFIVVHYAGPVRYHTAGLVEKNKDPIPPELTRLLQQSQDPLLMGLFPTNPKEKTQEEPPGQSRAPVLTVVSKFKASLEQLLQVLHSTTPHYIRCIKPNSQGQAQTFLQEEVLSQLEACGLVETIHISAAGFPIRVSHRNFVERYKLLRRLHPCTSSGPDSPYPAKGLPEWCPHSEEATLEPLIQDILHTLPVLTQAAAITGDSAEAMPAPMHCGRTKVFMTDSMLELLECGRARVLEQCARCIQGGWRRHRHREQERQWRAVMLIQAAIRSWLTRKHIQRLHAAATVIKRAWQKWRIRMACLAAKELDGVEEKHFSQAPCSLSTSPLQTRLLEAIIRLWPLGLVLANTAMGVGSFQRKLVVWACLQLPRGSPSSYTVQTAQDQAGVTSIRALPQGSIKFHCRKSPLRYADICPEPSPYSITGFNQILLERHRLIHVTSSAFTGLG

SEQ ID NO: 800751 - protein, 970 aa, Homo sapiens; identical to SEQ ID NO: 800750

SEQ ID NO: 800752 - protein, 774 aa, Homo sapiens; identical to SEQ ID NO: 800745

SEQ ID NO: 800753 - protein, 970 aa, Homo sapiens; identical to SEQ ID NO: 800750

SEQ ID NO: 800754 - protein, 239 aa, Homo sapiens
MPAPMHCGRTKVFMTDSMLELLECGRARVLEQCARCIQGGWRRHRHREQERQWRAVMLIQAAIRSWLTRKHIQRLHAAATVIKRAWQKWRIRMACLAAKELDGVEEKHFSQAPCSLSTSPLQTRLLEAIIRLWPLGLVLANTAMGVGSFQRKLVVWACLQLPRGSPSSYTVQTAQDQAGVTSIRALPQGSIKFHCRKSPLRYADICPEPSPYSITGFNQILLERHRLIHVTSSAFTGLG

SEQ ID NO: 800755 - protein, 970 aa, Homo sapiens; identical to SEQ ID NO: 800750

SEQ ID NO: 800756 - protein, 923 aa, Homo sapiens
MLQQVNGHNPGSDGQAREYLREDLQEFLGGEVLLYKLDDLTRVNPVTLETVLRCLQARYMADTFYTNAGCTLVALNPFKPVPQLYSPELMREYHAAPQPQKLKPHVFTVGEQTYRNVKSLIEPVNQSIVVSGESGAGKTWTSRCLMKFYAVVATSPASWESHKIAERIEQRILNSNPVMEAFGNACTLRNNNSSRFGKFIQLQLNRAQQMTGAAVQTYLLEKTRVACQASSERNFHIFYQICKGASEDERLQWHLPEGAAFSWLPNPERSLEEDCFEVTREAMLHLGIDTPTQNNIFKVLAGLLHLGNIQFAASEDEAQPCQPMDDAKYSVRTAASLLGLPEDVLLEMVQIRTIRAGRQQQVFRKPCARAECDTRRDCLAKLIYARLFDWLVSVINSSICADTDSWTTFIGLLDVYGFESFPDNSLEQLCINYANEKLQQHFVAHYLRAQQEEYAVEGLEWSFINYQDNQPCLDLIEGSPISICSLINEECRLNRPSSAAQLQTRIETALAGSPCLGHNKLSREPSFIVVHYAGPVRYHTAGLVEKNKDPIPPELTRLLQQSQDPLLMGLFPTNPKEKTQEEPPGQSRAPVLTVVSKFKASLEQLLQVLHSTTPHYIRCIKPNSQGQAQTFLQEEVLSQLEACGLVETIHISAAGFPIRVSHRNFVERYKLLRRLHPCTSSGPDSPYPAKGLPEWCPHSEEATLEPLIQDILHTLPVLTQAAAITGDSAEAMPAPMHCGRTKVFMTDSMLELLECGRARVLEQCARCIQGGWRRHRHREQERQWRAVMLIQAAIRSWLTRKHIQRLHAAATVIKRAWQKWRIRMACLAAKELDGVEEKHFSQAPCSLSTSPLQTRLLEAIIRLWPLGLVLANTAMGVGSFQRKLVVWACLQLPRGSPSSYTVQTAQDQAGVTSIRALPQVRCV

SEQ ID NO: 800757 - protein, 969 aa, Homo sapiens
MLQQVNGHNPGSDGQAREYLREDLQEFLGGEVLLYKLDDLTRVNPVTLETVLRCLQARYMADTFYTNAGCTLVALNPFKPVPQLYSPELMREYHAAPQPQKLKPHVFTVGEQTYRNVKSLIEPVNQSIVVSGESGAGKTWTSRCLMKFYAVVATSPASWESHKIAERIEQRILNSNPVMEAFGNACTLRNNNSSRFGKFIQLQLNRAQQMTGAAVQTYLLEKTRVACQASSERNFHIFYQICKGASEDERLQWHLPEGAAFSWLPNPERSLEEDCFEVTREAMLHLGIDTPTQNNIFKVLAGLLHLGNIQFAASEDEAQPCQPMDDAKYSVRTAASLLGLPEDVLLEMVQIRTIRAGRQQQVFRKPCARAECDTRRDCLAKLIYARLFDWLVSVINSSICADTDSWTTFIGLLDVYGFESFPDNSLEQLCINYANEKLQQHFVAHYLRAQQEEYAVEGLEWSFINYQDNQPCLDLIEGSPISICSLINEECRLNRPSSAAQLQTRIETALAGSPCLGHNKLSREPSFIVVHYAGPVRYHTAGLVEKNKDPIPPELTRLLQQSQDPLLMGLFPTNPKEKTQEEPPGQSRAPVLTVVSKFKASLEQLLQVLHSTTPHYIRCIKPNSQGQAQTFLQEEVLSQLEACGLVETIHISAAGFPIRVSHRNFVERYKLLRRLHPCTSSGPDSPYPAKGLPEWCPHSEEATLEPLIQDILHTLPVLTQAAAITGDSAEAMPAPMHCGRTKVFMTDSMLELLECGRARVLEQCARCIQGGWRRHRHREQERQWRAVMLIQAAIRSWLTRKHIQRLHAAATVIKRAWQKWRIRMACLAAKELDGVEEKHFSQAPCSLSTSPLQTRLLEAIIRLWPLGLVLANTAMGVGSFQRKLVVWACLQLPRGSPSSYTVQTAQDQAGVGGAEKSTVMRLGEGGPSRTGTRGYTPPPPYGKADQIWLLSHKGRGEDMGIARTTPREN

SEQ ID NO: 800758 - protein, 360 aa, Homo sapiens
MLQQVNGHNPGSDGQAREYLREDLQEFLGGEVLLYKLDDLTRVNPVTLETVLRCLQARYMADTFYTNAGCTLVALNPFKPVPQLYSPELMREYHAAPQPQKLKPHVFTVGEQTYRNVKSLIEPVNQSIVVSGESGAGKTWTSRCLMKFYAVVATSPASWESHKIAERIEQRILNSNPVMEAFGNACTLRNNNSSRFGKFIQLQLNRAQQMTGAAVQTYLLEKTRVACQASSERNFHIFYQICKGASEDERLQWHLPEGAAFSWLPNPERSLEEDCFEVTREAMLHLGIDTPTQNNIFKVLAGLLHLGNIQFAASEDEAQPCQPMDDAKCEGQGVGWGRPCQEGSQHCWGWVEGWMVKIGI

SEQ ID NO: 800759 - protein, 278 aa, Homo sapiens
  misc_feature (6)..(6): Xaa can be any naturally occurring amino acid
MPHQVXLYTKTVLRCLQARYMADTFYTNAGCTLVALNPFKPVPQLYSPELMREYHAAPQPQKLKPHVFTVGEQTYRNVKSLIEPVNQSIVVSGESGAGKTWTSRCLMKFYAVVATSPASWESHKIAERIEQRILNSNPVMEAFGNACTLRNNNSSRFGKFIQLQLNRAQQMTGAAVQTYLLEKTRVACQASSERNFHIFYQICKGASEDERLQWHLPEGAAFSWLPNPERSLEEDCFEVTREAMLHLGIDTPTQNNIFKVRRKATPLKFGRDDGQPFA

SEQ ID NO: 800760 - protein, 629 aa, Homo sapiens
MFCPPQVSCSLSLMPRLPSIRHWQGPSHPGFLGPLFPICSLQWPHGFSAIFPGLLDVYGFESFPDNSLEQLCINYANEKLQQHFVAHYLRAQQEEYAVEGLEWSFINYQDNQPCLDLIEGSPISICSLINEECRLNRPSSAAQLQTRIETALAGSPCLGHNKLSREPSFIVVHYAGPVRYHTAGLVEKNKDPIPPELTRLLQQSQDPLLMGLFPTNPKEKTQEEPPGQSRAPVLTVVSKFKASLEQLLQVLHSTTPHYIRCIKPNSQGQAQTFLQEEVLSQLEACGLVETIHISAAGFPIRVSHRNFVERYKLLRRLHPCTSSGPDSPYPAKGLPASVFREALGIYRWSEPSEWCPHSEEATLEPLIQDILHTLPVLTQAAAITGDSAEAMPAPMHCGRTKVFMTDSMLELLECGRARVLEQCARCIQGGWRRHRHREQERQWRAVMLIQAAIRSWLTRKHIQRLHAAATVIKRAWQKWRIRMACLAAKELDGVEEKHFSQAPCSLSTSPLQTRLLEAIIRLWPLGLVLANTAMGVGSFQRKLVVWACLQLPRGSPSSYTVQTAQDQAGVTSIRALPQGSIKFHCRKSPLRYADICPEPSPYSITGFNQILLERHRLIHVTSSAFTGLG

SEQ ID NO: 800761 - protein, 970 aa, Homo sapiens; identical to SEQ ID NO: 800750

SEQ ID NO: 800762 - protein, 1118 aa, Homo sapiens
MLQQVNGHNPGSDGQAREYLREDLQEFLGGEVLLYKLDDLTRVNPVTLETVLRCLQARYMADTFYTNAGCTLVALNPFKPVPQLYSPELMREYHAAPQPQKLKPHVFTVGEQTYRNVKSLIEPVNQSIVVSGESGAGKTWTSRCLMKFYAVVATSPASWESHKIAERIEQRILNSNPVMEAFGNACTLRNNNSSRFGKFIQLQLNRAQQMTGAAVQTYLLEKTRVACQASSERNFHIFYQICKGASEDERLQWHLPEGAAFSWLPNPERSLEEDCFEVTREAMLHLGIDTPTQNNIFKVLAGLLHLGNIQFAASEDEAQPCQPMDDAKCEGQGVGWGRPCQEGSQHCWGWVEGWMVKIGTDALAYATHHEGLALDHLLLTLSGEADSIVPILKMRKESEVCKVICPIHGSMDWYMKVLGLSSAAVYGVLWVSHFTDQNLVSSVQLGKSWSRCDDFTVPREEDWMESDLPKEDLPLPDSVRTAASLLGLPEDVLLEMVQIRTIRAGRQQQVFRKPCARAECDTRRDCLAKLIYARLFDWLVSVINSSICADTDSWTTFIGLLDVYGFESFPDNSLEQLCINYANEKLQQHFVAHYLRAQQEEYAVEGLEWSFINYQDNQPCLDLIEGSPISICSLINEECRLNRPSSAAQLQTRIETALAGSPCLGHNKLSREPSFIVVHYAGPVRYHTAGLVEKNKDPIPPELTRLLQQSQDPLLMGLFPTNPKEKTQEEPPGQSRAPVLTVVSKFKASLEQLLQVLHSTTPHYIRCIKPNSQGQAQTFLQEEVLSQLEACGLVETIHISAAGFPIRVSHRNFVERYKLLRRLHPCTSSGPDSPYPAKGLPEWCPHSEEATLEPLIQDILHTLPVLTQAAAITGDSAEAMPAPMHCGRTKVFMTDSMLELLECGRARVLEQCARCIQGGWRRHRHREQERQWRAVMLIQAAIRSWLTRKHIQRLHAAATVIKRAWQKWRIRMACLAAKELDGVEEKHFSQAPCSLSTSPLQTRLLEAIIRLWPLGLVLANTAMGVGSFQRKLVVWACLQLPRGSPSSYTVQTAQDQAGVTSIRALPQGSIKFHCRKSPLRYADICPEPSPYSITGFNQILLERHRLIHVTSSAFTGLG

SEQ ID NO: 800763 - protein, 962 aa, Homo sapiens
MLQQVNGHNPGSDGQAREYLREDLQEFLGGEVLLYKLDDLTRVNPVTLETVLRCLQARYMADTFYTNAGCTLVALNPFKPVPQLYSPELMREYHAAPQPQKLKPHVFTVGEQTYRNVKSLIEPVNQSIVVSGESGAGKTWTSRCLMKFYAVVATSPASWESHKIAERIEQRILNSNPVMEAFGNACTLRNNNSSRFGKFIQLQLNRAQQMTGAAVQTYLLEKTRVACQASSERNFHIFYQICKGASEDERLQWHLPEGAAFSWLPNPERSLEEDCFEVTREAMLHLGIDTPTQNNIFKVLAGLLHLGNIQFAASEDEAQPCQPMDDAKYSVRTAASLLGLPEDVLLEMVQIRTIRAGRQQQVFRKPCARAECDTRRDCLAKLIYARLFDWLVSVINSSICADTDSWTTFIGLLDVYGFESFPDNSLEQLCINYANEKLQQHFVAHYLRAQQEEYAVEGLEWSFINYQDNQPCLDLIEGSPISICSLINEECRLNRPSSAAQLQTRIETALAGSPCLGHNKLSREPSFIVVHYAGPVRYHTAGLVEKNKDPIPPELTRLLQQSQDPLLMGLFPTNPKEKTQEEPPGQSRAPVLTVVSKFKASLEQLLQVLHSTTPHYIRCIKPNSQGQAQTFLQEEVLSQLEACGLVETIHISAAGFPIRVSHRNFVERYKLLRRLHPCTSSGPDSPYPAKGLPEWCPHSEEATLEPLIQDILHTLPVLTQAAAITGDSAEAMPAPMHCGRTKVFMTDSMLELLECGRARVLEQCARCIQGGWRRHRHREQERQWRAVMLIQAAIRSWLTRKHIQRLHAAATVIKRAWQKWRVSKTQEVGVGSGSILGTRWTRVGMLALPLQCRWPWAGCLASLSLIFLMYAVGTVTPTLQGGYVGEEWYKQLWEYTKLWDVHFRRLGFMAYQLYLDGLLSCFQVAYVRPKHSCLGCIDLWHMEPVWFRAASCLQPGAFSSPC

SEQ ID NO: 800764 - protein, 970 aa, Homo sapiens; identical to SEQ ID NO: 800750

SEQ ID NO: 800765 - protein, 725 aa, Homo sapiens
VPRRPLEHETAPEQQEGIDRMAWQSRKGGHFREVAMQWKVTLTSRWGLLRHCQVLAGLLHLGNIQFAASEDEAQPCQPMDDAKYSVRTAASLLGLPEDVLLEMVQIRTIRAGRQQQVFRKPCARAECDTRRDCLAKLIYARLFDWLVSVINSSICADTDSWTTFIGLLDVYGFESFPDNSLEQLCINYANEKLQQHFVAHYLRAQQEEYAVEGLEWSFINYQDNQPCLDLIEGSPISICSLINEECRLNRPSSAAQLQTRIETALAGSPCLGHNKLSREPSFIVVHYAGPVRYHTAGLVEKNKDPIPPELTRLLQQSQDPLLMGLFPTNPKEKTQEEPPGQSRAPVLTVVSKFKASLEQLLQVLHSTTPHYIRCIKPNSQGQAQTFLQEEVLSQLEACGLVETIHISAAGFPIRVSHRNFVERYKLLRRLHPCTSSGPDSPYPAKGLPEWCPHSEEATLEPLIQDILHTLPVLTQAAAITGDSAEAMPAPMHCGRTKVFMTDSMLELLECGRARVLEQCARCIQGGWRRHRHREQERQWRAVMLIQAAIRSWLTRKHIQRLHAAATVIKRAWQKWRIRMACLAAKELDGVEEKHFSQAPCSLSTSPLQTRLLEAIIRLWPLGLVLANTAMGVGSFQRKLVVWACLQLPRGSPSSYTVQTAQDQAGVTSIRALPQGSIKFHCRKSPLRYADICPEPSPYSITGFNQILLERHRLIHVTSSAFTGLG

SEQ ID NO: 800766 - protein, 349 aa, Homo sapiens
MLQVPALSPHPCRSVLSQLEACGLVETIHISAAGFPIRVSHRNFVERYKLLRRLHPCTSSGPDSPYPAKGLPEWCPHSEEATLEPLIQDILHTLPVLTQAAAITGDSAEAMPAPMHCGRTKVFMTDSMLELLECGRARVLEQCARCIQGGWRRHRHREQERQWRAVMLIQAAIRSWLTRKHIQRLHAAATVIKRAWQKWRIRMACLAAKELDGVEEKHFSQAPCSLSTSPLQTRLLEAIIRLWPLGLVLANTAMGVGSFQRKLVVWACLQLPRGSPSSYTVQTAQDQAGVTSIRALPQGSIKFHCRKSPLRYADICPEPSPYSITGFNQILLERHRLIHVTSSAFTGLG

SEQ ID NO: 800767 - protein, 83 aa, Homo sapiens
AAAPTSVLDVAWNPRPTDALGTGLWVKAGAVTVVHVHLEHCGNRLVVTKSGLRNIRATFHYLHRSNSAAVMTVCHYTGDPNST

SEQ ID NO: 800768 - protein, 923 aa, Homo sapiens; identical to SEQ ID NO: 800756

SEQ ID NO: 800769 - protein, 494 aa, Homo sapiens
MLQQVNGHNPGSDGQAREYLREDLQEFLGGEVLLYKLDDLTRVNPVTLETVLRCLQARYMADTFYTNAGCTLVALNPFKPVPQLYSPELMREYHAAPQPQKLKPHVFTVGEQTYRNVKSLIEPVNQSIVVSGESGAGKTWTSRCLMKFYAVVATSPASWESHKIAERIEQRILNSNPVMEAFGNACTLRNNNSSRFGKFIQLQLNRAQQMTGAAVQTYLLEKTRVACQASSERNFHIFYQICKGASEDERLQWHLPEGAAFSWLPNPERSLEEDCFEVTREAMLHLGIDTPTQNNIFKVLAGLLHLGNIQFAASEDEAQPCQPMDDAKYSVRTAASLLGLPEDVLLEMVQIRTIRAGRQQQVFRKPCARAECDTRRDCLAKLIYARLFDWLVSVINSSICADTDSWTTFIGLLDVYGFESFPDNSLEQLCINYANEKLQQHFVAHYLRAQQVRDGVSRRQVLLLDPQSLPDLPAPVQVLIRSLWFLLILFLIDK

SEQ ID NO: 800770 - protein, 246 aa, Homo sapiens
MLQQVNGHNPGSDGQAREYLREDLQEFLGGEVLLYKLDDLTRVNPVTLETVLRCLQARYMADTFYTNAGCTLVALNPFKPVPQLYSPELMREYHAAPQPQKLKPHVFTVGEQTYRNVKSLIEPVNQSIVVSGESGAGKTWTSRCLMKFYAVVATSPASWESHKIAERIEQRILNSNPVMEAFGNACTLRNNNSSRFGKFIQLQLNRAQQMTGAAVQTYLLEKTRVACQASSERNFHIFYQVCAKWG

SEQ ID NO: 800771 - protein, 1548 aa, Homo sapiens
MLRARPEALMLLGALLTGSLGPSGSQDALSLPWEVQRYDGWFNNLRHHERGAVGCRLQRRVPANYADGVYQALEEPQLPNPRRLSNAATRGIAGLPSLHNRTVLGVFFGYHVLSDVVSVETPGCPAEFLNIRIPPGDPVFDPDQRGDVVLPFQRSRWDPETGRSPSNPRDLANQVTGWLDGSAIYGSSHSWSDALRSFSGGQLASGPDPAFPRDSQNPLLMWAAPDPATGQNGPRGLYAFGAERGNREPFLQALGLLWFRYHNLWAQRLARQHPDWEDEELFQHARKRVIATYQNIAVYEWLPSFLQKTLPEYTGYRPFLDPSISPEFVVASEQFFSTMVPPGVYMRNASCHFRKVLNKGFQSSQALRVCNNYWIRENPNLNSTQEVNELLLGMASQISELEDNIVVEDLRDYWPGPGKFSRTDYVASSIQRGRDMGLPSYSQALLAFGLDIPRNWSDLNPNVDPQVLEATAALYNQDLSQLELLLGGLLESHGDPGPLFSAIVLDQFVRLRDGDRYWFENTRNGLFSKKEIEDIRNTTLRDVLVAVINIDPSALQPNVFVWHKGAPCPQPKQLTTDGLPQCAPLTVLDFFEGSSPGFAITIIALCCLPLVSLLLSGVVAYFRGREHKKLQKKLKESVKKEAAKDGVPAMEWPGPKERSSPIIIQLLSDRCLQVLNRHLTVLRVVQLQPLQQVNLILSNNRGCRTLLLKIPKEYDLVLLFSSEEERGAFVQQLWDFCVRWALGLHVAEMSEKELFRKAVTKQQRERILEIFFRHLFAQVLDINQADAGTLPLDSSQKVREALTCELSRAEFAESLGLKPQDMFVESMFSLADKDGNGYLSFREFLDILVVFMKGSPEDKSRLMFTMYDLDENGFLSKDEFFTMMRSFIEISNNCLSKAQLAEVVESMFRESGFQDKEELTWEDFHFMLRDHDSELRFTQLCVKGGGGGGNGIRDIFKQNISCRVSFITRTPGERSHPQGLGPPAPEAPELGGPGLKKRFGKKAAVPTPRLYTEALQEKMQRGFLAQKLQQYKRFVENYRRHIVCVAIFSAICVGVFADRAYYYGFALPPSDIAQTTLVGIILSRGTAASVSFMFSYILLTMCRNLITFLRETFLNRYVPFDAAVDFHRWIAMAAVVLAILHSAGHAVNVYIFSVSPLSLLACIFPNVFVNDGSKLPQKFYWWFFQTVPGMTGVLLLLVLAIMYVFASHHFRRRSFRGFWLTHHLYILLYALLIIHGSYALIQLPTFHIYFLVPAIIYGGDKLVSLSRKKVEISVVKAELLPSGVTYLQFQRPQGFEYKSGQWVRIACLALGTTEYHPFTLTSAPHEDTLSLHIRAVGPWTTRLREIYSSPKGNGCAGYPKLYLDGPFGEGHQEWHKFEVSVLVGGGIGVTPFASILKDLVFKSSLGSQMLCKKIYFIWVTRTQRQFEWLADIIQEVEENDHQDLVSVHIYVTQLAEKFDLRTTMLYICERHFQKVLNRSLFTGLRSITHFGRPPFEPFFNSLQEVHPQVRKIGVFSCGPPGMTKNVEKACQLVNRQDRAHFMHHYENF

SEQ ID NO: 800772 - protein, 333 aa, Homo sapiens
RARSCYIRVYILLYALLIIHGSYALIQLPTFHIYFLVPAIIYGGDKLVSLSRKKVEISVVKAELLPSGVTYLQFQRPQGFEYKSGQWVRIACLALGTTEYHPFTLTSAPHEDTLSLHIRAVGPWTTRLREIYSSPKGNGCAGYPKLYLDGPFGEGHQEWHKFEVSVLVGGGIGVTPFASILKDLVFKSSLGSQMLCKKIYFIWVTRTQRQFEWLADIIQEVEENDHQDLVSVHIYVTQLAEKFDLRTTMLYICERHFQKVLNRSLFTGLRSITHFGRPPFEPFFNSLQEVHPQVRKIGVFSCGPPGMTKNVEKACQLVNRQDRAHFMHHYENF

SEQ ID NO: 800773 - protein, 124 aa, Homo sapiens
LSPCCSRPESFYKTNHEILLIHFVPCPLPGTRSHSLPLPHALPRELFSWLQRQGENSPISFSQLPPPGTGAPCPRSPRAGRPWTEEEVWQKVSVSQIPGPKETWREVLGSLGPTHISLTYKRPS

SEQ ID NO: 800774 - protein, 1548 aa, Homo sapiens; identical to SEQ ID NO: 800771

SEQ ID NO: 800775 - protein, 194 aa, Homo sapiens
PQGFEYKSGQWVRIACLALGTTEYHPFTLTSAPHEDTLSLHIRAVGPWTTRLREIYSSPKGNGCAGYPKVPVTGNPASGPLALAEDLCPSLPETRSSSRPKASLGEDRGASEKTRMFCILPLPVSPFLVSELGQGQAHFISPLSWQLYLDGPFGEGHQEWHKFEVSVLVGGGIGVTPFASILKDLVFKSSLGSQ

SEQ ID NO: 800776 - protein, 122 aa, Homo sapiens
GHACHADCDSELFQAPSEPERGSGKSQETPRQCHVAVKPLVPICQGAKPQDCWWDVGTTPFSFSSYNRMAERKGPSGIFQFSQPILQRWRLRPEACPRRLHMTQQSSPLWHQHFFQPQERKV

SEQ ID NO: 800777 - protein, 224 aa, Homo sapiens
MGIMAASRPLSRFWEWGKNIVCVGRNYADHVREMRSAVLSEPVLFLKPSTAYAPEGSPILMPAYTRNLHHELELGVVMGKRCRAVPEAAAMDYVGGYALCLDMTARDVQDECKKKGLPWTLAKSFTASCPVSAFVPKEKIPDPHKLKLWLKVNGELRQEGETSSMIFSIPYIISYVSKIITLEEGDIILTGTPKGVGPVKENDEIEAGIHGLVSMTFKVEKPEY

SEQ ID NO: 800778 - protein, 224 aa, Homo sapiens; identical to SEQ ID NO: 800777

SEQ ID NO: 800779 - protein, 224 aa, Homo sapiens; identical to SEQ ID NO: 800777

SEQ ID NO: 800780 - protein, 286 aa, Homo sapiens
MADFDDRVSDEEKVRIAAKFITHAPPGEFNEVFNDVRLLLNNDNLLREGAAHAFAQYNMDQFTPVKIEGYEDQVLITEHGDLGNSRFLDPRNKISFKFDHLRKEASDPQPEEADGGLKSWRESCDSALRAYVKDHYSNGFCTVYAKTIDGQQTIIACIESHQFQPKNFWNGRWRSEWKFTITPPTAQVVGVLKIQVHYYEDGNVQLVSHKDVQDSLTVSNEAQTAKEFIKIIENAENEYQTAISENYQTMSDTTFKALRRQLPVTRTKIDWNKILSYKIGKEMQNA

SEQ ID NO: 800781 - protein, 308 aa, Homo sapiens
LCSRVVIGINQTNRSTNQEQPKMADFDDRVSDEEKVRIAAKFITHAPPGEFNEVFNDVRLLLNNDNLLREGAAHAFAQYNMDQFTPVKIEGYEDQVLITEHGDLGNSRFLDPRNKISFKFDHLRKEASDPQPEEADGGLKSWRESCDSALRAYVKDHYSNGFCTVYAKTIDGQQTIIACIESHQFQPKNFWNGRWRSEWKFTITPPTAQVVGVLKIQVHYYEDGNVQLVSHKDVQDSLTVSNEAQTAKEFIKIIENAENEYQTAISENYQTMSDTTFKALRRQLPVTRTKIDWNKILSYKIGKEMQNA

SEQ ID NO: 800782 - protein, 286 aa, Homo sapiens; identical to SEQ ID NO: 800780

SEQ ID NO: 800783 - protein, 177 aa, Homo sapiens
MADFDDRVSDEEKVRIAAKFITHAPPGEFNEVFNDVRLLLNNDNLLREGAAHAFAQYNMDQFTPVKIEGYEDQVLITEHGDLGNSRFLDPRNKISFKFDHLRKEASDPQPEEADGGLKSWRESCDSALRAYVKDHYSNGFCTVYAKTIDGQQTIIACIESHQFQPKNFCYSPGGWRA

SEQ ID NO: 800784 - protein, 138 aa, Homo sapiens
LLVYTFNNSLCPSIVLALNFWNGRWRSEWKFTITPPTAQVVGVLKIQVHYYEDGNVQLVSHKDVQDSLTVSNEAQTAKEFIKIIENAENEYQTAISENYQTMSDTTFKALRRQLPVTRTKIDWNKILSYKIGKEMQNA

SEQ ID NO: 800785 - protein, 286 aa, Homo sapiens; identical to SEQ ID NO: 800780

SEQ ID NO: 800786 - protein, 286 aa, Homo sapiens; identical to SEQ ID NO: 800780

SEQ ID NO: 800787 - protein, 286 aa, Homo sapiens; identical to SEQ ID NO: 800780

SEQ ID NO: 800788 - protein, 136 aa, Homo sapiens
MADFDDRVSDEEKVRIAAKFITHAPPGEFNEVFNDVRLLLNNDNLLREGAAHAFAQYNMDQFTPVKIEGYEDQVLITEHGDLGNSRFLDPRNKISFKFDHLRKEASDPQPEEADGGLKHVKKRKVFVLPFCFCSVI

SEQ ID NO: 800789 - protein, 168 aa, Homo sapiens
SVKAESWGTGTEKISKVEERVSRLGLPVLSWGREGADSSAYSGGTGLRCDPEVLPLPNEMRVTFHTAPPPGVGKATDRSSCRAALKALDSAVVEITGTRKTCRSSNSYLVGWRPEAKNNRNTLPAPIRWMGNECNSLGKILDFKSPKANPTSWGAGAGAGVRRRHSRA

SEQ ID NO: 800790 - protein, 286 aa, Homo sapiens; identical to SEQ ID NO: 800780

SEQ ID NO: 800791 - protein, 286 aa, Homo sapiens; identical to SEQ ID NO: 800780

SEQ ID NO: 800792 - protein, 286 aa, Homo sapiens; identical to SEQ ID NO: 800780

SEQ ID NO: 800793 - protein, 286 aa, Homo sapiens; identical to SEQ ID NO: 800780

SEQ ID NO: 800794 - protein, 286 aa, Homo sapiens; identical to SEQ ID NO: 800780

SEQ ID NO: 800795 - protein, 265 aa, Homo sapiens
MADFDDRVSDEEKVRIAAKFITHAPPGEFNEVFNDVRLLLNNDNLLREGAAHAFAQYNMDQFTPVKIEGYEDQVLITEHGDLGNSRFLDPRNKISFKFDHLRKEASDPQPEEADGGLKSWRESCDSALRAYVKDHYSNGFCTVYAKTIDGQQTIIACIESHQFQPKNFWNGRWRSEWKFTITPPTAQVVGVLKIQVHYYEDGNVQLVSHKDVQDSLTVSNEAQTAKEFIKIIENAENEYQTAISENYQTMSDTTYLKRISGDTLE

SEQ ID NO: 800796 - protein, 90 aa, Homo sapiens
SLKIIYPVYPSQGTQAYPLTIALLFCSQPAPFLFKQLIFNYLLQTAISENYQTMSDTTFKALRRQLPVTRTKIDWNKILSYKIGKEMQNA

SEQ ID NO: 800797 - protein, 269 aa, Homo sapiens
ADGNPAAIAMSLQKTPPTRVFVELVPWADRSRENNLASGRETLPGLRHPLSSTQAQTATREVQVSGTSEVSAGPDRAQVVVRVSSTKEAAAEAKKSVCRRLDYITQSLQQQGVQAENITVTKDFRRVENAYHMEAEVCITFTEFGKMQNICNFLVEKLDSSVVISPPQFYHTPGSVENLRRQACLVAVENAWRKAQEVCNLVGQTLGKPLLIKEEETKEWEGQIDDHQSSRLSSSLTVQQKIKSATIHAASKVFITFEVKGKEKRKKHL

SEQ ID NO: 800798 - protein, 137 aa, Homo sapiens
MEAEVCITFTEFGKMQNICNFLVEKLDSSVVISPPQFYHTPGSVENLRRQACLVAVENAWRKAQEVCNLVGQTLGKPLLIKEEETKEWEGQIDDHQSSRLSSSLTVQQKIKSATIHAASKVFITFEVKGKEKRKKHL

SEQ ID NO: 800799 - protein, 138 aa, Homo sapiens
ADGNPAAIAMSLQKTPPTRVFVELVPWADRSRENNLASGRETLPGLRHPLSSTQAQTATREVQVSGTSEVSAGPDRAQVVVRVSSTKEAAAEAKKSVCRRLDYITQSLQQQGVQAENITVTKDFRRVENAYHMEAEFH

SEQ ID NO: 800800 - protein, 144 aa, Homo sapiens
ADGNPAAIAMSLQKTPPTRVFVELVPWADRSRENNLASGRETLPGLRHPLSSTQAQTATREVQVSGTSEVSAGPDRAQVVVRVSSTKEAAAEAKKSVCRRLDYITQSLQQQGVQAENITVTKDFRRVENAYHMEAEKLLRRGGV

SEQ ID NO: 800801 - protein, 266 aa, Homo sapiens
ADGNPAAIAMSLQKTPPTRVFVELVPWADRSRENNLASGRETLPGLRHPLSSTQAQTATREVQVSGTSEVSAGPDRAQVVVRVSSTKEAAAEAKKSVCRRLDYITQSLQQQGVQAENITVTKDFRRVENAYHMEAEVCITFTEFGKMQNICNFLVEKLDSSVVISPPQFYHTPGSVENLRRQACLVAVENAWRKAQEVCNLVGQTLGKPLLIKEEETKEWEGQIDDHQSSRLSSSLTVQQKIKSATIHAASKVFITFEKLLRRGGV

SEQ ID NO: 800802 - protein, 266 aa, Homo sapiens; identical to SEQ ID NO: 800801

SEQ ID NO: 800803 - protein, 266 aa, Homo sapiens; identical to SEQ ID NO: 800801

SEQ ID NO: 800804 - protein, 194 aa, Homo sapiens
ADGNPAAIAMSLQKTPPTRVFVELVPWADRSRENNLASGRETLPGLRHPLSSTQAQTATREVQVSGTSEVSAGPDRAQVVVRVSSTKEAAAEAKKSVCRRLDYITQSLQQQGVQAENITVTKDFRRVENAYHMEAEVCITFTEFGKMQNICNFLVEKLDSSVVISPPQFYHTPGSVENLRNCTFLRKYLCKVFH

SEQ ID NO: 800805 - protein, 266 aa, Homo sapiens; identical to SEQ ID NO: 800801

SEQ ID NO: 800806 - protein, 196 aa, Homo sapiens
ADGNPAAIAMSLQKTPPTRVFVELVPWADRSRENNLASGRETLPGLRHPLSSTQAQTATREVQVSGTSEVSAGPDRAQVVVRVSSTKEAAAEAKKSVCRRLDYITQSLQQQGVQAENITVTKDFRRVENAYHMEAEVCITFTEFGKMQNICNFLVEKLDSSVVISPPQFYHTPGSVENLRNSWNPSSTSQPTITPR

SEQ ID NO: 800807 - protein, 266 aa, Homo sapiens; identical to SEQ ID NO: 800801

SEQ ID NO: 800808 - protein, 266 aa, Homo sapiens; identical to SEQ ID NO: 800801

SEQ ID NO: 800809 - protein, 266 aa, Homo sapiens; identical to SEQ ID NO: 800801

SEQ ID NO: 800810 - protein, 725 aa, Homo sapiens
NASRAGMRSAEGEMAAAGLVAVAAAAEYSGTVASGGNLPGVHCGPSSGAGPGFGPGSWSRSLDRALEEAAVTGVLSLSGRKLREFPRGAANHDLTDTTRADLSRNRLSEIPIEACHFVSLENLNLYQNCIRYIPEAILNLQALTFLNISRNQLSTLPVHLCNLPLKVLIASNNKLVSLPEEIGHLRHLMELDVSCNEIQTIPSQIGNLEALRDLNVRRNHLVHLPEELAELPLIRLDFSCNKITTIPVCYRNLRHLQTITLDNNPLQSPPAQICIKGKVHIFKYLNIQACKIAPDLPDYDRRPLGFGSCHEELYSSRPYGALDSGFNSVDSGDKRWSGNEPTDEFSDLPLRVAEITKEQRLRRESQYQENRGSLVVTNGGVEHDLDQIDYIDSCTAEEEEAEVRQPKGPDPDSLSSQFMAYIEQRRISHEGSPVKPVAIREFQKTEDMRRYLHQNRVPAEPSSLLSLSASHNQLSHTDLELHQRREQLVERTRREAQLAALQYEEEKIRTKQIQRDAVLDFVKQKASQSPQKQHPLLDGVDGECPFPSRRSQHTDDSALCMSLSGLNQVGCAATLPHSSAFTPLKSDDRPNALLSSPATETVHHSPAYSFPAAIQRNQPQRPESFLFRAGVRAETNKGHASPLPPSAAPTTDSTDSITGQNSRQREEELELIDQLRKHIEYRLKVSLPCDLGAALTDGVVLCHLANHVRPRSVPSIHVPSPAVVS

SEQ ID NO: 800811 - protein, 780 aa, Homo sapiens
NASRAGMRSAEGEMAAAGLVAVAAAAEYSGTVASGGNLPGVHCGPSSGAGPGFGPGSWSRSLDRALEEAAVTGVLSLSGRKLREFPRGAANHDLTDTTRADLSRNRLSEIPIEACHFVSLENLNLYQNCIRYIPEAILNLQALTFLNISRNQLSTLPVHLCNLPLKVLIASNNKLVSLPEEIGHLRHLMELDVSCNEIQTIPSQIGNLEALRDLNVRRNHLVHLPEELAELPLIRLDFSCNKITTIPVCYRNLRHLQTITLDNNPLQSPPAQICIKGKVHIFKYLNIQACKIAPDLPDYDRRPLGFGSCHEELYSSRPYGALDSGFNSVDSGDKRWSGNEPTDEFSDLPLRVAEITKEQRLRRESQYQENRGSLVVTNGGVEHDLDQIDYIDSCTAEEEEAEVRQPKGPDPDSLSSQFMAYIEQRRISHEGSPVKPVAIREFQKTEDMRRYLHQNRVPAEPSSLLSLSASHNQLSHTDLELHQRREQLVERTRREAQLAALQYEEEKIRTKQIQRDAVLDFVKQKASQSPQKQHPLLDGVDGECPFPSRRSQHTDDSALCMSLSGLNQVGCAATLPHSSAFTPLKSDDRPNALLSSPATETGHASPLPPSAAPTTDSTDSITGQNSRQREEELELIDQLRKHIEYRLKVSLPCDLGAALTDGVVLCHLANHVRPRSVPSIHVPSPAVPKLTMAKCRRNVENFLEACRKIGVPQDNLCSPSDILQLNLSVKRTVETLLSLGAHSEESSFVCLSLQLLGFVAFYCTVMLTLCVLYYWLFPAR

SEQ ID NO: 800812 - protein, 780 aa, Homo sapiens; identical to SEQ ID NO: 800811

SEQ ID NO: 800813 - protein, 790 aa, Homo sapiens
NASRAGMRSAEGEMAAAGLVAVAAAAEYSGTVASGGNLPGVHCGPSSGAGPGFGPGSWSRSLDRALEEAAVTGVLSLSGRKLREFPRGAANHDLTDTTRADLSRNRLSEIPIEACHFVSLENLNLYQNCIRYIPEAILNLQALTFLNISRNQLSTLPVHLCNLPLKVLIASNNKLVSLPEEIGHLRHLMELDVSCNEIQTIPSQIGNLEALRDLNVRRNHLVHLPEELAELPLIRLDFSCNKITTIPVCYRNLRHLQTITLDNNPLQSPPAQICIKGKVHIFKYLNIQACKIAPDLPDYDRRPLGFGSCHEELYSSRPYGALDSGFNSVDSGDKRWSGNEPTDEFSDLPLRVAEITKEQRLRRESQYQENRGSLVVTNGGVEHDLDQIDYIDSCTAEEEEAEVRQPKGPDPDSLSSQFMAYIEQRRISHEGSPVKPVAIREFQKTEDMRRYLHQNRVPAEPSSLLSLSASHNQLSHTDLELHQRREQLVERTRREAQLAALQYEEEKIRTKQIQRDAVLDFVKQKASQSPQKQHPLLDGVDGECPFPSRRSQHTDDSALCMSLSGLNQVGCAATLPHSSAFTPLKSDDRPNALLSSPATETVHHSPAYSFPAAIQRNQPQRPESFLFRAGVRAETNKGHASPLPPSAAPTTDSTDSITGQNSRQREEELELIDQLRKHIEYRLKVSLPCDLGAALTDGVVLCHLANHVRPRSVPSIHVPSPAVPKLTMAKCRRNVENFLEACRKIGVPQEQLCLPLHILEEKGLSQVAVTVQALLELAPPKQQQHQLSAV

SEQ ID NO: 800814 - protein, 790 aa, Homo sapiens; identical to SEQ ID NO: 800813

SEQ ID NO: 800815 - protein, 565 aa, Homo sapiens
NASRAGMRSAEGEMAAAGLVAVAAAAEYSGTVASGGNLPGVHCGPSSGAGPGFGPGSWSRSLDRALEEAAVTGVLSLSGRKLREFPRGAANHDLTDTTRADLSRNRLSEIPIEACHFVSLENLNLYQNCIRYIPEAILNLQALTFLNISRNQLSTLPVHLCNLPLKVLIASNNKLVSLPEEIGHLRHLMELDVSCNEIQTIPSQIGNLEALRDLNVRRNHLVHLPEELAELPLIRLDFSCNKITTIPVCYRNLRHLQTITLDNNPLQSPPAQICIKGKVHIFKYLNIQACKIAPDLPDYDRRPLGFGSCHEELYSSRPYGALDSGFNSVDSGDKRWSGNEPTDEFSDLPLRVAEITKEQRLRRESQYQENRGSLVVTNGGVEHDLDQIDYIDSCTAEEEEAEVRQPKGPDPDSLSSQFMAYIEQRRISHEGSPVKPVAIREFQKTEDMRRYLHQNRVPAEPSSLLSLSASHNQLSHTDLELHQRREQLVERTRREAQLAALQYEEEKIRTKQIQRDAVLDFVKVSRLNDAVQAADWLTAYLFGQARWFLLSIKMSTIFLSVRNLD

SEQ ID NO: 800816 - protein, 750 aa, Homo sapiens
NASRAGMRSAEGEMAAAGLVAVAAAAEYSGTVASGGNLPGVHCGPSSGAGPGFGPGSWSRSLDRALEEAAVTGVLSLSGRKLREFPRGAANHDLTDTTRADLSRNRLSEIPIEACHFVSLENLNLYQNCIRYIPEAILNLQALTFLNISRNQLSTLPVHLCNLPLKVLIASNNKLVSLPEEIGHLRHLMELDVSCNEIQTIPSQIGNLEALRDLNVRRNHLVHLPEELAELPLIRLDFSCNKITTIPVCYRNLRHLQTITLDNNPLQSPPAQICIKGKVHIFKYLNIQACKIAPDLPDYDRRPLGFGSCHEELYSSRPYGALDSGFNSVDSGDKRWSGNEPTDEFSDLPLRVAEITKEQRLRRESQYQENRGSLVVTNGGVEHDLDQIDYIDSCTAEEEEAEVRQPKGPDPDSLSSQFMAYIEQRRISHEGSPVKPVAIREFQKTEDMRRYLHQNRVPAEPSSLLSLSASHNQLSHTDLELHQRREQLVERTRREAQLAALQYEEEKIRTKQIQRDAVLDFVKQKASQSPQKQHPLLDGVDGECPFPSRRSQHTDDSALCMSLSGLNQVGCAATLPHSSAFTPLKSDDRPNALLSSPATETGHASPLPPSAAPTTDSTDSITGQNSRQREEELELIDQLRKHIEYRLKVSLPCDLGAALTDGVVLCHLANHVRPRSVPSIHVPSPAVPKLTMAKCRRNVENFLEACRKIGVPQLPVSVAEFTALTASSWPGAVAHACNPSTLGGRGGWIT

SEQ ID NO: 800817 - protein, 388 aa, Homo sapiens
NASRAGMRSAEGEMAAAGLVAVAAAAEYSGTVASGGNLPGVHCGPSSGAGPGFGPGSWSRSLDRALEEAAVTGVLSLSGRKLREFPRGAANHDLTDTTRADLSRNRLSEIPIEACHFVSLENLNLYQNCIRYIPEAILNLQALTFLNISRNQLSTLPVHLCNLPLKVLIASNNKLVSLPEEIGHLRHLMELDVSCNEIQTIPSQIGNLEALRDLNVRRNHLVHLPEELAELPLIRLDFSCNKITTIPVCYRNLRHLQTITLDNNPLQSPPAQICIKGKVHIFKYLNIQACKIAPDLPDYDRRPLGFGSCHEELYSSRPYGALDSGFNSVDSGDKRWSGNEPTDEFSDLPLRVAEITKEQRLRRESQYQENRGSLVVTNGGGKHNSGDS

SEQ ID NO: 800818 - protein, 214 aa, Homo sapiens
AVLDFVTQKASQSPQKQHPLLDGVDGECPFPSRRSQHTDDSALCMSDDRPNALLSSPATETGHASPLPPSAAPTTDSTDSITGQNSRQREEELELIDQLRKHIEYRLKVSLPCDLGAALTDGVVLCHLANHVRPRSVPSIHVPSPAVPKLTMAKCRRNVENFLEACRKIGVPQEQLCLPLHILEEKGLSQVAVTVQALLELAPPKQQQHQLSAV

SEQ ID NO: 800819 - protein, 241 aa, Homo sapiens
GRACAELAGPSVVGWEMAAAGLVAVAAAAEYSGTVASGGNLPGVHCGPSSGAGPGFGPGSWSRSLDRALEEAAVTGVLSLSGRKLREFPRGAANHDLTDTTRADLSRNRLSEIPIEACHFVSLENLNLYQNCIRYIPEAILNLQALTFLNISRNQLSTLPVHLCNLPLKVLIASNNKLVSLPEEIGHLRHLMELDVSCNEIQTIPSQIGNLEALRDLNVRRNHLVHLPEDLSRESPFRNLL

SEQ ID NO: 800820 - protein, 783 aa, Homo sapiens
GRACAELAGPSVVGWEMAAAGLVAVAAAAEYSGTVASGGNLPGVHCGPSSGAGPGFGPGSWSRSLDRALEEAAVTGVLSLSGRKLREFPRGAANHDLTDTTRADLSRNRLSEIPIEACHFVSLENLNLYQNCIRYIPEAILNLQALTFLNISRNQLSTLPVHLCNLPLKVLIASNNKLVSLPEEIGHLRHLMELDVSCNEIQTIPSQIGNLEALRDLNVRRNHLVHLPEELAELPLIRLDFSCNKITTIPVCYRNLRHLQTITLDNNPLQSPPAQICIKGKVHIFKYLNIQACKIAPDLPDYDRRPLGFGSCHEELYSSRPYGALDSGFNSVDSGDKRWSGNEPTDEFSDLPLRVAEITKEQRLRRESQYQENRGSLVVTNGGVEHDLDQIDYIDSCTAEEEEAEVRQPKGPDPDSLSSQFMAYIEQRRISHEGSPVKPVAIREFQKTEDMRRYLHQNRVPAEPSSLLSLSASHNQLSHTDLELHQRREQLVERTRREAQLAALQYEEEKIRTKQIQRDAVLDFVKQKASQSPQKQHPLLDGVDGECPFPSRRSQHTDDSALCMSLSGLNQVGCAATLPHSSAFTPLKSDDRPNALLSSPATETGHASPLPPSAAPTTDSTDSITGQNSRQREEELELIDQLRKHIEYRLKVSLPCDLGAALTDGVVLCHLANHVRPRSVPSIHVPSPAVPKLTMAKCRRNVENFLEACRKIGVPQDNLCSPSDILQLNLSVKRTVETLLSLGAHSEESSFVCLSLQLLGFVAFYCTVMLTLCVLYYWLFPAR

SEQ ID NO: 800821 - protein, 780 aa, Homo sapiens; identical to SEQ ID NO: 800811

SEQ ID NO: 800822 - protein, 133 aa, Homo sapiens
  misc_feature (8)..(8): Xaa can be any naturally occurring amino acid
SCRIGTRXGAALTDGVVLCHLANHVRPRSVPSIHVPSPAVPKLTMAKCRRNVENFLEACRKIGVPQDNLCSPSDILQLNLSVKRTVETLLSLGAHSEESSFVCLSLQLLGFVAFYCTVMLTLCVLYYWLFPAR

SEQ ID NO: 800823 - protein, 444 aa, Homo sapiens
NASRAGMRSAEGEMAAAGLVAVAAAAEYSGTVASGGNLPGVHCGPSSGAGPGFGPGSWSRSLDRALEEAAVTGVLSLSGRKLREFPRGAANHDLTDTTRADLSRNRLSEIPIEACHFVSLENLNLYQNCIRYIPEAILNLQALTFLNISRNQLSTLPVHLCNLPLKVLIASNNKLVSLPEEIGHLRHLMELDVSCNEIQTIPSQIGNLEALRDLNVRRNHLVHLPEELAELPLIRLDFSCNKITTIPVCYRNLRHLQTITLDNNPLQSPPAQICIKGKVHIFKYLNIQACKIAPDLPDYDRRPLGFGSCHEELYSSRPYGALDSGFNSVDSGDKRWSGNEPTDEFSDLPLRVAEITKEQRLRRESQYQENRGSLVVTNGGVEHDLDQIDYIDSCTAEEEEAEVRQPKGPDPDSLSSQFMAYIEQRRISHEVVHRLKPKYVAIPS

SEQ ID NO: 800824 - protein, 689 aa, Homo sapiens
NASRAGMRSAEGEMAAAGLVAVAAAAEYSGTVASGGNLPGVHCGPSSGAGPGFGPGSWSRSLDRALEEAAVTGVLSLSGRKLREFPRGAANHDLTDTTRADLSRNRLSEIPIEACHFVSLENLNLYQNCIRYIPEAILNLQALTFLNISRNQLSTLPVHLCNLPLKVLIASNNKLVSLPEEIGHLRHLMELDVSCNEIQTIPSQIGNLEALRDLNVRRNHLVHLPEELAELPLIRLDFSCNKITTIPVCYRNLRHLQTITLDNNPLQSPPAQICIKGKVHIFKYLNIQACKIAPDLPDYDRRPLGFGSCHEELYSSRPYGALDSGFNSVDSGDKRWSGNEPTDEFSDLPLRVAEITKEQRLRRESQYQENRGSLVVTNGGVEHDLDQIDYIDSCTAEEEEAEVRQPKGPDPDSLSSQFMAYIEQRRISHEGSPVKPVAIREFQKTEDMRRYLHQNRVPAEPSSLLSLSASHNQLSHTDLELHQRREQLVERTRREAQLAALQYEEEKIRTKQIQRDAVLDFVKQKASQSPQKQHPLLDGVDGECPFPSRRSQHTDDSALCMSLSGLNQVGCAATLPHSSAFTPLKSDDRPNALLSSPATETGHASPLPPSAAPTTDSTDSITGQNSRQREEELELIDQLRKHIEYRLKVSLPCDLGAALTDGVVLCHLANHVRPRSVPSIHVPSPAVVS

SEQ ID NO: 800825 - protein, 258 aa, Homo sapiens
MRRGTRIHGSEVKFVKMSTIPRHFGLKYKEESYMFKELEKVRQETKKDFLRFKQKLASKPAVDESPVHSLHAPGPARPARVSCAAARTSRRYPSLKGPAMSAAALLQEVLGGAPRPSGLGEAAAPGKTRSFRPRDFYLRSSAFLRHQALKKPPVIASGFGTARPVVLLPPPEPPVKRRARGVLESSRHAAPRRVFHLGREREQSQEVAPLAGPCMAKERKASSVSAEDGYMEASSGRRKVRIRSNFVSESGAREAREA

SEQ ID NO: 800826 - protein, 285 aa, Homo sapiens
ASRAHPAPRHRKGLLDTRRAAGPSSPPPELERRRPRCRVKFVKMSTIPRHFGLKYKEESYMFKELEKVRQETKKDFLRFKQKLASKPAVDESPVHSLHAPGPARPARVSCAAARTSRRYPSLKGPAMSAAALLQEVLGGAPRPSGLGEAAAPGKTRSFRPRDFYLRSSAFLRHQALKKPPVIASGFGTARPVVLLPPPEPPVKRRARGVLESSRHAAPRRVFHLGREREQSQEVAPLAGPCMAKERKASSVSAEDGYMEASSGRRKVRIRSNFVSESGAREAREA

SEQ ID NO: 800827 - protein, 177 aa, Homo sapiens
PPRGQLARKSACFLSHPLVHTLPNTTPYLTFLLTSAADHTLVMDKLLSTVPPTQPPCPGHEVFASLIWSIWPLLESCQMRDISFTWRRMGRSQHLTSATLPQNQCHPSPAHPNLVSYIIPQLHQDLVEEELRGSSRLTCILKYAFCPVLISSPSTSAGGMGASAGRPACWSPSLQST

SEQ ID NO: 800828 - protein, 102 aa, Homo sapiens
MRRQRDISFTWRRMGRSQHLTSATLPQNQCHPSPAHPNLVSYIIPQLHQDLVEEELRGSSRLTCILKYAFCPVLISSPSTSAGGMGASAGRPACWSPSLQST

SEQ ID NO: 800829 - protein, 133 aa, Homo sapiens
MRKHVLAASFSMLSLLVIMGDTDSKTDSSFIMDSDPRRCMRHHYVDSISHPLYKCSSKMVLLARCEGHCSQASRSEPLVSFSTVLKQPFRSSCHCCRPQTSKLKALRLRCSGGMRLTATYRYILSCHCEECNS

SEQ ID NO: 800830 - protein, 133 aa, Homo sapiens; identical to SEQ ID NO: 800829

SEQ ID NO: 800831 - protein, 209 aa, Homo sapiens
MKKVRLKELESRLQQVDGFEKPKLLLEQYPTRPHIAACMLYTIHNTYDDIENKVVADLGCGCGVLSIGTAMLGAGLCVGFDIDEDALEIFNRNAEEFELTNIDMVQCDVCLLSNRMSKSFDTVIMNPPFGTKNNKGTDMAFLKTALEMARTAVYSLHKSSTREHVQKKAAEWKIKIDIIAELRYDLPASYKFHKKKSVDIEVDLIRFSF

SEQ ID NO: 800832 - protein, 209 aa, Homo sapiens; identical to SEQ ID NO: 800831

SEQ ID NO: 800833 - protein, 209 aa, Homo sapiens; identical to SEQ ID NO: 800831

SEQ ID NO: 800834 - protein, 215 aa, Homo sapiens
MKKVRLKELESRLQQVDGFEKPKLLLEQYPTRPHIAACMLYTIHNTYDDIENKVVADLGCGCGVLSIGTAMLGAGLCVGFDIDEDALEIFNRNAEEFELTNIDMVQCDVCLLSNRMSKSFDTVIMNPPFGTKNNKGTDMAFLKTALEMARTAVYSLHKSSTREHVQKKAAEWKIKIDIIAGGFCFTELRYDLPASYKFHKKKSVDIEVDLIRFSF

SEQ ID NO: 800835 - protein, 209 aa, Homo sapiens; identical to SEQ ID NO: 800831

SEQ ID NO: 800836 - protein, 198 aa, Homo sapiens
MKKVRLKELESRLQQVDGFEKPKLLLEQYPTRPHIAACMLYTIHNTYDDIENKVVADLGCGCGVLSIGTAMLGAGLCVGFDIDEDALEIFNRNAEEFELTNIDMVQCDVCLLSNRMSKSFDTVIMNPPFGTKNNKGTDMAFLKTALEMARTAVYSLHKSSTREHVQKKAAEWKIKIDIIAELRYDLPASYKFHKKKSV

SEQ ID NO: 800837 - protein, 186 aa, Homo sapiens
MKKVRLKELESRLQQVDGFEKPKLLLEQYPTRPHIAACMLYTIHNTYDDIENKVVADLGCGCGVLSIGTAMLGAGLCVGFDIDEDALEIFNRNAEEFELTNIDMVQCDVCLLSNRMSKSFDTVIMNPPFGTKNNKGTDMAFLKTALEMARTAVYSLHKSSTRENFDMTCQHHTSFTKRNQWTLKWT

SEQ ID NO: 800838 - protein, 209 aa, Homo sapiens; identical to SEQ ID NO: 800831

SEQ ID NO: 800839 - protein, 30 aa, Homo sapiens
MTRKSRRPMLNNAGRDIIKAKSSVRIPFAP

SEQ ID NO: 800840 - protein, 138 aa, Homo sapiens [sequence omitted]

SEQ ID NO: 800841 - protein, 96 aa, Homo sapiens
GRLQLREGRPLPAAGSAASLRLWPGAALTVGHELHDEPRAQPYTRTWSLHQYQPETIVSPRSSAGHGRSPVTGCRSRPRAPRPCPPRPSLVGEPLP

SEQ ID NO: 800842 - protein, 941 aa, Homo sapiens
MYQGEFGLNMKLGYGKFSWPTGESYHGQFYRDHCHGLGTYMWPDGSSFTGTFYLSHREGYGTMYMKTRLFQGLYKADQRFGPGVETYPDGSQDVGLWFREQLIKLCTQIPSGFSLLRYPEFSSFITHSPARISLSEEEKTEWGLQEGQDPFFYDYKRFLLNDNLTLPPEMYVYSTNSDHLPMTSSFRKELDARIFLNEIPPFVEDGEPWFIINETPLLVKIQKQTYKFRNKPAHTSWNMGAILEGKRSGFAPCGPKEQLSMEMILKAEEGNHEWICRILKDNFASADVADAKGYTVLAAAATHCHNDIVNLLLDCGADVNKCSDEGLTALSMCFLLHYPAQSFKPNVAERTIPEPQEPPKFPVVPILSSSFMDTNLESLYYEVNVPSQGSYELRPPPAPLLLPRVSGSHEGGHFQDTGQCGGSIDHRSSSLKGDSPLVKGSLGHVESGLEDVLGNTDRGSLCSAETKFESNVCVCDFSIELSQAMLERSAQSHSLLKMASPSPCTSSFDKGTMRRMALSMIERRKRWRTIKLLLRRGADPNLCCVPMQVLFLAVKAGDVDGVRLLLEHGARTDICFPPQLSTLTPLHIAAALPGEEGVQIVELLLHAITDVDAKASDEDDTYKPGKLDLLPSSLKLSNEPGPPQAYYSTDTALPEEGGRTALHMACEREDDNKCARDIVRLLLSHGANPNLLWSGHSPLSLSIASGNELVVKELLTQGADPNLPLTKGLGSALCVACDLTYEHQRNMDSKLALIDRLISHGADILKPVMLRQGEKEAVGTAVDYGYFRFFQDRRIARCPFHTLMPAERETFLARKRLLEYMGLQLRQAVFAKESQWDPTWLYLCKRAELIPSHRMKKKGPSLPRGLDVKEQGQIPFFKFCYQCGRSIGVRLLPCPRCYGILTCSKYCKTKAWTEFHKKDCGDLVAIVTQLEQVSRRREEFQ

SEQ ID NO: 800843 - protein, 769 aa, Homo sapiens
GLSPGKRDALRRRRAGKQSGRERGRPRWLQSRRSPCCPARALRVLLGWKTTDMEGAHASLSLEDEVSGAGSRQRPLEGKGGETPAAEEPGSLKNYAVFATRDVSAAPEKEEEEAEGPLRAQDLRESYIQLVQGVQEWQDGCMYQGEFGLNMKLGYGKFSWPTGESYHGQFYRDHCHGLGTYMWPDGSSFTGTFYLSHREGYGTMYMKTRLFQTHCHNDIVNLLLDCGADVNKCSDEGLTALSMCFLLHYPAQSFKPNVAERTIPEPQEPPKFPVVPILSSSFMDTNLESLYYEVNVPSQGSYELRPPPAPLLLPRVSGSHEGGHFQDTGQCGGSIDHRSSSLKGDSPLVKGSLGHVESGLEDVLGNTDRGSLCSAETKFESNVCVCDFSIELSQAMLERSAQSHSLLKMASPSPCTSSFDKGTMRRMALSMIERRKRWRTIKLLLRRGADPNLCCVPMQVLFLAVKAGDVDGVRLLLEHGARTDICFPPQLSTLTPLHIAAALPGEEGVQIVELLLHAITDVDAKASDEDDTYKPGKVVKELLTQGADPNLPLTKGLGSALCVACDLTYEHQRNMDSKLALIDRLISHGADILKPVMLRQGEKEAVGTAVDYGYFRFFQDRRIARCPFHTLMPAERETFLARKRLLEYMGLQLRQAVFAKESQWDPTWLYLCKRAELIPSHRMKKKGPSLPRGLDVKEQGQIPFFKFCYQCGRSIGVRLLPCPRCYGILTCSKYCKTKAWTEFHKKDCGDLVAIVTQLEQVSRRREEFQ

SEQ ID NO: 800844 - protein, 221 aa, Homo sapiens
RLHGGARGLQVRQQVLSRVVEHGHAQLCHAGRARAGLLAGDVDAQRDSRARQLLLRARELARSRGRVRARRAPTVEVRARRPRGAQLLPVPWRPPKSLLLGPEDLFWGLRRPPRSLFVGAGRAAGRPRVLEASEVDQAGVLGPPRALGRDRGLGSRWGRGMAGGLGLTRAPGPWTALRPMFSVPGRRPPRPRGLWHWACVCGSWAQRPARSTAASGAEASA

SEQ ID NO: 800845 - protein, 522 aa, Homo sapiens
MYQGEFGLNMKLGYGKFSWPTGESYHGQFYRDHCHGLGTYMWPDGSSFTGTFYLSHREGYGTMYMKTRLFQGLYKADQRFGPGVETYPDGSQDVGLWFREQLIKLCTQIPSGFSLLRYPEFSSFITHSPARISLSEEEKTEWGLQEGQDPFFYDYKRFLLNDNLTLPPEMYVYSTNSDHLPMTSSFRKELDARIFLNEIPPFVEDGEPWFIINETPLLVKIQKQTYKFRNKPAHTSWNMGAILEGKRSGFAPCGPKEQLSMEMILKAEEGNHEWICRILKDNFASADVADAKGYTVLAAAATHCHNDIVNLLLDCGADVNKCSDEGLTALSMCFLLHYPAQSFKPNVAERTIPEPQEPPKFPVVPILSSSFMDTNLESLYYEVNVPSQGSYELRPPPAPLLLPRVSGSHEGGHFQDTGQCGGSIDHRSSSLKGDSPLVKGSLGHVESGLEDVLGNTDRGSLCSAETKFESNVCVCDFSIELSQAMLERSAQSHSLLKMASPSPCTSSFDKGTMRRMALSMIE

SEQ ID NO: 800846 - protein, 941 aa, Homo sapiens; identical to SEQ ID NO: 800842

SEQ ID NO: 800847 - protein, 292 aa, Homo sapiens
MYQGEFGLNMKLGYGKFSWPTGESYHGQFYRDHCHGLGTYMWPDGSSFTGTFYLSHREGYGTMYMKTRLFQTHCHNDIVNLLLDCGADVNKCSDEGLTALSMCFLLHYPAQSFKPNVAERTIPEPQEPPKFPVVPILSSSFMDTNLESLYYEVNVPSQGSYELRPPPAPLLLPRVSGSHEGGHFQDTGQCGGSIDHRSSSLKGDSPLVKGSLGHVESGLEDVLGNTDRGSLCSAETKFESNVCVCDFSIELSQAMLERSAQSHSLLKMASPSPCTSSFDKGTMRRMALSMIE

SEQ ID NO: 800848 - protein, 139 aa, Homo sapiens
EKTEREPGYQADCLVTPLGASVADSNSRMPGIPEFCHSPGWSPFIANQAWWLSLKGIPSGSGRAAISHQLLHLTVIPWAVLPGPLPWPGYLHVARWLQFHGHILPQPPRRLRHHVHEDTAFPGEGAAMCSAGVEVAVCV

SEQ ID NO: 800849 - protein, 573 aa, Homo sapiens
EKTEREPGYQADCLVTPLGASVADSNSRMPGIPEFCHSPGWSPFIANQAWWLSLKGIPSGSGRAAISHQLPISQSYHGQFYRDHCHGLGTYMWPDGSSFTGTFYLSHREGYGTMYMKTRLFQGLYKADQRFGPGVETYPDGSQDVGLWFREQLIKLCTQIPSGFSLLRYPEFSSFITHSPARISLSEEEKTEWGLQEGQDPFFYDYKRFLLNDNLTLPPEMYVYSTNSDHLPMTSSFRKELDARIFLNEIPPFVEDGEPWFIINETPLLVKIQKQTYKFRNKPAHTSWNMGAILEGKRSGFAPCGPKEQLSMEMILKAEEGNHEWICRILKDNFASADVADAKGYTVLAAAATHCHNDIVNLLLDCGADVNKCSDEGLTALSMCFLLHYPAQSFKPNVAERTIPEPQEPPKFPVVPILSSSFMDTNLESLYYEVNVPSQGSYELRPPPAPLLLPRVSGSHEGGHFQDTGQCGGSIDHRSSSLKGDSPLVKGSLGHVESGLEDVLGNTDRGSLCSAETKFESNVCVCDFSIELSQAMLERSAQSHSLLKMASPSPCTSSFDKGTMRRMALSMIE

SEQ ID NO: 800850 - protein, 101 aa, Homo sapiens
LCSPQPGLTAPHEAQATAFPLLGRGEMRLLQGSPELAICRSLALLPTSLPCLASVSPLGDVSLQVPSPASDDAAAPGAAGGGQVTGQHLPLPKSPAVAGVH

SEQ ID NO: 800851 - protein, 321 aa, Homo sapiens
MKEDCLPSSHVPISDSKSIQKSELLGLLKTYNCYHEGKSFQLRHREEEGTLIIEGLLNIAWGLRRPIRLQMQDDREQVHLPSTSWMPRRPSCPLKEPSPQNGNITAQGPSIQPVHKAESSTDSSGPLEEAEEAPQLMRTKSDASCMSQRRPKCRAPGEAQRIRRHRFSINGHFYNHKTSVFTPAYGSVTNVRVNSTMTTLQVLTLLLNKFRVEDGPSEFALYIVHESGERTKLKDCEYPLISRILHGPCEKIARIFLMEADLGVEVPHEVAQYIKFEMPVLDSFVEKLKEEEEREIIKLTMKFQALRLTMLQRLEQLVEAK

SEQ ID NO: 800852 - protein, 352 aa, Homo sapiens
MAVWSPLVMPGRREGCCHTPVTNEETEAREAKGQKLRPCHTLGVHVRLSLFRSELLGLLKTYNCYHEGKSFQLRHREEEGTLIIEGLLNIAWGLRRPIRLQMQDDREQVHLPSTSWMPRRPSCPLKEPSPQNGNITAQGPSIQPVHKAESSTDSSGPLEEAEEAPQLMRTKSDASCMSQRRPKCRAPGEAQRIRRHRFSINGHFYNHKTSVFTPAYGSVTNVRVNSTMTTLQVLTLLLNKFRVEDGPSEFALYIVHESGERTKLKDCEYPLISRILHGPCEKIARIFLMEADLGVEVPHEVAQYIKFEMPVLDSFVEKLKEEEEREIIKLTMKFQALRLTMLQRLEQLVEAK

SEQ ID NO: 800853 - protein, 329 aa, Homo sapiens
MKEDCLPSSHVPISDSKSIQKSSLGVQEEGTLIIEGLLNIAWGLRRPIRLQMQDDREQVHLPSTSWMPRRPSCPLGCWSLLLGLSSLSLPAAISALQLSVFRKEPSPQNGNITAQGPSIQPVHKAESSTDSSGPLEEAEEAPQLMRTKSDASCMSQRRPKCRAPGEAQRIRRHRFSINGHFYNHKTSVFTPAYGSVTNVRVNSTMTTLQVLTLLLNKFRVEDGPSEFALYIVHESGERTKLKDCEYPLISRILHGPCEKIARIFLMEADLGVEVPHEVAQYIKFEMPVLDSFVEKLKEEEEREIIKLTMKFQALRLTMLQRLEQLVEAK

SEQ ID NO: 800854 - protein, 218 aa, Homo sapiens
MTGSRCTSPPPHGCPDGLAALWPLEEAEEAPQLMRTKSDASCMSQRRPKCRAPGEAQRIRRHRFSINGHFYNHKTSVFTPAYGSVTNVRVNSTMTTLQVLTLLLNKFRVEDGPSEFALYIVHESGERTKLKDCEYPLISRILHGPCEKIARIFLMEADLGVEVPHEVAQYIKFEMPVLDSFVEKLKEEEEREIIKLTMKFQALRLTMLQRLEQLVEAK

SEQ ID NO: 800855 - protein, 370 aa, Homo sapiens
MAVWSPLVMPGRREGCCHTPVTNEETEAREAKGQKLRPCHTLGVHVRLSLFRSELLGLLKTYNCYHEGKSFQLRHREEEGTLIIEGLLNIAWGLRRPIRLQMQDDREQVHLPSTSWMPRRPSCPLKEPSPQNGNITAQGPSIQPVHKAESSTDSSGPLEEAEEAPQLMRTKSDASCMSQRRPKCRAPGEAQRIRRHRFSINGHFYNHKTSVFTPAYGSVTNVRVNSTMTTLQVLTLLLNKFRFSPISKHRDLTSCDCLLQVEDGPSEFALYIVHESGERTKLKDCEYPLISRILHGPCEKIARIFLMEADLGVEVPHEVAQYIKFEMPVLDSFVEKLKEEEEREIIKLTMKFQALRLTMLQRLEQLVEAK

SEQ ID NO: 800856 - protein, 238 aa, Homo sapiens
MKEDCLPSSHVPISDSKSIQKSELLGLLKTYNCYHEGKSFQLRHREEEGTLIIEGLLNIAWGLRRPIRLQMQDDREQVHLPSTSWMPRRPSCPLKEPSPQNGNITAQGPSIQPVHKAESSTDSSGPLEEAEEAPQLMRTKSDASCMSQRRPKCRAPGEAQRIRRHRFSINGHFYNHKTSVFTPAYGSVTNVRVNSTMTTLQVLTLLLNKFRVEDGPSEFALYIVHESGEDRQDLPDGS

SEQ ID NO: 800857 - protein, 133 aa, Homo sapiens [sequence omitted]

SEQ ID NO: 800858 - protein, 133 aa, Homo sapiens [sequence omitted]

SEQ ID NO: 800859 - protein, 321 aa, Homo sapiens; identical to SEQ ID NO: 800851

SEQ ID NO: 800860 - protein, 158 aa, Homo sapiens
MAVWSPLVMPGRREGCCHTPVTNEETEAREAKGQKLRPCHTLGVHVRLSLFRSELLGLLKTYNCYHEGKSFQLRHREEEGTLIIEGLLNIAWGLRRPIRLQMQDDREQVHLPSTSWMPRRPSCPLKEPSPQNGNITAQGPSIQPVHKAESSTDSSGPS

SEQ ID NO: 800861 - protein, 107 aa, Homo sapiens
MKEDCLPSSHVPISDSKSIQKSELLGLLKTYNCYHEGKSFQLRHREEEGTLIIEGLLNIAWGLRRPIRLQMQDDREQVHLPSTSWMPRRPSCPLLTLWFEIQASPQP

SEQ ID NO: 800862 - protein, 116 aa, Homo sapiens
AYGSVTNVRVNSTMTTLQVLTLLLNKFRVSLVRSSLAPGCQWSAILLGVGFWGKLPVAEAAWAEGLARVPLLSFGFSDFKQEEVGRGQVPCNLRVCYWGCSYCQGTLSVLSHLQAP

SEQ ID NO: 800863 - protein, 67 aa, Homo sapiens
AAAYYYYYCSEFKLLTMYAGHAVRNCVRANVTAGFPQPSSIITDTESCRGGLPTVLSTLPSSGSIDP

SEQ ID NO: 800864 - protein, 321 aa, Homo sapiens; identical to SEQ ID NO: 800851

SEQ ID NO: 800865 - protein, 333 aa, Homo sapiens
MKEDCLPSSHVPISDSKSIQKSELLGLLKTYNCYHEGKSFQLRHREEAQCHICACRAPEEGTLIIEGLLNIAWGLRRPIRLQMQDDREQVHLPSTSWMPRRPSCPLKEPSPQNGNITAQGPSIQPVHKAESSTDSSGPLEEAEEAPQLMRTKSDASCMSQRRPKCRAPGEAQRIRRHRFSINGHFYNHKTSVFTPAYGSVTNVRVNSTMTTLQVLTLLLNKFRVEDGPSEFALYIVHESGERTKLKDCEYPLISRILHGPCEKIARIFLMEADLGVEVPHEVAQYIKFEMPVLDSFVEKLKEEEEREIIKLTMKFQALRLTMLQRLEQLVEAK

SEQ ID NO: 800866 - protein, 344 aa, Homo sapiens
MKEDCLPSSHVPISDSKSIQKSELLGLLKTYNCYHEGKSFQLRHREEEGTLIIEGLLNIAWGLRRPIRLQMQDDREQVHLPSTSWMPRRPSCPLKEPSPQNGNITAQGPSIQPVHKAESSTDSSGPLEEAEEAPQLMRTKSDASCMSQRRPKCRAPGEAQRIRRHRFSINGHFYNHKTSVFTPAYGSVTNVRVNSTMTTLQVLTLLLNKFRVEDGPSEFALYIVHESGGFSRRIPPSYRKPPSPPLPEKWMERTKLKDCEYPLISRILHGPCEKIARIFLMEADLGVEVPHEVAQYIKFEMPVLDSFVEKLKEEEEREIIKLTMKFQALRLTMLQRLEQLVEAK

SEQ ID NO: 800867 - protein, 185 aa, Homo sapiens
MRTKSDASCMSQRRPKCRAPGEAQRIRRHRFSINGHFYNHKTSVFTPAYGSVTNVRVNSTMTTLQVLTLLLNKFRVEDGPSEFALYIVHESGERTKLKDCEYPLISRILHGPCEKIARIFLMEADLGVEVPHEVAQYIKFEMPVLDSFVEKLKEEEEREIIKLTMKFQALRLTMLQRLEQLVEAK

SEQ ID NO: 800868 - protein, 133 aa, Homo sapiens [sequence omitted]

SEQ ID NO: 800869 - protein, 321 aa, Homo sapiens; identical to SEQ ID NO: 800851

SEQ ID NO: 800870 - protein, 280 aa, Homo sapiens
MKEDCLPSSHVPISDSKSIQKSELLGLLKTYNCYHEGKSFQLRHREEEGTLIIEGLLNIAWGLRRPIRLQMQDDREQVHLPSTSWMPRRPSCPLKEPSPQNGNITAQGPSIQPVHKAESSTDSSGPLEEAEEAPQLMRTKSDASCMSQRRPKCRAPGEAQRIRRHRFSINGHFYNHKTSVFTPAYGSVTNVRVNSTMTTLQVLTLLLNKFRVEDGPSEFALYIVHESGERTKLKDCEYPLISRILHGPCEKIARIFLMEADLGVEVPHEVSGGQGWGGLL

SEQ ID NO: 800871 - protein, 247 aa, Homo sapiens
MAVWSPLVMPGRREGCCHTPVTNEETEAREAKGQKLRPCHTLGVHVRLSLFRSELLGLLKTYNCYHEGKSFQLRHREEEGTLIIEGLLNIAWGLRRPIRLQMQDDREQVHLPSTSWMPRRPSCPLKEPSPQNGNITAQGPSIQPVHKAESSTDSSGPLEEAEEAPQLMRTKSDASCMSQRRPKCRAPGEAQRIRRHRFSINGHFYNHKTSVFTPAYGSVTNVRVNSTMTTLQVLTLLLNKFRGRWPQ

SEQ ID NO: 800872 - protein, 130 aa, Homo sapiens
MKEDCLPSSHVPISDSKSIQKSELLGLLKTYNCYHEGKSFQLRHREEEGTLIIEGLLNIAWGLRRPIRLQMQDDREQVHLPSTSWMPRRPSCPLHLAGKKGRLQPGGLPTPMQAEHVSPSLVLSLKFTRI

SEQ ID NO: 800873 - protein, 711 aa, Homo sapiens
MGWLPLLLLLTQCLGVPGQRSPLNDFQVLRGTELQHLLHAVVPGPWQEDVADAEECAGRCGPLMDCRAFHYNVSSHGCQLLPWTQHSPHTRLRRSGRCDLFQKKDYVRTCIMNNGVGYRGTMATTVGGLPCQAWSHKFPNDHKYTPTLRNGLEENFCRNPDGDPGGPWCYTTDPAVRFQSCGIKSCREAACVWCNGEEYRGAVDRTESGRECQRWDLQHPHQHPFEPGKFLDQGLDDNYCRNPDGSERPWCYTTDPQIEREFCDLPRCGSEAQPRQEATTVSCFRGKGEGYRGTANTTTAGVPCQRWDAQIPHQHRFTPEKYACKDLRENFCRNPDGSEAPWCFTLRPGMRAAFCYQIRRCTDDVRPQDCYHGAGEQYRGTVSKTRKGVQCQRWSAETPHKPQFTFTSEPHAQLEENFCRNPDGDSHGPWCYTMDPRTPFDYCALRRCADDQPPSILDPPDQVQFEKCGKRVDRLDQRRSKLRVVGGHPGNSPWTVSLRNRQGQHFCGGSLVKEQWILTARQCFSSCHMPLTGYEVWLGTLFQNPQHGEPSLQRVPVAKMVCGPSGSQLVLLKLERSVTLNQRVALICLPPEWYVVPPGTKCEIAGWGETKGTGNDTVLNVALLNVISNQECNIKHRGRVRESEMCTEGLLAPVGACEGDYGGPLACFTHNCWVLEGIIIPNRVCARSRWPAVFTRVSVFVDWIHKVMRLG

SEQ ID NO: 800874 - protein, 784 aa, Homo sapiens
MGWLPLLLLLTQCLGVPGQRSPLNDFQVLRGTELQHLLHAVVPGPWQEDVADAEECAGRCGPLMDCRAFHYNVSSHGCQLLPWTQHSPHTRLRRSGRCDLFQKKDYVRTCIMNNGVGYRGTMATTVGGLPCQAWSHKFPNDHKYTPTLRNGLEENFCRNPDGDPGGPWCYTTDPAVRFQSCGIKSCREAACVWCNGEEYRGAVDRTESGRECQRWDLQHPHQHPFEPGKFLDQGLDDNYCRNPDGSERPWCYTTDPQIEREFCDLPRCGSEAQPRQEATTVSCFRGKGEGYRGTANTTTAGVPCQRWDAQIPHQHRFTPEKYACKEVGGGGGRWDVLLRVRREEGSHGLKAGGWRARAEWSACLETFGRTSAGTPTAQRRPGASHCGPACARPFATRSGVVQTTCGPRVRPKLGGYRAGLEAWNRRAGARSRPDGCPHAATDCYHGAGEQYRGTVSKTRKGVQCQRWSAETPHKPQFTFTSEPHAQLEENFCRNPDGDSHGPWCYTMDPRTPFDYCALRRCADDQPPSILDPPDQVQFEKCGKRVDRLDQRRSKLRVVGGHPGNSPWTVSLRNRQGQHFCGGSLVKEQWILTARQCFSSCHMPLTGYEVWLGTLFQNPQHGEPSLQRVPVAKMVCGPSGSQLVLLKLERSVTLNQRVALICLPPEWYVVPPGTKCEIAGWGETKGTGNDTVLNVALLNVISNQECNIKHRGRVRESEMCTEGLLAPVGACEGDYGGPLACFTHNCWVLEGIIIPNRVCARSRWPAVFTRVSVFVDWIHKVMRLG

SEQ ID NO: 800875 - protein, 541 aa, Homo sapiens
MGWLPLLLLLTQCLGVPGQRSPLNDFQVLRGTELQHLLHAVVPGPWQEDVADAEECAGRCGPLMDCRAFHYNVSSHGCQLLPWTQHSPHTRLRRSGRCDLFQKKDYVRTCIMNNGVGYRGTMATTVGGLPCQAWSHKFPNDHKYTPTLRNGLEENFCRNPDGDPGGPWCYTTDPAVRFQSCGIKSCREAACVWCNGEEYRGAVDRTESGRECQRWDLQHPHQHPFEPGKFLDQGLDDNYCRNPDGSERPWCYTTDPQIEREFCDLPRCGSEAQPRQEATTVSCFRGKGEGYRGTANTTTAGVPCQRWDAQIPHQHRFTPEKYACKEVGGGGGRWDVLLRVRREEGSHGLKAGGWRARAELERLLRDLRENFCRNPDGSEAPWCFTLRPGMRAAFCYQIRRCTDDVRPQDCYHGAGEQYRGTVSKTRKGVQCQRWSAETPHKPQFTFTSEPHAQLEENFCRNPDGDSHGPWCYTMDPRTPFDYCALRRCADDQPPSILDPPDQVQFEKCGKRVDRLDQRRSKLRVVGGHPGNSPWTVSLRNR

SEQ ID NO: 800876 - protein, 808 aa, Homo sapiens
MGWLPLLLLLTQCLGVPGQRSPLNDFQVLRGTELQHLLHAVVPGPWQEDVADAEECAGRCGPLMDCRAFHYNVSSHGCQLLPWTQHSPHTRLRRSGRCDLFQKKDYVRTCIMNNGVGYRGTMATTVGGLPCQAWSHKFPNDHKYTPTLRNGLEENFCRNPDGDPGGPWCYTTDPAVRFQSCGIKSCREAACVWCNGEEYRGAVDRTESGRECQRWDLQHPHQHPFEPGKFLDQGLDDNYCRNPDGSERPWCYTTDPQIEREFCDLPRCGSEAQPRQEATTVSCFRGKGEGYRGTANTTTAGVPCQRWDAQIPHQHRFTPEKYACKEVGGGGGRWDVLLRVRREEGSHGLKAGGWRARAELERLLRDLRENFCRNPDGSEAPWCFTLRPGMRAAFCYQIRRCTDDVRPQDCYHGAGEQYRGTVSKTRKGVQCQRWSAETPHKPQFTFTSEPHAQLEENFCRNPDGDSHGPWCYTMDPRTPFDYCALRRCADDQPPSILDPPDQVQFEKCGKRVDRLDQRRSKLRVVGGHPGNSPWTVSLRNREAQLPVSHREELRLCPLWLSHWGLGIYPCPQRSQPEDGRSSICPRSLLPVLIPHSSRQGQHFCGGSLVKEQWILTARQCFSSCHMPLTGYEVWLGTLFQNPQHGEPSLQRVPVAKMVCGPSGSQLVLLKLERSVTLNQRVALICLPPEWYVVPPGTKCEIAGWGETKGTGNDTVLNVALLNVISNQECNIKHRGRVRESEMCTEGLLAPVGACEGDYGGPLACFTHNCWVLEGIIIPNRVCARSRWPAVFTRVSVFVDWIHKVMRLG

SEQ ID NO: 800877 - protein, 799 aa, Homo sapiens
MGWLPLLLLLTQCLGVPGQRSPLNDFQVLRGTELQHLLHAVVPGPWQEDVADAEECAGRCGPLMDCRAFHYNVSSHGCQLLPWTQHSPHTRLRRSGRCDLFQKKDYVRTCIMNNGVGYRGTMATTVGGLPCQAWSHKFPNDHKYTPTLRNGLEENFCRNPDGDPGGPWCYTTDPAVRFQSCGIKSCREAACVWCNGEEYRGAVDRTESGRECQRWDLQHPHQHPFEPGKFLDQGLDDNYCRNPDGSERPWCYTTDPQIEREFCDLPRCGSEAQPRQEATTVSCFRGKGEGYRGTANTTTAGVPCQRWDAQIPHQHRFTPEKYACKEVGGGGGRWDVLLRVRREEGSHGLKAGGWRARAELERLLRDLRENFCRNPDGSEAPWCFTLRPGMRAAFCYQIRRCTDDVRPQDCYHGAGEQYRGTVSKTRKGVQCQRWSAETPHKPQFTFTSEPHAQLEENFCRNPDGDSHGPWCYTMDPRTPFDYCALRRCADDQPPSILDPPDQVQFEKCGKRVDRLDQRRSKLRVVGGHPGNSPWTVSLRNRQGQHFCGGSLVKEQWILTARQCFSSWGASLVFGDPVSSHLPPSPGKLTSEPWGNGLRVTNDLQSFSPSHMPLTGYEVWLGTLFQNPQHGEPSLQRVPVAKMVCGPSGSQLVLLKLERSVTLNQRVALICLPPEWYVVPPGTKCEIAGWGETKGKSTVHRTAGPRGRSGETRPAGPPGNPGPPGPPGPPGPGIDMYAFCCLGPREKGPDPLQYMRADPAGRCLRQHDPEVDATLKFLTTQIESIRRPRGFREPCVDLRL

SEQ ID NO: 800878 - protein, 751 aa, Homo sapiens
MGWLPLLLLLTQCLGVPGQRSPLNDFQVLRGTELQHLLHAVVPGPWQEDVADAEECAGRCGPLMDCRAFHYNVSSHGCQLLPWTQHSPHTRLRRSGRCDLFQKKDYVRTCIMNNGVGYRGTMATTVGGLPCQAWSHKFPNDHKYTPTLRNGLEENFCRNPDGDPGGPWCYTTDPAVRFQSCGIKSCREAACVWCNGEEYRGAVDRTESGRECQRWDLQHPHQHPFEPGKFLDQGLDDNYCRNPDGSERPWCYTTDPQIEREFCDLPRCGSEAQPRQEATTVSCFRGKGEGYRGTANTTTAGVPCQRWDAQIPHQHRFTPEKYACKEVGGGGGRWDVLLRVRREEGSHGLKAGGWRARAELERLLRDLRENFCRNPDGSEAPWCFTLRPGMRAAFCYQIRRCTDDVRPQDCYHGAGEQYRGTVSKTRKGVQCQRWSAETPHKPQFTFTSEPHAQLEENFCRNPDGDSHGPWCYTMDPRTPFDYCALRRCADDQPPSILDPPDQVQFEKCGKRVDRLDQRRSKLRVVGGHPGNSPWTVSLRNRQGQHFCGGSLVKEQWILTARQCFSSCHMPLTGYEVWLGTLFQNPQHGEPSLQRVPVAKMVCGPSGSQLVLLKLERSVTLNQRVALICLPPEWYVVPPGTKCEIAGWGETKGTGNDTVLNVALLNVISNQECNIKHRGRVRESEMCTEGLLAPVGACEGDYGGPLACFTHNCWVLEGIIIPNRVCARSRWPAVFTRVSVFVDWIHKVMRLG

SEQ ID NO: 800879 - protein, 744 aa, Homo sapiens
MGWLPLLLLLTQCLGVPGQRSPLNDFQVLRGTELQHLLHAVVPGPWQEDVADAEECAGRCGPLMDCRAFHYNVSSHGCQLLPWTQHSPHTRLRRSGRCDLFQKKDYVRTCIMNNGVGYRGTMATTVGGLPCQAWSHKFPNDHKYTPTLRNGLEENFCRNPDGDPGGPWCYTTDPAVRFQSCGIKSCREAACVWCNGEEYRGAVDRTESGRECQRWDLQHPHQHPFEPGKFLDQGLDDNYCRNPDGSERPWCYTTDPQIEREFCDLPRCGSEAQPRQEATTVSCFRGKGEGYRGTANTTTAGVPCQRWDAQIPHQHRFTPEKYACKDLRENFCRNPDGSEAPWCFTLRPGMRAAFCYQIRRCTDDVRPQGEAQAWGLQSRAGSLEPEGRGEVSACWLPAPATDCYHGAGEQYRGTVSKTRKGVQCQRWSAETPHKPQFTFTSEPHAQLEENFCRNPDGDSHGPWCYTMDPRTPFDYCALRRCADDQPPSILDPPDQVQFEKCGKRVDRLDQRRSKLRVVGGHPGNSPWTVSLRNRQGQHFCGGSLVKEQWILTARQCFSSCHMPLTGYEVWLGTLFQNPQHGEPSLQRVPVAKMVCGPSGSQLVLLKLERSVTLNQRVALICLPPEWYVVPPGTKCEIAGWGETKGTGNDTVLNVALLNVISNQECNIKHRGRVRESEMCTEGLLAPVGACEGDYGGPLACFTHNCWVLEGIIIPNRVCARSRWPAVFTRVSVFVDWIHKVMRLG

SEQ ID NO: 800880 - protein, 531 aa, Homo sapiens
VHAPLPPPGSSTKVWTTTIAGILTAPSGHGATLRIRRSSESSVTSPAAGPRHSPAKRPQLSAASAGRVRATGAQPIPPLRAYLASVGTRKSLISTDLRQKNTRASEVGGGGGRWDVLLRVRREEGSHGLKAGGWRARAEWSACFRDLRENFCRNPDGSEAPWCFTLRPGMRAAFCYQIRRCTDDVRPQDCYHGAGEQYRGTVSKTRKGVQCQRWSAETPHKPQFTFTSEPHAQLEENFCRNPDGDSHGPWCYTMDPRTPFDYCALRRCADDQPPSILDPPDQVQFEKCGKRVDRLDQRRSKLRVVGGHPGNSPWTVSLRNRQGQHFCGGSLVKEQWILTARQCFSSCHMPLTGYEVWLGTLFQNPQHGEPSLQRVPVAKMVCGPSGSQLVLLKLERSVTLNQRVALICLPPEWYVVPPGTKCEIAGWGETKGTGNDTVLNVALLNVISNQECNIKHRGRVRESEMCTEGLLAPVGACEGDYGGPLACFTHNCWVLEGIIIPNRVCARSRWPAVFTRVSVFVDWIHKVMRLG

SEQ ID NO: 800881 - protein, 93 aa, Homo sapiens
KSTVHRTAGGQEAQPWIFLQDPLPLPIPLTAGTGNDTVLNVALLNVISNQECNIKHRGRVRESEMCTEGLLAPVGACEVGGRALGQPWKGMGG

SEQ ID NO: 800882 - protein, 296 aa, Homo sapiens
MIAERLARLRQENKPKLVPSQAEIEARLAALKDERQGSIPSTQEMEARLAALQGRVLPSQTPQPAHHTPDTRTQAQQTQDLLTQLAAEVAIDESWKGGGPAASLQNDLNQGGPGSTNSKRQANWSLEEEKSRLLAEAALELREENTRQERILALAKRLAMLRGQDPERVTLQDYRLPDSDDDEDEETAIQRVLQQLTEEAALDEASGFNIPAEQASRPWTQPRGAEPEAQDVDPRPEAEEEELPWCCICNEDATLRCAGCDGDLFCARCFREGHDAFELKEHQTSAYSPPRAGQEH

SEQ ID NO: 800883 - protein, 396 aa, Homo sapiens
MESRCYGCAVKFTLFKKEYGCKNCGRAFCSGCLSFSAAVPRTGNTQQKVCKQCHEVLTRGSSANASKWSPPQNYKKRVAALEAKQKPSTSQSQGLTRQDQMIAERLARLRQENKPKLVPSQAEIEARLAALKDERQGSIPSTQEMEARLAALQGRVLPSQTPQPAHHTPDTRTQAQQTQDLLTQLAAEVAIDESWKGGGPAASLQNDLNQGGPGSTNSKRQANWSLEEEKSRLLAEAALELREENTRQERILALAKRLAMLRGQDPERVTLQDYRLPDSDDDEDEETAIQRVLQQLTEEAALDEASGFNIPAEQASRPWTQPRGAEPEAQDVDPRPEAEEEELPWCCICNEDATLRCAGCDGDLFCARCFREGHDAFELKEHQTSAYSPPRAGQEH

SEQ ID NO: 800884 - protein, 296 aa, Homo sapiens; identical to SEQ ID NO: 800882

SEQ ID NO: 800885 - protein, 296 aa, Homo sapiens; identical to SEQ ID NO: 800882

SEQ ID NO: 800886 - protein, 464 aa, Homo sapiens
  misc_feature (19)..(19): Xaa can be any naturally occurring amino acid
PSGHHLKNYKKRVAALEAXAKAQHFPEPGTDKQKVCKQCHEVLTRGSSANASKWYHLSSADPAVLGATMESRCYGCAVKFTLFKKEYGCKNCGRAFCSGCLSFSAAVPRTGNTQQKVCKQCHEVLTRGSSANASKWSPPQNYKKRVAALEAKQKPSTSQSQGLTRQDQMIAERLARLRQENKPKLVPSQAEIEARLAALKDERQGSIPSTQEMEARLAALQGRVLPSQTPQPAHHTPDTRTQAQQTQDLLTQLAAEVAIDESWKGGGPAASLQNDLNQGGPGSTNSKRQANWSLEEEKSRLLAEAALELREENTRQERILALAKRLAMLRGQDPERVTLQDYRLPDSDDDEDEETAIQRVLQQLTEEAALDEASGFNIPAEQASRPWTQPRGAEPEAQDVDPRPEAEEEELPWCCICNEDATLRCAGCDGDLFCARCFREGHDAFELKEHQTSAYSPPRAGQEH

SEQ ID NO: 800887 - protein, 388 aa, Homo sapiens
MESRCYGCAVKFTLFKKEYGCKNCGRAFCSGCLSFSAAVPRTGNTQQKVCKQCHEVLTRGSSANASKWSPPQNYKKRVAALEAKQKPSTSQSQGLTRQDQMIAERLARLRQENKPKLVPSQAEIEARLAALKDERQGSIPSTQEMEARLAALQGRVLPSQTPQPAHHTPDTRTQAQQTQDLLTQLAAEVAIDESWKGGGPAASLQNDLNQGGPGSTNSKRQANWSLEEEKSRLLAEAALELREENTRQERILALAKRLAMLRGQDPERVTLQDYRLPDSDDDEDEETAIQRVLQQLTEEAALDEASGFNIPAEQASRPWTQPRGAEPEAQDVDPRPEAEEEELPWCCICNEDATLRCAGCDGDLFCARCFRWVQVECSVRELKGCLDP

SEQ ID NO: 800888 - protein, 396 aa, Homo sapiens
  misc_feature (19)..(19): Xaa can be any naturally occurring amino acid
PSGHHLKNYKKRVAALEAXAKAQHFPEPGTDKQKVCKQCHEVLTRGSSANASKWYHLSSADPAVLGATMESRCYGCAVKFTLFKKEYGCKNCGRAFCSGCLSFSAAVPRTGNTQQKVCKQCHEVLTRGSSANASKWSPPQNYKKRVAALEAKQKPSTSQSQGLTRQDQMIAERLARLRQENKPKLVPSQAEIEARLAALKDERQGSIPSTQEMEARLAALQGRVLPSQTPQPAHHTPDTRTQAQQTQDLLTQLAAEVAIDESWKGGGPVTLQDYRLPDSDDDEDEETAIQRVLQQLTEEAALDEASGFNIPAEQASRPWTQPRGAEPEAQDVDPRPEAEEEELPWCCICNEDATLRCAGCDGDLFCARCFREGHDAFELKEHQTSAYSPPRAGQEH

SEQ ID NO: 800889 - protein, 142 aa, Homo sapiens
MNYDSQQPPLPPLPYAGCRRASGFPALGRGGTVPVGVWGGGAGQGREGRSWGEGPRGPGLGRRDLSSADPAVLGATMESRCYGCAVKFTLFKKEASLPSPRAAGPGRRGGKSAGLNVQRLGLTAPFQLCGFDEVIDPQFPFL

SEQ ID NO: 800890 - protein, 396 aa, Homo sapiens; identical to SEQ ID NO: 800883

SEQ ID NO: 800891 - protein, 456 aa, Homo sapiens
MNYDSQQPPLPPLPYAGCRRASGFPALGRGGTVPVGVCGAGQGREGKGGAGVRVQGAQDLAGVISALQTLRCWEPPWRYGCKNCGRAFCSGCLSFSAAVPRTGNTQQKVCKQCHEVLTRGSSANASKWSPPQNYKKRVAALEAKQKPSTSQSQGLTRQDQMIAERLARLRQENKPKLVPSQAEIEARLAALKDERQGSIPSTQEMEARLAALQGRVLPSQTPQPAHHTPDTRTQAQQTQDLLTQLAAEVAIDESWKGGGPAASLQNDLNQGGPGSTNSKRQANWSLEEEKSRLLAEAALELREENTRQERILALAKRLAMLRGQDPERVTLQDYRLPDSDDDEDEETAIQRVLQQLTEEAALDEASGFNIPAEQASRPWTQPRGAEPEAQDVDPRPEAEEEELPWCCICNEDATLRCAGCDGDLFCARCFREGHDAFELKEHQTSAYSPPRAGQEH

SEQ ID NO: 800892 - protein, 296 aa, Homo sapiens; identical to SEQ ID NO: 800882

SEQ ID NO: 800893 - protein, 388 aa, Homo sapiens; identical to SEQ ID NO: 800887

SEQ ID NO: 800894 - protein, 228 aa, Homo sapiens [sequence omitted]

SEQ ID NO: 800895 - protein, 396 aa, Homo sapiens; identical to SEQ ID NO: 800883

SEQ ID NO: 800896 - protein, 322 aa, Homo sapiens
MESRCYGCAVKFTLFKKEYGCKNCGRAFCSGCLSFSAAVPRTGNTQQKVCKQCHEVLTRGSSANASKWSPPQNYKKRVAALEAKQKPSTSQSQGLTRQDQMIAERLARLRQENKPKLVPSQAEIEARLAALKDERQGSIPSTQEMEARLAALQGRVLPSQTPQPAHHTPDTRTQAQQTQDLLTQLAAEVAIDESWKGGGPAASLQNDLNQGGPGSTNSKRQANWSLEEEKSRLLAEAALELREENTRQERILALAKRLAMLRGQDPERVTLQDYRLPEVRSPSRGDSTSHHPRLSPKLMRTDQLKLGGGPFSVPRSCLCTET

SEQ ID NO: 800897 - protein, 107 aa, Homo sapiens
MIAERLARLRQENKPKLVPSQAEIEARLAALKDERQGSIPSTQEMEARLAALQGRVLPSQTPQPAHHTPDTRTQAQQTQDLLTQLAAEVAIDESWKGGGPEPLHLAP

SEQ ID NO: 800898 - protein, 142 aa, Homo sapiens; identical to SEQ ID NO: 800889

SEQ ID NO: 800899 - protein, 321 aa, Homo sapiens
MLDLEVVPERSLGNEQWEFTLGMPLAQAVAILQKHCRIIKNVQVLYSEQSPLSHDLILNLTQDGIKLMFDAFNQRLKVIEVCDLTKVKLKYCGVHFNSQAIAPTIEQIDQSFGATHPGVYNSAEQLFHLNFRGLSFSFQLDSWTEAPKYEPNFAHGLASLQIPHGATVKRMYIYSGNSLQDTKAPMMPLSCFLGNVYAESVDVLRDGTGPAGLRLRLLAAGCGPGLLADAKMRVFERSVYFGDSCQDVLSMLGSPHKVFYKSEDKMKIHSPSPHKQVPSKCNDYFFNYFTLGVDILFDANTHKVKKFVLHTNYPGHYNFNM

SEQ ID NO: 800900 - protein, 469 aa, Homo sapiens
MLDLEVVPERSLGNEQWEFTLGMPLAQAVAILQKHCRIIKNVQVLYSEQSPLSHDLILNLTQDGIKLMFDAFNQRLKVIEVCDLTKVKLKYCGVHFNSQAIAPTIEQIDQSFGATHPGVYNSAEQLFHLNFRGLSFSFQLDSWTEAPKYEPNFAHGLASLQIPHGATVKRMYIYSGNSLQDTKAPMMPLSCFLGNVYAESVDVLRDGTGPAGLRLRLLAAGCGPGLLADAKMRVFERSVYFGDSCQDVLSMLGSPHKVFYKSEDKMKIHSPSPHKQVPSKCNDYFFNYFTLGVDILFDANTHKVKKFVLHTNYPGHYNFNIYHRCEFKIPLAIKKENADGQTETCTTYSKWDNIQELLGHPVEKPVVLHRSSSPNNTNPFGSTFCFGLQRMIFEVMQNNHIASVTLYGPPRYSSVHLWPAGASRGHRLQREAQSLSLDSWTQELSTNKEAGEVNPCPMHIGKTWGSFCD

SEQ ID NO: 800901 - protein, 497 aa, Homo sapiens
MPLAQAVAILQKHCRIIKNVQVLYSEQSPLSHDLILNLTQDGIKLMFDAFNQRLKVIEVCDLTKVKLKYCGVHFNSQAIAPTIEQIDQSFGATHPGGKPSPSDSSGHQWQFIAINLPGSAIPPHFLESGSHRIVGLVLGCEGNILPLVFNLVGQFRNKPQGRCCQSLLPARLVYVSHFRCQSTMLFSSPPPPTVYNSAEQLFHLNFRGLSFSFQLDSWTEAPKYEPNFAHGLASLQIPHGATVKRMYIYSGNSLQDTKAPMMPLSCFLGNVYAESVDVLRDGTGPAGLRLRLLAAGCGPGLLADAKMRVFERSVYFGDSCQDVLSMLGSPHKVFYKSEDKMKIHSPSPHKQVPSKCNDYFFNYFTLGVDILFDANTHKVKKFVLHTNYPGHYNFNIYHRCEFKIPLAIKKENADGQTETCTTYSKWDNIQELLGHPVEKPVVLHRSSSPNNTNPFGSTFCFGLQRMIFEVMQNNHIASVTLYGPPRPGSHLRTAELP

SEQ ID NO: 800902 - protein, 252 aa, Homo sapiens
MYIYSGNSLQDTKAPMMPLSCFLGNVYAESVDVLRDGTGPAGLRLRLLAAGCGPGLLADAKMRVFERSVYFGDSCQDVLSMLGSPHKVFYKSEDKMKIHSPSPHKQVPSKCNDYFFNYFTLGVDILFDANTHKVKKFVLHTNYPGHYNFNIYHRCEFKIPLAIKKENADGQTETCTTYSKWDNIQELLGHPVEKPVVLHRSSSPNNTNPFGSTFCFGLQRMIFEVMQNNHIASVTLYGPPRPGSHLRTAELP

SEQ ID NO: 800903 - protein, 527 aa, Homo sapiens
MPLAQAVAILQKHCRIIKNVQVLYSEQSPLSHDLILNLTQDGIKLMFDAFNQRLKVIEVCDLTKVKLKYCGVHFNSQAIAPTIEQIDQSFGATHPGGKPSPSDSSGHQWQFIAINLPGSAIPPHFLESGSHRIVGLVLGCEGNILPLVFNLVGQFRNKPQGRCCQSLLPARLVYVSHFRCQSTMLFSSPPPPTVYNSAEQLFHLNFRGLSFSFQLDSWTEAPKYEPNFAHGLASLQIPHGATVKRMYIYSGNSLQDTKYSIRSMSFLLRPGLPGRKNQASAHSVSVPRAPMMPLSCFLGNVYAESVDVLRDGTGPAGLRLRLLAAGCGPGLLADAKMRVFERSVYFGDSCQDVLSMLGSPHKVFYKSEDKMKIHSPSPHKQVPSKCNDYFFNYFTLGVDILFDANTHKVKKFVLHTNYPGHYNFNIYHRCEFKIPLAIKKENADGQTETCTTYSKWDNIQELLGHPVEKPVVLHRSSSPNNTNPFGSTFCFGLQRMIFEVMQNNHIASVTLYGPPRPGSHLRTAELP

SEQ ID NO: 800904 - protein, 422 aa, Homo sapiens
MLDLEVVPERSLGNEQWEFTLGMPLAQAVAILQKHCRIIKNVQVLYSEQSPLSHDLILNLTQDGIKLMFDAFNQRLKVIEVCDLTKVKLKYCGVHFNSQAIAPTIEQIDQSFGATHPGVYNSAEQLFHLNFRGLSFSFQLDSWTEAPKYEPNFAHGLASLQIPHGATVKRMYIYSGNSLQDTKAPMMPLSCFLGNVYAESVDVLRDGTGPAGLRLRLLAAGCGPGLLADAKMRVFERSVYFGDSCQDVLSMLGSPHKVFYKSEDKMKIHSPSPHKQVPSKCNDYFFNYFTLGVDILFDANTHKVKKFVLHTNYPGHYNFNIYHRCEFKIPLAIKKENADGQTETCTTYSKWDNIQELLGHPVEKPVVLHRSSSPNNTNPFGSTFCFGLQRMIFEVMQNNHIASVTLYGPPRPGSHLRTAELP

SEQ ID NO: 800905 - protein, 258 aa, Homo sapiens
MPLAQAVAILQKHCRIIKNVQVLYSEQSPLSHDLILNLTQDGIKLMFDAFNQRLKVIEVCDLTKVKLKYCGVHFNSQAIAPTIEQIDQSFGATHPGGKPSPSDSSGHQWQFIAINLPGSAIPPHFLESGSHRIVGLVLGCEGNILPLVFNLVGQFRNKPQGRCCQSLLPARLVYVSHFRCQSTMLFSSPPPPTVYNSAEQLFHLNFRGLSFSFQLDSWTEAPKYEPNFAHGLASLQIPHGATVKRMYIYSGNSLQDTK

SEQ ID NO: 800906 - protein, 139 aa, Homo sapiens [sequence omitted]

SEQ ID NO: 800907 - protein, 422 aa, Homo sapiens; identical to SEQ ID NO: 800904

SEQ ID NO: 800908 - protein, 422 aa, Homo sapiens; identical to SEQ ID NO: 800904

SEQ ID NO: 800909 - protein, 296 aa, Homo sapiens
MLDLEVVPERSLGNEQWEFTLGMPLAQAVAILQKHCRIIKNVQVLYSEQSPLSHDLILNLTQDGIKLMFDAFNQRLKVIEVCDLTKVKLKYCGVHFNSQAIAPTIEQIDQSFGATHPGVYNSAEQLFHLNFRGLSFSFQLDSWTEAPKYEPNFAHGLASLQIPHGATVKRMYIYSGNSLQDTKAPMMPLSCFLGNVYAESVDVLRDGTGPAGLRLRLLAAGCGPGLLADAKMRVFERSVYFGDSCQDVLSMLGSPHKVFYKSEDKMKIHSPSPHKQVPSKCNDYFFNYFTLGVALL

SEQ ID NO: 800910 - protein, 222 aa, Homo sapiens
MLDLEVVPERSLGNEQWEFTLGMPLAQAVAILQKHCRIIKNVQVLYSEQSPLSHDLILNLTQDGIKLMFDAFNQRLKVIEVCDLTKVKLKYCGVHFNSQAIAPTIEQIDQSFGATHPGVYNSAEQLFHLNFRGLSFSFQLDSWTEAPKYEPNFAHGLASLQIPHGATVKRMYIYSGNSLQDTKAPMMPLSCFLGNVYAESVDVLRDGTGPAGLRLRLLAAGQ

SEQ ID NO: 800911 - protein, 131 aa, Homo sapiens [sequence omitted]

SEQ ID NO: 800912 - protein, 201 aa, Homo sapiens
MAATALLEAGLARVLFYPTLLYTLFRGKVPGRAHRDWYHRIDPTVLLGALPLRSLTRQLVQDENVRGVITMNEEYETRFLCNSSQEWKRLGVEQLRLSTVDMTGIPTLDNLQKGVQFALKYQSLGQCVYVHCKAGRSRSATMVAAYLIQVHKWSPEEAVRAIAKIRSYIHIRPGQLDVLKEFHKQITARATKDGTFVISKT

SEQ ID NO: 800913 - protein, 201 aa, Homo sapiens; identical to SEQ ID NO: 800912

SEQ ID NO: 800914 - protein, 137 aa, Homo sapiens
MAATALLEAGLARVLFYPTLLYTLFRGKVPGRAHRDWYHRIDPTVLLGALPLRSLTRQLVQDENVRGVITMNEEYETRFLCNSSQVHKWSPEEAVRAIAKIRSYIHIRPGQLDVLKEFHKQITARATKDGTFVISKT

SEQ ID NO: 800915 - protein, 201 aa, Homo sapiens; identical to SEQ ID NO: 800912

SEQ ID NO: 800916 - protein, 201 aa, Homo sapiens; identical to SEQ ID NO: 800912

SEQ ID NO: 800917 - protein, 151 aa, Homo sapiens
MAATALLEAGLARVLFYPTLLYTLFRGKVPGRAHRDWYHRIDPTVLLGALPLRSLTRQVSRAGEPGPLPRPRRSVPVGPLGSPPSLLSHLFASAAGTGRERARGDHHERGVRDEVPVQLFTGAQMESRGGCKSHRQDPVIHPHQAWPAGCS

SEQ ID NO: 800918 - protein, 378 aa, Homo sapiens
MRGGKCNMLSSLGCLLLCGSITLALGNAQKLPKGKRPNLKVHINTTSDSILLKFLRPSPNVKLEGLLLGYGSNVSPNQYFPLPAEGKFTEAIVDAEPKYLIVVRPAPPPSQKKSCSGKTRSRKPLQLVVGTLTPSSVFLSWGFLINPHHDWTLPSHCPNDRFYTIRYREKDKEKKWIFQICPATETIVENLKPNTVYEFGVKDNVEGGIWSKIFNHKTVVGSKKVNGKIQSTYDQDHTVPAYVPRKLIPITIIKQVIQNVTHKDSAKSPEKAPLGGVILVHLIIPGLNETTVKLPASLMFEISDALKTQLAKNETLALPAESKTPEVEKISARPTTVTPETVPRSTKPTTSSALDVSETTLGNSKNFFFSKKTKVTTK

SEQ ID NO: 800919 - protein, 486 aa, Homo sapiens
MISPSPSQEELQTTLEETDQSTQEPFTTKIPRTTELAKTTQAPHRFYTTVRPRTSDKPHIRPVLNRTTTRPTRPKPSGMPSGNGVGTGVKQAPRPSGADRNVSVDSTHPTKKPGTRRPPLPPRPTHPRRKPLPPNNVTGKPGSAGIISSGPITTPPLRSTPRPTGTPLERIETDIKQPTVPASGEELENITDFSSSPTRETDPLGKPRFKGPHVRYIQKPDNSPCSITDSVKRFPKEEATEGNATSPPQNPPTNLTVVTVEGCPSFVILDWEKPLNDTVTEYEVISRENGSFSGKNKSIQMTNQTFSTVENLKPNTSYEFQVKPKNPLGEGPVSNTVAFSTESADPRVSEPVSAGRDAIWTERPFNSDSYSECKGKQYVKRTWYKKFVGVQLCNSLRYKIYLSDSLTGKFYNIGDQRGHGEDHCQFVDSFLDGRTGQQLTSDQLPIKEGYFRAVRQEPVQFGEIGGHTQINYVQWYECGTTIPGKW

SEQ ID NO: 800920 - protein, 378 aa, Homo sapiens; identical to SEQ ID NO: 800918

SEQ ID NO: 800921 - protein, 990 aa, Homo sapiens
SGGYGWLHFYAEPKYLIVVRPAPPPSQKKSCSGKTRSRKPLQLVVGTLTPSSVFLSWGFLINPHHDWTLPSHCPNDRFYTIRYREKDKEKKWIFQICPATETIVENLKPNTVYEFGVKDNVEGGIWSKIFNHKTVVGSKKVNGKIQSTYDQDHTVPAYVPRKLIPITIIKQVIQNVTHKDSAKSPEKAPLGGVILVHLIIPGLNETTVKLPASLMFEISDALKTQLAKNETLALPAESKTPEVEKISARPTTVTPETVPRSTKPTTSSALDVSETTLVLSKRTPETLQTILIPQFELPLSTLASSEKPWIVPTAKISEDSKVLQPQTATYDVFSSPTTSDEPEISDSYTATSDRILDSIPPKTSRTLEQPRATLAPSETPFVPQKLEIFTSPEMQPTTPAPQQTTSIPSTPKRRPRPKPPRTKPERTTSAGTITPKISKSPEPTWTTPAPGKTQFISLKPKIPLSPEVTHTKPAPKQTPRAPPKPKTSPRPRIPQTQPVPKVPQRVTAKPKTSPSPEVSYTTPAPKDVLLPHKPYPEVSQSEPAPLETRGIPFIPMISPSPSQEELQTTLAPHRFYTTVRPRTSDKPHIRPGVKQAPRPSGADRNVSVDSTHPTKKPGTRRPPLPPRPTHPRRKPLPPNNVTGKPGSAGIISSGPITTPPLRSTPRPTGTPLERIETDIKQPTVPASGEELENITDFSSSPTRETDPLGKPRFKGPHVRYIQKPDNSPCSITDSVKRFPKEEATEGNATSPPQNPPTNLTVVTVEGCPSFVILDWEKPLNDTVTEYEVISRENGSFSGKNKSIQMTNQTFSTVENLKPNTSYEFQVKPKNPLGEGPVSNTVAFSTESADPRVSEPVSAGRDAIWTERPFNSDSYSECKGKQYVKRTWYKKFVGVQLCNSLRYKIYLSDSLTGKFYNIGDQRGHGEDHCQFVDSFLDGRTGQQLTSDQLPIKEGYFRAVRQEPVQFGEIGGHTQINYVQWYECGTTIPGKW

SEQ ID NO: 800922 - protein, 1048 aa, Homo sapiens
MCIPFRLRKRPNLKVHINTTSDSILLKFLRPSPNVKLEGLLLGYGSNVSPNQYFPLPAEGKFTEAIVDAEPKYLIVVRPAPPPSQKKSCSGKTRSRKPLQLVVGTLTPSSVFLSWGFLINPHHDWTLPSHCPNDRFYTIRYREKDKEKKWIFQICPATETIVENLKPNTVYEFGVKDNVEGGIWSKIFNHKTVVGSKKVNGKIQSTYDQDHTVPAYVPRKLIPITIIKQVIQNVTHKDSAKSPEKAPLGGVILVHLIIPGLNETTVKLPASLMFEISDALKTQLAKNETLALPAESKTPEVEKISARPTTVTPETVPRSTKPTTSSALDVSETTLVLSKRTPETLQTILIPQFELPLSTLASSEKPWIVPTAKISEDSKVLQPQTATYDVFSSPTTSDEPEISDSYTATSDRILDSIPPKTSRTLEQPRATLAPSETPFVPQKLEIFTSPEMQPTTPAPQQTTSIPSTPKRRPRPKPPRTKPERTTSAGTITPKISKSPEPTWTTPAPGKTQFISLKPKIPLSPEVTHTKPAPKQTPRAPPKPKTSPRPRIPQTQPVPKVPQRVTAKPKTSPSPEVSYTTPAPKDVLLPHKPYPEVSQSEPAPLETRGIPFIPMISPSPSQEELQTTLAPHRFYTTVRPRTSDKPHIRPGVKQAPRPSGADRNVSVDSTHPTKKPGTRRPPLPPRPTHPRRKPLPPNNVTGKPGSAGIISSGPITTPPLRSTPRPTGTPLERIETDIKQPTVPASGEELENITDFSSSPTRETDPLGKPRFKGPHVRYIQKPDNSPCSITDSVKRFPKEEATEGNATSPPQNPPTNLTVVTVEGCPSFVILDWEKPLNDTVTEYEVISRENGSFSGKNKSIQMTNQTFSTVENLKPNTSYEFQVKPKNPLGEGPVSNTVAFSTESADPRVSEPVSAGRDAIWTERPFNSDSYSECKGKQYVKRTWYKKFVGVQLCNSLRYKIYLSDSLTGKFYNIGDQRGHGEDHCQFVDSFLDGRTGQQLTSDQLPIKEGYFRAVRQEPVQFGEIGGHTQINYVQWYECGTTIPGKW

SEQ ID NO: 800923 - protein, 272 aa, Homo sapiens
PRKRNLTQTLLPSQSTIGPETPGTKPSTTLAPRKTKRPGRRPRPRPRPKTTPSPEVPKSKPALEPATIQPEPLVPTTVSEPVPFETEAPSMTIVPTTDIEPVTVRTEATVTTLAPKTSQRTRTRRPRPKHKTTPRPETLQTKLDFGPITPGTSSAPTTTTKRTRRPHPKPKTTPHPEVPQTKLVPATILEPVLRTEASGTTAAPKVPQRTHRPHPKPKTTLSPEELQTELVPATIFEPVSPIKEAPGTTFVPVTDLEPVTFRTEIPATTLAT

SEQ ID NO: 800924 - protein, 1074 aa, Homo sapiens
MRGGKCNMLSSLGCLLLCGSITLALGNAQKLPKGKRPNLKVHINTTSDSILLKFLRPSPNVKLEGLLLGYGSNVSPNQYFPLPAEGKFTEAIVDAEPKYLIVVRPAPPPSQKKSCSGKTRSRKPLQLVVGTLTPSSVFLSWGFLINPHHDWTLPSHCPNDRFYTIRYREKDKEKKWIFQICPATETIVENLKPNTVYEFGVKDNVEGGIWSKIFNHKTVVGSKKVNGKIQSTYDQDHTVPAYVPRKLIPITIIKQVIQNVTHKDSAKSPEKAPLGGVILVHLIIPGLNETTVKLPASLMFEISDALKTQLAKNETLALPAESKTPEVEKISARPTTVTPETVPRSTKPTTSSALDVSETTLVLSKRTPETLQTILIPQFELPLSTLASSEKPWIVPTAKISEDSKVLQPQTATYDVFSSPTTSDEPEISDSYTATSDRILDSIPPKTSRTLEQPRATLAPSETPFVPQKLEIFTSPEMQPTTPAPQQTTSIPSTPKRRPRPKPPRTKPERTTSAGTITPKISKSPEPTWTTPAPGKTQFISLKPKIPLSPEVTHTKPAPKQTPRAPPKPKTSPRPRIPQTQPVPKVPQRVTAKPKTSPSPEVSYTTPAPKDVLLPHKPYPEVSQSEPAPLETRGIPFIPMISPSPSQEELQTTLAPHRFYTTVRPRTSDKPHIRPGVKQAPRPSGADRNVSVDSTHPTKKPGTRRPPLPPRPTHPRRKPLPPNNVTGKPGSAGIISSGPITTPPLRSTPRPTGTPLERIETDIKQPTVPASGEELENITDFSSSPTRETDPLGKPRFKGPHVRYIQKPDNSPCSITDSVKRFPKEEATEGNATSPPQNPPTNLTVVTVEGCPSFVILDWEKPLNDTVTEYEVISRENGSFSGKNKSIQMTNQTFSTVENLKPNTSYEFQVKPKNPLGEGPVSNTVAFSTESADPRVSEPVSAGRDAIWTERPFNSDSYSECKGKQYVKRTWYKKFVGVQLCNSLRYKIYLSDSLTGKFYNIGDQRGHGEDHCQFVDSFLDGRTGQQLTSDQLPIKEGYFRAVRQEPVQFGEIGGHTQINYVQWYECGTTIPGKW

SEQ ID NO: 800925 - protein, 378 aa, Homo sapiens; identical to SEQ ID NO: 800918

SEQ ID NO: 800926 - protein, 242 aa, Homo sapiens
LASKPSERPKTTHRPDAPQIQPGSKPPKQLLPKPQTTAEPDMPPTKSVSEPVPFETEAPSMTIVPTTDIEPVTVRTEATVTTLAPKTSQRTRTRRPRPKHKTTPRPETLQTKLDFGPITPGTSSAPTTTTKRTRRPHPKPKTTPHPEVPQTKLVPATILEPVLRTEASGTTAAPKVPQRTHRPHPKPKTTLSPEELQTELVPATIFEPVSPIKEAPGTTFVPVTDLEPVTFRTEIPATTLAT

SEQ ID NO: 800927 - protein, 66 aa, Homo sapiens
GAQMKTPCGHRNYKPDSSRGATVRADASGPSRHEQSGPGLSNVRAKPVLHPKTSSSPRNSPRPVRP

SEQ ID NO: 800928 - protein, 66 aa, Homo sapiens; identical to SEQ ID NO: 800927

SEQ ID NO: 800929 - protein, 81 aa, Homo sapiens
FRLPLRRGLTPEYILRRQTTEVFSREKFIFILFLLFFIDLKHGVLLCHAGWTTVAIYSGPSEMAGYLQEDYHEEGLVCSNV

SEQ ID NO: 800930 - protein, 380 aa, Homo sapiens
AAAIVRSRGGGGWWSLDHAVGGASGDGLPSPPDAGRKYVRGDFRPLRCSRPGCKAFFCRLFSQVPSACTSRTPLAPGPSVSARLTVGCDDMSNKEGSGGFRKRKHDNFPHNQRREGKDVNSSSPVMLAFKSFQQELDARHDKYERLVKLSRDITVESKRTIFLLHRITSAPDMEDILTESEIKLDGVRQKIFQVAQELSGEDMHQFHRAITTGLQEYVEAVSFQHFIKTRSLISMDEINKQLIFTTEDNGKENKTPSSDAQDKQFGTWRLRVTPVDYLLGVADLTGELMRMCINSVGNGDIDTPFEVSQFLRQVYDGFSFIGNTGPYEVSKKLYTLKQSLAKVENACYALKVRGSEIPKHMLADVFSVKTEMIDQEEGIS

SEQ ID NO: 800931 - protein, 380 aa, Homo sapiens; identical to SEQ ID NO: 800930

SEQ ID NO: 800932 - protein, 380 aa, Homo sapiens; identical to SEQ ID NO: 800930

SEQ ID NO: 800933 - protein, 335 aa, Homo sapiens
ALVSTQSAHYAGGRLFSQVPSACTSRTPLAPGPSVSARLTVGCDDMSNKEGSGGFRKRKHDNFPHNQRREGKDVNSSSPVMLAFKSFQQELDARHDKYERLVKLSRDITVESKRTIFLLHRITSAPDMEDILTESEIKLDGVRQKIFQVAQELSGEDMHQFHRAITTGLQEYVEAVSFQHFIKTRSLISMDEINKQLIFTTEDNGKENKTPSSDAQDKQFGTWRLRVTPVDYLLGVADLTGELMRMCINSVGNGDIDTPFEVSQFLRQVYDGFSFIGNTGPYEVSKKLYTLKQSLAKVENACYALKVRGSEIPKHMLADVFSVKTEMIDQEEGIS

SEQ ID NO: 800934 - protein, 103 aa, Homo sapiens
GLQARAEFGTSSSSPVMLAFKSFQQELDARHDKYERLVKLSRDITVESKRTIFLLHRITSAPDMEDILTESEIKLDGVRQKIFQDYRNMWKLSLFNTSSKHDH

SEQ ID NO: 800935 - protein, 297 aa, Homo sapiens
AAAIVRSRGGGGWWSLDHAVGGASGDGLPSPPDAGRKYVRGDFRPLRCSRPGCKAFFCRLFSQVPSACTSRTPLAPGPSVSARLTVGCDDMSNKEGSGGFRKRKHDNFPHNQRREGKDVNSSSPVMLAFKSFQQELDARHDKYERLVKLSRDITVESKRTIFLLHRITSAPDMEDILTESEIKLDGVRQKIFQVAQELSGEDMHQFHRAITTGLQEYVEAVSFQHFIKTRSLISMDEINKQLIFTTEDNGKENKTPSSDAQDKQFGIYDSVKVYFRLPRPPPPEMPESLKKKLGLTQ

SEQ ID NO: 800936 - protein, 259 aa, Homo sapiens
AAAIVRSRGGGGWWSLDHAVGGASGDGLPSPPDAGRKYVRGDFRPLRCSRPGCKAFFCRLFSQVPSACTSRTPLAPGPSVSARLTVGCDDMSNKEGSGGFRKRKHDNFPHNQRREGKDVNSSSPVMLAFKSFQQELDARHDKYERLVKLSRDITVESKRTIFLLHRITSAPDMEDILTESEIKLDGVRQKIFQVAQELSGEDMHQFHRAITTGLQEYVEAVSFQHFIKTRSLISMDEINKQLIFTTEDNGKENKTTVRI

SEQ ID NO: 800937 - protein, 110 aa, Homo sapiens
GASGDGLPSPPDAGRKYVRGDFRPLRCSRPGCKAFFCRLFSQVPSACTSRTPLAPGPSVSARLTVGCDDMSNKEGGVLNNTGRYLSGGGGSPVFLCSFPLFTLEGCLRPL

SEQ ID NO: 800938 - protein, 252 aa, Homo sapiens
ALVSTQSAHYAGGRLFSQVPSACTSRTPLAPGPSVSARLTVGCDDMSNKEGSGGFRKRKHDNFPHNQRREGKDVNSSSPVMLAFKSFQQELDARHDKYERLVKLSRDITVESKRTIFLLHRITSAPDMEDILTESEIKLDGVRQKIFQVAQELSGEDMHQFHRAITTGLQEYVEAVSFQHFIKTRSLISMDEINKQLIFTTEDNGKENKTPSSDAQDKQFGIYDSVKVYFRLPRPPPPEMPESLKKKLGLTQ

SEQ ID NO: 800939 - protein, 380 aa, Homo sapiens; identical to SEQ ID NO: 800930

SEQ ID NO: 800940 - protein, 267 aa, Homo sapiens
AAAIVRSRGGGGWWSLDHAVGGASGDGLPSPPDAGRKYVRGDFRPLRCSRPGCKAFFCRLFSQVPSACTSRTPLAPGPSVSARLTVGCDDMSNKEGSGGFRKRKHDNFPHNQRREGKDVNSSSPVMLAFKSFQQELDARHDKYERLVKLSRDITVESKRTIFLLHRITSAPDMEDILTESEIKLDGVRQKIFQVAQELSGEDMHQFHRAITTGLQEYVEAVSFQHFIKTRSLISMDEINKQLIFTTEDNGKENKTSHLSITFWEWLT

SEQ ID NO: 800941 - protein, 133 aa, Homo sapiens
FVFLPALLPSSDAQDKQFGTWRLRVTPVDYLLGVADLTGELMRMCINSVGNGDIDTPFEVSQFLRQVYDGFSFIGNTGPYEVSKKLYTLKQSLAKVENACYALKVRGSEIPKHMLADVFSVKTEMIDQEEGIS

SEQ ID NO: 800942 - protein, 220 aa, Homo sapiens
AAAIVRSRGGGGWWSLDHAVGGASGDGLPSPPDAGRKYVRGDFRPLRCSRPGCKAFFCRLFSQVPSACTSRTPLAPGPSVSARLTVGCDDMSNKEGSGGFRKRKHDNFPHNQRREGKDVNSSSPVMLAFKSFQQELDARHDKYERLVKLSRDITVESKRTIFLLHRITSAPDMEDILTESEIKLDGVRQKIFQVAQELSGEDMHQFHRAITTGKSRFVSG

SEQ ID NO: 800943 - protein, 88 aa, Homo sapiens
VLGVDTMEKLTILFRNLEEENLSSGHKVSHNEILLSFILQTKCWTHITTSFTRSTVDSRTTHSTRRTTGPRRAGNAKRTRFTLNRQRR

SEQ ID NO: 800944 - protein, 88 aa, Homo sapiens; identical to SEQ ID NO: 800943

SEQ ID NO: 800945 - protein, 76 aa, Homo sapiens
SRLFVETLQVRRFLYGMIFSNQLFESKRKRRSSVANGSHRKATPTAGFTRVESTLSLLLLVSRALQVQRNFSHNQL

SEQ ID NO: 800946 - protein, 144 aa, Homo sapiens
WVGSRLSHCEESKVWAMEMSLVLLFLIRTALFAPQGAAAEPHSLCYNLTVLSQDGSVQSGFLAEGHLDGQLFLLCDRQKGRAGPRGQWAEAVLGAETWDTETEDLTENGQELRRTLAHIKGQKGGRLHAKAMVISEILEVSEKQ

SEQ ID NO: 800947 - protein, 39 aa, Homo sapiens
ETWDTETEDLTENGQELRRTLAHIKGQKGGESGQWARVM

SEQ ID NO: 800948 - protein, 533 aa, Homo sapiens
MWLGRRALCALVLLLACASLGLLYASTRDAPGLRLPLAPWAPPQSPRRPELPDLAPEPRYAHIPVRIKEQVVGLLAWNNCSCESSGGGLPLPFQKQVRAIDLTKAFDPAELRAASATREQEFQAFLSRSQSPADQLLIAPANSPLQYPLQGVEVQPLRSILVPGLSLQAASGQEVYQVNLTASLGTWDVAGEVTGVTLTGEGQADLTLVSPGLDQLNRQLQLVTYSSRSYQTNTADTVRFSTEGHEAAFTIRIRHPPNPRLYPPGSLPQGAQYNISALVTIATKTFLRYDRLRALITSIRRFYPTVTVVIADDSDKPERVSGPYVEHYLMPFGKGWFAGRNLAVSQVTTKYVLWVDDDFVFTARTRLERLVDVLERTPLDLVGGAVREISGFATTYRQLLSVEPGAPGLGNCLRQRRGFHHELVGFPGCVVTDGVVNFFLARTDKVREVGFDPRLSRVAHLEFFLDGLGSLRVGSCSDVVVDHASKLKLPWTSRDAGAETYARYRYPGSLDESQMAKHRLLFFKHRLQCMTSQ

SEQ ID NO: 800949 - protein, 337 aa, Homo sapiens
MWLGRRALCALVLLLACASLGLLYASTRDAPGLRLPLAPWAPPQSPRRPELPDLAPEPRYAHIPVRIKEQVVGLLAWNNCSCESSGGGLPLPFQKQVRAIDLTKAFDPAELRAASATREQEFQAFLSRSQSPADQLLIAPANSPLQYPLQGVEVQPLRSILVPGLSLQAASGQEVYQVNLTASLGTWDVAGEVTGVTLTGEGQADLTLVSPGLDQLNRQLQLVTYSSRSYQTNTADTVRFSTEGHEAAFTIRIRHPPNPRLYPPGSLPQGAQYNISALVTIATKTFLRYDRLRALITSIRRFYPTVTVVIADDSDKPERVSGPYVEHYLMPFGKVCS

SEQ ID NO: 800950 - protein, 533 aa, Homo sapiens; identical to SEQ ID NO: 800948

SEQ ID NO: 800951 - protein, 329 aa, Homo sapiens
MWLGRRALCALVLLLACASLGLLYASTRDAPGLRLPLAPWAPPQSPRRPELPDLAPEPRYAHIPVRIKEQVVGLLAWNNCSCESSGGGLPLPFQKQVRAIDLTKAFDPAELRAASATREQEFQAFLSRSQSPADQLLIAPANSPLQYPLQGVEVQPLRSILVPGLSLQAASGQEVYQVNLTASLGTWDVAGEVTGVTLTGEGQADLTLVSPGLDQLNRQLQLVTYSSRSYQTNTADTGARPGWRDGQAGQTEKNQKGWSGQMAEGMGGIWAMARAVQPHNGCFNWTSRARGRTGGLCSSGAGAGQRENPSLGCVSPLGQLWRGPRKRLV

SEQ ID NO: 800952 - protein, 141 aa, Homo sapiens
MEMLQGLLLLLLLSMGGAWASREPLRPWCHPINAILAVEKEGCPVCITVNTTICAGYCPTMMRVLQAVLPPLPQVVCTYRDVRFESIRLPGCPRGVDPVVSFPVALSCRCGPCRRSTSDCGGPKDHPLTCDHPQLSGLLFL

SEQ ID NO: 800953 - protein, 103 aa, Homo sapiens
MEMLQGLLLLLLLSMGGAWASREPLRPWCHPINAILAVEKEGCPVCITVNTTICAGYCPTMMRVLQAVLPPLPQVVCTYRDVRFESIRLPGCPRGVDPLDCFR

SEQ ID NO: 800954 - protein, 904 aa, Homo sapiens [sequence omitted]

SEQ ID NO: 800955 - protein, 837 aa, Homo sapiens
YESDFDRRLSRVYTNDSAPDNETSKSANQDTCSPFAGMLFGGEDRELIQRRKEKYRLELLEQMAEQQRNKRREKDLELRVAASGAQDPEKSPDRLKQFSVAPRHFEEMIPPERPRIAFQTPLPPLSAPSVPPIPSVHPVPSQNEDLRSGLSSALGEMVSPRIAPLPPPPLLPPLATNYRTPYDDAYYFYGSRNTFDPSLAYYGSGMMGVQPAAYVSAPVTHQLAQPVVNTVGQNELKITSDQVINSGLIFEDKPKPSKQSLQSYQEALQQQIREREERRKKEREEKEEYEAKLEAEMRTYNPWGKGGGGAPLRDAKGNLISHMQTQSSPFARGNVFGEPPTELQIKQQELYKNFLRFQIEEKKQREEAERERLRIAEEKEERRLAEQRARIQQEYEEEQEKKREKEEEQRLKNEEHIRLAEERQKEAERKKKEEEEKYNLQLQHYCERDNLIGEETKHMRQPSPIVPALQNKIASKLQRPPSVDSIIRSFIHESSMSRAQSPPVPARKNQLRAEEEKKNVIMELSEMRKQLRSEERRLQERLLHMDSDDEIPIRKKERNPMDIFDMARHRLQAPVRRQSPKGLDAATFQNVHDFNELKDRDSETRVDLKFMYLDPPRDHHTLEIQQQALLREQQKRLNRIKMQEGAKVDLDAIPSAKVREQRMPRDDTSDFLKNSLLESDSAFIGAYGETYPAIEDDVLPPPSQLPSARERRRNKWKGLDIDSSRPNVAPDGLSLKSISSVNVDELRVRNEERMRRLNEFHNKPINTDDESSLVDPDDIMKHIGDDGSNSVATEPWLRPGTSETLKRFMAEQLNQEQQQIPGKPGTFTWQGLSTAHG

SEQ ID NO: 800956 - protein, 888 aa, Homo sapiens
YESDFDRRLSRVYTNDSAPDNETSKSANQDTCSPFAGMLFGGEDRELIQRRKEKYRLELLEQMAEQQRNKRREKDLELRVAASGAQDPEKSPDRLKQFSVAPRHFEEMIPPERPRIAFQTPLPPLSAPSVPPIPSVHPVPSQNEDLRSGLSSALGEMVSPRIAPLPPPPLLPPLATNYRTPYDDAYYFYGSRNTFDPSLAYYGSGMMGVQPAAYVSAPVTHQLAQPVVNTVGQNELKITSDQVINSGLIFEDKPKPSKQSLQSYQEALQQQIREREERRKKEREEKEEYEAKLEAEMRTYNPWGKGGGGAPLRDAKGNLITDLNRMHRQNIDAYHNPDARTYEDKRAVVSLDPNLATSNAENLEDAANKSSGHMQTQSSPFARGNVFGEPPTELQIKQQELYKNFLRFQIEEKKQREEAERERLRIAEEKEERRLAEQRARIQQEYEEEQEKKREKEEEQRLKNEEHIRLAEERQKEAERKKKEEEEKYNLQLQHYCERDNLIGEETKHMRQPSPIVPALQNKIASKLQRPPSVDSIIRSFIHESSMSRAQSPPVPARKNQLRAEEEKKNVIMELSEMRKQLRSEERRLQERLLHMDSDDEIPIRKKERNPMDIFDMARHRLQAPVRRQSPKGLDAATFQNVHDFNELKDRDSETRVDLKFMYLDPPRDHHTLEIQQQALLREQQKRLNRIKMQEGAKVDLDAIPSAKVREQRMPRDDTSDFLKNSLLESDSAFIGAYGETYPAIEDDVLPPPSQLPSARERRRNKWKGLDIDSSRPNVAPDGLSLKSISSVNVDELRVRNEERMRRLNEFHNKPINTDDESSLVDPDDIMKHIGDDGSNSVATEPWLRPGTSETLKRFMAEQLNQEQQQIPGKPGTFTWQGLSTAHG

SEQ ID NO: 800957 - protein, 653 aa, Homo sapiens
YESDFDRRLSRVYTNDSAPDNETSKSANQDTCSPFAGMLFGGEDRELIQRRKEKYRLELLEQMAEQQRNKRREKDLELRVAASGAQDPEKSPDRLKQFSVAPRHFEEMIPPERPRIAFQTPLPPLSAPSVPPIPSVHPVPSQNEDLRSGLSSALGEMVSPRIAPLPPPPLLPPLATNYRTPYDDAYYFYGSRNTFDPSLAYYGSGMMGVQPAAYVSAPVTHQLAQPVVNTVGQNELKITSDQVINSGLIFEDKPKPSKQSLQSYQEALQQQIREREERRKKEREEKEEYEAKLEAEMRTYNPWGKGGGGAPLRDAKGNLITDLNRMHRQNIDAYHNPDARTYEDKRAVVSLDPNLATSNAENLEDAANKSSGHMQTQSSPFARGNVFGEPPTELQIKQQELYKNFLRFQIEEKKQREEAERERLRIAEEKEERRLAEQRARIQQEYEEEQEKKREKEEEQRLKNEEHIRLAEERQKEAERKKKEEEEKYNLQLQHYCERDNLIGEETKHMRQPSPIVPALQNKIASKLQRPPSVDSIIRSFIHESSMSRAQSPPVPARKNQLRAEEEKKNVIMELSEMRKQLRSEERRLQERLLHMDSDDEIPIRKKERNPMDIFDMARHRLQAPVRRQSPKGLDAATFQNVHDFNELKDRGE

SEQ ID NO: 800958 - protein, 888 aa, Homo sapiens; identical to SEQ ID NO: 800956

SEQ ID NO: 800959 - protein, 993 aa, Homo sapiens
YESDFDRRLSRVYTNDSAPDNETSKSANQDTCSPFAGMLFGGEDRELIQRRKEKYRLELLEQMAEQQRNKRREKDLELRVAASGAQDPEKSPDRLKQFSVAPRHFEEMIPPERPRIAFQTPLPPLSAPSVPPIPSVHPVPSQNEDLRSGLSSALGEMVSPRIAPLPPPPLLPPLATNYRTPYDDAYYFYGSRNTFDPSLAYYGSGMMGVQPAAYVSAPVTHQLAQPVVNTVGQNELKITSDQVINSGLIFEDKPKPSKQSLQSYQEALQQQIREREERRKKEREEKEEYEAKLEAEMRTYNPWGKGGGGAPLRDAKGNLITDLNRMHRQNIDAYHNPDARTYEDKRAVVSLDPNLATSNAENLEDAANKSSGHMQTQSSPFARGNVFGEPPTELQIKQQELYKNFLRFQIEEKKQREEAERERLRIAEEKEERRLAEQRARIQQEYEEEQEKKREKEEEQRLKNEEHIRLAEERQKEAERKKKEEEEKYNLQLQHYCERDNLIGEETKHMRQPSPIVPALQNKIASKLQRPPSVDSIIRSFIHESSMSRAQSPPVPARKNQLRAEEEKKNVIMELSEMRKQLRSEERRLQERLLHMDSDDEIPIRKKERNPMDIFDMARHRLQAPVRRQSPKGLDAATFQNVHDFNELKDRDSETRVDLKFMYLDPPRDHHTLEIQQQALLREQQKRLNRIKMQEGAKVDLDAIPSAKVREQRMPRDDTSDFLKNSLLESDSAFIGAYGETYPAIEDDVLPPPSQLPSARERRRNKWKGLDIDSSRPNVAPDGLSLKSISSVNVDELRVRNEERMRRLNEFHNKPINTDDESSLVDPDDIMKHIGDDGSNSVATEPWLRPGTSETLKRFMAEQLNQEQQQIPGKPGTFTRAANKSSGHMQTQSSPFARGNVFGEPPTELQIKQQELYKNFLRFQIEEKKQREEAERERLRIAEEKEERRLAEQRARIQQEYEEEQEKKREKEEEQRLKNEEHIRLAEERQKEA

SEQ ID NO: 800960 - protein, 556 aa, Homo sapiens
YESDFDRRLSRVYTNDSAPDNETSKSANQDTCSPFAGMLFGGEDRELIQRRKEKYRLELLEQMAEQQRNKRREKDLELRVAASGAQDPEKSPDRLKQFSVAPRHFEEMIPPERPRIAFQTPLPPLSAPSVPPIPSVHPVPSQNEDLRSGLSSALGEMVSPRIAPLPPPPLLPPLATNYRTPYDDAYYFYGSRNTFDPSLAYYGSGMMGVQPAAYVSAPVTHQLAQPVVNTVGQNELKITSDQVINSGLIFEDKPKPSKQSLQSYQEALQQQIREREERRKKEREEKEEYEAKLEAEMRTYNPWGKGGGGAPLRDAKGNLITDLNRMHRQNIDAYHNPDARTYEDKRAVVSLDPNLATSNAENLEDAANKSSGHMQTQSSPFARGNVFGEPPTELQIKQQELYKNFLRFQIEEKKQREEAERERLRIAEEKEERRLAEQRARIQQEYEEEQEKKREKEEEQRLKNEEHIRLAEERQKEAERKKKEEEEKYNLQLQHYCERDNLIGEETKHMRQPSPIVPALQNKIASKLQRPPSVDSIIRSFIHESSVEAVDGFNGT

SEQ ID NO: 800961 - protein, 302 aa, Homo sapiens
MHRNKRGNMPPMEHDGDVIEQSNIRISSAENKSAPDNETSKSANQDTCSPFAGMLFGGEDRELIQRRKEKYRLELLEQMAEQQRNKRREKDLELRVAASGAQDPEKSPDRLKQFSVAPRHFEEMIPPERPRIAFQTPLPPLSAPSVPPIPSVHPVPSQNEDLRSGLSSALGEMVSPRIAPLPPPPLLPPLATNYRTPYDDAYYFYGSRNTFDPSLAYYGSGMMGVQPAAYVSAPVTHQLAQPVVNTVGQNELKITSDQVINSGLIFEDKPKPSKQSLQSYQEALQQQIREREERGRETTDLQ

SEQ ID NO: 800962 - protein, 329 aa, Homo sapiens
MKLLRRAWRRRAALGLGTLALCGAALLYLARCAAEPGDPRAMSGRSPPPPAPARAAAFLAVLVASAPRAAERRSVIRSTWLARRGAPGDVWARFAVGTAGLGAEERRALEREQARHGDLLLLPALRDAYENLTAKVLAMLAWLDEHVAFEFVLKADDDSFARLDALLAELRAREPARRRRLYWGFFSGRGRVKPGGRWREAAWQLCDYYLPYALGGGYVLSADLVHYLRLSRDYLRAWHSEDVSLGAWLAPVDVQREHDPRFDTEYRSRGCSNQYLVTHKQSLEDMLEKHATLAREGRLCKREVQLRLSYVYDWSAPPSQCCQRREGIP

SEQ ID NO: 800963 - protein, 349 aa, Homo sapiens
SRRRLRTRESGLGRRPGAGAMKLLRRAWRRRAALGLGTLALCGAALLYLARCAAEPGDPRAMSGRSPPPPAPARAAAFLAVLVASAPRAAERRSVIRSTWLARRGAPGDVWARFAVGTAGLGAEERRALEREQARHGDLLLLPALRDAYENLTAKVLAMLAWLDEHVAFEFVLKADDDSFARLDALLAELRAREPARRRRLYWGFFSGRGRVKPGGRWREAAWQLCDYYLPYALGGGYVLSADLVHYLRLSRDYLRAWHSEDVSLGAWLAPVDVQREHDPRFDTEYRSRGCSNQYLVTHKQSLEDMLEKHATLAREGRLCKREVQLRLSYVYDWSAPPSQCCQRREGIP

SEQ ID NO: 800964 - protein, 329 aa, Homo sapiens; identical to SEQ ID NO: 800962

SEQ ID NO: 800965 - protein, 424 aa, Homo sapiens
SRRRLRTRESGLGRRPGAGAMKLLRRAWRRRAALGLGTLALCGAALLYLARCAAEPGDPRAMSGRSPPPPAPARAAAFLAVLVASAPRAAERRSVIRSTWLARRGAPGDVWARFAVGTAGLGAEERRALEREQARHGDLLLLPALRDAYENLTAKVLAMLAWLDEHVAFEFVLKADDDSFARLDALLAELRAREPARRRRLYWGFFSGRGRVKPGGRWREAAWQLCDYYLPYALGGGYVLSADLVHYLRLSRDYLRAWHSEDVSLGAWLAPVDVQREHDPRFDTEYRSRGCSNQYLVTHKQSLEDMLERARAACASARCSCACPTCTTGPRRPRSAAREGRASPEPPRPGPPGHLLHPAAPWGRCRAGALRPGPKAPVPQPRLWSLRPGLRLGDPWGLPGQRAVSRWRCPFLDLSEPEPGPAAR

SEQ ID NO: 800966 - protein, 329 aa, Homo sapiens; identical to SEQ ID NO: 800962

SEQ ID NO: 800967 - protein, 349 aa, Homo sapiens; identical to SEQ ID NO: 800963

SEQ ID NO: 800968 - protein, 111 aa, Homo sapiens
MPIIQSNQLVSSWVVKTLSLYFLLCLVNASAYGILQTTLKFREIQFQESTRRLCNSEDADTVFSYGSFHTSLFLYKKLRGWARPDQTLLFPVPLVLTPWNNGMKPRDLSAF

SEQ ID NO: 800969 - protein, 111 aa, Homo sapiens; identical to SEQ ID NO: 800968

SEQ ID NO: 800970 - protein, 157 aa, Homo sapiens
MVGRMKLLPNRIRTLALTAIGVVLLGVDDPGAPSDQVEVHLELDLPTQLTSVWQVMSTVPLAPLPGQLSLLGPPGALGFPQQGGPTQLPLLLREVGVEHKEHIGGRRCGGPRPALSSYPGHLLLQGPRALQPLGERPGHLQNHAAQGKGDLGQSDSE

SEQ ID NO: 800971 - protein, 382 aa, Homo sapiens
MAAADLSHGHYLSGDPVCLHEEKTPAGRIVADCLTDCYQDSVTFDDVAVDFTQEEWTLLDSTQRSLYSDVMLENYKNLATVGGQIIKPSLISWLEQEESGQFREEFSKEGKHNGRELCDCEQCGEVFSEHSCLKTHVRTQSTGNTHDCNQYGKDFLTLCEKTSTGEKLSEFNQSEKIFSLTPNIVYQRTSTQEKSFECSHCGKSFINESYLQAHMRTHNGEKLYEWRNYGPGFIDSTSLSVLIETLNAKKPYKCKECGKGYRYPAYLSIHMRTHTGEKPYECKECGKAFNYSNSFQIHGRTHTGEKPYVCKECGKAFTQYSGLSMHVRSHSGDKPYECKECGKSFLTSSRLIQHIRTHTGEKPLYVLNVGKPLQFPQILVDI

SEQ ID NO: 800972 - protein, 410 aa, Homo sapiens
MAAADLSHGHYLSGDPVCLHEEKTPAGRIVADCLTDCYQDSVTFDDVAVDFTQEEWTLLDSTQRSLYSDVMLENYKNLATVGGQIIKPSLISWLEQEESRTVQGGVLQGWEMRLETQWSILQQDFLRGQTSIGIQLEGKHNGRELCDCEQCGEVFSEHSCLKTHVRTQSTGNTHDCNQYGKDFLTLCEKTSTGEKLSEFNQSEKIFSLTPNIVYQRTSTQEKSFECSHCGKSFINESYLQAHMRTHNGEKLYEWRNYGPGFIDSTSLSVLIETLNAKKPYKCKECGKGYRYPAYLSIHMRTHTGEKPYECKECGKAFNYSNSFQIHGRTHTGEKPYVCKECGKAFTQYSGLSMHVRSHSGDKPYECKECGKSFLTSSRLIQHIRTHTGEKPLYVLNVGKPLQFPQILVDI

SEQ ID NO: 800973 - protein, 410 aa, Homo sapiens; identical to SEQ ID NO: 800972

SEQ ID NO: 800974 - protein, 284 aa, Homo sapiens
MAAADLSHGHYLSGDPVCLHEEKTPAGRIVADCLTDCYQDSVTFDDVAVDFTQEEWTLLDSTQRSLYSDVMLENYKNLATVGGQIIKPSLISWLEQEESRTVQGGVLQGWEMRLETQWSILQQDFLRGQTSIGIQLEGKHNGRELCDCEQCGEVFSEHSCLKTHVRTQSTGNTHDCNQYGKDFLTLCEKTSTGEKLSEFNQSEKIFSLTPNIVYQRTSTQEKSFECSHCGKSFINESYLQAHMRTHNGEKLYEWRNYGPGFIDSTSLSVLIETLNAKKPYKCKE

SEQ ID NO: 800975 - protein, 263 aa, Homo sapiens
MQGQNRTLGRRQVAGGYPASHPQQTLANPTLPASGSECLAGAAVEMIKVEHLKEKLISQAQEVSRLRSELGGTDLEKHRDLLMVENERLRQEMRRCEAELQELRTKPAGPCPGCEHSQESAQLRDKLSQLQLEMAESKGMLSELNLEVQQKTDRLAEVELRLKDCLAEKAQEEERLSRRLRDSHETIASLRAQSPPVKYVIKTVEVESSKTKQALSESQARNQHLQEQVAMQRQVLKEMEQQLQSSHQLTARLRAQVPRLCGG

SEQ ID NO: 800976 - protein, 730 aa, Homo sapiens
MQGQNRTLGRRQVAGGYPASHPQQTLANPTLPASGSECLAGAAVEMIKVEHLKEKLISQAQEVSRLRSELGGTDLEKHRDLLMVENERLRQEMRRCEAELQELRTKPAGPCPGCEHSQESAQLRDKLSQLQLEMAESKGMLSELNLEVQQKTDRLAEVELRLKDCLAEKAQEEERLSRRLRDSHETIASLRAQSPPVKYVIKTVEVESSKTKQALSESQARNQHLQEQVAMQRQVLKEMEQQLQSSHQLTARLRAQIAMYESELERAHGQMLEEMQSLEEDKNRAIEEAFARAQVEMKAVHENLAGVRTNLLTLQPALRTLTNDYNGLKRQVRGFPLLLQEALRSVKAEIGQAIEEVNSNNQELLRKYRRELQLRKKCHNELVRLKGNIRVIARVRPVTKEDGEGPEATNAVTFDADDDSIIHLLHKGKPVSFELDKVFSPQASQQDVFQEVQALVTSCIDGFNVCIFAYGQTGAGKTYTMEGTAENPGINQRALQLLFSEVQEKASDWEYTITVSAAEIYNEVLRDLLGKEPQEKLEIRLCPDGSGQLYVPGLTEFQVQSVDDINKVFEFGHTNRTTEFTNLNEHSSRSHALLIVTVRGVDCSTGLRTTGKLNLVDLAGSERVGKSGAEGSRLREAQHINKSLSALGDVIAALRSRQATCPSATPSSPTCCRIRLVVTARPSWWYRCPPWRRTLARRSIPSSLLRGCALWSWGLGYAGQSLGPGQARSI

SEQ ID NO: 800977 - protein, 730 aa, Homo sapiens; identical to SEQ ID NO: 800976

SEQ ID NO: 800978 - protein, 729 aa, Homo sapiens
MVLRMVEAMSQLQDEKTQLQEELVVLQERLALRDSDQQATSTQLQNQVEHLKEKLISQAQEVSRLRSELGGTDLEKHRDLLMVENERLRQEMRRCEAELQELRTKPAGPCPGCEHSQESAQLRDKLSQLQLEMAESKGMLSELNLEVQQKTDRLAEVELRLKDCLAEKAQEEERLSRRLRDSHETIASLRAQSPPVKYVIKTVEVESSKTKQALSESQARNQHLQEQVAMQRQVLKEMEQQLQSSHQLTARLRAQIAMYESELERAHGQMLEEMQSLEEDKNRAIEEAFARAQVEMKAVHENLAGVRTNLLTLQPALRTLTNDYNGLKRQVRGFPLLLQEALRSVKAEIGQAIEEVNSNNQELLRKYRRELQLRKKCHNELVRLKGNIRVIARVRPVTKEDGEGPEATNAVTFDADDDSIIHLLHKGKPVSFELDKVFSPQASQQDVFQEVQALVTSCIDGFNVCIFAYGQTGAGKTYTMEGTAENPGINQRALQLLFSEVQEKASDWEYTITVSAAEIYNEVLRDLLGKEPQEKLEIRLCPDGSGQLYVPGLTEFQVQSVDDINKVFEFGHTNRTTEFTNLNEHSSRSHALLIVTVRGVDCSTGLRTTGKLNLVDLAGSERVGKSGAEGSRLREAQHINKSLSALGDVIAALRSRQATCPSATPSSPTCCRIRLVVTARPSWWYRCPPWRRTLARRSIPSSLLRGCALWSWGLGYAGQSLGPGQARSI

SEQ ID NO: 800979 - protein, 648 aa, Homo sapiens
MVENERLRQEMRRCEAELQELRTKPAGPCPGCEHSQESAQLRDKLSQLQLEMAESKGMLSELNLEVQQKTDRLAEVELRLKDCLAEKAQEEERLSRRLRDSHETIASLRAQSPPVKYVIKTVEVESSKTKQALSESQARNQHLQEQVAMQRQVLKEMEQQLQSSHQLTARLRAQIAMYESELERAHGQMLEEMQSLEEDKNRAIEEAFARAQVEMKAVHENLAGVRTNLLTLQPALRTLTNDYNGLKRQVRGFPLLLQEALRSVKAEIGQAIEEVNSNNQELLRKYRRELQLRKKCHNELVRLKGNIRVIARVRPVTKEDGEGPEATNAVTFDADDDSIIHLLHKGKPVSFELDKVFSPQASQQDVFQEVQALVTSCIDGFNVCIFAYGQTGAGKTYTMEGTAENPGINQRALQLLFSEVQEKASDWEYTITVSAAEIYNEVLRDLLGKEPQEKLEIRLCPDGSGQLYVPGLTEFQVQSVDDINKVFEFGHTNRTTEFTNLNEHSSRSHALLIVTVRGVDCSTGLRTTGKLNLVDLAGSERVGKSGAEGSRLREAQHINKSLSALGDVIAALRSRQATCPSATPSSPTCCRIRLVVTARPSWWYRCPPWRRTLARRSIPSSLLRGCALWSWGLGYAGQSLGPGQARSI

SEQ ID NO: 800980 - protein, 729 aa, Homo sapiens; identical to SEQ ID NO: 800978

SEQ ID NO: 800981 - protein, 592 aa, Homo sapiens
SRGPPHVREVQQKTDRLAEVELRLKDCLAEKAQEEERLSRRLRDSHETIASLRAQSPPVKYVIKTVEVESSKTKQALSESQARNQHLQEQVAMQRQVLKEMEQQLQSSHQLTARLRAQIAMYESELERAHGQMLEEMQSLEEDKNRAIEEAFARAQVEMKAVHENLAGVRTNLLTLQPALRTLTNDYNGLKRQVRGFPLLLQEALRSVKAEIGQAIEEVNSNNQELLRKYRRELQLRKKCHNELVRLKGNIRVIARVRPVTKEDGEGPEATNAVTFDADDDSIIHLLHKGKPVSFELDKVFSPQASQQDVFQEVQALVTSCIDGFNVCIFAYGQTGAGKTYTMEGTAENPGINQRALQLLFSEVQEKASDWEYTITVSAAEIYNEVLRDLLGKEPQEKLEIRLCPDGSGQLYVPGLTEFQVQSVDDINKVFEFGHTNRTTEFTNLNEHSSRSHALLIVTVRGVDCSTGLRTTGKLNLVDLAGSERVGKSGAEGSRLREAQHINKSLSALGDVIAALRSRQATCPSATPSSPTCCRIRLVVTARPSWWYRCPPWRRTLARRSIPSSLLRGCALWSWGLGYAGQSLGPGQARSI

SEQ ID NO: 800982 - protein, 250 aa, Homo sapiens
MEGTAENPGINQRALQLLFSEVQEKASDWEYTITVSAAEIYNEVLRDLLGKEPQEKLEIRLCPDGSGQLYVPGLTEFQVQSVDDINKVFEFGHTNRTTEFTNLNEHSSRSHALLIVTVRGVDCSTGLRTTGKLNLVDLAGSERVGKSGAEGSRLREAQHINKSLSALGDVIAALRSRQATCPSATPSSPTCCRIRLVVTARPSWWYRCPPWRRTLARRSIPSSLLRGCALWSWGLGYAGQSLGPGQARSI

SEQ ID NO: 800983 - protein, 335 aa, Homo sapiens
MQGQNRTLGRRQVAGGYPASHPQQTLANPTLPASGSECLAGAAVEMIKVEHLKEKLISQAQEVSRLRSELGGTDLEKHRDLLMVENERLRQEMRRCEAELQELRTKPAGPCPGCEHSQESAQLRDKLSQLQLEMAESKGMLSELNLEVQQKTDRLAEVELRLKDCLAEKAQEEERLSRRLRDSHETIASLRAQSPPVKYVIKTVEVESSKTKQALSESQARNQHLQEQVAMQRQVLKEMEQQLQSSHQLTARLRAQIAMYESELERAHGQMLEEMQSLEEDKNRAIEEAFARAQVEMKAVHENLAGVQDKLLPLQPGTQSLNKDTMGTREMDRIQ

SEQ ID NO: 800984 - protein, 100 aa, Homo sapiens
ALGAPVAGPSAARPGTAAPLAAWCPEEAAEPQAMVPSRRTWNLGATPSLRGLWRVGRAPEPEPGMARPAPGPSQPGRPPFPTHRPGEVENWAWKRYPSLR

SEQ ID NO: 800985 - protein, 185 aa, Homo sapiens
ARVNHFLWKVCGRGASGLAEEEAAAWSCLLPAGRAGPSPGRCGDAWILPPPGRLPGAPRRLLSPRPWSPLAGRGTWEPRPRCGACGEWAGPRSPSRGWLAPPQAPASPAARPFPHTGPGRLRTGRGKDTPVCGDEDSSARSAARPALAQCRALSVDWAGPGSPHGLYLTLQRQGFTMLAMLLSKS

SEQ ID NO: 800986 - protein, 853 aa, Homo sapiens
ARVNHFLWKVCGRGASGLAEEEAAAWSCLLPAGRAGPSPGRCGDAWILPPPGRLPGAPRRLLSPRPWSPLAGRGTWEPRPRCGACGEWAGPRSPSRGWLAPPQAPASPAARPFPHTGPGRLRTGRGKDTPVCGDEDSSARSAARPALAQCRALSVDWAGPGSPHGLYLTLQVEHLKEKLISQAQEVSRLRSELGGTDLEKHRDLLMVENERLRQEMRRCEAELQELRTKPAGPCPGCEHSQESAQLRDKLSQLQLEMAESKGMLSELNLEVQQKTDRLAEVELRLKDCLAEKAQEEERLSRRLRDSHETIASLRAQSPPVKYVIKTVEVESSKTKQALSESQARNQHLQEQVAMQRQVLKEMEQQLQSSHQLTARLRAQIAMYESELERAHGQMLEEMQSLEEDKNRAIEEAFARAQVEMKAVHENLAGVRTNLLTLQPALRTLTNDYNGLKRQVRGFPLLLQEALRSVKAEIGQAIEEVNSNNQELLRKYRRELQLRKKCHNELVRLKGNIRVIARVRPVTKEDGEGPEATNAVTFDADDDSIIHLLHKGKPVSFELDKVFSPQASQQDVFQEVQALVTSCIDGFNVCIFAYGQTGAGKTYTMEGTAENPGINQRALQLLFSEVQEKASDWEYTITVSAAEIYNEVLRDLLGKEPQEKLEIRLCPDGSGQLYVPGLTEFQVQSVDDINKVFEFGHTNRTTEFTNLNEHSSRSHALLIVTVRGVDCSTGLRTTGKLNLVDLAGSERVGKSGAEGSRLREAQHINKSLSALGDVIAALRSRQATCPSATPSSPTCCRIRLVVTARPSWWYRCPPWRRTLARRSIPSSLLRGCALWSWGLGYAGQSLGPGQARSI

SEQ ID NO: 800987 - protein, 769 aa, Homo sapiens
MVPCFQPYPPLASDRLLFHTAVPARLCGPMVKGEGSARVSQMRVPVLGPPLTGQVTSKLFSSSATEIWASLKSNSSFAICLRGLTAHVEHLKEKLISQAQEVSRLRSELGGTDLEKHRDLLMVENERLRQEMRRCEAELQELRTKPAGPCPGCEHSQESAQLRDKLSQLQLEMAESKGMLSELNLEVQQKTDRLAEVELRLKDCLAEKAQEEERLSRRLRDSHETIASLRAQSPPVKYVIKTVEVESSKTKQALSESQARNQHLQEQVAMQRQVLKEMEQQLQSSHQLTARLRAQIAMYESELERAHGQMLEEMQSLEEDKNRAIEEAFARAQVEMKAVHENLAGVRTNLLTLQPALRTLTNDYNGLKRQVRGFPLLLQEALRSVKAEIGQAIEEVNSNNQELLRKYRRELQLRKKCHNELVRLKGNIRVIARVRPVTKEDGEGPEATNAVTFDADDDSIIHLLHKGKPVSFELDKVFSPQASQQDVFQEVQALVTSCIDGFNVCIFAYGQTGAGKTYTMEGTAENPGINQRALQLLFSEVQEKASDWEYTITVSAAEIYNEVLRDLLGKEPQEKLEIRLCPDGSGQLYVPGLTEFQVQSVDDINKVFEFGHTNRTTEFTNLNEHSSRSHALLIVTVRGVDCSTGLRTTGKLNLVDLAGSERVGKSGAEGSRLREAQHINKSLSALGDVIAALRSRQATCPSATPSSPTCCRIRLVVTARPSWWYRCPPWRRTLARRSIPSSLLRGCALWSWGLGYAGQSLGPGQARSI

SEQ ID NO: 800988 - protein, 648 aa, Homo sapiens; identical to SEQ ID NO: 800979

SEQ ID NO: 800989 - protein, 648 aa, Homo sapiens; identical to SEQ ID NO: 800979

SEQ ID NO: 800990 - protein, 124 aa, Homo sapiens
MAGVRHCCPALPPGHVPFRNSKLTYLLQDSLSGDSKTLMVVQVSPVEKNTSETLYSLKFAERVRSVELGPGLRRAELGSWSSQEHLEWEPACQTPQPSARAHSAPSSGTSSRPGSIRRKLQPSA

SEQ ID NO: 800991 - protein, 458 aa, Homo sapiens
ARVNHFLWKVCGRGASGLAEEEAAAWSCLLPAGRAGPSPGRCGDAWILPPPGRLPGAPRRLLSPRPWSPLAGRGTWEPRPRCGACGEWAGPRSPSRGWLAPPQAPASPAARPFPHTGPGRLRTGRGKDTPVCGDEDSSARSAARPALAQCRALSVDWAGPGSPHGLYLTLQVEHLKEKLISQAQEVSRLRSELGGTDLEKHRDLLMVENERLRQEMRRCEAELQELRTKPAGPCPGCEHSQESAQLRDKLSQLQLEMAESKGMLSELNLEVQQKTDRLAEVELRLKDCLAEKAQEEERLSRRLRDSHETIASLRAQSPPVKYVIKTVEVESSKTKQALSESQARNQHLQEQVAMQRQVLKEMEQQLQSSHQLTARLRAQIAMYESELERAHGQMLEEMQSLEEDKNRAIEEAFARAQVEMKAVHENLAGVQDKLLPLQPGTQSLNKDTMGTREMDRIQ

SEQ ID NO: 800992 - protein, 231 aa, Homo sapiens
QCECMCASACKDTAAWCPEEAAEPQAMVPSRRTWNLGATPSLRGLWRVGRAPEPEPGMARPAPAPASPAARPFPHTGPGRLRTGRGKDTPVCGDEDSSARSAARPALAQCRALSVDWAGPGSPHGLYLTLQQALQDKGCKSQSQGTKEEKLWKRQAPAPRRAREAREAGGTMNVENTGKAGLPAKPALPSEASAGGRLLCSWYIPMPCPARLEVAETDSSCLIRSCIPQPA

SEQ ID NO: 800993 - protein, 274 aa, Homo sapiens
MAQVAMSTLPVEDEESSESRMVVTFLMSALESMCKELAKSKAEVACIAVYETDVFVVGTERGRAFVNTRKDFQKDFVKYCVEEEEKAAEMHKMKSTTQANRMSVDAVEIETLRKTVEDYFCFCYGKALGKSTVVPVPYEKMLRDQSAVVVQGLPEGVAFKHPENYDLATLKWILENKAGISFIIKRPFLEPKKHVGGRVMVTDADRSILSPGGSCGPIKVKTEPTEDSGISLEMAAVTVKEESEDPDYYQYNIQGSHHSSEGNEGTEMEVPAEG

SEQ ID NO: 800994 - protein, 957 aa, Homo sapiens; identical to SEQ ID NO: 766037

SEQ ID NO: 800995 - protein, 957 aa, Homo sapiens; identical to SEQ ID NO: 766037

SEQ ID NO: 800996 - protein, 274 aa, Homo sapiens; identical to SEQ ID NO: 800993

SEQ ID NO: 800997 - protein, 262 aa, Homo sapiens
MAQVAMSTLPVEDEESSESRMVVTFLMSALESMCKELAKSKAEVACIAVYETDVFVVGTERGRAFVNTRKDFQKDFVKYCVEEEEKAAEMHKMKSTTQANRMSVDAVEIETLRKTVEDYFCFCYGKALGKSTVVPVPYEKMLRDQSAVVVQGLPEGVAFKHPENYDLATLKWILENKAGISFIIKRPFLEPKKHVGGRVMVTDADRSILSPGGSCGPIKVKTEPTEDSGISLEMAAVTVKEEEYQAGIFNSFGGSLPEEEND

SEQ ID NO: 800998 - protein, 957 aa, Homo sapiens; identical to SEQ ID NO: 766037

SEQ ID NO: 800999 - protein, 978 aa, Homo sapiens; identical to SEQ ID NO: 766035

SEQ ID NO: 801000 - protein, 283 aa, Homo sapiens
MAQVAMSTLPVEDEESSESRMVVTFLMSALESMCKELAKSKAEVACIAVYETDVFVVGTERGRAFVNTRKDFQKDFVKYCVEEEEKAAEMHKMKSTTQANRMSVDAVEIETLRKTVEDYFCFCYGKALGKSTVVPVPYEKMLRDQSAVVVQGLPEGVAFKHPENYDLATLKWILENKAGISFIIKRPFLEPKKHVGGRVMVTDADRSILSPGGSCGPIKVKTEPTEDSGISLEMAAVTVKEESEDPDYYQYNIQAGPSETDDVDEKQPLSKPLQGIIFSLPFS

SEQ ID NO: 801001 - protein, 181 aa, Homo sapiens
SSCCPTRKDFTGEKIFQEDTIPRIQAVFSFFLSVFVGWYLLEDTIPRTQIERRKTSLYFSSKYNKEALSPPRRKAFKKWTPPRSPFNLVQETLFHDPWKLLIATIFLNRTSGKMAIPVLWKFLEKYPSAEVARTADWRDVSELLKPLGLYDLRAKTIVKFSDEYLTKQWKYPIELHGIGAP

SEQ ID NO: 801002 - protein, 416 aa, Homo sapiens
MGTTGLESLSLGDRGAAPTVTSSERLVPDPPNDLRKEDVAMELERVGEDEEQMMIKRSSECNPLLQEPIASAQFGATAGTECRKSVPCGWERVVKQRLFGKTAGRFDVYFISPQGLKFRSKSSLANYLHKNGETSLKPEDFDFTVLSKRGIKSRYKDCSMAALTSHLQNQSNNSNWNLRTRSKCKKDVFMPPSSSSELQESRGLSNFTSTHLLLKEDEGVDDVNFRKVRKPKGKVTILKGIPIKKTKKGCRKSCSGFVQSDSKRESVCNKADAESEPVAQKSQLDRTVCISDAGACGETLSVTSEENSLVKKKERSLSSGSNFCSEQKTSGIINKFCSAKDSEHNEKYEDTFLESEEIGTKVEVVERKEHLHTDILKRGSEMDNNCSPTRKDFTGRYHPTNTDRKKENKPVFFQQI

SEQ ID NO: 801003 - protein, 416 aa, Homo sapiens; identical to SEQ ID NO: 801002

SEQ ID NO: 801004 - protein, 422 aa, Homo sapiens
MGTTGLESLSLGDRGAAPTVTSSERLVPDPPNDLRKEDVAMELERVGEDEEQMMIKRSSECNPLLQEPIASAQFGATAGTECRKSVPCGWERVVKQRLFGKTAGRFDVYFISPQGLKFRSKSSLANYLHKNGETSLKPEDFDFTVLSKRGIKSRYKDCSMAALTSHLQNQSNNSNWNLRTRSKCKKDVFMPPSSSSELQESRGLSNFTSTHLLLKEDEGVDDVNFRKVRKPKGKVTILKGIPIKKTKKGCRKSCSGFVQSDSKRESVCNKADAESEPVAQKSQLDRTVCISDAGACGETLSVTSEENSLVKKKERSLSSGSNFCSEQKTSGIINKFCSAKDSEHNEKYEDTFLESEEIGTKVEVVERKEHLHTDILKRGSEMDNNCSPTRKDFTGEKIFQGRYHPTNTDRKKENKPVFFQQI

SEQ ID NO: 801005 - protein, 416 aa, Homo sapiens; identical to SEQ ID NO: 801002

SEQ ID NO: 801006 - protein, 416 aa, Homo sapiens; identical to SEQ ID NO: 801002

SEQ ID NO: 801007 - protein, 213 aa, Homo sapiens
SSCCPTRKDFTGEKIFQEDTIPRIQAVFSFFLSVFVGWYLLEDTIPRTQIERRKTSLYFSSKYNKEALSPPRRKAFKKWTPPRSPFNLVQETLFHDPWKLLIATIFLNRTSGKMAIPVLWKFLEKYPSAEVARTADWRDVSELLKPLGLYDLRAKTIVKFSDEYLTKQWKYPIELHGIGKYGNDSYRIFCVNEWKQVRLTPIHNSAHLVSEAK

SEQ ID NO: 801008 - protein, 416 aa, Homo sapiens; identical to SEQ ID NO: 801002

SEQ ID NO: 801009 - protein, 416 aa, Homo sapiens; identical to SEQ ID NO: 801002

SEQ ID NO: 801010 - protein, 580 aa, Homo sapiens
MGTTGLESLSLGDRGAAPTVTSSERLVPDPPNDLRKEDVAMELERVGEDEEQMMIKRSSECNPLLQEPIASAQFGATAGTECRKSVPCGWERVVKQRLFGKTAGRFDVYFISPQGLKFRSKSSLANYLHKNGETSLKPEDFDFTVLSKRGIKSRYKDCSMAALTSHLQNQSNNSNWNLRTRSKCKKDVFMPPSSSSELQESRGLSNFTSTHLLLKEDEGVDDVNFRKVRKPKGKVTILKGIPIKKTKKGCRKSCSGFVQSDSKRESVCNKADAESEPVAQKSQLDRTVCISDAGACGETLSVTSEENSLVKKKERSLSSGSNFCSEQKTSGIINKFCSAKDSEHNEKYEDTFLESEEIGTKVEVVERKEHLHTDILKRGSEMDNNCSPTRKDFTGEKIFKEDTIPRTQIERRKTSLYFSSKYNKEALSPPRRKAFKKWTPPRSPFNLVQETLFHDPWKLLIATIFLNRTSGKMAIPVLWKFLEKYPSAEVARTADWRDVSELLKPLGLYDLRAKTIVKFSDEYLTKQWKYPIELHGIGKYGNDSYRIFCVNEWKQVHPEDHKLNKYHDWLWENHEKLSLS

SEQ ID NO: 801011 - protein, 416 aa, Homo sapiens; identical to SEQ ID NO: 801002

SEQ ID NO: 801012 - protein, 383 aa, Homo sapiens
MSRPGVNRPRGRVGEDEEQMMIKRSSECNPLLQEPIASAQFGATAGTECRKSVPCGWERVVKQRLFGKTAGRFDVYFISPQGLKFRSKSSLANYLHKNGETSLKPEDFDFTVLSKRGIKSRYKDCSMAALTSHLQNQSNNSNWNLRTRSKCKKDVFMPPSSSSELQESRGLSNFTSTHLLLKEDEGVDDVNFRKVRKPKGKVTILKGIPIKKTKKGCRKSCSGFVQSDSKRESVCNKADAESEPVAQKSQLDRTVCISDAGACGETLSVTSEENSLVKKKERSLSSGSNFCSEQKTSGIINKFCSAKDSEHNEKYEDTFLESEEIGTKVEVVERKEHLHTDILKRGSEMDNNCSPTRKDFTGRYHPTNTDRKKENKPVFFQQI

SEQ ID NO: 801013 - protein, 659 aa, Homo sapiens
RPVSNGSAAMASGEHSPGSGAARRPLHSAQAVDVASASNFRAFELLHLHLDLRAEFGPPGPGAGSRGLSGTAVLDLRCLEPEGAAELRLDSHPCLEVTAAALRRERPGSEEPPAEPVSFYTQPFSHYGQALCVSFPQPCRAAERLQVLLTYRVGEGPGVCWLAPEQTAGKKKPFVYTQGQAVLNRAFFPCFDTPAVKYKYSALIEVPDGFTAVMSASTWEKRGPNKFFFQMCQPIPSYLIALAIGDLVSAEVGPRSRVWAEPCLIDAAKEEYNGVIEEFLATGEKLFGPYVWGRYDLLFMPPSFPFGGMENPCLTFVTPCLLAGDRSLADVIIHEISHSWFGNLVTNANWGEFWLNEGFTMYAQRRISTILFGAAYTCLEAATGRALLRQHMDITGEENPLNKLRVKIEPGVDPDDTYNETPYEKGFCFVSYLAHLVGDQDQFDSFLKAYVHEFKFRSILADDFLDFYLEYFPELKKKRVDIIPGFEFDRWLNTPGWPPYLPDLSPGDSLMKPAEELAQLWAAEELDMKAIEAVAISPWKTYQLVYFLDKILQKSPLPPGNVKKLGDTYPSISNARNAELRLRWGQIVLKNDHQEDFWKVKEFLHNQGKQKYTLPLYHAMMGGSEVAQTLAKETFASTASQLHSNVVNYVQQIVAPKGS

SEQ ID NO: 801014 - protein, 244 aa, Homo sapiens
FTRHDFIETNGDNCLVTLLPLLNMAYKFRTHSPEALEQLYPWECFVFCLIIFGTFTNQIHKWSHTYFGLPRWVTLLQDWHVILPRKHHRIHHVSPHETYFCITTGVKVPRNFRLLEELEEGQKGVGDGTVSWGLEDDEDMTLTRWTGMIIGPPRTIYENRIYSLKIECGPKYPEAPPFVRFVTKINMNGVNSSNGVVDPRAISVLAKWQNSYSIKVVLQELRRLMMSKENMKLPQPPEGQCYSN

SEQ ID NO: 801015 - protein, 299 aa, Homo sapiens [sequence omitted]

SEQ ID NO: 801016 - protein, 134 aa, Homo sapiens
MPPSFPFGGMENPCLTFVTPCLLAGDRSLADVIIHEISHSWFGNLVTNANWGEFWLNEGFTMYAQRRISTILFGAAYTCLEAATGRALLRQHMDITGEENPLNKLRVKIEPGVDPHDTYELRPCIEKYASIDSY

SEQ ID NO: 801017 - protein, 519 aa, Homo sapiens
MTCCSCTSLSALLDFWAEVCWLAPEQTAGKKKPFVYTQGQAVLNRAFFPCFDTPAVKYKYSALIEVPDGFTAVMSASTWEKRGPNKFFFQMCQPIPSYLIALAIGDLVSAEVGPRSRVWAEPCLIDAAKEEYNGVIEEFLATGEKLFGPYVWGRYDLLFMPPSFPFGGMENPCLTFVTPCLLAGDRSLADVIIHEISHSWFGNLVTNANWGEFWLNEGFTMYAQRRISTILFGAAYTCLEAATGRALLRQHMDITGEENPLNKLRVKIEPGVDPDDTYNETPYEKGFCFVSYLAHLVGDQDQFDSFLKAYVHEFKFRSILADDFLDFYLEYFPELKKKRVDIIPGFEFDRWLNTPGWPPYLPDLSPGDSLMKPAEELAQLWAAEELDMKAIEAVAISPWKTYQLVYFLDKILQKSPLPPGNVKKLGDTYPSISNARNAELRLRWGQIVLKNDHQEDFWKVKEFLHNQGKQKYTLPLYHAMMGGSEVAQTLAKETFASTASQLHSNVVNYVQQIVAPKGS

SEQ ID NO: 801018 - protein, 446 aa, Homo sapiens [sequence omitted]

SEQ ID NO: 801019 - protein, 360 aa, Homo sapiens
MPPSFPFGGMENPCLTFVTPCLLAGDRSLADVIIHEISHSWFGNLVTNANWGEFWLNEGFTMYAQRRISTILFGAAYTCLEAATGRALLRQHMDITGEENPLNKLRVKIEPGVDPDDTYNETPYEKGFCFVSYLAHLVGDQDQFDSFLKAYVHEFKFRSILADDFLDFYLEYFPELKKKRVDIIPGFEFDRWLNTPGWPPYLPDLSPGDSLMKPAEELAQLWAAEELDMKAIEAVAISPWKTYQLVYFLDKILQKSPLPPGNVKKLGDTYPSISNARNAELRLRWGQIVLKNDHQEDFWKVKEFLHNQGKQKYTLPLYHAMMGGSEVAQTLAKETFASTASQLHSNVVNYVQQIVAPKGS

SEQ ID NO: 801020 - protein, 291 aa, Homo sapiens
MFGEGAAYTCLEAATGRALLRQHMDITGEENPLNKLRVKIEPGVDPDDTYNETPYEKGFCFVSYLAHLVGDQDQFDSFLKAYVHEFKFRSILADDFLDFYLEYFPELKKKRVDIIPGFEFDRWLNTPGWPPYLPDLSPGDSLMKPAEELAQLWAAEELDMKAIEAVAISPWKTYQLVYFLDKILQKSPLPPGNVKKLGDTYPSISNARNAELRLRWGQIVLKNDHQEDFWKVKEFLHNQGKQKYTLPLYHAMMGGSEVAQTLAKETFASTASQLHSNVVNYVQQIVAPKGS

SEQ ID NO: 801021 - protein, 360 aa, Homo sapiens; identical to SEQ ID NO: 801019

SEQ ID NO: 801022 - protein, 578 aa, Homo sapiens
RPVSNGSAAMASGEHSPGSGAARRPLHSAQAVDVASASNFRAFELLHLHLDLRAEFGPPGPGAGSRGLSGTAVLDLRCLEPEGAAELRLDSHPCLEVTAAALRRERPGSEEPPAEPVSFYTQPFSHYGQALCVSFPQPCRAAERLQVLLTYRVGEGPGVCWLAPEQTAGKKKPFVYTQGQAVLNRAFFPCFDTPAVKYKYSALIEVPDGFTAVMSASTWEKRGPNKFFFQMCQPIPSYLIALAIGDLVSAEVGPRSRVWAEPCLIDAAKEEYNGVIEEFLATGEKLFGPYVWGRYDLLFMPPSFPFGGMENPCLTFVTPCLLAGDRSLADVIIHEISHSWFGNLVTNANWGEFWLNEGFTMYAQRRISTILFGAAYTCLEAATGRALLRQHMDITGEENPLNKLRVKIEPGVDPDDTYNETPYEKGFCFVSYLAHLVGDQDQFDSFLKAYVHEFKFRSILADDFLDFYLEYFPELKKKRVDIIPGFEFDRWLNTPGWPPYLPDLSPGDSLMKPAEELAQLWAAEELDMKAIEAVAISPWKTYQLVYFLDKILQKSPLPPGCDGAKSSLRTTTRKISGK

SEQ ID NO: 801023 - protein, 291 aa, Homo sapiens; identical to SEQ ID NO: 801020

SEQ ID NO: 801024 - protein, 268 aa, Homo sapiens [sequence omitted]

SEQ ID NO: 801025 - protein, 659 aa, Homo sapiens; identical to SEQ ID NO: 801013

SEQ ID NO: 801026 - protein, 149 aa, Homo sapiens
MKPAEELAQLWAAEELDMKAIEAVAISPWKTYQLVYFLDKILQKSPLPPGNVKKLGDTYPSISNARNAELRLRWGQIVLKNDHQEDFWKVKEFLHNQGKQKYTLPLYHAMMGGSEVAQTLAKETFASTASQLHSNVVNYVQQIVAPKGS

SEQ ID NO: 801027 - protein, 85 aa, Homo sapiens
SGTSNVVNYVQQIVAPKGSERLVCMAPASPRRLLHPPPPSSTAMLSTMSSRSWHPRAVRGSCAWPLPLQALQAFRIIVCSQIPVP

SEQ ID NO: 801028 - protein, 382 aa, Homo sapiens
RPVSNGSAAMASGEHSPGSGAARRPLHSAQAVDVASASNFRAFELLHLHLDLRAEFGPPGPGAGSRGLSGTAVLDLRCLEPEGAAELRLDSHPCLEVTAAALRRERPGSEEPPAEPVSFYTQPFSHYGQALCVSFPQPCRAAERLQVLLTYRVGEGPGVCWLAPEQTAGKKKPFVYTQGQAVLNRAFFPCFDTPAVKYKYSALIEVPDGFTAVMSASTWEKRGPNKFFFQMCQPIPSYLIALAIGDLVSAEVGPRSRVWAEPCLIDAAKEEYNGVIEEFLATGEKLFGPYVWGRYDLLFMPPSFPFGGMENPCLTFVTPCLLAGDRSLADVIIHEISHSWFGNLVTNANWGEFWLNEGFTMYAQRRISTILFANPANQRQVT

SEQ ID NO: 801029 - protein, 330 aa, Homo sapiens
RPVSNGSAAMASGEHSPGSGAARRPLHSAQAVDVASASNFRAFELLHLHLDLRAEFGPPGPGAGSRGLSGTAVLDLRCLEPEGAAELRLDSHPCLEVTAAALRRERPGSEEPPAEPVSFYTQPFSHYGQALCVSFPQPCRAAERLQVLLTYRVGEGPGVCWLAPEQTAGKKKPFVYTQGQAVLNRAFFPCFDTPAVKYKYSALIEVPDGFTAVMSASTWEKRGPNKFFFQMCQPIPSYLIALAIGDLVSAEVGPRSRVWAEPCLIDAAKEEYNGVIEEFLATGEKLFGPYVWGRCGITLTLVSPVKLSHWLPFFLFVWLFHLLPPRAKFP

SEQ ID NO: 801030 - protein, 667 aa, Homo sapiens
RPVSNGSAAMASGEHSPGSGAARRPLHSAQLRPLHSAQAVDVASASNFRAFELLHLHLDLRAEFGPPGPGAGSRGLSGTAVLDLRCLEPEGAAELRLDSHPCLEVTAAALRRERPGSEEPPAEPVSFYTQPFSHYGQALCVSFPQPCRAAERLQVLLTYRVGEGPGVCWLAPEQTAGKKKPFVYTQGQAVLNRAFFPCFDTPAVKYKYSALIEVPDGFTAVMSASTWEKRGPNKFFFQMCQPIPSYLIALAIGDLVSAEVGPRSRVWAEPCLIDAAKEEYNGVIEEFLATGEKLFGPYVWGRYDLLFMPPSFPFGGMENPCLTFVTPCLLAGDRSLADVIIHEISHSWFGNLVTNANWGEFWLNEGFTMYAQRRISTILFGAAYTCLEAATGRALLRQHMDITGEENPLNKLRVKIEPGVDPDDTYNETPYEKGFCFVSYLAHLVGDQDQFDSFLKAYVHEFKFRSILADDFLDFYLEYFPELKKKRVDIIPGFEFDRWLNTPGWPPYLPDLSPGDSLMKPAEELAQLWAAEELDMKAIEAVAISPWKTYQLVYFLDKILQKSPLPPGNVKKLGDTYPSISNARNAELRLRWGQIVLKNDHQEDFWKVKEFLHNQGKQKYTLPLYHAMMGGSEVAQTLAKETFASTASQLHSNVVNYVQQIVAPKGS

SEQ ID NO: 801031 - protein, 299 aa, Homo sapiens [sequence omitted]

SEQ ID NO: 801032 - protein, 659 aa, Homo sapiens; identical to SEQ ID NO: 801013

SEQ ID NO: 801033 - protein, 557 aa, Homo sapiens
RPVSNGSAAMASGEHSPGSGAARRPLHSAQAVDVASASNFRAFELLLTYRVGEGPGVCWLAPEQTAGKKKPFVYTQGQAVLNRAFFPCFDTPAVKYKYSALIEVPDGFTAVMSASTWEKRGPNKFFFQMCQPIPSYLIALAIGDLVSAEVGPRSRVWAEPCLIDAAKEEYNGVIEEFLATGEKLFGPYVWGRYDLLFMPPSFPFGGMENPCLTFVTPCLLAGDRSLADVIIHEISHSWFGNLVTNANWGEFWLNEGFTMYAQRRISTILFGAAYTCLEAATGRALLRQHMDITGEENPLNKLRVKIEPGVDPDDTYNETPYEKGFCFVSYLAHLVGDQDQFDSFLKAYVHEFKFRSILADDFLDFYLEYFPELKKKRVDIIPGFEFDRWLNTPGWPPYLPDLSPGDSLMKPAEELAQLWAAEELDMKAIEAVAISPWKTYQLVYFLDKILQKSPLPPGNVKKLGDTYPSISNARNAELRLRWGQIVLKNDHQEDFWKVKEFLHNQGKQKYTLPLYHAMMGGSEVAQTLAKETFASTASQLHSNVVNYVQQIVAPKGS

SEQ ID NO: 801034 - protein, 360 aa, Homo sapiens; identical to SEQ ID NO: 801019

SEQ ID NO: 801035 - protein, 360 aa, Homo sapiens; identical to SEQ ID NO: 801019

SEQ ID NO: 801036 - protein, 360 aa, Homo sapiens; identical to SEQ ID NO: 801019

SEQ ID NO: 801037 - protein, 659 aa, Homo sapiens; identical to SEQ ID NO: 801013

SEQ ID NO: 801038 - protein, 303 aa, Homo sapiens
MVRGWVLQRRISTILFGAAYTCLEAATGRALLRQHMDITGEENPLNKLRVKIEPGVDPDDTYNETPYEKGFCFVSYLAHLVGDQDQFDSFLKAYVHEFKFRSILADDFLDFYLEYFPELKKKRVDIIPGFEFDRWLNTPGWPPYLPDLSPGDSLMKPAEELAQLWAAEELDMKAIEAVAISPWKTYQLVYFLDKILQKSPLPPGNVKKLGDTYPSISNARNAELRLRWGQIVLKNDHQEDFWKVKEFLHNQGKQKYTLPLYHAMMGGSEVAQTLAKETFASTASQLHSNVVNYVQQIVAPKGS

SEQ ID NO: 801039 - protein, 287 aa, Homo sapiens
GKLNSDLFHRYSLTVELEKNVTGDRLQKLKSCLLSPLPGVDPDDTYNETPYEKGFCFVSYLAHLVGDQDQFDSFLKAYVHEFKFRSILADDFLDFYLEYFPELKKKRVDIIPGFEFDRWLNTPGWPPYLPDLSPGDSLMKPAEELAQLWAAEELDMKAIEAVAISPWKTYQLVYFLDKILQKSPLPPGNVKKLGDTYPSISNARNAELRLRWGQIVLKNDHQEDFWKVKEFLHNQGKQKYTLPLYHAMMGGSEVAQTLAKETFASTASQLHSNVVNYVQQIVAPKGS

SEQ ID NO: 801040 - protein, 530 aa, Homo sapiens
RPVSNGSAAMASGEHSPGSGAARRPLHSAQAVDVASASNFRAFELLHLHLDLRAEFGPPGPGAGSRGLSGTAVLDLRCLEPEGAAELRLDSHPCLEVTAAALRRERPGSEEPPAEPVSFYTQPFSHYGQALCVSFPQPCRAAERLQVLLTYRVGEGPGVCWLAPEQTAGKKKPFVYTQGQAVLNRAFFPCFDTPAVKYKYSALIEVPDGFTAVMSASTWEKRGPNKFFFQMCQPIPSYLIALAIGDLVSAEVGPRSRVWAEPCLIDAAKEEYNGVIEEFLATGEKLFGPYVWGRYDLLFMPPSFPFGGMENPCLTFVTPCLLAGDRSLADVIIHEISHSWFGNLVTNANWGEFWLNEGFTMYAQRRISTILFGAAYTCLEAATGRALLRQHMDITGEENPLNKLRVKIEPGVDPDDTYNETPYEKGFCFVSYLAHLVGDQDQFDSFLKAYVHEFKFRSILADDFLDFYLEYFPELKKKRVDIIPGFEFDRWLNTPRHAFRGGGTRRERGVTEEAADEHEFIDSASPSWYD

SEQ ID NO: 801041 - protein, 417 aa, Homo sapiens
RPVSNGSAAMASGEHSPGSGAARRPLHSAQAVDVASASNFRAFELLHLHLDLRAEFGPPGPGAGSRGLSGTAVLDLRCLEPEGAAELRLDSHPCLEVTAAALRRERPGSEEPPAEPVSFYTQPFSHYGQALCVSFPQPCRAAERLQVLLTYRVGEGPGVCWLAPEQTAGKKKPFVYTQGQAVLNRAFFPCFDTPAVKYKYSALIEVPDGFTAVMSASTWEKRGPNKFFFQMCQPIPSYLIALAIGDLVSAEVGPRSRVWAEPCLIDAAKEEYNGVIEEFLATGEKLFGPYVWGRYDLLFMPPSFPFGGMENPCLTFVTPCLLAGDRSLADVIIHEISHSWFGNLVTNANWGEFWLNEGFTMYAQRRISTILFGAAYTCLEAATGRALLRQHMDITGEENPLNKLRVKIEPGPGGSSV

SEQ ID NO: 801042 - protein, 760 aa, Homo sapiens [sequence omitted]

SEQ ID NO: 801043 - protein, 668 aa, Homo sapiens
MPSTLGTSPAKPNSTPVGPSSSKLPLSGLAESVGMTRNGDLGAMKHSPGLSRDLMYFSGATGENGIEQSWFPAVGHERQEEARKFDIPSMESTLNQSAMMETLYSDPHHRVRFHNPRTSTSKELYRVLPEAKKAPGSGAVFERNGPHSNSSGVLPLGLQPAPGLSKPLPSQVWQPSPDTWHPREQSCELSTCRQQLELIRLQMEQMQLQNGAICHHPAAFGPSLPILEPAQWISILNSNEHLLKEKELLIDKQRKHISQLEQKVRESELQVHSALLGRPAPFGDVCLLRLQELQRENTFLRAQFAQKTEALSREKIDLEKKLSASEVEVQLIRESLKVALQKHSEEVKKQEERVKGRDKHINNLKKKCQKESEQNREKQQRIETLERYLADLPTLEDHQKQSQQLKDSELKSTELQEKVTELESLLEETQAICREKEIQLESLRQREAEFSSAGHSLQDKQSVEETSGEGPEVEMESWQKRYDSLQKIVEKQQQKMDQLRSQVQSLEQEVAQEEGTSQALREEAQRRDSALQQLRTAVKELSVQNQDLIEKNLTLQEHLRQAQPGSPPSPDTAQLALELHQELASCLQDLQAVCSIVTQRAQGHDPNLSLLLGIHSAQHPETQLDLQKPDVIKRKLEEVQQLRRDIEDLRTTMSDRYAQDMGENCVTQ

SEQ ID NO: 801044 - protein, 194 aa, Homo sapiens
MESWQKRYDSLQKIVEKQQQKMDQLRSQVQSLEQEVAQEEGTSQALREEAQRRDSALQQLRTAVKELSVQNQDLIEKNLTLQEHLRQAQPGSPPSPDTAQLALELHQELASCLQDLQAVCSIVTQRAQGHDPNLSLLLGIHSAQHPETQLDLQKPDVIKRKLEEVQQLRRDIEDLRTTMSDRYAQDMGENCVTQ

SEQ ID NO: 801045 - protein, 614 aa, Homo sapiens
MQEKYPTEGISHVTSPSSDVIQKGSSLGTEWQTPVISEPFRSRFSRCSSVADSGDTAIGTSCSDIAEDFCSSSGSPPFQPIKSHVTIPTAHVMPSTLGTSPAKPNSTPVGPSSSKLPLSGLAESVGMTRNGDLGAMKHSPGLSRDLMYFSGATGENGIEQSWFPAVGHERQEEARKFDIPSMESTLNQSAMMETLYSDPHHRVRFHNPRTSTSKELYRVLPEAKKAPGSGAVFERNGPHSNSSGVLPLGLQPAPGLSKPLPSQVWQPSPDTWHPREQSCELSTCRQQLELIRLQMEQMQLQNGAICHHPAAFGPSLPILEPAQWISILNSNEHLLKEKELLIDKQRKHISQLEQKVRESELQVHSALLGRPAPFGDVCLLRLQELQRENTFLRAQFAQKTEALSREKIDLEKKLSASEVEVQLIRESLKVALQKHSEEVKKQEERVKGRDKHINNLKKKCQKESEQNREKQQRIETLERYLADLPTLEDHQKQSQQLKDSELKSTELQEKVTELESLLEETQAICREKEIQLESLRQREAEFSSAGHSLQDKQSVEETSGEGPEVEMESWQKRYDSLQKIVEKQQQKMDQLRSQVQSLALVAQAGVQWRNLGSL

SEQ ID NO: 801046 - protein, 68 aa, Homo sapiens
SLEQEVAQEEGTSQALREEAQRRDSALQQLRTAVKEVSNISQTSWFCLHKPDFFVCPPHLYPNKSPSV

SEQ ID NO: 801047 - protein, 760 aa, Homo sapiens [sequence omitted]

SEQ ID NO: 801048 - protein, 760 aa, Homo sapiens [sequence omitted]

SEQ ID NO: 801049 - protein, 447 aa, Homo sapiens
MQEKYPTEGISHVTSPSSDVIQKGSSLGTEWQTPVISEPFRSRFSRCSSVADSGDTAIGTSCSDIAEDFCSSSGSPPFQPIKSHVTIPTAHVMPSTLGTSPAKPNSTPVGPSSSKLPLSGLAESVGMTRNGDLGAMKHSPGLSRDLMYFSGATGENGIEQSWFPAVGHERQEEARKFDIPSMESTLNQSAMMETLYSDPHHRVRFHNPRTSTSKELYRVLPEAKKAPGSGAVFERNGPHSNSSGVLPLGLQPAPGLSKPLPSQVWQPSPDTWHPREQSCELSTCRQQLELIRLQMEQMQLQNGAICHHPAAFGPSLPILEPAQWISILNSNEHLLKEKELLIDKQRKHISQLEQKVRESELQVHSALLGRPAPFGDVCLLRLQELQRENTFLRAQFAQKTEALSREKIDLEKKLSASEVEVQLIRESLKVALQKHSEEVKKQEERVS

SEQ ID NO: 801050 - protein, 203 aa, Homo sapiens
MARPRPREYKAGDLVFAKMKGYPHWPARIDELPEGAVKPPANKYPIFFFGTHETAFLGPKDLFPYKEYKDKFGKSNKRKGFNEGLWEIENNPGVKFTGYQAIQQQSSSETEGEGGNTADASSEEEGDRVEEDGKGKRKNEKAGSKRKKSYTSKKSSKQSRKSPGDEDDKDCKEEENKSSSEGGDAGNDTRNTTSDLQKTSEGT

SEQ ID NO: 801051 - protein, 203 aa, Homo sapiens; identical to SEQ ID NO: 801050

SEQ ID NO: 801052 - protein, 203 aa, Homo sapiens; identical to SEQ ID NO: 801050

SEQ ID NO: 801053 - protein, 203 aa, Homo sapiens; identical to SEQ ID NO: 801050

SEQ ID NO: 801054 - protein, 190 aa, Homo sapiens
MARPRPREYKAGDLVFAKMKGYPHWPARIDELPEGAVKPPANKYPIFFFGTHETAFLGPKDLFPYKEYKDKFGKSNKRKGFNEGLWEIENNPGVKFTGYQAIQQQSSSETEGEGGNTADASSEEEGDRVEEDGKGKRKNEKAGSKRKKSYTSKKSSKQSRKSPGDEDDKDCKEEENKSSSEGGDAGLIPR

SEQ ID NO: 801055 - protein, 245 aa, Homo sapiens
RRLRQGVGGGRSRPGKSRPGSGGAASRHLRGDQGLPGRGAAGMARPRPREYKAGDLVFAKMKGYPHWPARIDELPEGAVKPPANKYPIFFFGTHETAFLGPKDLFPYKEYKDKFGKSNKRKGFNEGLWEIENNPGVKFTGYQAIQQQSSSETEGEGGNTADASSEEEGDRVEEDGKGKRKNEKAGSKRKKSYTSKKSSKQSRKSPGDEDDKDCKEEENKSSSEGGDAGNDTRNTTSDLQKTSEGT

SEQ ID NO: 801056 - protein, 212 aa, Homo sapiens
MAITRGRGPCTRTRPREYKAGDLVFAKMKGYPHWPARIDELPEGAVKPPANKYPIFFFGTHETAFLGPKDLFPYKEYKDKFGKSNKRKGFNEGLWEIENNPGVKFTGYQAIQQQSSSETEGEGGNTADASSEEEGDRVEEDGKGKRKNEKAGSKRKKSYTSKKSSKQSRKSPGDEDDKDCKEEENKSSSEGGDAGNDTRNTTSDLQKTSEGT

SEQ ID NO: 801057 - protein, 187 aa, Homo sapiens
MERDSLTYPPLQIDELPEGAVKPPANKYPIFFFGTHETAFLGPKDLFPYKEYKDKFGKSNKRKGFNEGLWEIENNPGVKFTGYQAIQQQSSSETEGEGGNTADASSEEEGDRVEEDGKGKRKNEKAGSKRKKSYTSKKSSKQSRKSPGDEDDKDCKEEENKSSSEGGDAGNDTRNTTSDLQKTSEGT

SEQ ID NO: 801058 - protein, 203 aa, Homo sapiens; identical to SEQ ID NO: 801050

SEQ ID NO: 801059 - protein, 316 aa, Homo sapiens
RTRPAGVKPAPYILRSALYVLVFLSLVGATTPPLAVGVGQVTLARSLQSRPVAMSADVTSSLAAFGEGWGVRELSDHSGPRPLLGLARQSPQSGPPSDWGLLPTPPSFWSDAAVRGPCTRTRPREYKAGDLVFAKMKGYPHWPARIDELPEGAVKPPANKYPIFFFGTHETAFLGPKDLFPYKEYKDKFGKSNKRKGFNEGLWEIENNPGVKFTGYQAIQQQSSSETEGEGGNTADASSEEEGDRVEEDGKGKRKNEKAGSKRKKSYTSKKSSKQSRKSPGDEDDKDCKEEENKSSSEGGDAGPCTYKAPWGVAEK

SEQ ID NO: 801060 - protein, 203 aa, Homo sapiens; identical to SEQ ID NO: 801050

SEQ ID NO: 801061 - protein, 199 aa, Homo sapiens
MARPRPREYKAGDLVFAKMKGYPHWPARIDELPEGAVKPPANKYPIFFFGTHETAFLGPKDLFPYKEYKDKFGKSNKRKGFNEGLWEIENNPGVKFTGYQAIQQQSSSETEGEGGNTADASSEEEGDRVEEDGKGKRKNEKAGSKRKKSYTSKKSSKQSRKSPGDEDDKDCKEEENKSSSEGGDAGPCTYKAPWGVAEK

SEQ ID NO: 801062 - protein, 320 aa, Homo sapiens
RTRPAGVKPAPYILRSALYVLVFLSLVGATTPPLAVGVGQVTLARSLQSRPVAMSADVTSSLAAFGEGWGVRELSDHSGPRPLLGLARQSPQSGPPSDWGLLPTPPSFWSDAAVRGPCTRTRPREYKAGDLVFAKMKGYPHWPARIDELPEGAVKPPANKYPIFFFGTHETAFLGPKDLFPYKEYKDKFGKSNKRKGFNEGLWEIENNPGVKFTGYQAIQQQSSSETEGEGGNTADASSEEEGDRVEEDGKGKRKNEKAGSKRKKSYTSKKSSKQSRKSPGDEDDKDCKEEENKSSSEGGDAGNDTRNTTSDLQKTSEGT

SEQ ID NO: 801063 - protein, 96 aa, Homo sapiens
RRLRQGVGGGRSRPGKSRPGSGGAASRHLRGDQGLPGRGAAGMARPRPREYKAGDLVFAKMKGYPHWPARIDELPEGAVKPPANKYPIFFFGTHET

SEQ ID NO: 801064 - protein, 42 aa, Homo sapiens
MNGPADGEVDYKKKYRNLKRKLKFLIYVSAAAGRLWGMRPGA

SEQ ID NO: 801065 - protein, 205 aa, Homo sapiens
MNGPADGEVDYKKKYRNLKRKLKFLIYEHECFQEELRKAQRKLLKVSRDKSFLLDRLLQYENVDEDSSDSDATASSDNSETEGTPKLSDTPAPKRKRSPPLGGAPSPSSLSLPPSTGFPLQASGVPSPYLSSMAVGPPDCPVGGPLTFPGRGSGAGVGTTLTPLPPPKMPPPTILSTVPRQMFSDAGSGDDALDGDDDLVIDIPE

SEQ ID NO: 801066 - protein, 137 aa, Homo sapiens
MNGPADGEVDYKKKYRNLKRKLKFLIYEHECFQEELRKAQRKLLKVSRDKSFLLDRLLQYENVDEDSSDSDATASSDNSETEGTPKLSDTPAPKRKRSPPLGGAPSPSSLSLPPSTGFPLQASGVPSPYLSSERGQA

SEQ ID NO: 801067 - protein, 274 aa, Homo sapiens
MNGPADGEVDYKKKYRNLKRKLKFLIYEHECFQEELRKAQRKLLKVSRDKSFLLDRLLQYENVDEDSSDSDATASSDNSETEGTPKLSDTPAPKRKRSPPLGGAPSPSSLSLPPSTGFPLQASGVPSPYLSSLASSRYPPFPSDYLALQLPEPSPLRPKREKRPRLPRKLKSARSGCRAEELDLGEAAGRESSKEAGTAAQMAVGPPDCPVGGPLTFPGRGSGAGVGTTLTPLPPPKMPPPTILSTVPRQMFSDAGSGDDALDGDDDLVIDIPE

SEQ ID NO: 801068 - protein, 270 aa, Homo sapiens
PTRPDPRVRLLGVAGGQTLGATPGPVMNGPADGEVDYKKKYRNLKRKLKFLIYEHECFQEELRKAQRKLLKVSRDKSFLLDRLLQYENVDEDSSDSDATASSDNSETEGTPKLSDTPAPKRKRSPPLGGAPSPSSLSLPPSTGFPLQASGVPSPYLSSLASSRYPPFPSDYLALQLPEPSPLRPKREKRPRLPRKLKMAVGPPDCPVGGPLTFPGRGSGAGVGTTLTPLPPPKMPPPTILSTVPRQMFSDAGSGDDALDGDDDLVIDIPE

SEQ ID NO: 801069 - protein, 195 aa, Homo sapiens
MNGPADGEVDYKKKYRNLKRKLKFLIYEHECFQEELRKAQRKLLKVSRDKSFLLDRLLQYENVDEDSSDSDATASSDNSETEGTPKLSDTPAPKRKRSPPLGGAPSPSSLSLPPSTGFPLQASGVPSPYLSSLASSRYPPFPSDYLALQLPEPSPLRPKREKRPRLPRKLKMFSDAGSGDDALDGDDDLVIDIPE

SEQ ID NO: 801070 - protein, 225 aa, Homo sapiens
AHPLPVIQEHECFQEELRKAQRKLLKVSRDKSFLLDRLLQYENVDEDSSDSDATASSDNSETEGTPKLSDTPAPKRKRSPPLGGAPSPSSLSLPPSTGFPLQASGVPSPYLSSLASSRYPPFPSDYLALQLPEPSPLRPKREKRPRLPRKLKMAVGPPDCPVGGPLTFPGRGSGAGVGTTLTPLPPPKMPPPTILSTVPRQMFSDAGSGDDALDGDDDLVIDIPE

SEQ ID NO: 801071 - protein, 193 aa, Homo sapiens
MNGPADGEVDYKKKYRNLKRKLKFLIYEHECFQEELRKAQRKLLKVSRDKSFLLDRLLQYENVDEDSSDSDATASSDNSETEGTPKLSDTPAPKRKRSPPLGGAPSPSSLSLPPSTGFPLQASGVPSPYLSSLASSRYPPFPSDYLALQLPEPSPLRPKREKRPRLPRKLKSARSGCRAEELDLGEAAGRESS

SEQ ID NO: 801072 - protein, 193 aa, Homo sapiens; identical to SEQ ID NO: 801071

SEQ ID NO: 801073 - protein, 123 aa, Homo sapiens
GQALSAAWVGPAVPRASSPSPELPWGAKPSLLRPQCLPDYVPLCFFPLLQMAVGPPDCPVGGPLTFPGRGSGAGVGTTLTPLPPPKMPPPTILSTVPRQMFSDAGSGDDALDGDDDLVIDIPE

SEQ ID NO: 801074 - protein, 244 aa, Homo sapiens
MNGPADGEVDYKKKYRNLKRKLKFLIYEHECFQEELRKAQRKLLKVSRDKSFLLDRLLQYENVDEDSSDSDATASSDNSETEGTPKLSDTPAPKRKRSPPLGGAPSPSSLSLPPSTGFPLQASGVPSPYLSSLASSRYPPFPSDYLALQLPEPSPLRPKREKRPRLPRKLKMAVGPPDCPVGGPLTFPGRGSGAGVGTTLTPLPPPKMPPPTILSTVPRQMFSDAGSGDDALDGDDDLVIDIPE

SEQ ID NO: 801075 - protein, 137 aa, Homo sapiens; identical to SEQ ID NO: 801066

SEQ ID NO: 801076 - protein, 244 aa, Homo sapiens; identical to SEQ ID NO: 801074

SEQ ID NO: 801077 - protein, 152 aa, Homo sapiens
MPLHHQITARRRGHPSCLTHRPLRGFPLQASGVPSPYLSSLASSRYPPFPSDYLALQLPEPSPLRPKREKRPRLPRKLKMAVGPPDCPVGGPLTFPGRGSGAGVGTTLTPLPPPKMPPPTILSTVPRQMFSDAGSGDDALDGDDDLVIDIPE

SEQ ID NO: 801078 - protein, 183 aa, Homo sapiens
MNGPADGEVDYKKKYRNLKRKLKFLIYEHECFQEELRKAQRKLLKVSRDKSFLLDRLLQYENVDEDSSDSDATASSDNSETEGTPKLSDTPAPKRKRSPPLGGAPSPSSLSLPPSTGFPLQASGVPSPYLSSMAVGPPDCPVGGPLTFPGRGSGAGVGTTLTPLPRFKESERDGIRSNPKERR

SEQ ID NO: 801079 - protein, 166 aa, Homo sapiens
MSNQGEQYDRKSIKRSTADSRSMTDTTRSDSYNRQDVEDRQHTAKAEKQHRGKGKEERGGEQAETAAQAEGREDRSGRKGERGKQENRKKGEARRKEQREEDKRARQSKRTKDTRRAKKTGEERKSTRHERQTRTQQQEGENEHGVGRRRRTEERREHGERGPSHE

SEQ ID NO: 801080 - protein, 105 aa, Homo sapiens
ELRYPYICRRKQQEEYKKKVAALPKQEVIQEEEEIIHEDNEWGIELVSEVSEEELKNFSGPVPDLPEGITVAYTIPKKQEDSVTELTVEDSGESLEDLMAKMKNM

SEQ ID NO: 801081 - protein, 348 aa, Homo sapiens
MALKRMGIVSDYEKIRTFAVAIVGVGGVGSVTAEMLTRCGIGKLLLFDYDKVELANMNRLFFQPHQAGLSKVQAAEHTLRNINPDVLFEVHNYNITTVENFQHFMDRISNGGLEEGKPVDLVLSCVDNFEARMTINTACNELGQTWMESGVSENAVSGHIQLIIPGESACFACAPPLVVAANIDEKTLKREGVCAASLPTTMGVVAGILVQNVLKFLLNFGTVSFYLGYNAMQDFFPTMSMKPNPQCDDRNCRKQQEEYKKKVAALPKQEVIQEEEEIIHEDNEWGIELVSEVSEEELKNFSGPVPDLPEGITVAYTIPKKQEDSVTELTVEDSGESLEDLMAKMKNM

SEQ ID NO: 801082 - protein, 330 aa, Homo sapiens
MAESVERLQQRVQELERELAQERSLQVPRSGDGGGGRVRIEKMSSEVVDSNPYSRLMALKRMGIVSDYEKIRTFAVAIVGVGGVGSVTAEMLTRCGIGKLLLFDYDKVELANMNRLFFQPHQAGLSKVQAAEHTLRNINPDVLFEVHNYNITTVENFQHFMDRISNGGLEEGKPVDLVLSCVDNFEARMTINTACNELGQTWMESGVSENAVSGHIQLIIPGESACFACAPPLVVAANIDEKTLKREGVCAASLPTTMGVVAGILVQNVLKFLLNFGTVSFYLGYNAMQDFFPTMSMKPNPQCDDRNCRKQQEEYKVYDNLLECMRDHIE

SEQ ID NO: 801083 - protein, 348 aa, Homo sapiens; identical to SEQ ID NO: 801081

SEQ ID NO: 801084 - protein, 105 aa, Homo sapiens; identical to SEQ ID NO: 801080

SEQ ID NO: 801085 - protein, 404 aa, Homo sapiens
MAESVERLQQRVQELERELAQERSLQVPRSGDGGGGRVRIEKMSSEVVDSNPYSRLMALKRMGIVSDYEKIRTFAVAIVGVGGVGSVTAEMLTRCGIGKLLLFDYDKVELANMNRLFFQPHQAGLSKVQAAEHTLRNINPDVLFEVHNYNITTVENFQHFMDRISNGGLEEGKPVDLVLSCVDNFEARMTINTACNELGQTWMESGVSENAVSGHIQLIIPGESACFACAPPLVVAANIDEKTLKREGVCAASLPTTMGVVAGILVQNVLKFLLNFGTVSFYLGYNAMQDFFPTMSMKPNPQCDDRNCRKQQEEYKKKVAALPKQEVIQEEEEIIHEDNEWGIELVSEVSEEELKNFSGPVPDLPEGITVAYTIPKKQEDSVTELTVEDSGESLEDLMAKMKNM

SEQ ID NO: 801086 - protein, 293 aa, Homo sapiens
MAESVERLQQRVQELERELAQERSLQVPRSGDGGGGRVRIEKMSSEVVDSNPYSRLMALKRMGIVSDYEKIRTFAVAIVGVGGVGSVTAEMLTRCGIGKLLLFDYDKVELANMNRLFFQPHQAEHHSPCHHIKQTSSRHQADIKQTSSRHQADIKQTSSRHQADIKQTSSRHQADIKQTSSRHQADIKQTSSRHQADIKQTSSRHQADIKQTSSRHQADIKQTSSRHQADIKQTSSRHQADIKQTSSRHQADIKQTSSRHQADIKQASSRHQADIKQTSSRHQADIKQTSSTA

SEQ ID NO: 801087 - protein, 404 aa, Homo sapiens; identical to SEQ ID NO: 801085

SEQ ID NO: 801088 - protein, 404 aa, Homo sapiens; identical to SEQ ID NO: 801085

SEQ ID NO: 801089 - protein, 314 aa, Homo sapiens
MRSNIKPAKLLLFDYDKVELANMNRLFFQPHQAGLSKVQAAEHTLRNINPDVLFEVHNYNITTVENFQHFMDRISNGGLEEGKPVDLVLSCVDNFEARMTINTACNELGQTWMESGVSENAVSGHIQLIIPGESACFACAPPLVVAANIDEKTLKREGVCAASLPTTMGVVAGILVQNVLKFLLNFGTVSFYLGYNAMQDFFPTMSMKPNPQCDDRNCRKQQEEYKKKVAALPKQEVIQEEEEIIHEDNEWGIELVSEVSEEELKNFSGPVPDLPEGITVAYTIPKKQEDSVTELTVEDSGESLEDLMAKMKNM

SEQ ID NO: 801090 - protein, 348 aa, Homo sapiens; identical to SEQ ID NO: 801081

SEQ ID NO: 801091 - protein, 404 aa, Homo sapiens; identical to SEQ ID NO: 801085

SEQ ID NO: 801092 - protein, 330 aa, Homo sapiens; identical to SEQ ID NO: 801082

SEQ ID NO: 801093 - protein, 552 aa, Homo sapiens
QIFFRADVEPEAEVPGSGMKGGNADSWQREKLASMESPEEPGASMDENYFVNYTFKDRSHSGRVAQGIMKLCLEEELFADVTISVEGREFQLHRLVLSAQSCFFRSMFTSNLKEAHNRVIVLQDVSESVFQLLVDYIYHGTVKLRAEELQEIYEVSDMYQLTSLFEECSRFLARTVQVGNCLQVMWLADRHSDPELYTAAKHCAKTHLAQLQNTEEFLHLPHRLLTDIISDGVPCSQNPTEAIEAWINFNKEEREAFAESLRTSLKEIGENVHIYLIGKESSRTHSLAVSLHCAEDDSISVSGQNSLCHQITAACKHGGDLYVVGGSIPRRMWKCNNATVDWEWCAPLPRDRLQHTLVSVPGKDAIYSLGGKTLQDTLSNAVIYYRVGDNVWTETTQLEVAVSGAAGANLNGIIYLLGGEENDLDFFTKPSRLIQCFDTETDKCHVKPYVLPFAGRMHAAVHKDLVFIVAEGDSLVCYNPLLDSFTRLCLPEAWSSAPSLWKIASCNGSIYVFRDRYKKGDANTYKLDPATSAVTVTRGIKVLLTNLQFVLA

SEQ ID NO: 801094 - protein, 552 aa, Homo sapiens; identical to SEQ ID NO: 801093

SEQ ID NO: 801095 - protein, 539 aa, Homo sapiens
  misc_feature (5)..(5): Xaa can be any naturally occurring amino acid
LYRPXFWDGNADSWQREKLASMESPEEPGASMDENYFVNYTFKDRSHSGRVAQGIMKLCLEEELFADVTISVEGREFQLHRLVLSAQSCFFRSMFTSNLKEAHNRVIVLQDVSESVFQLLVDYIYHGTVKLRAEELQEIYEVSDMYQLTSLFEECSRFLARTVQVGNCLQVMWLADRHSDPELYTAAKHCAKTHLAQLQNTEEFLHLPHRLLTDIISDGVPCSQNPTEAIEAWINFNKEEREAFAESLRTSLKEIGENVHIYLIGKESSRTHSLAVSLHCAEDDSISVSGQNSLCHQITAACKHGGDLYVVGGSIPRRMWKCNNATVDWEWCAPLPRDRLQHTLVSVPGKDAIYSLGGKTLQDTLSNAVIYYRVGDNVWTETTQLEVAVSGAAGANLNGIIYLLGGEENDLDFFTKPSRLIQCFDTETDKCHVKPYVLPFAGRMHAAVHKDLVFIVAEGDSLVCYNPLLDSFTRLCLPEAWSSAPSLWKIASCNGSIYVFRDRYKKGDANTYKLDPATSAVTVTRGIKVLLTNLQFVLA

SEQ ID NO: 801096 - protein, 543 aa, Homo sapiens
MAVNSSGYSRWCCFADSWQREKLASMESPEEPGASMDENYFVNYTFKDRSHSGRVAQGIMKLCLEEELFADVTISVEGREFQLHRLVLSAQSCFFRSMFTSNLKEAHNRVIVLQDVSESVFQLLVDYIYHGTVKLRAEELQEIYEVSDMYQLTSLFEECSRFLARTVQVGNCLQVMWLADRHSDPELYTAAKHCAKTHLAQLQNTEEFLHLPHRLLTDIISDGVPCSQNPTEAIEAWINFNKEEREAFAESLRTSLKEIGENVHIYLIGKESSRTHSLAVSLHCAEDDSISVSGQNSLCHQITAACKHGGDLYVVGGSIPRRMWKCNNATVDWEWCAPLPRDRLQHTLVSVPGKDAIYSLGGKTLQDTLSNAVIYYRVGDNVWTETTQLEVAVSGAAGANLNGIIYLLGGEENDLDFFTKPSRLIQCFDTETDKCHVKPYVLPFAGRMHAAVHKDLVFIVAEGDSLVCYNPLLDSFTRLCLPEAWSSAPSLWKIASCNGSIYVFRDRYKKGDANTYKLDPATSAVTVTRGIKVLLTNLQFVLA

SEQ ID NO: 801097 - protein, 543 aa, Homo sapiens; identical to SEQ ID NO: 801096

SEQ ID NO: 801098 - protein, 559 aa, Homo sapiens
QIFFRADVEPEAEVPGSGMKGGNAGEKARQADSWQREKLASMESPEEPGASMDENYFVNYTFKDRSHSGRVAQGIMKLCLEEELFADVTISVEGREFQLHRLVLSAQSCFFRSMFTSNLKEAHNRVIVLQDVSESVFQLLVDYIYHGTVKLRAEELQEIYEVSDMYQLTSLFEECSRFLARTVQVGNCLQVMWLADRHSDPELYTAAKHCAKTHLAQLQNTEEFLHLPHRLLTDIISDGVPCSQNPTEAIEAWINFNKEEREAFAESLRTSLKEIGENVHIYLIGKESSRTHSLAVSLHCAEDDSISVSGQNSLCHQITAACKHGGDLYVVGGSIPRRMWKCNNATVDWEWCAPLPRDRLQHTLVSVPGKDAIYSLGGKTLQDTLSNAVIYYRVGDNVWTETTQLEVAVSGAAGANLNGIIYLLGGEENDLDFFTKPSRLIQCFDTETDKCHVKPYVLPFAGRMHAAVHKDLVFIVAEGDSLVCYNPLLDSFTRLCLPEAWSSAPSLWKIASCNGSIYVFRDRYKKGDANTYKLDPATSAVTVTRGIKVLLTNLQFVLA

SEQ ID NO: 801099 - protein, 518 aa, Homo sapiens
MESPEEPGASMDENYFVNYTFKDRSHSGRVAQGIMKLCLEEELFADVTISVEGREFQLHRLVLSAQSCFFRSMFTSNLKEAHNRVIVLQDVSESVFQLLVDYIYHGTVKLRAEELQEIYEVSDMYQLTSLFEECSRFLARTVQVGNCLQVMWLADRHSDPELYTAAKHCAKTHLAQLQNTEEFLHLPHRLLTDIISDGVPCSQNPTEAIEAWINFNKEEREAFAESLRTSLKEIGENVHIYLIGKESSRTHSLAVSLHCAEDDSISVSGQNSLCHQITAACKHGGDLYVVGGSIPRRMWKCNNATVDWEWCAPLPRDRLQHTLVSVPGKDAIYSLGGKTLQDTLSNAVIYYRVGDNVWTETTQLEVAVSGAAGANLNGIIYLLGGEENDLDFFTKPSRLIQCFDTETDKCHVKPYVLPFAGRMHAAVHKDLVFIVAEGDSLVCYNPLLDSFTRLCLPEAWSSAPSLWKIASCNGSIYVFRDRYKKGDANTYKLDPATSAVTVTRGIKVLLTNLQFVLA

SEQ ID NO: 801100 - protein, 534 aa, Homo sapiens
QIFFRADVEPEAEVPGSGMKGGNADSWQREKLASMESPEEPGASMDENYFVNYTFKDRSHSGRVAQGIMKLCLEEELFADVTISVEGREFQLHRLVLSAQSCFFRSMFTSNLKEAHNRVIVLQDVSESVFQLLVDYIYHGTVKLRAEELQEIYEVSDMYQLTSLFEECSRFLARTVQVGNCLQVMWLADRHSDPELYTAAKHCAKTHLAQLQNTEEFLHLPHRLLTDIISDGVPCSQNPTEAIEAWINFNKEEREAFAESLRTSLKEIGENVHIYLIGKESSRTHSLAVSLHCAEDDSISVSGHVVGGSIPRRMWKCNNATVDWEWCAPLPRDRLQHTLVSVPGKDAIYSLGGKTLQDTLSNAVIYYRVGDNVWTETTQLEVAVSGAAGANLNGIIYLLGGEENDLDFFTKPSRLIQCFDTETDKCHVKPYVLPFAGRMHAAVHKDLVFIVAEGDSLVCYNPLLDSFTRLCLPEAWSSAPSLWKIASCNGSIYVFRDRYKKGDANTYKLDPATSAVTVTRGIKVLLTNLQFVLA

SEQ ID NO: 801101 - protein, 567 aa, Homo sapiens
MGLPVPRPGGGWTQVLGRSHRESFERAGKCGGSSSEESKYSWQREKLASMESPEEPGASMDENYFVNYTFKDRSHSGRVAQGIMKLCLEEELFADVTISVEGREFQLHRLVLSAQSCFFRSMFTSNLKEAHNRVIVLQDVSESVFQLLVDYIYHGTVKLRAEELQEIYEVSDMYQLTSLFEECSRFLARTVQVGNCLQVMWLADRHSDPELYTAAKHCAKTHLAQLQNTEEFLHLPHRLLTDIISDGVPCSQNPTEAIEAWINFNKEEREAFAESLRTSLKEIGENVHIYLIGKESSRTHSLAVSLHCAEDDSISVSGQNSLCHQITAACKHGGDLYVVGGSIPRRMWKCNNATVDWEWCAPLPRDRLQHTLVSVPGKDAIYSLGGKTLQDTLSNAVIYYRVGDNVWTETTQLEVAVSGAAGANLNGIIYLLGGEENDLDFFTKPSRLIQCFDTETDKCHVKPYVLPFAGRMHAAVHKDLVFIVAEGDSLVCYNPLLDSFTRLCLPEAWSSAPSLWKIASCNGSIYVFRDRYKKGDANTYKLDPATSAVTVTRGIKVLLTNLQFVLA

SEQ ID NO: 801102 - protein, 518 aa, Homo sapiens; identical to SEQ ID NO: 801099

SEQ ID NO: 801103 - protein, 122 aa, Homo sapiens
  misc_feature (9)..(9): Xaa can be any naturally occurring amino acid
LLKPFGTSXPLFRKTLQPYVLPFAGRMHAAVHKDLVFIVAEGDSLVCYNPLLDSFTRLCLPEAWSSAPSLWKIASCNGSIYVFRDRYKKGDANTYKLDPATSAVTVTRGIKVLLTNLQFVLA

SEQ ID NO: 801104 - protein, 325 aa, Homo sapiens
TVATALLRTRGQPSSPSPLAYMLSLYRDPLPRADIIRSLQAEDVAVDGQNWTFAFDFSFLSQQEDLAWAELRLQLSSPVDLPTEGSLAIEIFHQPKPDTEQASDSCLERFQMDLFTVTLSQVTFSLGSMVLEVTRPLSKWLKHPGALEKQMSRVAGECWPRPPTPPATNVLLMLYSNLSQEQRQLGGSTLLWEAESSWRAQEGQLSWEWGKRHRRHHLPDRSQLCRKVKFQVDFNLIGWGSWIIYPKQYNAYRCEGECPNPVGEEFHPTNHAYIQSLLKRYQPHRVPSTCCAPVKTKPLSMLYVDNGRVLLDHHKDMIVEECGCL

SEQ ID NO: 801105 - protein, 391 aa, Homo sapiens
MYSMMMETDLHSPGGAQAPTNLSGPAGAGGGGGGGGGGGGGGGAKANQDRVKRPMNAFMVWSRGQRRKMAQENPKMHNSEISKRLGAEWKVMSEAEKRPFIDEAKRLRALHMKEHPDYKYRPRRKTKTLLKKDKYSLAGGLLAAGAGGGGAAVAMGVGVGVGAAAVGQRLESPGGAAGGGYAHVNGWANGAYPGSVAAAAAAAAMMQEAQLAYGQHPGAGGAHPHAHPAHPHPHHPHAHPHNPQPMHRYDMGALQYSPISNSQGYMSASPSGYGGLPYGAAAAAAAAAGGAHQNSAVAAAAAAAAASSGALGALGSLVKSEPSGSPPAPAHSRAPCPGDLREMISMYLPAGEGGDPAAAAAAAAQSRLHSLPQHYQGAGAGVNGTVPLTHI

SEQ ID NO: 801106 - protein, 387 aa, Homo sapiens
PAHSARMYNMMETELKPPGPQQTSGGGGGNSTAAAAGGNQKNSPDRVKRPMNAFMVWSRGQRRKMAQENPKMHNSEISKRLGAEWKVMSEAEKRPFIDEAKRLRALHMKEHPDYKYRPRRKTKTLLKKDKYSLAGGLLAAGAGGGGAAVAMGVGVGVGAAAVGQRLESPGGAAGGGYAHVNGWANGAYPGSVAAAAAAAAMMQEAQLAYGQHPGAGGAHPHAHPAHPHPHHPHAHPHNPQPMHRYDMGALQYSPISNSQGYMSASPSGYGGLPYGAAAAAAAAAGGAHQNSAVAAAAAAAAASSGALGALGSLVKSEPSGSPPAPAHSRAPCPGDLREMISMYLPAGEGGDPAAAAAAAAQSRLHSLPQHYQGAGAGVNGTVPLTHI

SEQ ID NO: 801107 - protein, 413 aa, Homo sapiens
MHLALTTVLLWAWGLQAFEIVEKENIFQRTPCPAFLMFENAAYLADMSFELPCHCKPEEVPAVVWFYQKHLGSSHTKVLTDFDGRVLTEAAQVRVGSDMLTRFSIRMFSLLVFRAQSEDSGLYFCGTRKGDYFYAYDVDIQNSEGMVATFQDKGQEPFADEYYGHLHVFTTFWEWTPCDRCGVRGEQWRIGLCYLQSPDLSPRYLKAVPDVVSCGSRAVPRKLRTKARDHTPEVLVRSCLVPCEKTKTIREGVLAIINYVSKVGSRPWVPQVPIQFHQQRLGHGLIISCPGARPEHAVAWDKDRQHLYRTQYLKGVNRSMRVFIDHGNQLHIRFTQLDDRGIYYCWRQGVLVAGFRLGVTSHGHYPASFSDPETRSAVELTLIGYLLITAVFVTIHFCRCCCYLFHCCPSFSP

SEQ ID NO: 801108 - protein, 413 aa, Homo sapiens; identical to SEQ ID NO: 801107

SEQ ID NO: 801109 - protein, 413 aa, Homo sapiens; identical to SEQ ID NO: 801107

SEQ ID NO: 801110 - protein, 242 aa, Homo sapiens
MERNDIINFKALEKELQAALTADEKYKRENAAKLRAVEQRVASYEEFRGIVLASHLKPLERKDKMGGKRTVPWNCHTIQGRTFQDVATEISPEKAPLQPETSADFYRDWRRHLPSGPERYQALLQLGGPRLGCLFQTDVGFGLLGELLVALADHVGPADRAAVLGILCSLASTGRFTLNLSLLSRAERESCKGLFQKLQAMGNPRSVKEGLSWEEQGLEEQSGGLQEEERLLQELLELYQVD

SEQ ID NO: 801111 - protein, 413 aa, Homo sapiens; identical to SEQ ID NO: 801107

SEQ ID NO: 801112 - protein, 242 aa, Homo sapiens; identical to SEQ ID NO: 801110

SEQ ID NO: 801113 - protein, 413 aa, Homo sapiens; identical to SEQ ID NO: 801107

SEQ ID NO: 801114 - protein, 351 aa, Homo sapiens
ERAVRAHGAGWDRGGYRGRGAMRRPSVRAAGLVLCTLCYLLVGAAVFDALESEAESGRQRLLVQKRGALRRKFGFSAEDYRELERLALQAEPHRAGRQWKFPGSFYFAITVITTIGYGHAAPGTDSGKVFCMFYALLGIPLTLVTFQSLGERLNAVVRRLLLAAKCCLGLRWTCVSTENLVVAGLLACAATLALGAVAFSHFEGWTFFHAYYYCFITLTTIGFGDFVALQSGEALQRKLPYVAFSFLYILLGLTVIGAFLNLVVLRFLVASADWPERAARPPSPRPPGAPESRGLWLPRRPARSVGSASVFCHVHKLERCARDNLGFSPPSSPGVVRGGQAPRPGARWKSI

SEQ ID NO: 801115 - protein, 455 aa, Homo sapiens
ERAVRAHGAGWDRGGYRGRGAMRRPSVRAAGLVLCTLCYLLVGAAVFDALESEAESGRQRLLVQKRGALRRKFGFSAEDYRELERLALQAEPHRAGRQWKFPGSFYFAITVITTIDEHLPRNCSHGQDWNIAINPQNSTMPSVVKPAPNPSYWQATTDLFSVATVFVISRVSFIGNHAVCRLSSSSSSTQLRHLRSILGCRKLQEFIQLLKKIGVWMPPGYGHAAPGTDSGKVFCMFYALLGIPLTLVTFQSLGERLNAVVRRLLLAAKCCLGLRWTCVSTENLVVAGLLACAATLALGAVAFSHFEGWTFFHAYYYCFITLTTIGFGDFVALQSGEALQRKLPYVAFSFLYILLGLTVIGAFLNLVVLRFLVASADWPERAARPPSPRPPGAPESRGLWLPRRPARSVGSASVFCHVHKLERCARDNLGFSPPSSPGVVRGGQAPRPGARWKSI

SEQ ID NO: 801116 - protein, 121 aa, Homo sapiens
GRQRLLVQKRGALRRKFGFSAEDYRELERLALQAEPHRAGRQWKFPGSFYFAITVITTIGEPPGASLRARSSPSRPGAPLGFGPTSAPAQLSYFGRVISAHRASLISFASLVSLVSFAPLC

SEQ ID NO: 801117 - protein, 309 aa, Homo sapiens
DSSAHQQVTQGAQDQPGRAHARPPHGAPAPVPAAVPTCSVCPDRALQAEPHRAGRQWKFPGSFYFAITVITTIGYGHAAPGTDSGKVFCMFYALLGIPLTLVTFQSLGERLNAVVRRLLLAAKCCLGLRWTCVSTENLVVAGLLACAATLALGAVAFSHFEGWTFFHAYYYCFITLTTIGFGDFVALQSGEALQRKLPYVAFSFLYILLGLTVIGAFLNLVVLRFLVASADWPERAARPPSPRPPGAPESRGLWLPRRPARSVGSASVFCHVHKLERCARDNLGFSPPSSPGVVRGGQAPRPGARWKSI

SEQ ID NO: 801118 - protein, 473 aa, Homo sapiens
MSTELFSSTREEGSSGSGPSFRSNQRKMLNLLLERDTSFTVCPDVPRTPVGKFLGDSANLSILSGGTPKRCLDLSNLSSGEITATQLTTSADLDETGHLDSSGLQEVHLAGMNHDQHLMKCSPAQLLCSTPNGLDRGHRKRDAMCSSSANKENDNGNLVDSEMKYLGSPITTVPKLDKNPNLGEDQAEEISDELMEFSLKDQEAKVSRSGLYRSPSMPENLNRPRLKQVEKFKDNTIPDKVKKKYFSGQGKLRKGLCLKKTVSLCDITITQMLEEDSNQGHLIGDFSKVCALPTVSGKHQDLKYVNPETVAALLSGKFQGLIEKFYVIDCRYPYEYLGGHIQGALNLYSQEELFNFFLKKPIVPLDTQKRIIIVFHCEFSSERGPRMCRCLREEDRSLNQYPALYYPELYILKGGYRDFFPEYMELCEPQSYCPMHHQDHKTELLRCRSQSKVQEGERQLREQIALLVKDMSP

SEQ ID NO: 801119 - protein, 117 aa, Homo sapiens
MSEEGKQRHRPCPPSLQRPNCSLPLGSGRVTQLATVPLTCSAAPPSTTTSSKESPFPQQRTRPRREGCWEVWSKRGLGPARSPRSPSCSCRIGLNLKNPGLIMVAGTFPLGSVICPH

SEQ ID NO: 801120 - protein, 311 aa, Homo sapiens
MKYLGSPITTVPKLDKNPNLGEDQAEEISDELMEFSLKDQEAKVSRSGLYRSPSMPENLNRPRLKQVEKFKDNTIPDKVKKKYFSGQGKLRKGLCLKKTVSLCDITITQMLEEDSNQGHLIGDFSKVCALPTVSGKHQDLKYVNPETVAALLSGKFQGLIEKFYVIDCRYPYEYLGGHIQGALNLYSQEELFNFFLKKPIVPLDTQKRIIIVFHCEFSSERGPRMCRCLREEDRSLNQYPALYYPELYILKGGYRDFFPEYMELCEPQSYCPMHHQDHKTELLRCRSQSKVQEGERQLREQIALLVKDMSP

SEQ ID NO: 801121 - protein, 430 aa, Homo sapiens
MSTELFSSTREEGSSGSGPSFRSNQRKMLNLLLERDTSFTVCPDVPRTPVGKFLGDSANLSILSGSPGFFRTSGSAFSWDAQLLCSTPNGLDRGHRKRDAMCSSSANKENDNGNLVDSEMKYLGSPITTVPKLDKNPNLGEDQAEEISDELMEFSLKDQEAKVSRSGLYRSPSMPENLNRPRLKQVEKFKDNTIPDKVKKKYFSGQGKLRKGLCLKKTVSLCDITITQMLEEDSNQGHLIGDFSKVCALPTVSGKHQDLKYVNPETVAALLSGKFQGLIEKFYVIDCRYPYEYLGGHIQGALNLYSQEELFNFFLKKPIVPLDTQKRIIIVFHCEFSSERGPRMCRCLREEDRSLNQYPALYYPELYILKGGYRDFFPEYMELCEPQSYCPMHHQDHKTELLRCRSQSKVQEGERQLREQIALLVKDMSP

SEQ ID NO: 801122 - protein, 439 aa, Homo sapiens
MSTELFSSTREEGSSGSGPSFRSNQRKMLNLLLERDTSFTVCPDVPRTPVGKFLGDSANLSILSGGTPKRCLDLSNLSSGEITATQLTTSADLDETGHLDSSGLQEVHLAGMNHDQHLMKCSPAQLLCSTPNGLDRGHRKRDAMCSSSANKENDNGNLVDSEMKYLGSPITTVPKLDKNPNLGEDQAEEISDELMEFSLKDQEAKVSRSGLYRSPSMPENLNRPRLKQVEKFKDNTIPDKVKKKYFSGQGKLRKVCALPTVSGKHQDLKYVNPETVAALLSGKFQGLIEKFYVIDCRYPYEYLGGHIQGALNLYSQEELFNFFLKKPIVPLDTQKRIIIVFHCEFSSERGPRMCRCLREEDRSLNQYPALYYPELYILKGGYRDFFPEYMELCEPQSYCPMHHQDHKTELLRCRSQSKVQEGERQLREQIALLVKDMSP

SEQ ID NO: 801123 - protein, 246 aa, Homo sapiens
GPLMICGHTIPDKVKKKYFSGQGKLRKGLCLKKTVSLCDITITQMLEEDSNQGHLIGDFSKVCALPTVSGKHQDLKYVNPETVAALLSGKFQGLIEKFYVIDCRYPYEYLGGHIQGALNLYSQEELFNFFLKKPIVPLDTQKRIIIVFHCEFSSERGPRMCRCLREEDRSLNQYPALYYPELYILKGGYRDFFPEYMELCEPQSYCPMHHQDHKTELLRCRSQSKVQEGERQLREQIALLVKDMSP

SEQ ID NO: 801124 - protein, 117 aa, Homo sapiens
MGTNREALYSKAQSLKLIRLTGNEENLKEKQDAWTRITPFTDSLYLIAGHLDSSGLQEVHLAGMNHDQHLMKCSPVSSLSFFGFCFAFQVGGRGFPLHLWLEDAGRSQQTFKENVSV

SEQ ID NO: 801125 - protein, 400 aa, Homo sapiens
MSTELFSSTREEGSSGSGPSFRSNQRKMLNLLLERDTSFTVCPDVPRTPVGKFLGDSANLSILSGSPGFFRTSGSAFSWDDNGNLVDSEMKYLGSPITTVPKLDKNPNLGEDQAEEISDELMEFSLKDQEAKVSRSGLYRSPSMPENLNRPRLKQVEKFKDNTIPDKVKKKYFSGQGKLRKGLCLKKTVSLCDITITQMLEEDSNQGHLIGDFSKVCALPTVSGKHQDLKYVNPETVAALLSGKFQGLIEKFYVIDCRYPYEYLGGHIQGALNLYSQEELFNFFLKKPIVPLDTQKRIIIVFHCEFSSERGPRMCRCLREEDRSLNQYPALYYPELYILKGGYRDFFPEYMELCEPQSYCPMHHQDHKTELLRCRSQSKVQEGERQLREQIALLVKDMSP

SEQ ID NO: 801126 - protein, 443 aa, Homo sapiens
MSTELFSSTREEGSSGSGPSFRSNQRKMLNLLLERDTSFTVCPDVPRTPVGKFLGDSANLSILSGGTPKRCLDLSNLSSGEITATQLTTSADLDETGHLDSSGLQEVHLAGMNHDQHLMKCSPDNGNLVDSEMKYLGSPITTVPKLDKNPNLGEDQAEEISDELMEFSLKDQEAKVSRSGLYRSPSMPENLNRPRLKQVEKFKDNTIPDKVKKKYFSGQGKLRKGLCLKKTVSLCDITITQMLEEDSNQGHLIGDFSKVCALPTVSGKHQDLKYVNPETVAALLSGKFQGLIEKFYVIDCRYPYEYLGGHIQGALNLYSQEELFNFFLKKPIVPLDTQKRIIIVFHCEFSSERGPRMCRCLREEDRSLNQYPALYYPELYILKGGYRDFFPEYMELCEPQSYCPMHHQDHKTELLRCRSQSKVQEGERQLREQIALLVKDMSP

SEQ ID NO: 801127 - protein, 490 aa, Homo sapiens
MSEEARFCFSPGENSKTMSTELFSSTREEGSSGSGPSFRSNQRKMLNLLLERDTSFTVCPDVPRTPVGKFLGDSANLSILSGGTPKRCLDLSNLSSGEITATQLTTSADLDETGHLDSSGLQEVHLAGMNHDQHLMKCSPAQLLCSTPNGLDRGHRKRDAMCSSSANKENDNGNLVDSEMKYLGSPITTVPKLDKNPNLGEDQAEEISDELMEFSLKDQEAKVSRSGLYRSPSMPENLNRPRLKQVEKFKDNTIPDKVKKKYFSGQGKLRKGLCLKKTVSLCDITITQMLEEDSNQGHLIGDFSKVCALPTVSGKHQDLKYVNPETVAALLSGKFQGLIEKFYVIDCRYPYEYLGGHIQGALNLYSQEELFNFFLKKPIVPLDTQKRIIIVFHCEFSSERGPRMCRCLREEDRSLNQYPALYYPELYILKGGYRDFFPEYMELCEPQSYCPMHHQDHKTELLRCRSQSKVQEGERQLREQIALLVKDMSP

SEQ ID NO: 801128 - protein, 461 aa, Homo sapiens
MGTNREALYSKAQSLKLIRLTGNEENLKEKQDAWTRITPFTDSLYLIAGHLDSSGLQEVHLAGMNHDQHLMKCSPVSSLSFFGFCFAFQVGGRGFPLHLWLEDAGRSQQTPAQLLCSTPNGLDRGHRKRDAMCSSSANKENDNGNLVDSEMKYLGSPITTVPKLDKNPNLGEDQAEEISDELMEFSLKDQEAKVSRSGLYRSPSMPENLNRPRLKQVEKFKDNTIPDKVKKKYFSGQGKLRKGLCLKKTVSLCDITITQMLEEDSNQGHLIGDFSKVCALPTVSGKHQDLKYVNPETVAALLSGKFQGLIEKFYVIDCRYPYEYLGGHIQGALNLYSQEELFNFFLKKPIVPLDTQKRIIIVFHCEFSSERGPRMCRCLREEDRSLNQYPALYYPELYILKGGYRDFFPEYMELCEPQSYCPMHHQDHKTELLRCRSQSKVQEGERQLREQIALLVKDMSP

SEQ ID NO: 801129 - protein, 461 aa, Homo sapiens
MSTELFSSTREEGSSGSGPSFRSNQRKMLNLLLERDTSFTVCPDVPRTPVGKFLGDSANLSILSGGTPKRCLDLSNLSSGEITATQLTTSADLDETGHLDSSGLQEVHLAGMNHDQHLMKCSPAQLLCSTPNGLDRGHRKRDAMCSSSANKENDNGNLVDSEMKYLGSPITTVPKLDKNPNLGEDQAEEISDELMEFSLKDQEAKVSRSGLYRSPSMPENLNRPRLKQVEKFKDNTIPDKVKKKYFSGQGKLRKGLCLKKTVSLCDITITQMLEEDSNQGHLIGDFSKVCALPTVSGKHQDLKYVNPETVSRFLEMVAALLSGKFQGLIEKFYVIDCRYPYEYLGGHIQGALNLYSQEELFNFFLKKPIVPLDTQKRIIIVFHCEFSSERGPRMCRCLREEDRSLNQYPALYYPELYILKGGYRDFFPEYMVKGGACGEPNFNNSTPRACKAFREETAAPP

SEQ ID NO: 801130 - protein, 162 aa, Homo sapiens
MNSRTASARGWFSSRPPTSESDLEPATDGPASETTTLSPEATTFNDTRIPDAAGGTAGVGTMLLSFGIITVIGLAVALVLYIRKKKRLEKLRHQLMPMYNFDPTEEQDELEQELLEHGRDAASVQAATSVQAMQGKTTLPSQGPLQRPSRLVFTDVANAIHV

SEQ ID NO: 801131 - protein, 162 aa, Homo sapiens; identical to SEQ ID NO: 801130

SEQ ID NO: 801132 - protein, 230 aa, Homo sapiens
GRGACREARRCSFGDPPRLLGPAPPPPWVPALPTLAQAGRASARGCGWCAVAGLASGSGLAGRADLGSDPQPQTPGLGVPPAPASCQSLPPLASPTELGAGRGLSFVHQEEEEGNLKALSMVVCCGSASQEAGPGGLLGGEGPALSPAAFAPIPRLEKLRHQLMPMYNFDPTEEQDELEQELLEHGRDAASVQAATSVQAMQGKTTLPSQGPLQRPSRLVFTDVANAIHV

SEQ ID NO: 801133 - protein, 160 aa, Homo sapiens
GRGACREARRCSFGDPPRLLGPAPPPPWVPALPTLAQAGRASARGCGWCAVAGLASGSGLAGRADLGSDPQPQTPGLGVPPAPASCQSLPPLASPTELGAGRGLNYSALPGPTAETQPAGVYRCGQCHPCVSGLGQAWTSDRDPSRCLQSSPLPDCQDLL

SEQ ID NO: 801134 - protein, 153 aa, Homo sapiens
MQGCQEKGNSHPGSIHTTEGPGGLPATHPWQPDVTGAKLGWELRGKEVGEWKWKDAAPPDLPRGLMHVHECAHGQTCACPSTAGRMRLSTLAPPSKSTSTPWYVVEHQGRLSSLPSIFRDCREEGSTHSTVPLSTALFHWAHLLLKTAPCLGL

SEQ ID NO: 801135 - protein, 162 aa, Homo sapiens; identical to SEQ ID NO: 801130

SEQ ID NO: 801136 - protein, 153 aa, Homo sapiens; identical to SEQ ID NO: 801134

SEQ ID NO: 801137 - protein, 162 aa, Homo sapiens; identical to SEQ ID NO: 801130

SEQ ID NO: 801138 - protein, 162 aa, Homo sapiens; identical to SEQ ID NO: 801130

SEQ ID NO: 801139 - protein, 134 aa, Homo sapiens
GRELAPITADLPRPPCWEETTRHAAAERLQTRKRRRRRRRRRSLPRAAAAPGGWGRRAAREERPEPQRYGGPAGPPAFACRAAWGVAGLWWHRAQHFGLLVAAELRDQRSPHSAPLLLPSEQDSWLLCTGFLTF

SEQ ID NO: 801140 - protein, 153 aa, Homo sapiens
VGTGRLSWKKRLSVQTCSTATSSSTATLTADQKLTRSKLPSCRLRSRASKARSSVSIWMLRSSRVRMVSMDSYRAAGGEGSGLPPPIREQRPKKPGDTEGGCINPGRYSCKHRLVQAKFKSSPCHSLAVTMSNLINLSEPVSSSISFQIAVNI

SEQ ID NO: 801141 - protein, 136 aa, Homo sapiens
MAGPAEDDPEQQQQEAHETVADDGDEGPLGDGCPHDRQHPQTSTDSGAASMDSSQPDQETSRGASLHRGNFVEALAGMCRLCASRAVCLYVGLPLWVRPVIVTYSDPAVFSSRSTCSPWRITSLKLYHEDSQCSQV

SEQ ID NO: 801142 - protein, 196 aa, Homo sapiens
MLKDDRLGQHVPTLHPNGVLLCRPGWSAVVQSRLTASSASRVHAILLPQPPEWLGLQASEELTIAGMTFTTFDLGGHVQARRVWKNYLPAINGIVFLVDCADHERLLESKEELDSLMTDETIANVPILILGNKIDRPEAISEERLREMFGLYGQTTGKGSISLKELNARPLEVFMCSVLKRQGYGEGFRWMAQYID

SEQ ID NO: 801143 - protein, 198 aa, Homo sapiens
MSFIFDWIYSGFSSVLQFLGLYKKTGKLVFLGLDNAGKTTLLHMLKDDRLGQHVPTLHPTSEELTIAGMTFTTFDLGGHVQARRVWKNYLPAINGIVFLVDCADHERLLESKEELDSLMTDETIANVPILILGNKIDRPEAISEERLREMFGLYGQTTGKGSISLKELNARPLEVFMCSVLKRQGYGEGFRWMAQYID

SEQ ID NO: 801144 - protein, 198 aa, Homo sapiens; identical to SEQ ID NO: 801143

SEQ ID NO: 801145 - protein, 198 aa, Homo sapiens; identical to SEQ ID NO: 801143

SEQ ID NO: 801146 - protein, 198 aa, Homo sapiens; identical to SEQ ID NO: 801143

SEQ ID NO: 801147 - protein, 156 aa, Homo sapiens
NPTISNTVSIAGPDMYNEHDPYLCMLKTSMICDIDATVSASSIGNRYGVRGSMLLQTQNRDVCEDVKRVQVYLESLMTDETIANVPILILGNKIDRPEAISEERLREMFGLYGQTTGKGSISLKELNARPLEVFMCSVLKRQGYGEGFRWMAQYID

SEQ ID NO: 801148 - protein, 203 aa, Homo sapiens
MSFIFDWIYSGFSSVLQFLGLYKKTGKLVFLGLDNAGKTTLLHMLKDDRLGQHVPTLHPTSEELTIAGMTFTTFDLGGHVQARRVWKNYLPAINGIVFLVDCADHERLLESKEELDSLMTDETIANVPILILGNKIDRPEAISEERLREMFGLYGQTTGKGSISLKELNARPLEVFMCSVLQTHIGSRSQRSGLLRDLIAQHA

SEQ ID NO: 801149 - protein, 198 aa, Homo sapiens; identical to SEQ ID NO: 801143

SEQ ID NO: 801150 - protein, 198 aa, Homo sapiens; identical to SEQ ID NO: 801143

SEQ ID NO: 801151 - protein, 155 aa, Homo sapiens
MLKDDRLGQHVPTLHPTSEELTIAGMTFTTFDLGGHVQARRVWKNYLPAINGIVFLVDCADHERLLESKEELDSLMTDETIANVPILILGNKIDRPEAISEERLREMFGLYGQTTGKGSISLKELNARPLEVFMCSVLKRQGYGEGFRWMAQYID

SEQ ID NO: 801152 - protein, 185 aa, Homo sapiens
MSFIFDWIYSGFSSVLQFLGLYKKTGKLVFLGLDNAGKTTLLHMLKDDRLGQHVPTLHPTSEELTIAGMTFTTFDLGGHVQARRVWKNYLPAINGIVFLVDCADHERLLESKEELDLILGNKIDRPEAISEERLREMFGLYGQTTGKGSISLKELNARPLEVFMCSVLKRQGYGEGFRWMAQYID

SEQ ID NO: 801153 - protein, 981 aa, Homo sapiens
MVHHSGSIQSFKQQKGMNISKSEITKETSLKPSRRSLPCLAQSYAYSKSLSQSTSLFQSTESESQAPTSITLISTDKAEQVNTEENKNDSVLRCSFADLSDFCLALGKDKDYTDESEHATYDRSRLINDFVIKDKSEFKTKLSKNDMNYIASSGPLFKDGKRRIDYILVYRKTNIPYDKRNTFEKNLRAEGLMLEKEPAIASPDIMFIKIHIPWDTLCKYAERLNIRMPFRKKCYYTDGRSKSMGRMQTYFRRIKNWMAQNPMVLDKSAFPDLEESDCYTGPFSRARIHHFIINNKDTFFSNATRSRIVYHMLERTKYENGISKVGIRKLINNGSYIAAFPPHEGAYKSSQPIKTHGPQNNRHLLYERWARWGMWYKHQPLDLIRLYFGEKIGLYFAWLGWYTGMLIPAAIVGLCVFFYGLFTMNNSQVSQEICKATEVFMCPLCDKNCSLQRLNDSCIYAKVTYLFDNGGTVFFAIFMAIWATVFLEFWKRRRSILTYTWDLIEWEEEEETLRPQFEAKYYKMEIVNPITGKPEPHQPSSDKVTRLLVSVSGIFFMISLVITAVFGVVVYRLVVMEQFASFKWNFIKQYWQFATSAAAVCINFIIIMLLNLAYEKIAYLLTNLEYPRTESEWENSFALKMFLFQFVNLNSSIFYIAFFLGRFVGHPGKYNKLFDRWRLEECHPSGCLIDLCLQMGVIMFLKQIWNNFMELGYPLIQNWWSRHKIKRGIHDASIPQWENDWNLQPMNLHGLMDEYLEMVLQFGFTTIFVAAFPLAPLLALLNNIIEIRLDAYKFVTQWRRPLPARATDIGIWLGILEGIGILAVITNAFVIAITSDYIPRFVYEYKYGPCANHVEPSENCLKGYVNNSLSFFDLSELGMGKSGYCRYRDYRGPPWSSKPYEFTLQYWHILAARLAFIIVFEHLVFGIKSFIAYLIPDVPKGLHDRIRREKYLVQEMMYEAELEHLQQQRRKSGQPVHHEWP

SEQ ID NO: 801154 - protein, 495 aa, Homo sapiens
MVHHSGSIQSFKQQKGMNISKSEITKETSLKPSRRSLPCLAQSYAYSKSLSQSTSLFQSTESESQAPTSITLISTDKAEQVNTEENKNDSVLRCSFADLSDFCLALGKDKDYTDESEHATYDRSRLINDFVIKDKSEFKTKLSKNDMNYIASSGPLFKDGKRRIDYILVYRKTNIPYDKRNTFEKNLRAEGLMLEKEPAIASPDIMFIKIHIPWDTLCKYAERLNIRMPFRKKCYYTDGRSKSMGRMQTYFRRIKNWMAQNPMVLDKSAFPDLEESDCYTGPFSRARIHHFIINNKDTFFSNATRSRIVYHMLERTKYENGISKVGIRKLINNGSYIAAFPPHEGAYKSSQPIKTHGPQNNRHLLYERWARWGMWYKHQPLDLIRLYFGEKIGLYFAWLGWYTGMLIPAAIVGLCVFFYGLFTMNNSQVSQEICKATEVFMCPLCDKNCSLQRLNDSCIYAKVTYLFDNGGTVFFAIFMAIWGKYFLHYFLSLIF

SEQ ID NO: 801155 - protein, 492 aa, Homo sapiens
MVHHSGSIQSFKQQKGMNISKSEITKETSLKPSRRSLPCLAQSYAYSKSLSQSTSLFQSTESESQAPTSITLISTDKAEQVNTEENKNDSVLRCSFADLSDFCLALGKDKDYTDESEHATYDRSRLINDFVIKDKSEFKTKLSKNDMNYIASSGPLFKDGKRRIDYILVYRKTNIPYDKRNTFEKNLRAEGLMLEKEPAIASPDIMFIKIHIPWDTLCKYAERLNIRMPFRKKCYYTDGRSKSMGRMQTYFRRIKNWMAQNPMVLDKSAFPDLEESDCYTGPFSRARIHHFIINNKDTFFSNATRSRIVYHMLERTKYENGISKVGIRKLINNGSYIAAFPPHEGAYKSSQPIKTHGPQNNRHLLYERWARWGMWYKHQPLDLIRLYFGEKIGLYFAWLGWYTGMLIPAAIVGLCVFFYGLFTMNNSQVSQEICKATEVFMCPLCDKNCSLQRLNDSCIYAKVTYLFDNGGTVFFAIFMAIWGNAVNIGILI

SEQ ID NO: 801156 - protein, 1507 aa, Homo sapiens
MTTVVVHVDSKAELTTLLEQWEKEHGSGQDMVPILTRMSQLIEKETEEYRKGDPDPFDDRHPGRADPECMLGHLLRILFKNDDFMNALVNAYVMTSREPPLNTAACRLLLDIMPGLETAVVFQEKEGIVENLFKWAREADQPLRTYSTGLLGGAMENQDIAANYRDENSQLVAIVLRRLRELQLQEVALRQENKRPSPRKLSSEPLLPLDEEAVDMDYGDMAVDVVDGDQEEASGDMEISFHLDSGHKTSSRVNSTTKPEDGGLKKNKSAKQGDRENFRKAKQKLGFSSSDPDRMFVELSNSSWSEMSPWVIGTNYTLYPMTPAIEQRLILQYLTPLGEYQELLPIFMQLGSRELMMFYIDLKQTNDVLLTFEALKHLASLLLHNKFATEFVAHGGVQKLLEIPRPSMAATGVSMCLYYLSYNQDAMERVCMHPHNVLSDVVNYTLWLMECSHASGCCHATMFFSICFSFRAVLELFDRYDGLRRLVNLISTLEILNLEDQGALLSDDEIFASRQTGKHTCMALRKYFEAHLAIKLEQVKQSLQRTEGGILVHPQPPYKACSYTHEQIVEMMEFLIEYGPAQLYWEPAEVFLKLSCVQLLLQLISIACNWKTYYARNDTVRFALDVLAILTVVPKIQLQLAESVDVLDEAGSTVSTVGISIILGVAEGEFFIHDAEIQKSALQIIINCVCGPDNRISSIGKFISGTPRRKLPQNPKSSEHTLAKMWNVVQSNNGIKVLLSLLSIKMPITDADQIRALACKALVGLSRSSTVRQIISKLPLFSSCQIQQLMKEPVLQDKRSDHVKFCKYAAELIERVSGKPLLIGTDVSLARLQKADVVAQSRISFPEKELLLLIRNHLISKGLGETATVLTKEADLPMTAASHSSAFTPVTAAASPVSLPRTPRIANGIATRLGSHAAVGASAPSAPTAHPQPRPPQGPLALPGPSYAGNSPLIGRISFIRERPSPCNGRKIRVLRQKSDHGAYSQSPAIKKQLDRHLPSPPTLDSIITEYLREQHARCKNPVATCPPFSLFTPHQCPEPKQRRQAPINFTSRLNRRASFPKYGGVDGGCFDRHLIFSRFRPISVFREANEDESGFTCCAFSARERFLMLGTCTGQLKLYNVFSGQEEASYNCHNSAITHLEPSRDGSLLLTSATWSQPLSALWGMKSVFDMKHSFTEDHYVEFSKHSQDRVIGTKGDIAHIYDIQTGNKLLTLFNPDLANNYKRNCATFNPTDDLVLNDGVLWDVRSAQAIHKFDKFNMNISGVFHPNGLEVIINTEIWDLRTFHLLHTVPALDQCRVVFNHTGTVMYGAMLQADDEDDLMEERMKSPFGSSFRTFNATDYKPIATIDVKRNIFDLCTDTKDCYLAVIENQGSMDALNMDTVCRLYEVGRQRLAEDEDEEEDQEEEEQEEEDDDEDDDDTDDLDELDTDQLLEAELEEDDNNENAGEDGDNDFSPSDEELANLLEEGEDGEDEDSDADEEVELILGDTDSSDNSDLEDDIILSLNE

SEQ ID NO: 801157 - protein, 1507 aa, Homo sapiens; identical to SEQ ID NO: 801156

SEQ ID NO: 801158 - protein, 1507 aa, Homo sapiens; identical to SEQ ID NO: 801156

SEQ ID NO: 801159 - protein, 1507 aa, Homo sapiens; identical to SEQ ID NO: 801156

SEQ ID NO: 801160 - protein, 958 aa, Homo sapiens
ADRVTTTPYKACSYTHEQIVEMMEFLIEYGPAQLYWEPAEVFLKLSCVQLLLQLISIACNWKTYYARNDTVRFALDVLAILTVVPKIQLQLAESVDVLDEAGSTVSTVGISIILGVAEGEFFIHDAEIQKSALQIIINCVCGPDNRISSIGKFISGTPRRKLPQNPKSSEHTLAKMWNVVQSNNGIKVLLSLLSIKMPITDADQIRALACKALVGLSRSSTVRQIISKLPLFSSCQIQQLMKEPVLQDKRSDHVKFCKYAAELIERVSGKPLLIGTDVSLARLQKADVVAQSRISFPEKELLLLIRNHLISKGLGETATVLTKEADLPMTAASHSSAFTPVTAAASPVSLPRTPRIANGIATRLGSHAAVGASAPSAPTAHPQPRPPQGPLALPGPSYAGNSPLIGRISFIRERPSPCNGRKIRVLRQKSDHGAYSQSPAIKKQLDRHLPSPPTLDSIITEYLREQHARCKNPVATCPPFSLFTPHQCPEPKQRRQAPINFTSRLNRRASFPKYGGVDGGCFDRHLIFSRFRPISVFREANEDESGFTCCAFSARERFLMLGTCTGQLKLYNVFSGQEEASYNCHNSAITHLEPSRDGSLLLTSATWSQPLSALWGMKSVFDMKHSFTEDHYVEFSKHSQDRVIGTKGDIAHIYDIQTGNKLLTLFNPDLANNYKRNCATFNPTDDLVLNDGVLWDVRSAQAIHKFDKFNMNISGVFHPNGLEVIINTEIWDLRTFHLLHTVPALDQCRVVFNHTGTVMYGAMLQADDEDDLMEERMKSPFGSSFRTFNATDYKPIATIDVKRNIFDLCTDTKDCYLAVIENQGSMDALNMDTVCRLYEVGRQRLAEDEDEEEDQEEEEQEEEDDDEDDDDTDDLDELDTDQLLEAELEEDDNNENAGEDGDNDFSPSDEELANLLEEGEDGEDEDSDADEEVELILGDTDSSDNSDLEDDIILSLNE

SEQ ID NO: 801161 - protein, 1507 aa, Homo sapiens; identical to SEQ ID NO: 801156

SEQ ID NO: 801162 - protein, 1500 aa, Homo sapiens
MTTVVVHVDSKAELTTLLEQWEKEHGSGQDMVPILTRMSQLIEKETEEYRKGDPDPFDDRHPGRADPECMLGHLLRILFKNDDFMNALVNAYVMTSREPPLNTAACRLLLDIMPGLETAVVFQEKEGIVENLFKWAREADQPLRTYSTGLLGGAMENQDIAANYRDENSQLVAIVLRRLRELQLQEVALRQENKRPSPRKLSSEPLLPLDEEAVDMDYGDMAVDVVDGDQEEASGDMEISFHLDSGHKTSSRVNSTTKPEDGGLKKNKSAKQGDRENFRKAKQKLGFSSSDPDRMFVELSNSSWSEMSPWVIGTNYTLYPMTPAIEQRLILQYLTPLGEYQELLPIFMQLGSRELMMFYIDLKQTNDVLLTFEALKHLASLLLHNKFATEFVAHGGVQKLLEIPRPSMAATGVSMCLYYLSYNQDAMERVCMHPHNVLSDVVNYTLWLMECSHASGCCHATMFFSICFSFRAVLELFDRYDGLRRLVNLISTLEILNLEDQGALLSDDEIFASRQTGKHTCMALRKYFEAHLAIKLEQVKQSLQRTEGGILVHPQPPYKACSYTHEQIVEMMEFLIEYGPAQLYWEPAEVFLKLSCVQLLLQLISIACNWKTYYARNDTVRFALDVLAILTVVPKIQLQLAESVDVLDEAGSTVSTVGISIILGVAEGEFFIHDAEIQKSALQIIINCVCGPDNRISSIGKFISGTPRRKLPQNPKSSEHTLAKMWNVVQSNNGIKVLLSLLSIKMPITDADQIRALACKALVGLSRSSTVRQIISKLPLFSSCQIQQLMKEPVLQDKRSDHVKFCKYAAELIERVSGKPLLIGTDVSLARLQKADVVAQSRISFPEKELLLLIRNHLISKGLGETATVLTKEADLPMTAASHSSAFTPVTAAASPVSLPRTPRIANGIATRLGSHAAVGASAPSAPTAHPQPRPPQGPLALPGPSYAGNSPLIGRISFIRERPSPCNGRKIRVLRQKSDHGAYSQSPAIKKQLDRHLPSPPTLDSIITEYLREQHARCKNPVATCPPFSLFTPHQCPEPKQRRQAPINFTSRLNRRASFPKYGGVDGGCFDRHLIFSRFRPISVFREANEDESGFTCCAFSARERFLMLGTCTGQLKLYNVFSGQEEASYNCHNSAITHLEPSRDGSLLLTSATWSQPLSALWGMKSVFDMKHSFTEDHYVEFSKHSQDRVIGTKGDIAHIYDIQTGNKLLTLFNPDLANNYKRNCATFNPTDDLVLNDGVLWDVRSAQAIHKFDKFNMNISGVFHPNGLEWDLRTFHLLHTVPALDQCRVVFNHTGTVMYGAMLQADDEDDLMEERMKSPFGSSFRTFNATDYKPIATIDVKRNIFDLCTDTKDCYLAVIENQGSMDALNMDTVCRLYEVGRQRLAEDEDEEEDQEEEEQEEEDDDEDDDDTDDLDELDTDQLLEAELEEDDNNENAGEDGDNDFSPSDEELANLLEEGEDGEDEDSDADEEVELILGDTDSSDNSDLEDDIILSLNE

SEQ ID NO: 801163 - protein, 1489 aa, Homo sapiens
MTTVVVHVDSKAELTTLLEQWEKEHGSGQDMVPILTRMSQLIEKETEEYRKGDPDPFDDRHPGRADPECMLGHLLRILFKNDDFMNALVNAYVMTSREPPLNTAACRLLLDIMPGLETAVVFQEKEGIVENLFKWAREADQPLRTYSTGLLGGAMENQDIAANYRDENSQLVAIVLRRLRELQLQEVALRQENKRPSPRKLSSEPLLPLDEEAVDMDYGDMAVDVVDGDQEEASGDMEISFHLDSGHKTSSRVNSTTKPEDGGLKKNKSAKQGDRENFRKAKQKLGFSSSDPDRMFVELSNSSWSEMSPWVIGTNYTLYPMTPAIEQRLILQYLTPLGEYQELLPIFMQLGSRELMMFYIDLKQTNDVLLTFEALKHLASLLLHNKFATEFVAHGGVQKLLEIPRPSMAATGVSMCLYYLSYNQDAMERVCMHPHNVLSDVVNYTLWLMECSHASGCCHATMFFSICFSFRAVLELFDRYDGLRRLVNLISTLEILNLEDQGALLSDDEIFASRQTGKHTCMALRKYFEAHLAIKLEQVKQSLQRTEGGILVHPQPPYKACSYTHEQIVEMMEFLIEYGPAQLYWEPAEVFLKLSCVQLLLQLISIACNWKTYYARNDTVRFALDVLAILTVVPKIQLQLAESVDVLDEAGSTVSTVGISIILGVAEGEFFIHDAEIQKSALQIIINCVCGPDNRISSIGKFISGTPRRKLPQNPKSSEHTLAKMWNVVQSNNGIKVLLSLLSIKMPITDADQIRALACKALVGLSRSSTVRQIISKLPLFSSCQIQQLMKEPVLQDKRSDHVKFCKYAAELIERVSGKPLLIGTDVSLARLQKADVVAQSRISFPEKELLLLIRNHLISKGLGETATVLTKEADLPMTAASHSSAFTPVTAAASPVSLPRTPRIANGIATRLGSHAAVGASAPSAPTAHPQPRPPQGPLALPGPSYAGNSPLIGRISFIRERPSPCNGRKIRVLRQKSDHGAYSQSPAIKKQLDRHLPSPPTLDSIITEYLREQHARCKNPVATCPPFSLFTPHQCPEASFPKYGGVDGGCFDRHLIFSRFRPISVFREANEDESGFTCCAFSARERFLMLGTCTGQLKLYNVFSGQEEASYNCHNSAITHLEPSRDGSLLLTSATWSQPLSALWGMKSVFDMKHSFTEDHYVEFSKHSQDRVIGTKGDIAHIYDIQTGNKLLTLFNPDLANNYKRNCATFNPTDDLVLNDGVLWDVRSAQAIHKFDKFNMNISGVFHPNGLEVIINTEIWDLRTFHLLHTVPALDQCRVVFNHTGTVMYGAMLQADDEDDLMEERMKSPFGSSFRTFNATDYKPIATIDVKRNIFDLCTDTKDCYLAVIENQGSMDALNMDTVCRLYEVGRQRLAEDEDEEEDQEEEEQEEEDDDEDDDDTDDLDELDTDQLLEAELEEDDNNENAGEDGDNDFSPSDEELANLLEEGEDGEDEDSDADEEVELILGDTDSSDNSDLEDDIILSLNE

SEQ ID NO: 801164 - protein, 1420 aa, Homo sapiens
MTTVVVHVDSKAELTTLLEQWEKEHGSGQDMVPILTRMSQLIEKETEEYRKGDPDPFDDRHPGRADPECMLGHLLRILFKNDDFMNALVNAYVMTSREPPLNTAACRLLLDIMPGLETAVVFQEKEGIVENLFKWAREADQPLRTYSTGLLGGAMENQDIAANYRDENSQLVAIVLRRLRELQLQEVALRQENKRPSPRKLSSEPLLPLDEEAVDMDYGDMAVDVVDGDQEEASGDMEISFHLDSGHKTSSRVNSTTKPEDGGLKKNKSAKQGDRENFRKAKQKLGFSSSDPDRMFVELSNSSWSEMSPWVIGTNYTLYPMTPAIEQRLILQYLTPLGEYQELLPIFMQLGSRELMMFYIDLKQTNDVLLTFEALKHLASLLLHNKFATEFVAHGGVQKLLEIPRPSMAATGVSMCLYYLSYNQDAMERVCMHPHNVLSDVVNYTLWLMECSHASGCCHATMFFSICFSFRAVLELFDRYDGLRRLVNLISTLEILNLEDQGALLSDDEIFASRQTGKHTCMALRKYFEAHLAIKLEQVKQSLQRTEGGILVHPQPPYKACSYTHEQIVEMMEFLIEYGPAQLYWEPAEVFLKLSCVQLLLQLISIACNWKTYYARNDTVRFALDVLAILTVVPKIQLQLAESVDVLDEAGSTVSTVGISIILGVAEGEFFIHDAEIQKSALQIIINCVCGPDNRISSIGKFISGTPRRKLPQNPKSSEHTLAKMWNVVQSNNGIKVLLSLLSIKMPITDADQIRALACKALVGLSRSSTVRQIISKLPLFSSCQIQQLMKEPVLQDKRSDHVKFCKYAAELIERVSGKPLLIGTDVSLARLQKADVVAQSRISFPEKELLLLIRNHLISKGLGETATVLTKEADLPMTAASHSSAFTPVTAAASPVSLPRTPRIANGIATRLGSHAAVGASAPSAPTAHPQPRPPQGPLALPGPSYAGNSPLIGRISFIRERPSPCNGRKIRVLRQKSDHGAYSQSPAIKKQLDRHLPSPPTLDSIITEYLREQHARCKNPVATCPPFSLFTPHQCPEPKQRRQAPINFTSRLNRRASFPKYGGVDGGCFDRHLIFSRFRPISVFREANEDESGFTCCAFSARERFLMLGTCTGQLKLYNVFSGQEEASYNCHNSAITHLEPSRDGSLLLTSATWSQPLSALWGMKSVFDMKHSFTEDHYVEFSKHSQDRVIGTKGDIAHIYDIQTGNKLLTLFNPDLANNYKRNCATFNPTDDLVLNDGVLWDVRSAQAIHKFDKFNMNISGVFHPNGLEVIINTEIWDLRTFHLLHTVPALDQCRVVFNHTGTVMYGAMLQADDEDDLMEERMKSPFGSSFRTFNATDYKPIATIDVKRNIFDLCTDTKDCYLAVIENQGSMDALNMDTVCRLYEVGRQRLAEDEDEEEDQLTALTTLIWKMTSSYL

SEQ ID NO: 801165 - protein, 1507 aa, Homo sapiens; identical to SEQ ID NO: 801156

SEQ ID NO: 801166 - protein, 111 aa, Homo sapiens
MTTVVVHVDSKAELTTLLEQWEKEHGSGQDMVPILTRMSQLIEKETEEYRKGDPDPFDDRHPGRADPECMLGHLLRILFKNDDFMNAVGLLLTFLQRLSSVDAVSLLFFRE

SEQ ID NO: 801167 - protein, 1148 aa, Homo sapiens
LYMIPCLHVLLTFEALKHLASLLLHNKFATEFVAHGGVQKLLEIPRPSMAATGVSMCLYYLSYNQDAMERVCMHPHNVLSDVVNYTLWLMECSHASGCCHATMFFSICFSFRAVLELFDRYDGLRRLVNLISTLEILNLEDQGALLSDDEIFASRQTGKHTCMALRKYFEAHLAIKLEQVKQSLQRTEGGILVHPQPPYKACSYTHEQIVEMMEFLIEYGPAQLYWEPAEVFLKLSCVQLLLQLISIACNWKTYYARNDTVRFALDVLAILTVVPKIQLQLAESVDVLDEAGSTVSTVGISIILGVAEGEFFIHDAEIQKSALQIIINCVCGPDNRISSIGKFISGTPRRKLPQNPKSSEHTLAKMWNVVQSNNGIKVLLSLLSIKMPITDADQIRALACKALVGLSRSSTVRQIISKLPLFSSCQIQQLMKEPVLQDKRSDHVKFCKYAAELIERVSGKPLLIGTDVSLARLQKADVVAQSRISFPEKELLLLIRNHLISKGLGETATVLTKEADLPMTAASHSSAFTPVTAAASPVSLPRTPRIANGIATRLGSHAAVGASAPSAPTAHPQPRPPQGPLALPGPSYAGNSPLIGRISFIRERPSPCNGRKIRVLRQKSDHGAYSQSPAIKKQLDRHLPSPPTLDSIITEYLREQHARCKNPVATCPPFSLFTPHQCPEPKQRRQAPINFTSRLNRRASFPKYGGVDGGCFDRHLIFSRFRPISVFREANEDESGFTCCAFSARERFLMLGTCTGQLKLYNVFSGQEEASYNCHNSAITHLEPSRDGSLLLTSATWSQPLSALWGMKSVFDMKHSFTEDHYVEFSKHSQDRVIGTKGDIAHIYDIQTGNKLLTLFNPDLANNYKRNCATFNPTDDLVLNDGVLWDVRSAQAIHKFDKFNMNISGVFHPNGLEVIINTEIWDLRTFHLLHTVPALDQCRVVFNHTGTVMYGAMLQADDEDDLMEERMKSPFGSSFRTFNATDYKPIATIDVKRNIFDLCTDTKDCYLAVIENQGSMDALNMDTVCRLYEVGRQRLAEDEDEEEDQEEEEQEEEDDDEDDDDTDDLDELDTDQLLEAELEEDDNNENAGEDGDNDFSPSDEELANLLEEGEDGEDEDSDADEEVELILGDTDSSDNSDLEDDIILSLNE

SEQ ID NO: 801168 - protein, 1507 aa, Homo sapiens; identical to SEQ ID NO: 801156

SEQ ID NO: 801169 - protein, 1148 aa, Homo sapiens; identical to SEQ ID NO: 801167

SEQ ID NO: 801170 - protein, 1507 aa, Homo sapiens; identical to SEQ ID NO: 801156

SEQ ID NO: 801171 - protein, 1491 aa, Homo sapiens
MTTVVVHVDSKAELTTLLEQWEKEHGSGQDMVPILTRMSQLIEKETEEYRKGDPDPFDDRHPGRADPECMLGHLLRILFKNDDFMNALVNAYVMTSREPPLNTAACRLLLDIMPGLETAVVFQEKEGIVENLFKWAREADQPLRTYSTGLLGGAMENQDIAANYRDENSQLVAIVLRRLRELQLQEVALRQENKRPSPRKLSSEPLLPLDEEAVDMDYGDMAVDVVDGDQEEASGDMEISFHLDSGHKTSSRVNSTTKPEDGGLKKNKSAKQGDRENFRKAKQKLGFSSSDPDRMFVELSNSSWSEMSPWVIGTNYTLYPMTPAIEQRLILQYLTPLGEYQELLPIFMQLGSRELMMFYIDLKQTNDVLLTFEALKHLASLLLHNKFATEFVAHGGVQKLLEIPRPSMAATGVSMCLYYLSYNQDAMERVCMHPHNVLSDVVNYTLWLMECSHASGCCHATMFFSICFSFRAVLELFDRYDGLRRLVNLISTLEILNLEDQGALLSDDEIFASRQTGKHTCMALRKYFEAHLAIKLEQVKQSLQRTEGGILVHPQPPYKACSYTHEQIVEMMEFLIEYGPAQLYWEPAEVFLKLSCVQLLLQLISIACNWKTYYARNDTVRFALDVLAILTVVPKIQLQLAESVDVLDEAGSTVSTVGISIILGVAEGEFFIHDAEIQKSALQIIINCVCGPDNRISSIGKFISGTPRRKLPQNPKSSEHTLAKMWNVVQSNNGIKVLLSLLSIKMPITDADQIRALACKALVGLSRSSTVRQIISKLPLFSSCQIQQLMKEPVLQDKRSDHVKFCKYAAELIERVSGKPLLIGTDVSLARLQKADVVAQSRISFPEKELLLLIRNHLISKGLGETATVLTKEADLPMTAASHSSAFTPVTAAASPVSLPRTPRIANGIATRLGSHAAVGASAPSAPTAHPQPRPPQGPLALPGPSYAGNSPLIGRISFIRERPSPCNGRKIRVLRQKSDHGAYSQSPAIKKQLDRHLPSPPTLDSIITEYLREQHARCKNPVATCPPFSLFTPHQCPEPKQRRQAPINFTSRLNRRASFPKYGGVDGGCFDRHLIFSRFRPISVFREANEDESGFTCCAFSARERFLMLGTCTGQLKLYNVFSGQEEASYNCHNSAITHLEPSRDGSLLLTSATWSQPLSALWGMKSVFDMKHSFTEDHYVEFSKHSQDRVIGTKGDIAHILPTTTRGTVPPLILQMILSSNDGVLWDVRSAQAIHKFDKFNMNISGVFHPNGLEVIINTEIWDLRTFHLLHTVPALDQCRVVFNHTGTVMYGAMLQADDEDDLMEERMKSPFGSSFRTFNATDYKPIATIDVKRNIFDLCTDTKDCYLAVIENQGSMDALNMDTVCRLYEVGRQRLAEDEDEEEDQEEEEQEEEDDDEDDDDTDDLDELDTDQLLEAELEEDDNNENAGEDGDNDFSPSDEELANLLEEGEDGEDEDSDADEEVELILGDTDSSDNSDLEDDIILSLNE

SEQ ID NO: 801172 - protein, 1507 aa, Homo sapiens; identical to SEQ ID NO: 801156

SEQ ID NO: 801173 - protein, 1507 aa, Homo sapiens; identical to SEQ ID NO: 801156

SEQ ID NO: 801174 - protein, 1180 aa, Homo sapiens
MTTVVVHVDSKAELTTLLEQWEKEHGSGQDMVPILTRMSQLIEKETEEYRKGDPDPFDDRHPGRADPECMLGHLLRILFKNDDFMNALVNAYVMTSREPPLNTAACRLLLDIMPGLETAVVFQEKEGIVENLFKWAREADQPLRTYSTGLLGGAMENQDIAANYRDENSQLVAIVLRRLRELQLQEVALRQENKRPSPRKLSSEPLLPLDEEAVDMDYGDMAVDVVDGDQEEASGDMEISFHLDSGHKTSSRVNSTTKPEDGGLKKNKSAKQGDRENFRKAKQKLGFSSSDPDRMFVELSNSSWSEMSPWVIGTNYTLYPMTPAIEQRLILQYLTPLGEYQELLPIFMQLGSRELMMFYIDLKQTNDVLLTFEALKHLASLLLHNKFATEFVAHGGVQKLLEIPRPSMAATGVSMCLYYLSYNQDAMERVCMHPHNVLSDVVNYTLWLMECSHASGCCHATMFFSICFSFRAVLELFDRYDGLRRLVNLISTLEILNLEDQGALLSDDEIFASRQTGKHTCMALRKYFEAHLAIKLEQVKQSLQRTEGGILVHPQPPYKACSYTHEQIVEMMEFLIEYGPAQLYWEPAEVFLKLSCVQLLLQLISIACNWKTYYARNDTVRFALDVLAILTVVPKIQLQLAESVDVLDEAGSTVSTVGISIILGVAEGEFFIHDAEIQKSALQIIINCVCGPDNRISSIGKFISGTPRRKLPQNPKSSEHTLAKMWNVVQSNNGIKVLLSLLSIKMPITDADQIRALACKALVGLSRSSTVRQIISKLPLFSSCQIQQLMKEPVLQDKRSDHVKFCKYAAELIERVSGKPLLIGTDVSLARLQKADVVAQSRISFPEKELLLLIRNHLISKGLGETATVLTKEADLPMTAASHSSAFTPVTAAASPVSLPRTPRIANGIATRLGSHAAVGASAPSAPTAHPQPRPPQGPLALPGPSYAGNSPLIGRISFIRERPSPCNGRKIRVLRQKSDHGAYSQSPAIKKQLDRHLPSPPTLDSIITEYLREQHARCKNPVATCPPFSLFTPHQCPEPKQRRQAPINFTSRLNRRASFPKYGGVDGGCFDRHLIFSRFRPISVFREANEDESGFTCCAFSARERFLMLGTCTGQLKLYNVFSGQEEASYNCHNSAITHLEPSRDGSLLLTSATWSQPLSALWGMKSVFDMKYVSAFGT

SEQ ID NO: 801175 - protein, 415 aa, Homo sapiens
PAGGARRKGTAAGPAEAAERTAHQGSGSSDRVKLRWLPGSPAGMHFSTVTRDMEAFTASSLSSLGAAGGFPGAASPGADPYGPREPPPPPPRYDPCAAAAPGAPGPPPPPHAYPFAPAAGAATSAAAEPEGPGASCAAAAKAPVKKNAKVAGVSVQLEMKALWDEFNQLGTEMIVTKAGRRMFPTFQVKLFGMDPMADYMLLMDFVPVDDKRYRYAFHSSSWLVAGKADPATPGRVHYHPDSPAKGAQWMKQIVSFDKLKLTNNLLDDNGHIILNSMHRYQPRFHVVYVDPRKDSEKYAEENFKTFVFEETRFTAVTAYQNHRITQLKIASNPFAKGFRDCDPEDWPRNHRPGALPLMSAFARSRNPVASPTQPSGTEKGLVTEGSGLQPGLLDVLLKPPSKKSESLRPPHCKDT

SEQ ID NO: 801176 - protein, 695 aa, Homo sapiens
PAGGARRKGTAAGPAEAAERTAHQGSGSSDRVKLRWLPGSPAGMHFSTVTRDMEAFTASSLSSLGAAGGFPGAASPGADPYGPREPPPPPPRYDPCAAAAPGAPGPPPPPHAYPFAPAAGAATSAAAEPEGPGASCAAAAKAPVKKNAKVAGVSVQLEMKALWDEFNQLGTEMIVTKAGRRMFPTFQVKLFGMDPMADYMLLMDFVPVDDKRYRYAFHSSSWLVAGKADPATPGRVHYHPDSPAKGAQWMKQIVSFDKLKLTNNLLDDNGHIILNSMHRYQPRFHVVYVDPRKDSEKYAEENFKTFVFEETRFTAVTAYQNHRITQLKIASNPFAKGFRDCDPEDWPRNHRPGALPLMSAFARSRNPVASPTQPSGTEKDAAEARREFQRDAGGPAVLGDPAHPPQLLARVLSPSLPGAGGAGGLVPLPGAPGGRPSPPNPELRLEAPGASEPLHHHPYKYPAAAYDHYLGAKSRPAPYPLPGLRGHGYHPHAHPHHHHHPVSPAAAAAAAAAAAAAAANMYSSAGAAPPAPTTIAPDNTGPVALPPRSCTAPKFAGPGHPAPRASKEYVPPAPGATAALPFPSLEAMGAPSPPPAPWAIEVSGSPVPGATAGPSPAPRAKGVPARQCQSARSEAEGSDIYCSPRDRVARGPAGSCSVDSPRAPPAGGVDTCRYCRYCRYRPGADLINGFASFGK

SEQ ID NO: 801177 - protein, 441 aa, Homo sapiens
PAGGARRKGTAAGPAEAAERTAHQGSGSSDRVKLRWLPGSPAGMHFSTVTRDMEAFTASSLSSLGAAGGFPGAASPGADPYGPREPPPPPPRYDPCAAAAPGAPGPPPPPHAYPFAPAAGAATSAAAEPEGPGASCAAAAKAPVKKNAKVAGVSVQLEMKALWDEFNQLGTEMIVTKAGRRMFPTFQVKLFGMDPMADYMLLMDFVPVDDKRYRYAFHSSSWLVAGKADPATPGRVHYHPDSPAKGAQWMKQIVSFDKLKLTNNLLDDNGHIILNSMHRYQPRFHVVYVDPRKDSEKYAEENFKTFVFEETRFTAVTAYQNHRITQLKIASNPFAKGFRDCDPEDWPRNHRPGALPLMSAFARSRNPVASPTQPSGTEKGGHVLKDKEVKAETSRNTPEREVELLRDAGGCVNLGLPCPAECQPFNTQGLVAGRTAGDRLC

SEQ ID NO: 801178 - protein, 214 aa, Homo sapiens
PAGGARRKGTAAGPAEAAERTAHQGSGSSDRVKLRWLPGSPAGMHFSTVTRDMEAFTASSLSSLGAAGGFPGAASPGADPYGPREPPPPPPRYDPCAAAAPGAPGPPPPPHAYPFAPAAGAATSAAAEPEGPGASCAAAAKAPVKKNAKVAGVSVQLEMKALWDEFNQLGTEMIVTKAGRRMFPTFQVKLFGMDPMADYMLLMDFVPVDDKRYR

SEQ ID NO: 801179 - protein, 436 aa, Homo sapiens
PAGGARRKGTAAGPAEAAERTAHQGSGSSDRVKLRWLPGSPAGMHFSTVTRDMEAFTASSLSSLGAAGGFPGAASPGADPYGPREPPPPPPRYDPCAAAAPGAPGPPPPPHAYPFAPAAGAATSAAAEPEGPGASCAAAAKAPVKKNAKVAGVSVQLEMKALWDEFNQLGTEMIVTKAGRRMFPTFQVKLFGMDPMADYMLLMDFVPVDDKRYRYAFHSSSWLVAGKADPATPGRVHYHPDSPAKGAQWMKQIVSFDKLKLTNNLLDDNGHIILNSMHRYQPRFHVVYVDPRKDSEKYAEENFKTFVFEETRFTAVTAYQNHRITQLKIASNPFAKGFRDCDPEDWPRNHRPGALPLMSAFARSRNPVASPTQPSGTEKGRAGVVGSGFRPCARSTPGRRPRPTSPAPPGRSRLSRRLHNGRGGGQARTRPPGPTA

SEQ ID NO: 801180 - protein, 214 aa, Homo sapiens; identical to SEQ ID NO: 801178

SEQ ID NO: 801181 - protein, 120 aa, Homo sapiens
EDTQKSPSIRNRLPPDTESAGALILNFPTSRTVATRLSLLVSSQDHRTHRIPRQPIPSWMSSKCLKVLLYQVSQTSSLRTIHSRAQLFYWRSEGKAITRTTLVTGWTGSQLLGMTSGNPE

SEQ ID NO: 801182 - protein, 114 aa, Homo sapiens
GRFPPRTRARRRQQRPPADAENPKPCRMAKLQHGSHPDHHVKEISPTRNKHLPCNIRSFLGLGACAYLLPESWSILRCLPPAPVHSQEPRSQRQAWKTYSSPSEGCCGFPCCGD

SEQ ID NO: 801183 - protein, 94 aa, Homo sapiens
GRFPPRTRARRRQQRPPADAENPKPCRMAKLQHGSHPDHHVKEISPTRNKHLPCNIRCLPPAPVHSQEPRSQRQAWKTYSSPSEGCCGFPCCGD

SEQ ID NO: 801184 - protein, 84 aa, Homo sapiens
GRFPPRTRARRRQQRPPADAENPKPCRMAKLQHGSHPDHHVKEISPTRNKHLPCNIRWPPDFLCLYPPRTTELIASQGSLFHHG

SEQ ID NO: 801185 - protein, 94 aa, Homo sapiens; identical to SEQ ID NO: 801183

SEQ ID NO: 801186 - protein, 126 aa, Homo sapiens
MCFPKIEVISSLSDDSDPELDYTSLPVLENLPTDTLSNIFAVSKDTSKAARVPFTDIFKKEAKRDLEIRKQDTKSPRPLIQELSDEDPSGQLLMPPTCQRDAAPLTSSGDRDSDFLAASSPAAKCI

SEQ ID NO: 801187 - protein, 158 aa, Homo sapiens [sequence omitted]

SEQ ID NO: 801188 - protein, 189 aa, Homo sapiens
MCFPKIEVISSLSDDSDPELDYTSLPVLENLPTDTLSNIFAVSKDTSKAARVPFTDIFKKEAKRDLEIRKQDTKSPRPLIQELSDEDPSGQLLMPPTCQRDAAPLTSSGDRDSDFLAASSPEMGFHHVDQAGLELLTSGDLFASASQSAGITVPTESAATPPETCVGVAQPSQALPTWDLTAFPAPKAS

SEQ ID NO: 801189 - protein, 363 aa, Homo sapiens
KTAPLCRLQQIGAMALEQNQSTDYYYEENEMNGTYDYSQYELICIKEDVREFAKVFLPVFLTIVFVIGLAGNSMVVAIYAYYKKQRTKTDVYILNLAVADLLLLFTLPFWAVNAVHGWVLGKIMCKITSALYTLNFVSGMQFLACISIDRYVAVTKVPSQSGVGKPCWIICFCVWMAAILLSIPQLVFYTVNDNARCIPIFPRYLGTSMKALIQMLEICIGFVVPFLIMGVCYFITARTLMKMPNIKISRPLKVLLTVVIVFIVTQLPYNIVKFCRAIDIIYSLITSCNMSKRMDIAIQVTESIALFHSCLNPILYVFMGASFKNYVMKVAKKYGSWRRQRQSVEEFPFDSEGPTEPTSTFSI

SEQ ID NO: 801190 - protein, 363 aa, Homo sapiens; identical to SEQ ID NO: 801189

SEQ ID NO: 801191 - protein, 363 aa, Homo sapiens; identical to SEQ ID NO: 801189

SEQ ID NO: 801192 - protein, 154 aa, Homo sapiens
AGSGELAVVHEWREDGLRLWVFGLSVPKEAAELGDAAHGAPARVGELLLLALHHSHVFAPMITDAVDGDAREDGPHDESQDDCNGQEGDGNQLVVAFEGPPPFNCDITVGCCGNDCPVTKDCDLSRSSKYLLRNKDSVIQQIPLVIKGSQGNSP

SEQ ID NO: 801193 - protein, 154 aa, Homo sapiens; identical to SEQ ID NO: 801192

SEQ ID NO: 801194 - protein, 154 aa, Homo sapiens; identical to SEQ ID NO: 801192

SEQ ID NO: 801195 - protein, 1951 aa, Homo sapiens
MAQALLVPPGPESFRLFTRESLAAIEKRAAEEKAKKPKKEQDNDDENKPKPNSDLEAGKNLPFIYGDIPPEMVSEPLEDLDPYYINKKTFIVMNKGKAIFRFSATSALYILTPLNPVRKIAIKILVHSLFSMLIMCTILTNCVFMTLSNPPDWTKNVEYTFTGIYTFESLIKILARGFCLEDFTFLRDPWNWLDFSVIVMAYVTEFVSLGNVSALRTFRVLRALKTISVIPGLKTIVGALIQSVKKLSDVMILTVFCLSVFALIGLQLFMGNLRNKCLQWPPSDSAFETNTTSYFNGTMDSNGTFVNVTMSTFNWKDYIGDDSHFYVLDGQKDPLLCGNGSDAGQCPEGYICVKAGRNPNYGYTSFDTFSWAFLSLFRLMTQDYWENLYQLTLRAAGKTYMIFFVLVIFLGSFYLVNLILAVVAMAYEEQNQATLEEAEQKEAEFQQMLEQLKKQQEEAQAVAAASAASRDFSGIGGLGELLESSSEASKLSSKSAKEWRNRRKKRRQREHLEGNNKGERDSFPKSESEDSVKRSSFLFSMDGNRLTSDKKFCSPHQSLLSIRGSLFSPRRNSKTSIFSFRGRAKDVGSENDFADDEHSTFEDSESRRDSLFVPHRHGERRNSNGTTTETEVRKRRLSSYQISMEMLEDSSGRQRAVSIASILTNTMEELEESRQKCPPCWYRFANVFLIWDCCDAWLKVKHLVNLIVMDPFVDLAITICIVLNTLFMAMEHYPMTEQFSSVLTVGNLVFTGIFTAEMVLKIIAMDPYYYFQEGWNIFDGIIVSLSLMELGLSNVEGLSVLRSFRLLRVFKLAKSWPTLNMLIKIIGNSVGALGNLTLVLAIIVFIFAVVGMQLFGKSYKECVCKINDDCTLPRWHMNDFFHSFLIVFRVLCGEWIETMWDCMEVAGQTMCLIVFMLVMVIGNLVVLNLFLALLLSSFSSDNLAATDDDNEMNNLQIAVGRMQKGIDYVKNKMRECFQKAFFRKPKVIEIHEGNKIDSCMSNNTGIEISKELNYLRDGNGTTSGVGTGSSVEKYVIDENDYMSFINNPSLTVTVPIAVGESDFENLNTEEFSSESELEESKEKLNATSSSEGSTVDVVLPREGEQAETEPEEDLKPEACFTEGCIKKFPFCQVSTEEGKGKIWWNLRKTCYSIVEHNWFETFIVFMILLSSGALAFEDIYIEQRKTIKTMLEYADKVFTYIFILEMLLKWVAYGFQTYFTNAWCWLDFLIVDVSLVSLVANALGYSELGAIKSLRTLRALRPLRALSRFEGMRVVVNALVGAIPSIMNVLLVCLIFWLIFSIMGVNLFAGKFYHCVNMTTGNMFDISDVNNLSDCQALGKQARWKNVKVNFDNVGAGYLALLQVATFKGWMDIMYAAVDSRDVKLQPVYEENLYMYLYFVIFIIFGSFFTLNLFIGVIIDNFNQQKKKFGGQDIFMTEEQKKYYNAMKKLGSKKPQKPIPRPANKFQGMVFDFVTRQVFDISIMILICLNMVTMMVETDDQGKYMTLVLSRINLVFIVLFTGEFVLKLVSLRHYYFTIGWNIFDFVVVILSIVGMFLAEMIEKYFVSPTLFRVIRLARIGRILRLIKGAKGIRTLLFALMMSLPALFNIGLLLFLVMFIYAIFGMSNFAYVKKEAGIDDMFNFETFGNSMICLFQITTSAGWDGLLAPILNSAPPDCDPDTIHPGSSVKGDCGNPSVGIFFFVSYIIISFLVVVNMYIAVILENFSVATEESAEPLSEDDFEMFYEVWEKFDPDATQFIEFSKLSDFAAALDPPLLIAKPNKVQLIAMDLPMVSGDRIHCLDILFAFTKRVLGESGEMDALRIQMEDRFMASNPSKVSYEPITTTLKRKQEEVSAAIIQRNFRCYLLKQRLKNISSNYNKEAIKGRIDLPIKQDMIIDKLNGNSTPEKTDGSSSTTSPPSYDSVTKPDKEKFEKDKPEKESKGKEVRENQK

SEQ ID NO: 801196 - protein, 2000 aa, Homo sapiens
MAQALLVPPGPESFRLFTRESLAAIEKRAAEEKAKKPKKEQDNDDENKPKPNSDLEAGKNLPFIYGDIPPEMVSEPLEDLDPYYINKKTFIVMNKGKAIFRFSATSALYILTPLNPVRKIAIKILVHSLFSMLIMCTILTNCVFMTLSNPPDWTKNVEYTFTGIYTFESLIKILARGFCLEDFTFLRDPWNWLDFSVIVMAYVTEFVSLGNVSALRTFRVLRALKTISVIPGLKTIVGALIQSVKKLSDVMILTVFCLSVFALIGLQLFMGNLRNKCLQWPPSDSAFETNTTSYFNGTMDSNGTFVNVTMSTFNWKDYIGDDSHFYVLDGQKDPLLCGNGSDAGQCPEGYICVKAGRNPNYGYTSFDTFSWAFLSLFRLMTQDYWENLYQLTLRAAGKTYMIFFVLVIFLGSFYLVNLILAVVAMAYEEQNQATLEEAEQKEAEFQQMLEQLKKQQEEAQAVAAASAASRDFSGIGGLGELLESSSEASKLSSKSAKEWRNRRKKRRQREHLEGNNKGERDSFPKSESEDSVKRSSFLFSMDGNRLTSDKKFCSPHQSLLSIRGSLFSPRRNSKTSIFSFRGRAKDVGSENDFADDEHSTFEDSESRRDSLFVPHRHGERRNSNVSQASMSSRMVPGLPANGKMHSTVDCNGVVSLVGGPSALTSPTGQLPPEGTTTETEVRKRRLSSYQISMEMLEDSSGRQRAVSIASILTNTMEELEESRQKCPPCWYRFANVFLIWDCCDAWLKVKHLVNLIVMDPFVDLAITICIVLNTLFMAMEHYPMTEQFSSVLTVGNLVFTGIFTAEMVLKIIAMDPYYYFQEGWNIFDGIIVSLSLMELGLSNVEGLSVLRSFRLLRVFKLAKSWPTLNMLIKIIGNSVGALGNLTLVLAIIVFIFAVVGMQLFGKSYKECVCKINDDCTLPRWHMNDFFHSFLIVFRVLCGEWIETMWDCMEVAGQTMCLIVFMLVMVIGNLVVLNLFLALLLSSFSSDNLAATDDDNEMNNLQIAVGRMQKGIDYVKNKMRECFQKAFFRKPKVIEIHEGNKIDSCMSNNTGIEISKELNYLRDGNGTTSGVGTGSSVEKYVIDENDYMSFINNPSLTVTVPIAVGESDFENLNTEEFSSESELEESKEKLNATSSSEGSTVDVVLPREGEQAETEPEEDLKPEACFTEGCIKKFPFCQVSTEEGKGKIWWNLRKTCYSIVEHNWFETFIVFMILLSSGALAFEDIYIEQRKTIKTMLEYADKVFTYIFILEMLLKWVAYGFQTYFTNAWCWLDFLIVDVSLVSLVANALGYSELGAIKSLRTLRALRPLRALSRFEGMRVVVNALVGAIPSIMNVLLVCLIFWLIFSIMGVNLFAGKFYHCVNMTTGNMFDISDVNNLSDCQALGKQARWKNVKVNFDNVGAGYLALLQVATFKGWMDIMYAAVDSRDVKLQPVYEENLYMYLYFVIFIIFGSFFTLNLFIGVIIDNFNQQKKKFGGQDIFMTEEQKKYYNAMKKLGSKKPQKPIPRPANKFQGMVFDFVTRQVFDISIMILICLNMVTMMVETDDQGKYMTLVLSRINLVFIVLFTGEFVLKLVSLRHYYFTIGWNIFDFVVVILSIVGMFLAEMIEKYFVSPTLFRVIRLARIGRILRLIKGAKGIRTLLFALMMSLPALFNIGLLLFLVMFIYAIFGMSNFAYVKKEAGIDDMFNFETFGNSMICLFQITTSAGWDGLLAPILNSAPPDCDPDTIHPGSSVKGDCGNPSVGIFFFVSYIIISFLVVVNMYIAVILENFSVATEESAEPLSEDDFEMFYEVWEKFDPDATQFIEFSKLSDFAAALDPPLLIAKPNKVQLIAMDLPMVSGDRIHCLDILFAFTKRVLGESGEMDALRIQMEDRFMASNPSKVSYEPITTTLKRKQEEVSAAIIQRNFRCYLLKQRLKNISSNYNKEAIKGRIDLPIKQDMIIDKLNGNSTPEKTDGSSSTTSPPSYDSVTKPDKEKFEKDKPEKESKGKEVRENQK

SEQ ID NO: 801197 - protein, 2000 aa, Homo sapiens
MAQALLVPPGPESFRLFTRESLAAIEKRAAEEKAKKPKKEQDNDDENKPKPNSDLEAGKNLPFIYGDIPPEMVSEPLEDLDPYYINKKTFIVMNKGKAIFRFSATSALYILTPLNPVRKIAIKILVHSLFSMLIMCTILTNCVFMTLSNPPDWTKNVEYTFTGIYTFESLIKILARGFCLEDFTFLRDPWNWLDFSVIVMAYVTEFVDLGNVSALRTFRVLRALKTISVIPGLKTIVGALIQSVKKLSDVMILTVFCLSVFALIGLQLFMGNLRNKCLQWPPSDSAFETNTTSYFNGTMDSNGTFVNVTMSTFNWKDYIGDDSHFYVLDGQKDPLLCGNGSDAGQCPEGYICVKAGRNPNYGYTSFDTFSWAFLSLFRLMTQDYWENLYQLTLRAAGKTYMIFFVLVIFLGSFYLVNLILAVVAMAYEEQNQATLEEAEQKEAEFQQMLEQLKKQQEEAQAVAAASAASRDFSGIGGLGELLESSSEASKLSSKSAKEWRNRRKKRRQREHLEGNNKGERDSFPKSESEDSVKRSSFLFSMDGNRLTSDKKFCSPHQSLLSIRGSLFSPRRNSKTSIFSFRGRAKDVGSENDFADDEHSTFEDSESRRDSLFVPHRHGERRNSNVSQASMSSRMVPGLPANGKMHSTVDCNGVVSLVGGPSALTSPTGQLPPEGTTTETEVRKRRLSSYQISMEMLEDSSGRQRAVSIASILTNTMEELEESRQKCPPCWYRFANVFLIWDCCDAWLKVKHLVNLIVMDPFVDLAITICIVLNTLFMAMEHYPMTEQFSSVLTVGNLVFTGIFTAEMVLKIIAMDPYYYFQEGWNIFDGIIVSLSLMELGLSNVEGLSVLRSFRLLRVFKLAKSWPTLNMLIKIIGNSVGALGNLTLVLAIIVFIFAVVGMQLFGKSYKECVCKINDDCTLPRWHMNDFFHSFLIVFRVLCGEWIETMWDCMEVAGQTMCLIVFMLVMVIGNLVVLNLFLALLLSSFSSDNLAATDDDNEMNNLQIAVGRMQKGIDYVKNKMRECFQKAFFRKPKVIEIHEGNKIDSCMSNNTGIEISKELNYLRDGNGTTSGVGTGSSVEKYVIDENDYMSFINNPSLTVTVPIAVGESDFENLNTEEFSSESELEESKEKLNATSSSEGSTVDVVLPREGEQAETEPEEDLKPEACFTEGCIKKFPFCQVSTEEGKGKIWWNLRKTCYSIVEHNWFETFIVFMILLSSGALAFEDIYIEQRKTIKTMLEYADKVFTYIFILEMLLKWVAYGFQTYFTNAWCWLDFLIVDVSLVSLVANALGYSELGAIKSLRTLRALRPLRALSRFEGMRVVVNALVGAIPSIMNVLLVCLIFWLIFSIMGVNLFAGKFYHCVNMTTGNMFDISDVNNLSDCQALGKQARWKNVKVNFDNVGAGYLALLQVATFKGWMDIMYAAVDSRDVKLQPVYEENLYMYLYFVIFIIFGSFFTLNLFIGVIIDNFNQQKKKFGGQDIFMTEEQKKYYNAMKKLGSKKPQKPIPRPANKFQGMVFDFVTRQVFDISIMILICLNMVTMMVETDDQGKYMTLVLSRINLVFIVLFTGEFVLKLVSLRHYYFTIGWNIFDFVVVILSIVGMFLAEMIEKYFVSPTLFRVIRLARIGRILRLIKGAKGIRTLLFALMMSLPALFNIGLLLFLVMFIYAIFGMSNFAYVKKEAGIDDMFNFETFGNSMICLFQITTSAGWDGLLAPILNSAPPDCDPDTIHPGSSVKGDCGNPSVGIFFFVSYIIISFLVVVNMYIAVILENFSVATEESAEPLSEDDFEMFYEVWEKFDPDATQFIEFSKLSDFAAALDPPLLIAKPNKVQLIAMDLPMVSGDRIHCLDILFAFTKRVLGESGEMDALRIQMEDRFMASNPSKVSYEPITTTLKRKQEEVSAAIIQRNFRCYLLKQRLKNISSNYNKEAIKGRIDLPIKQDMIIDKLNGNSTPEKTDGSSSTTSPPSYDSVTKPDKEKFEKDKPEKESKGKEVRENQK

SEQ ID NO: 801198 - protein, 944 aa, Homo sapiens
MAQALLVPPGPESFRLFTRESLAAIEKRAAEEKAKKPKKEQDNDDENKPKPNSDLEAGKNLPFIYGDIPPEMVSEPLEDLDPYYINKKTFIVMNKGKAIFRFSATSALYILTPLNPVRKIAIKILVHSLFSMLIMCTILTNCVFMTLSNPPDWTKNVEYTFTGIYTFESLIKILARGFCLEDFTFLRDPWNWLDFSVIVMAYVTEFVSLGNVSALRTFRVLRALKTISVIPGLKTIVGALIQSVKKLSDVMILTVFCLSVFALIGLQLFMGNLRNKCLQWPPSDSAFETNTTSYFNGTMDSNGTFVNVTMSTFNWKDYIGDDSHFYVLDGQKDPLLCGNGSDAGQCPEGYICVKAGRNPNYGYTSFDTFSWAFLSLFRLMTQDYWENLYQLTLRAAGKTYMIFFVLVIFLGSFYLVNLILAVVAMAYEEQNQATLEEAEQKEAEFQQMLEQLKKQQEEAQAVAAASAASRDFSGIGGLGELLESSSEASKLSSKSAKEWRNRRKKRRQREHLEGNNKGERDSFPKSESEDSVKRSSFLFSMDGNRLTSDKKFCSPHQSLLSIRGSLFSPRRNSKTSIFSFRGRAKDVGSENDFADDEHSTFEDSESRRDSLFVPHRHGERRNSNVSQASMSSRMVPGLPANGKMHSTVDCNGVVSLVGGPSALTSPTGQLPPEGTTTETEVRKRRLSSYQISMEMLEDSSGRQRAVSIASILTNTMEELEESRQKCPPCWYRFANVFLIWDCCDAWLKVKHLVNLIVMDPFVDLAITICIVLNTLFMAMEHYPMTEQFSSVLTVGNLVFTGIFTAEMVLKIIAMDPYYYFQEGWNIFDGIIVSLSLMELGLSNVEGLSVLRSFRLLRVFKLAKSWPTLNMLIKIIGNSVGALGNLTLVLAIIVFIFAVVGMQLFGKSYKECVCKINDDCTLPRWHMNDFFHSFLIVFRVLCGEW

SEQ ID NO: 801199 - protein, 163 aa, Homo sapiens
MPEKRPFERLPADVSPINYSLCLKPDLLDFTFEGKLEAAAQVRQATNQIVMNCADIDIITASYAPEGDEEIHATGFNYQNEDEKVTLSFPSTLQTGTGTLKIDFVGELNDKMKGFYRSKYTTPSGEVRYAAVTQFEATDARRAFPCWDEPAIKATFDISLVVP

SEQ ID NO: 801200 - protein, 264 aa, Homo sapiens
KREEKSARSRLGVNRPRRVTLLWQAEQGKFALEVAAKTLPFYKDYFNVPYPLPKIDLIAIADFAAGAMENWGLVTYRETALLIDPKNSCSSSRQWVALVVGHELAHQWFGNLVTMEWWTHLWLNEGFASWIEYLCVDHCFPEYDIWTQFVSADYTRAQELDALDNSHPIEVSVGHPSEVDEIFDAISYSKGASVIRMLHDYIGDKDFKKGMNMYLTKFQQKNAATEDLWESLENASGKPIAAVMNTWTKQMGFPLIYVEAEQVD

SEQ ID NO: 801201 - protein, 875 aa, Homo sapiens
MPEKRPFERLPADVSPINYSLCLKPDLLDFTFEGKLEAAAQVRQATNQIVMNCADIDIITASYAPEGDEEIHATGFNYQNEDEKVTLSFPSTLQTGTGTLKIDFVGELNDKMKGFYRSKYTTPSGEVRYAAVTQFEATDARRAFPCWDEPAIKATFDISLVVPKDRVALSNMNVIDRKPYPDDENLVEVKFARTPVMSTYLVAFVVGEYDFVETRSKDGVCVRVYTPVGKAEQGKFALEVAAKTLPFYKDYFNVPYPLPKIDLIAIADFAAGAMENWGLVTYRETALLIDPKNSCSSSRQWVALVVGHELAHQWFGNLVTMEWWTHLWLNEGFASWIEYLCVDHCFPEYDIWTQFVSADYTRAQELDALDNSHPIEVSVGHPSEVDEIFDAISYSKGASVIRMLHDYIGDKDFKKGMNMYLTKFQQKNAATEDLWESLENASGKPIAAVMNTWTKQMGFPLIYVEAEQVEDDRLLRLSQKKFCAGGSYVGEDCPQWMVPITISTSEDPNQAKLKILMDKPEMNVVLKNVKPDQWVKLNLGTVGFYRTQYSSAMLESLLPGIRDLSLPPVDRLGLQNDLFSLARAGIISTVEVLKVMEAFVNEPNYTVWSDLSCNLGILSTLLSHTDFYEEIQEFVKDVFSPIGERLGWDPKPGEGHLDALLRGLVLGKLGKAGHKATLEEARRRFKDHVEGKQILSADLRSPVYLTVLKHGDGTTLDIMLKLHKQADMQEEKNRIERVLGATLLPDLIQKVLTFALSEEVRPQDTVSVIGGVAGGSKHGRKAAWKFIKDNWEELYNRYQGGFLISRLIKLSVEGFAVDKMAGEVKAFFESHPAPSAERTIQQCCENILLNAAWLKRDAESIHQYLLQRKASPPTV

SEQ ID NO: 801202 - protein, 875 aa, Homo sapiens; identical to SEQ ID NO: 801201

SEQ ID NO: 801203 - protein, 704 aa, Homo sapiens [sequence omitted]

SEQ ID NO: 801204 - protein, 869 aa, Homo sapiens
RTEESRLGPHGIIFHGLLSKFLCSWPLEPLHHIPQVRQATNQIVMNCADIDIITASYAPEGDEEIHATGFNYQNEDEKVTLSFPSTLQTGTGTLKIDFVGELNDKMKGFYRSKYTTPSGEVRYAAVTQFEATDARRAFPCWDEPAIKATFDISLVVPKDRVALSNMNVIDRKPYPDDENLVEVKFARTPVMSTYLVAFVVGEYDFVETRSKDGVCVRVYTPVGKAEQGKFALEVAAKTLPFYKDYFNVPYPLPKIDLIAIADFAAGAMENWGLVTYRETALLIDPKNSCSSSRQWVALVVGHELAHQWFGNLVTMEWWTHLWLNEGFASWIEYLCVDHCFPEYDIWTQFVSADYTRAQELDALDNSHPIEVSVGHPSEVDEIFDAISYSKGASVIRMLHDYIGDKDFKKGMNMYLTKFQQKNAATEDLWESLENASGKPIAAVMNTWTKQMGFPLIYVEAEQVEDDRLLRLSQKKFCAGGSYVGEDCPQWMVPITISTSEDPNQAKLKILMDKPEMNVVLKNVKPDQWVKLNLGTVGFYRTQYSSAMLESLLPGIRDLSLPPVDRLGLQNDLFSLARAGIISTVEVLKVMEAFVNEPNYTVWSDLSCNLGILSTLLSHTDFYEEIQEFVKDVFSPIGERLGWDPKPGEGHLDALLRGLVLGKLGKAGHKATLEEARRRFKDHVEGKQILSADLRSPVYLTVLKHGDGTTLDIMLKLHKQADMQEEKNRIERVLGATLLPDLIQKVLTFALSEEVRPQDTVSVIGGVAGGSKHGRKAAWKFIKDNWEELYNRYQGGFLISRLIKLSVEGFAVDKMAGEVKAFFESHPAPSAERTIQQCCENILLNAAWLKRDAESIHQYLLQRKASPPTV

SEQ ID NO: 801205 - protein, 602 aa, Homo sapiens
MENWGLVTYRETALLIDPKNSCSSSRQWVALVVGHELAHQWFGNLVTMEWWTHLWLNEGFASWIEYLCVDHCFPEYDIWTQFVSADYTRAQELDALDNSHPIEVSVGHPSEVDEIFDAISYSKGASVIRMLHDYIGDKDFKKGMNMYLTKFQQKNAATEDLWESLENASGKPIAAVMNTWTKQMGFPLIYVEAEQVEDDRLLRLSQKKFCAGGSYVGEDCPQWMVPITISTSEDPNQAKLKILMDKPEMNVVLKNVKPDQWVKLNLGTVGFYRTQYSSAMLESLLPGIRDLSLPPVDRLGLQNDLFSLARAGIISTVEVLKVMEAFVNEPNYTVWSDLSCNLGILSTLLSHTDFYEEIQEFVKDVFSPIGERLGWDPKPGEGHLDALLRGLVLGKLGKAGHKATLEEARRRFKDHVEGKQILSADLRSPVYLTVLKHGDGTTLDIMLKLHKQADMQEEKNRIERVLGATLLPDLIQKVLTFALSEEVRPQDTVSVIGGVAGGSKHGRKAAWKFIKDNWEELYNRYQGGFLISRLIKLSVEGFAVDKMAGEVKAFFESHPAPSAERTIQQCCENILLNAAWLKRDAESIHQYLLQRKASPPTV

SEQ ID NO: 801206 - protein, 473 aa, Homo sapiens
MLHDYIGDKDFKKGMNMYLTKFQQKNAATEDLWESLENASGKPIAAVMNTWTKQMGFPLIYVEAEQVEDDRLLRLSQKKFCAGGSYVGEDCPQWMVPITISTSEDPNQAKLKILMDKPEMNVVLKNVKPDQWVKLNLGTVGFYRTQYSSAMLESLLPGIRDLSLPPVDRLGLQNDLFSLARAGIISTVEVLKVMEAFVNEPNYTVWSDLSCNLGILSTLLSHTDFYEEIQEFVKDVFSPIGERLGWDPKPGEGHLDALLRGLVLGKLGKAGHKATLEEARRRFKDHVEGKQILSADLRSPVYLTVLKHGDGTTLDIMLKLHKQADMQEEKNRIERVLGATLLPDLIQKVLTFALSEEVRPQDTVSVIGGVAGGSKHGRKAAWKFIKDNWEELYNRYQGGFLISRLIKLSVEGFAVDKMAGEVKAFFESHPAPSAERTIQQCCENILLNAAWLKRDAESIHQYLLQRKASPPTV

SEQ ID NO: 801207 - protein, 473 aa, Homo sapiens; identical to SEQ ID NO: 801206

SEQ ID NO: 801208 - protein, 875 aa, Homo sapiens; identical to SEQ ID NO: 801201

SEQ ID NO: 801209 - protein, 106 aa, Homo sapiens
GFAVDKMAGEVKAAWKFIKDNWEELYNRYQGGFLISRLIKLSVEGFAVDKMAGEVKAFFESHPAPSAERTIQQCCENILLNAAWLKRDAESIHQYLLQRKASPPTV

SEQ ID NO: 801210 - protein, 637 aa, Homo sapiens
MPEKRPFERLPADVSPINYSLCLKPDLLDFTFEGKLEAAAQVRQATNQIVMNCADIDIITASYAPEGDEEIHATGFNYQNEDEKVTLSFPSTLQTGTGTLKIDFVGELNDKMKGFYRSKYTTPSGEVRYAAVTQFEATDARRAFPCWDEPAIKATFDISLVVPKDRVALSNMNVIDRKPYPDDENLVEVKFARTPVMSTYLVAFVVGEYDFVETRSKDGVCVRVYTPVGKAEQGKFALEVAAKTLPFYKDYFNVPYPLPKIDLIAIADFAAGAMENWGLVTYRETALLIDPKNSCSSSRQWVALVVGHELAHQWFGNLVTMEWWTHLWLNEGFASWIEYLCVDHCFPEYDIWTQFVSADYTRAQELDALDNSHPIEVSVGHPSEVDEIFDAISYSKGASVIRMLHDYIGDKDFKKGMNMYLTKFQQKNAATEDLWESLENASGKPIAAVMNTWTKQMGFPLIYVEAEQEDDRLSRKSQTEVHGGWAGANRWGEQWPQSRHGPTYYNNSQYIGREDRQQTGPQLKTHTTMRTPARRMTSGETLHQTWSKPRNIHGGRNDQQTYKRTDVRELSTPGNRKEQGIHGPMPRDYTSEQTPGPTPASTTHPPLAPPWRGMRTHGTSTRLMEHRPLPTENYDDC

SEQ ID NO: 801211 - protein, 434 aa, Homo sapiens
MPEKRPFERLPADVSPINYSLCLKPDLLDFTFEGKLEAAAQVRQATNQIVMNCADIDIITASYAPEGDEEIHATGFNYQNEDEKVTLSFPSTLQTGTGTLKIDFVGELNDKMKGFYRSKYTTPSGEVRYAAVTQFEATDARRAFPCWDEPAIKATFDISLVVPKDRVALSNMNVIDRKPYPDDENLVEVKFARTPVMSTYLVAFVVGEYDFVETRSKDGVCVRVYTPVGKAEQGKFALEVAAKTLPFYKDYFNVPYPLPKIDLIAIADFAAGAMENWGLVTYRETALLIDPKNSCSSSRQWVALVVGHELAHQWFGNLVTMEWWTHLWLNEGFASWIEYLCVDHCFPEYDIWTQFVSADYTRAQELDALDNSHPIEVSVGHPSEVDEIFDAISYSKGASVIRMLHDYIGDKDFKKGMNMYLTKFQQKNAATGNL

SEQ ID NO: 801212 - protein, 297 aa, Homo sapiens
MPEKRPFERLPADVSPINYSLCLKPDLLDFTFEGKLEAAAQVRQATNQIVMNCADIDIITASYAPEGDEEIHATGFNYQNEDEKVTLSFPSTLQTGTGTLKIDFVGELNDKMKGFYRSKYTTPSGEVRYAAVTQFEATDARRAFPCWDEPAIKATFDISLVVPKDRVALSNMNVIDRKPYPDDENLVEVKFARTPVMSTYLVAFVVGEYDFVETRSKDGVCVRVYTPVGKAEQGKFALEVAAKTLPFYKDYFNVPYPLPKIDLIAIADFAAGAMENWGLVTYRYVNDVLPCLIFSNH

SEQ ID NO: 801213 - protein, 108 aa, Homo sapiens
MNTWTKQMGFPLIYVEAEQVEDDRLLRLSQKKFCAGGSYVGEDCPQWMVPITISTSEDPNQAKLKILMDKPEMNVVLKNVKPDQWVKVSSESYLNRFLSLIHFMAGFK

SEQ ID NO: 801214 - protein, 875 aa, Homo sapiens; identical to SEQ ID NO: 801201

SEQ ID NO: 801215 - protein, 925 aa, Homo sapiens
SGRKSQGWDLMASFSMDCSPSFCVPGLWNPFIIFRSRSSRRRLHSLGLAAMPEKRPFERLPADVSPINYSLCLKPDLLDFTFEGKLEAAAQVRQATNQIVMNCADIDIITASYAPEGDEEIHATGFNYQNEDEKVTLSFPSTLQTGTGTLKIDFVGELNDKMKGFYRSKYTTPSGEVRYAAVTQFEATDARRAFPCWDEPAIKATFDISLVVPKDRVALSNMNVIDRKPYPDDENLVEVKFARTPVMSTYLVAFVVGEYDFVETRSKDGVCVRVYTPVGKAEQGKFALEVAAKTLPFYKDYFNVPYPLPKIDLIAIADFAAGAMENWGLVTYRETALLIDPKNSCSSSRQWVALVVGHELAHQWFGNLVTMEWWTHLWLNEGFASWIEYLCVDHCFPEYDIWTQFVSADYTRAQELDALDNSHPIEVSVGHPSEVDEIFDAISYSKGASVIRMLHDYIGDKDFKKGMNMYLTKFQQKNAATEDLWESLENASGKPIAAVMNTWTKQMGFPLIYVEAEQVEDDRLLRLSQKKFCAGGSYVGEDCPQWMVPITISTSEDPNQAKLKILMDKPEMNVVLKNVKPDQWVKLNLGTVGFYRTQYSSAMLESLLPGIRDLSLPPVDRLGLQNDLFSLARAGIISTVEVLKVMEAFVNEPNYTVWSDLSCNLGILSTLLSHTDFYEEIQEFVKDVFSPIGERLGWDPKPGEGHLDALLRGLVLGKLGKAGHKATLEEARRRFKDHVEGKQILSADLRSPVYLTVLKHGDGTTLDIMLKLHKQADMQEEKNRIERVLGATLLPDLIQKVLTFALSEEVRPQDTVSVIGGVAGGSKHGRKAAWKFIKDNWEELYNRYQGGFLISRLIKLSVEGFAVDKMAGEVKAFFESHPAPSAERTIQQCCENILLNAAWLKRDAESIHQYLLQRKASPPTV

SEQ ID NO: 801216 - protein, 669 aa, Homo sapiens
KREEKSARSRLGVNRPRRVTLLWQAEQGKFALEVAAKTLPFYKDYFNVPYPLPKIDLIAIADFAAGAMENWGLVTYRETALLIDPKNSCSSSRQWVALVVGHELAHQWFGNLVTMEWWTHLWLNEGFASWIEYLCVDHCFPEYDIWTQFVSADYTRAQELDALDNSHPIEVSVGHPSEVDEIFDAISYSKGASVIRMLHDYIGDKDFKKGMNMYLTKFQQKNAATEDLWESLENASGKPIAAVMNTWTKQMGFPLIYVEAEQVEDDRLLRLSQKKFCAGGSYVGEDCPQWMVPITISTSEDPNQAKLKILMDKPEMNVVLKNVKPDQWVKLNLGTVGFYRTQYSSAMLESLLPGIRDLSLPPVDRLGLQNDLFSLARAGIISTVEVLKVMEAFVNEPNYTVWSDLSCNLGILSTLLSHTDFYEEIQEFVKDVFSPIGERLGWDPKPGEGHLDALLRGLVLGKLGKAGHKATLEEARRRFKDHVEGKQILSADLRSPVYLTVLKHGDGTTLDIMLKLHKQADMQEEKNRIERVLGATLLPDLIQKVLTFALSEEVRPQDTVSVIGGVAGGSKHGRKAAWKFIKDNWEELYNRYQGGFLISRLIKLSVEGFAVDKMAGEVKAFFESHPAPSAERTIQQCCENILLNAAWLKRDAESIHQYLLQRKASPPTV

SEQ ID NO: 801217 - protein, 599 aa, Homo sapiens
LFSFHINEGKSICLVQVFITAAIGLPLAFSKLSQRSSVAAFFCWNEWWTHLWLNEGFASWIEYLCVDHCFPEYDIWTQFVSADYTRAQELDALDNSHPIEVSVGHPSEVDEIFDAISYSKGASVIRMLHDYIGDKDFKKGMNMYLTKFQQKNAATEDLWESLENASGKPIAAVMNTWTKQMGFPLIYVEAEQVEDDRLLRLSQKKFCAGGSYVGEDCPQWMVPITISTSEDPNQAKLKILMDKPEMNVVLKNVKPDQWVKLNLGTVGFYRTQYSSAMLESLLPGIRDLSLPPVDRLGLQNDLFSLARAGIISTVEVLKVMEAFVNEPNYTVWSDLSCNLGILSTLLSHTDFYEEIQEFVKDVFSPIGERLGWDPKPGEGHLDALLRGLVLGKLGKAGHKATLEEARRRFKDHVEGKQILSADLRSPVYLTVLKHGDGTTLDIMLKLHKQADMQEEKNRIERVLGATLLPDLIQKVLTFALSEEVRPQDTVSVIGGVAGGSKHGRKAAWKFIKDNWEELYNRYQGGFLISRLIKLSVEGFAVDKMAGEVKAFFESHPAPSAERTIQQCCENILLNAAWLKRDAESIHQYLLQRKASPPTV

SEQ ID NO: 801218 - protein, 473 aa, Homo sapiens; identical to SEQ ID NO: 801206

SEQ ID NO: 801219 - protein, 231 aa, Homo sapiens
SLMSLLLLKSGHLDALLRGLVLGKLGKAGHKATLEEARRRFKDHVEGKQILSADLRSPVYLTVLKHGDGTTLDIMLKLHKQADMQEEKNRIERVLGATLLPDLIQKVLTFALSEEVRPQDTVSVIGGVAGGSKHGRKAAWKFIKDNWEELYNRYQGGFLISRLIKLSVEGFAVDKMAGEVKAFFESHPAPSAERTIQQCCENILLNAAWLKRDAESIHQYLLQRKASPPTV

SEQ ID NO: 801220 - protein, 875 aa, Homo sapiens; identical to SEQ ID NO: 801201

SEQ ID NO: 801221 - protein, 875 aa, Homo sapiens; identical to SEQ ID NO: 801201

SEQ ID NO: 801222 - protein, 388 aa, Homo sapiens
MPEKRPFERLPADVSPINYSLCLKPDLLDFTFEGKLEAAAQVRQATNQIVMNCADIDIITASYAPEGDEEIHATGFNYQNEDEKVTLSFPSTLQTGTGTLKIDFVGELNDKMKGFYRSKYTTPSGEVRYAAVTQFEATDARRAFPCWDEPAIKATFDISLVVPKDRVALSNMNVIDRKPYPDDENLVEVKFARTPVMSTYLVAFVVGEYDFVETRSKDGVCVRVYTPVGKAEQGKFALEVAAKTLPFYKDYFNVPYPLPKIDLIAIADFAAGAMENWGLVTYRETALLIDPKNSCSSSRQWVALVVGHELAHQWFGNLVTMEWWTHLWLNEGFASWIEYLCVDHCFPEYDIWTQFVSADYTRAQELDALDNSHPIEVSVGHQSVETHM

SEQ ID NO: 801223 - protein, 1016 aa, Homo sapiens [sequence omitted]

SEQ ID NO: 801224 - protein, 1026 aa, Homo sapiens
MSEGKPPDKKRPRRSLSISKNKKKASNSIISCFNNAPPAKLACPVCSKMVPRYDLNRHLDEMCANNDFVQVDPGQVGLINSNVSMVDLTSVTLEDVTPKKSPPPKTNLTPGQSDSAKREVKQKISPYFKSNDVVCKNQDELRNRSVKVICLGSLASKLSRKYVKAKKSIDKDEEFAGSSPQSSKSTVVKSLIDNSSEIEDEDQILENSSQKENVFKCDSLKEECIPEHMVRGSKIMEAESQKATRECEKSALTPGFSDNAIMLFSPDFTLRNTLKSTSEDSLVKQECIKEVVEKREACHCEEVKMTVASEAKIQLSDSEAKSHSSADDASAWSNIQEAPLQDDSCLNNDIPHSIPLEQGSSCNGPGQTTGHPYYLRSFLVVLKTVLENEDDMLLFDEQEKGIVTKFYQLSATGQKLYVRLFQRKLSWIKMTKLEYEEIALDLTPVIEELTNAGFLQTESELQELSEVLELLSAPELKSLAKTFHLVNPNGQKQQLVDAFLKLAKQRSVCTWGKNKPGIGAVILKRAKALAGQSVRICKGPRAVFSRILLLFSLTDSMEDEDAACGGQGQLSTVLLVNLGRMEFPSYTINRKTHIFQDRDDLIRYAAATHMLSDISSAMANGNWEEAKELAQCAKRDWNRLKNHPSLRCHEDLPLFLRCFTVGWIYTRILSRFVEILQRLHMYEEAVRELESLLSQRIYCPDSRGRWWDRLALNLHQHLKRLEPEPDVDHALCQTIKCITEGLADPEVRTGHRLSLYQRAVRLRESPSCKKFKHLFQQLPEMAVQDVKHVTITGRLCPQRGMCKSVFVMEAGEAADPTTVLCSVEELALAHYRRSGFDQGIHGEGSTFSTLYGLLLWDIIFMDGIPDVFRNACQAFPLDLCTDSFFTSRRPALEARLQLIHDAPEESLRAWVAATWHEQEGRVASLVSWDRFTSLQQAQDLVSCLGGPVLSGVCRHLAADFRHCRGGLPDLVVWNSQSRHFKLVEVKGPNDRLSHKQMIWLAELQKLGAEVEVCHVVAVGAKSQSLS

SEQ ID NO: 801225 - protein, 632 aa, Homo sapiens
MPEVLGSQGWLQASSAATGQKLYVRLFQRKLSWIKMTKLEYEEIALDLTPVIEELTNAGFLQTESELQELSEVLELLSAPELKSLAKTFHLVNPNGQKQQLVDAFLKLAKQRSVCTWGKNKPGIGAVILKRAKALAGQSVRICKGPRAVFSRILLLFSLTDSMEDEDAACGGQGQLSTVLLVNLGRMEFPSYTINRKTHIFQDRDDLIRYAAATHMLSDISSAMANGNWEEAKELAQCAKRDWNRLKNHPSLRCHEDLPLFLRCFTVGWIYTRILSRFVEILQRLHMYEEAVRELESLLSQRIYCPDSRGRWWDRLALNLHQHLKRLEPEPDVDHALCQTIKCITEGLADPEVRTGHRLSLYQRAVRLRESPSCKKFKHLFQQLPEMAVQDVKHVTITGRLCPQRGMCKSVFVMEAGEAADPTTVLCSVEELALAHYRRSGFDQGIHGEGSTFSTLYGLLLWDIIFMDGIPDVFRNACQAFPLDLCTDSFFTSRRPALEARLQLIHDAPEESLRAWVAATWHEQEGRVASLVSWDRFTSLQQAQDLVSCLGGPVLSGVCRHLAADFRHCRGGLPDLVVWNSQSRHFKLVEVKGPNDRLSHKQMIWLAELQKLGAEVEVCHVVAVGAKSQSLS

SEQ ID NO: 801226 - protein, 532 aa, Homo sapiens
MSEGKPPDKKRPRRSLSISKNKKKASNSIISCFNNAPPAKLACPVCSKMVPRYDLNRHLDEMCANNDFVQVDPGQVGLINSNVSMVDLTSVTLEDVTPKKSPPPKTNLTPGQSDSAKREVKQKISPYFKSNDVVCKNQDELRNRSVKVICLGSLASKLSRKYVKAKKSIDKDEEFAGSSPQSSKSTVVKSLIDNSSEIEDEDQILENSSQKENVFKCDSLKEECIPEHMVRGSKIMEAESQKATRECEKSALTPGFSDNAIMLFSPDFTLRNTLKSTSEDSLVKQECIKEVVEKREACHCEEVKMTVASEAKIQLSDSEAKSHSSADDASAWSNIQEAPLQDDSCLNNDIPHSIPLEQGSSCNGPGQTTGHPYYLRSFLVVLKTVLENEDDMLLFDEQEKGIVTKFYQLSATGQKLYVRLFQRKLSWIKMTKLEYEEIALDLTPVIEELTNAGFLQTESELQELSEVLELLSAPELKSLAKTFHLVNPNGQKQQLVDAFLKLAKQRSVCTWGKNKPGIGAVILKRFCWLLLQ

SEQ ID NO: 801227 - protein, 1026 aa, Homo sapiens
MSEGKPPDKKRPRRSLSISKNKKKASNSIISCFNNAPPAKLACPVCSKMVPRYDLNRHLDEMCANNDFVQVDPGQVGLINSNVSMVDLTSVTLEDVTPKKSPPPKTNLTPGQSDSAKREVKQKISPYFKSNDVVCKNQDELRNRSVKVICLGSLASKLSRKYVKAKKSIDKDEEFAGSSPQSSKSTVVKSLIDNSSEIEDEDQILENSSQKENVFKCDSLKEECIPEHMVRGSKIMEAESQKATRECEKSALTPGFSDNAIMLFSPDFTLRNTLKSTSEDSLVKQECIKEVVEKREACHCEEVKMTVASEAKIQLSDSEAKSHSSADDASAWSNIQEAPLQDDSCLNNDIPHSIPLEQGSSCNGPGQTTGHPYYLRSFLVVLKTVLENEDDMLLFDEQEKGIVTKFYQLSATGQKLYVRLFQRKLSWIKMTKLEYEEIALDLTPVIEELTNAGFLQTESELQELSEVLELLSAPELKSLAKTFHLVNPNGQKQQLVDAFLKLAKQRSVCTWGKNKPGIGAVILKRAKALAGQSVRICKGPRAVFSRILLLFSLTDSMEDEDAACGGQGQLSTVLLVNLGRMEFPSYTINRKTHIFQDRDDLIRYAAATHMLSDISSAMANGNWEEAKELAQCAKRDWNRLKNHPSLRCHEDLPLFLRCFTVGWIYTRILSRFVEILQRLHMYEEAVRELESLLSQRIYCPDSRGRWWDRLALNLHQHLKRLEPELMCDHALCQTIKCITEGLADPEVRTGHRLSLYQRAVRLRESPSCKKFKHLFQQLPEMAVQDVKHVTITGRLCPQRGMCKSVFVMEAGEAADPTTVLCSVEELALAHYRRSGFDQGIHGEGSTFSTLYGLLLWDIIFMDGIPDVFRNACQAFPLDLCTDSFFTSRRPALEARLQLIHDAPEESLRAWVAATWHEQEGRVASLVSWDRFTSLQQAQDLVSCLGGPVLSGVCRHLAADFRHCRGGLPDLVVWNSQSRHFKLVEVKGPNDRLSHKQMIWLAELQKLGAEVEVCHVVAVGAKSQSLS

SEQ ID NO: 801228 - protein, 652 aa, Homo sapiens
YDEAHDGASQEEEIVETNNMRSYRIPLLVISSQESKTTGQKLYVRLFQRKLSWIKMTKLEYEEIALDLTPVIEELTNAGFLQTESELQELSEVLELLSAPELKSLAKTFHLVNPNGQKQQLVDAFLKLAKQRSVCTWGKNKPGIGAVILKRAKALAGQSVRICKGPRAVFSRILLLFSLTDSMEDEDAACGGQGQLSTVLLVNLGRMEFPSYTINRKTHIFQDRDDLIRYAAATHMLSDISSAMANGNWEEAKELAQCAKRDWNRLKNHPSLRCHEDLPLFLRCFTVGWIYTRILSRFVEILQRLHMYEEAVRELESLLSQRIYCPDSRGRWWDRLALNLHQHLKRLEPEPDVDHALCQTIKCITEGLADPEVRTGHRLSLYQRAVRLRESPSCKKFKHLFQQLPEMAVQDVKHVTITGRLCPQRGMCKSVFVMEAGEAADPTTVLCSVEELALAHYRRSGFDQGIHGEGSTFSTLYGLLLWDIIFMDGIPDVFRNACQAFPLDLCTDSFFTSRRPALEARLQLIHDAPEESLRAWVAATWHEQEGRVASLVSWDRFTSLQQAQDLVSCLGGPVLSGVCRHLAADFRHCRGGLPDLVVWNSQSRHFKLVEVKGPNDRLSHKQMIWLAELQKLGAEVEVCHVVAVGAKSQSLS

SEQ ID NO: 801229 - protein, 937 aa, Homo sapiens
MSEGKPPDKKRPRRSLSISKNKKKASNSIISCFNNAPPAKLACPVCSKMVPRYDLNRHLDEMCANNDFVQVDPGQVGLINSNVSMVDLTSVTLEDVTPKKSPPPKTNLTPGQSDSAKREVKQKISPYFKSNDVVCKNQDELRNRSVKVICLGSLASKLSRKYVKAKKSIDKDEEFAGSSPQSSKSTVVKSLIDNSSEIEDEDQILENSSQKENVFKCDSLKEECIPEHMVRGSKIMEAESQKATRECEKSALTPGFSDNAIMLFSPDFTLRNTLKSTSEDSLVKQECIKEVVEKREACHCEEVKMTVASEAKIQLSDSEAKSHSSADDASAWSNIQEAPLQDDSCLNNDIPHSIPLEQGSSCNGPGQTTGHPYYLRSFLVVLKTVLENEDDMLLFDEQEKGIVTKFYQLSATGQKLYVRLFQRKLSWIKMTKLEYEEIALDLTPVIEELTNAGFLQTESELQELSEVLELLSAPELKSLAKTFHLVNPNGQKQQLVDAFLKLAKQRSVCTWGKNKPGIGAVILKRAKALAGQSVRICKGPRAVFSRILLLFSLTDSMEDEDAACGGQGQLSTVLLVNLGRMEFPSYTINRKTHIFQDRDDLIRYAAATHMLSDISSAMANGNWEEAKELAQCAKRDWNRLKNHPSLRCHEDLPLFLRCFTVGWIYTRILSRFVEILQRLHMYEEAVRELESLLSQRIYCPDSRGRWWDRLALNLHQHLKRLEPEPDVDHALCQTIKCITEGLADPEVRTGHRLSLYQRAVRLRESPSCKKFKHLFQQLPEMAVQDVKHVTITGRLCPQRGMCKSVFVMEAGEAADPTTVLCSVEELALAHYRRSGFDQGIHGEGSTFSTLYGLLLWDIIFMDGIPDVFRNACQAFPLDLCTDSFFTSRRPALEARLQLIHDAPEESLRAWVAATWHEQEGRVASLVIGIQSFELKRE

SEQ ID NO: 801230 - protein, 296 aa, Homo sapiens
MALTSDLGKQIKLKEVEGTLLQPATVDNWSQIQSFEAKPDDLLICTYPKAGTTWIQEIVDMIEQNGDVEKCQRAIIQHRHPFIEWARPPQPSGVEKAKAMPSPRILKTHLSTQLLPPSFWENNCKFLYVARNAKDCMVSYYHFQRMNHMLPDPGTWEEYFETFINGKVVWGSWFDHVKGWWEMKDRHQILFLFYEDIKRDPKHEIRKVMQFMGKKVDETVLDKIVQETSFEKMKENPMTNRSTVSKSILDQSISSFMRKGTVGDWKNHFTVAQNERFDEIYRRKMEGTSINFCMEL

SEQ ID NO: 801231 - protein, 111 aa, Homo sapiens
GPHVVLVLRRCFLLSYFKGVEKAKAMPSPRILKTHLSTQLLPPSFWENNCKVRYQQLPVTEGKVSQPKRVLQTPTQSIRDHLCLSTVSDAYQQRENIKFYIQQDIHLNSFK

SEQ ID NO: 801232 - protein, 296 aa, Homo sapiens; identical to SEQ ID NO: 801230

SEQ ID NO: 801233 - protein, 291 aa, Homo sapiens
MLGKQIKLKEVEGTLLQPATVDNWSQIQSFEAKPDDLLICTYPKAGTTWIQEIVDMIEQNGDVEKCQRAIIQHRHPFIEWARPPQPSGVEKAKAMPSPRILKTHLSTQLLPPSFWENNCKFLYVARNAKDCMVSYYHFQRMNHMLPDPGTWEEYFETFINGKVVWGSWFDHVKGWWEMKDRHQILFLFYEDIKRDPKHEIRKVMQFMGKKVDETVLDKIVQETSFEKMKENPMTNRSTVSKSILDQSISSFMRKGTVGDWKNHFTVAQNERFDEIYRRKMEGTSINFCMEL

SEQ ID NO: 801234 - protein, 144 aa, Homo sapiens
MALTSDLGKQIKLKEVEGTLLQPATVDNWSQIQSFEAKPDDLLICTYPKAGTTWIQEIVDMIEQNGDVEKCQRAIIQHRHPFIEWARPPQPSETGFHHVAQAGLKLLSSSNPPASTSQSAKITDVSHCPWSSLHILNIVIYILY

SEQ ID NO: 801235 - protein, 296 aa, Homo sapiens; identical to SEQ ID NO: 801230

SEQ ID NO: 801236 - protein, 307 aa, Homo sapiens
MALTSDLGKQIKLKEVEGTLLQPATVDNWSQIQSFEAKPDDLLICTYPKAGTTWIQEIVDMIEQNGDVEKCQRAIIQHRHPFIEWARPPQPSETGFHHVAQAGLKLLSSSNPPASTSQSAKITDLLPPSFWENNCKFLYVARNAKDCMVSYYHFQRMNHMLPDPGTWEEYFETFINGKVVWGSWFDHVKGWWEMKDRHQILFLFYEDIKRDPKHEIRKVMQFMGKKVDETVLDKIVQETSFEKMKENPMTNRSTVSKSILDQSISSFMRKGTVGDWKNHFTVAQNERFDEIYRRKMEGTSINFCMEL

SEQ ID NO: 801237 - protein, 296 aa, Homo sapiens; identical to SEQ ID NO: 801230

SEQ ID NO: 801238 - protein, 160 aa, Homo sapiens [sequence omitted]

SEQ ID NO: 801239 - protein, 641 aa, Homo sapiens
MNWAAFGGSEFFIPEGIQIDSRCPLSRNITEWYHYYGIAVKESSQYYDVMYSKKGAAWVSETGKKEVSKQTVAYSPRSKLGTLLPEFPNVKDLNLPASLPEEKVSTFIMMYRTHCQRILDTVIRANFDEVQSFLLHFWQGMPPHMLPVLGSSTVVNIVGVCDSILYKAISGVLMPTVLQALPDSLTQVIRKFAKQLDEWLKVALHDLPENLRNIKFELSRRFSQILRRQTSLNHLCQASRTVIHSADITFQMLEDWRNVDLNSITKQTLYTMEDSRDEHRKLITQLYQEFDHLLEEQSPIESYIEWLDTMVDRCVVKVAAKRQGSLKKVAQQFLLMWSCFGTRVIRDMTLHSAPSFGSFHLIHLMFDDYVLYLLESLHCQERANELMRAMKGEGSTAEVREEIILTEAAAPTPSPVPSFSPAKSATSVEVPPPSSPVSNPSPEYTGLSTTGAMQAYTWSLTYTVTTAAGSPAENSQQLPCMRNTHVPSSSVTHRIPVYPHREEHGYTGSYNYGSYGNQHPHPMQSQYPALPHDTAISGPLHYAPYHRSSAQYPFNSPTSRMEPCLMSSTPRLHPTPVTPRWPEVPSANTCYTSPSVHSARYGNSSDMYTPLTTRRNSEYEHMQHFPGFAYINGEASTGWAK

SEQ ID NO: 801240 - protein, 336 aa, Homo sapiens
MTMTLHTKASGMALLHQIQGNELEPLNRPQLKIPLERPLGEVYLDSSKPAVYNYPEGAAYEFNAAAAANAQVYGQTGLPYGPGSEAAAFGSNGLGGFPPLNSVSPSPLMLLHPPPQLSPFLQPHGQQVPYYLENEPSGYTVREAGPPAFYRPNSDNRRQGGRERLASTNDKGSMAMESAKETRYCAVCNDYASGYHYGVWSCEGCKAFFKRSIQGHNDYMCPATNQCTIDKNRRKSCQACRLRKCYEVGMMKGDEEKENNRASKPHSTPATLQWLEENYEIAEGVCIPRSALYMHYLDFCEKNDTQPVNAASFGKIIRQQFPQLTTRRLGTRGQSK

SEQ ID NO: 801241 - protein, 557 aa, Homo sapiens
MNWAAFGGSEFFIPEGIQIDSRCPLSRNITEWYHYYGIAVKESSQYYDVMYSKKGAAWVSETGKKEVSKQTVAYSPRSKLGTLLPEFPNVKDLNLPASLPEEKVSTFIMMYRTHCQRILDTVIRANFDEVQSFLLHFWQGMPPHMLPVLGSSTVVNIVGVCDSILYKAISGVLMPTVLQALPDSLTQVIRKFAKQLDEWLKVALHDLPENLRNIKFELSRRFSQILRRQTSLNHLCQASRTVIHSADITFQMLEDWRNVDLNSITKQTLYTMEDSRDEHRKLITQLYQEFDHLLEEQSPIESYIEWLDTMVDRCVVKVAAKRQGSLKKVAQQFLLMWSCFGTRVIRDMTLHSAPSFGSFHLIHLMFDDYVLYLLESLHCQERANELMRAMKGEGSTAEVREEIILTEAAAPTPSPVPSFSPAKSATSVEVPPPSSPVSNPSPEYTGLSTTGAMQAYTWSLTYTVTTAAGSPAENSQQLPCMRNTHVPSSSVTHRIPVYPHREEHGYTGSYNYGSYGNQHPHPMQSQYPALPHDTAISGPLHYAPYHRSSAQVKKWRL

SEQ ID NO: 801242 - protein, 107 aa, Homo sapiens
CNLKLILTLWNFFPLNKYPFNSPTSRMEPCLMSSTPRLHPTPVTPRWPEVPSANTCYTSPSVHSARYGNSSDMYTPLTTRRNSEYEHMQHFPGFAYINGEASTGWAK

SEQ ID NO: 801243 - protein, 563 aa, Homo sapiens
MIKRRAHPGAGGDRTRPRRRRSTESWIERCLNESENKRYSSHTSLGNVSNDENEEKENNRASKPHSTPATLQWLEENYEIAEGVCIPRSALYMHYLDFCEKNDTQPVNAASFGKIIRQQFPQLTTRRLGTRGQSKYHYYGIAVKESSQYYDVMYSKKGAAWVSETGKKEVSKQTVAYSPRSKLGTLLPEFPNVKDLNLPASLPEEKVSTFIMMYRTHCQRILDTVIRANFDEVQSFLLHFWQGMPPHMLPVLGSSTVVNIVGVCDSILYKAISGVLMPTVLQALPDSLTQVIRKFAKQLDEWLKVALHDLPENLRNIKFELSRRFSQILRRQTSLNHLCQASRTVIHSADITFQMLEDWRNVDLNSITKQTLYTMEDSRDEHRKLITQLYQEFDHLLEEQSPIESYIEWLDTMVDRCVVKVAAKRQGSLKKVAQQFLLMWSCFGTRVIRDMTLHSAPSFGSFHLIHLMFDDYVLYLLESLHCQERANELMRAMKGEGSTAEVREEIILTEAAAPTPSPVPSFSPAKSATSVEVPPPSSPVSNPSPEYTGLSTTGNGKSFKNFG

SEQ ID NO: 801244 - protein, 671 aa, Homo sapiens
SGEKPFRAEASSSARPYGLRAEFSDNHTGKMNWAAFGGSEFFIPEGIQIDSRCPLSRNITEWYHYYGIAVKESSQYYDVMYSKKGAAWVSETGKKEVSKQTVAYSPRSKLGTLLPEFPNVKDLNLPASLPEEKVSTFIMMYRTHCQRILDTVIRANFDEVQSFLLHFWQGMPPHMLPVLGSSTVVNIVGVCDSILYKAISGVLMPTVLQALPDSLTQVIRKFAKQLDEWLKVALHDLPENLRNIKFELSRRFSQILRRQTSLNHLCQASRTVIHSADITFQMLEDWRNVDLNSITKQTLYTMEDSRDEHRKLITQLYQEFDHLLEEQSPIESYIEWLDTMVDRCVVKVAAKRQGSLKKVAQQFLLMWSCFGTRVIRDMTLHSAPSFGSFHLIHLMFDDYVLYLLESLHCQERANELMRAMKGEGSTAEVREEIILTEAAAPTPSPVPSFSPAKSATSVEVPPPSSPVSNPSPEYTGLSTTGAMQAYTWSLTYTVTTAAGSPAENSQQLPCMRNTHVPSSSVTHRIPVYPHREEHGYTGSYNYGSYGNQHPHPMQSQYPALPHDTAISGPLHYAPYHRSSAQYPFNSPTSRMEPCLMSSTPRLHPTPVTPRWPEVPSANTCYTSPSVHSARYGNSSDMYTPLTTRRNSEYEHMQHFPGFAYINGEASTGWAK

SEQ ID NO: 801245 - protein, 598 aa, Homo sapiens
MPTKQKYHGMKGAAWVSETGKKEVSKQTVAYSPRSKLGTLLPEFPNVKDLNLPASLPEEKVSTFIMMYRTHCQRILDTVIRANFDEVQSFLLHFWQGMPPHMLPVLGSSTVVNIVGVCDSILYKAISGVLMPTVLQALPDSLTQVIRKFAKQLDEWLKVALHDLPENLRNIKFELSRRFSQILRRQTSLNHLCQASRTVIHSADITFQMLEDWRNVDLNSITKQTLYTMEDSRDEHRKLITQLYQEFDHLLEEQSPIESYIEWLDTMVDRCVVKVAAKRQGSLKKVAQQFLLMWSCFGTRVIRDMTLHSAPSFGSFHLIHLMFDDYVLYLLESLHCQERANELMRAMKGEGSTAEVREEIILTEAAAPTPSPVPSFSPAKSATSVEVPPPSSPVSNPSPEYTGLSTTGAMQAYTWSLTYTVTTAAGSPAENSQQLPCMRNTHVPSSSVTHRIPVYPHREEHGYTGSYNYGSYGNQHPHPMQSQYPALPHDTAISGPLHYAPYHRSSAQYPFNSPTSRMEPCLMSSTPRLHPTPVTPRWPEVPSANTCYTSPSVHSARYGNSSDMYTPLTTRRNSEYEHMQHFPGFAYINGEASTGWAK

SEQ ID NO: 801246 - protein, 213 aa, Homo sapiens
SDAWVSFNMAEASSANLGSGCEEKRHEGSSSESVPPGTTISRVKLLDTMVDTFLQKLVAAGSYQRFTDCYKCFYQLQPAMTQQIYDKFIAQLQTSIREEISDIKEEGNLEAVLNALDKIVEEGKVRKEPAWRPSGIPEKDLHSVMAPYFLQQRDTLRRHVQKQEAENQQLADAVLAGRRQVEELQLQVQAQQQAWQALHREQRELVAVLREPE

SEQ ID NO: 801247 - protein, 213 aa, Homo sapiens; identical to SEQ ID NO: 801246

SEQ ID NO: 801248 - protein, 183 aa, Homo sapiens
SDAWVSFNMAEASSANLGSGCEEKRHEGSSSESVPPGTTISRVKLLDTMVDTFLQKLVAAGSYQRFTDCYKCFYQLQPAMTQQIYDKFIAQLQTSIREEISDIKEEGNLEAVLNALDKIVEEGKVRKEPAWCEAQRCRVQQRCSLCVQAGGQRGSEETQALPVSMAGSPSPLPGSPGAQEGGV

SEQ ID NO: 801249 - protein, 78 aa, Homo sapiens
MAGLMLGPPHLCFSPSRHYQRFTDCYKCFYQLQPAMTQQIYDKFIAQLQTSIREEISDIKEEGNLEAVLRPRVLWSAR

SEQ ID NO: 801250 - protein, 213 aa, Homo sapiens; identical to SEQ ID NO: 801246

SEQ ID NO: 801251 - protein, 177 aa, Homo sapiens
WTRPITLRDQRRMGWDTFLQKLVAAGYQRFTDCYKCFYQLQPAMTQQIYDKFIAQLQTSIREEISDIKEEGNLEAVLNALDKIVEEGKVRKEPAWRPSGIPEKDLHSVMAPYFLQQRDTLRRHVQKQEAENQQLADAVLAGRRQVEELQLQVQAQQQAWQALHREQRELVAVLREPE

SEQ ID NO: 801252 - protein, 215 aa, Homo sapiens
SDAWVSFNMAEASSANLGSGCEEKRHEGSSSESVPPGTTISRVKLLDTMVDTFLQKLVAAGSSPLLHWDGSAGPRLPSGGQSVKQAFSWAACRLPQGRKEEISDIKEEGNLEAVLNALDKIVEEGKVRKEPAWRPSGIPEKDLHSVMAPYFLQQRDTLRRHVQKQEAENQQLADAVLAGRRQVEELQLQVQAQQQAWQALHREQRELVAVLREPE

SEQ ID NO: 801253 - protein, 208 aa, Homo sapiens
KVRQVACDPIIAPREIFRAQLTGSGGQHTGTTISRVKLLDTMVDTFLQKLVAAGSSPLLHWDGSAGPRLPSGGQSVKQAFSWAACRLPQGRKEEISDIKEEGNLEAVLNALDKIVEEGKVRKEPAWRPSGIPEKDLHSVMAPYFLQQRDTLRRHVQKQEAENQQLADAVLAGRRQVEELQLQVQAQQQAWQALHREQRELVAVLREPE

SEQ ID NO: 801254 - protein, 69 aa, Homo sapiens
SSCSSLCLSCARGTIGATRPGQHELRPAPPGAGGKHMGELQLQVQAQQQAWQALHREQRELVAVLREPE

SEQ ID NO: 801255 - protein, 223 aa, Homo sapiens
SDAWVSFNMAEASSANLGSGCEEKRHEGSSSESVPPGTTISRVKLLDTMVDTFLQKLVAAGSYQRFTDCYKCFYQLQPAMTQQIYDKFIAQLQTSIREEISDIKEEGNLEAVLNALDKIVEEGKVRKEPAWRPSGIPEKDLHSVMAPYFLQQRDTLRRHVQKQEAENQQLADAVLAGRRQVEELQLQVQAQQQAWQALHREQREWFPSPFPWPWLGESVFNLH

SEQ ID NO: 801256 - protein, 188 aa, Homo sapiens
SDAWVSFNMAEASSANLGSGCEEKRHEGSSSESVPPGTTISRVKLLDTMVDTFLQKLVAAGSYQRFTDCYKCFYQLQPAMTQQIYDKFIAQLQTSIREEISDIKEEGNLEAVLNALDKIVEEGKVRKEPACNGTPCGAMCRNRRPRTSSWQMPSWQGGGRWRSCSYRSRPSSRPGRLYTENRGSWLLC

SEQ ID NO: 801257 - protein, 91 aa, Homo sapiens [sequence omitted]

SEQ ID NO: 801258 - protein, 123 aa, Homo sapiens
EGWAFCTGADATTSGVSEPQSPTRIPWSPGGRCVSSIRTVTSWLTTSAFRRPIGASTARSRVSLCWPGRQPQFCSSPGTLLSSSPCPCPDLPALWMWGPHHPSCSQINSRRGKKNKDTKPNQD

SEQ ID NO: 801259 - protein, 213 aa, Homo sapiens; identical to SEQ ID NO: 801246

SEQ ID NO: 801260 - protein, 213 aa, Homo sapiens; identical to SEQ ID NO: 801246

SEQ ID NO: 801261 - protein, 187 aa, Homo sapiens
WTRPITLRDQRRMGWDTFLQKLVAAGYQRFTDCYKCFYQLQPAMTQQIYDKFIAQLQTSIREEISDIKEEGNLEAVLNALDKIVEEGKVRKEPAWRPSGIPEKDLHSVMAPYFLQQRDTLRRHVQKQEAENQQLADAVLAGRRQVEELQLQVQAQQQAWQALHREQREWFPSPFPWPWLGESVFNLH

SEQ ID NO: 801262 - protein, 134 aa, Homo sapiens
MTQQIYDKFIAQLQTSIREEISDIKEEGNLEAVLNALDKIVEEGKVRKEPAWRPSGIPEKDLHSVMAPYFLQQRDTLRRHVQKQEAENQQLADAVLAGRRQVEELQLQVQAQQQAWQALHREQRELVAVLREPE

SEQ ID NO: 801263 - protein, 169 aa, Homo sapiens
MAGLMLGPPHLCFSPSRHYQRFTDCYKCFYQLQPAMTQQIYDKFIAQLQTSIREEISDIKEEGNLEAVLNALDKIVEEGKVRKEPAWRPSGIPEKDLHSVMAPYFLQQRDTLRRHVQKQEAENQQLADAVLAGRRQVEELQLQVQAQQQAWQALHREQRELVAVLREPE

SEQ ID NO: 801264 - protein, 134 aa, Homo sapiens; identical to SEQ ID NO: 801262

SEQ ID NO: 801265 - protein, 219 aa, Homo sapiens
SDAWVSFNMAEASSANLGSGCEEKRHEGSSSESVPPGTTISRVKLLDTMVDTFLQKLVAAGSYQRFTDCYKCFYQLQPAMTQQIYDKFIAQLQTSIREEISDIKEEGNLEAVLNALDKIVEEGKVRKEPAWRPSGIPEKDLHSVMAPYFLQQRDTLRRHVQKQEAENQQLADAVLAGRRQVEELQLQVQAQQQAWQVRSPAVQSPAKVQPLCPSRRAAR

SEQ ID NO: 801266 - protein, 106 aa, Homo sapiens
RSHRDTMRALTLLALLALAALCIAGQAGAKPSGAESSKGAAFVSKQEGSEVVKRPRRYLYQWLGAPVPYPDPLEPRREVCELNPDCDELADHIGFQEAYRRFYGPV

SEQ ID NO: 801267 - protein, 131 aa, Homo sapiens
MATSTSWVQEEISDIKEEGNLEAVLNALDKIVEEGKVRKEPAWRPSGIPEKDLHSVMAPYFLQQRDTLRRHVQKQEAENQQLADAVLAGRRQVEELQLQVQAQQQAWQVRSPAVQSPAKVQPLCPSRRAAR

SEQ ID NO: 801268 - protein, 103 aa, Homo sapiens
VGLEAEPSSTRAFRLLHSLCPVWPSRRPSGIPEKDLHSVMAPYFLQQRDTLRRHVQKQEAENQQLADAVLAGRRQVEELQLQVQAQQQAWQVSVPACLFLFLL

SEQ ID NO: 801269 - protein, 72 aa, Homo sapiens
LEYKIYINVVKIIENNYFILNSGDGIDYSQQKRENIGDLIQETLEAFERYGGENAFINIKYVVPTYESCLLN

SEQ ID NO: 801270 - protein, 132 aa, Homo sapiens
IACFKCDSVEIEKLDYHHYLPLFFDGLCEMTFPYEFFARQGIHDMLEHGGNKILPVLPQLIIPIKNALNLRNRQVICVTLKVLQHLVVSAEMVGKALVPYYRQILPVLNIFKNMNDLPGCACPEGRIILSCL

SEQ ID NO: 801271 - protein, 257 aa, Homo sapiens
MVAEKETLSLNKCPDKMPKRTKLLAQQPLPVHQPHSLVSEGFTVKAMMKNSVVRGPPAAGAFKERPTKPTAFRKFYERGDFPIALEHDSKGNKIAWKVEIEKLDYHHYLPLFFDGLCEMTFPYEFFARQGIHDMLEHGGNKILPVLPQLIIPIKNALNLRNRQVICVTLKVLQHLVVSAEMVGKALVPYYRQILPVLNIFKNMNVNSGDGIDYSQQKRENIGDLIQETLEAFERYGGENAFINIKYVVPTYESCLLN

SEQ ID NO: 801272 - protein, 209 aa, Homo sapiens
MVAEKETLSLNKCPDKMPKRTKLLAQQPLPVHQPHSLVSEGFTVKAMMKNSVVRGPPAAGAFKERPTKPTAFRKFYERGDFPIALEHDSKGNKIAWKVEIEKLDYHHYLPLFFDGLCEMTFPYEFFARQGIHDMLEHGGNKILPVLPQLIIPIKNALNLRNRQVICVTLKVLQHLVVSAEMVGKALVPYYRQILPVLNIFKNMNGWAPP

SEQ ID NO: 801273 - protein, 112 aa, Homo sapiens
SHPPPHPPPHIFPFPPPFTSGENSLPRLECSGAIMARCNLDHLGSSDPPTSASQVAEIIVNSGDGIDYSQQKRENIGDLIQETLEAFERYGGENAFINIKYVVPTYESCLLN

SEQ ID NO: 801274 - protein, 76 aa, Homo sapiens
LDCVGLFGKLQRSNWPLCVFACTMNSGDGIDYSQQKRENIGDLIQETLEAFERYGGENAFINIKYVVPTYESCLLN

SEQ ID NO: 801275 - protein, 110 aa, Homo sapiens
MVAEKETLSLNKCPDKMPKRTKLLAQQPLPVHQPHSLVSEGFTVKAMMKNSVVRGPPAAGAFKERPTKPTAFRKFYERGDFPIALEHDSKGNKIAWKVSQGTAVPASCTR

SEQ ID NO: 801276 - protein, 257 aa, Homo sapiens; identical to SEQ ID NO: 801271

SEQ ID NO: 801277 - protein, 269 aa, Homo sapiens
MVAEKETLSLNKCPDKMPKRTKLLAQQPLPVHQPHSLVSEGFTVKAMMKNSVVRGPPAAGAFKERPTKPTAFRKFYERGDFPIALEHDSKGNKIAWKVEIEKLDYHHYLPLFFDGLCEMTFPYEFFARQGIHDMLEHGGNKILPVLPQLIIPIKNALNLRNRQVICVTLKVLQHLVVSAEMVGKALVPYYRQILPVLNIFKNMNVTHRQRSELSSMLAKWGGPDLLLVFLPFSTIIVCKSLIFILSQFMLPRLNSATNNMNVTHFIICN

SEQ ID NO: 801278 - protein, 299 aa, Homo sapiens
MPKRTKLLAQQPLPVHQPHSLVSEGFTVKAMMKNSVVRGPPAAGAFKERPTKPTAFRKFYERGDFPIALEHDSKGNKIAWKILGMKNYKTTSPWPLSNRLKLLTDGSESCLPMNSRIMLEIGKINVKVEIEKLDYHHYLPLFFDGLCEMTFPYEFFARQGIHDMLEHGGNKILPVLPQLIIPIKNALNLRNRQVICVTLKVLQHLVVSAEMVGKALVPYYRQILPVLNIFKNMNVTHRQRSELSSMLAKWGGPDLLLVFLPFSTIIVCKSLIFILSQFMLPRLNSATNNMNVTHFIICN

SEQ ID NO: 801279 - protein, 80 aa, Homo sapiens
SKGHGGAERDARPLLLLRVQDLLLICWTLISLQPSEAAAALLSFRGCHHQKRRLPAAHQLGSSQAVVSTRMSDLEWRWGD

SEQ ID NO: 801280 - protein, 69 aa, Homo sapiens
AARITVVLAAPGRGHLQPASHLLEVQSNNVSKWGVRVEDGLQHCLIIWSPHGAQLQNPKRKDPGHGWET

SEQ ID NO: 801281 - protein, 67 aa, Homo sapiens
REASRPAYVQSYTPDQMPTFFSFFLFCFLSEVQSNNVSKWGVRVEDGLQHCLIIWSPHGAQLQNPKR

SEQ ID NO: 801282 - protein, 67 aa, Homo sapiens
AARITVVLAAPGRGHLQPASHLLEKRPRPWMGDLGQRWKRVLGTRQLLNEEHNCIMENPQHPQTVNT

SEQ ID NO: 801283 - protein, 77 aa, Homo sapiens
GRGSPPPGWSPARAEYPRVPFSPGAGRTQEQAESKRPRPWMGDLGQRWKRVLGTRQLLNEEHNCIMENPQHPQTVNT

SEQ ID NO: 801284 - protein, 258 aa, Homo sapiens
MASAAAAEAEKGSPVVVGLLVVGNIIILLSGLSLFAETIWVTADQYRVYPLMGVSGKDDVFAGAWIAIFCGFSFFMVASFGVGAALCRRRSMVLTYLVLMLIVYIFECASCITSYTHRDYMVSNPSLITKQMLTFYSADTDQGQELTRLWDRVMIEQECCGTSGPMDWVNFTSAFRAATPEVVFPWPPLCCRRTGNFIPLNEEGCRLGHMDYLFTKGCFEHIGHAIDSYTWGISWFGFAILMWTLPVMLIAMYFYTML

SEQ ID NO: 801285 - protein, 172 aa, Homo sapiens
AAASLPGSPAPSQRCFKPYPLITPCYIKTTTRQLSSPNHSPSQSPNQSPRIKRRPEPSLSRGSRTALASVAAPAKKHRADGGLAAGLSRSADWTEELGARTPRVGGSAHLLERGVASDSGGGVSPALAAKASGAPAAADGFQNVFTGERALLLASGSQVACQSGPSPATRPP

SEQ ID NO: 801286 - protein, 173 aa, Homo sapiens
AAASLPGSPAPSQRCFKPYPLITPCYIKTTTRQLSSPNHSPSQSPNQSPRIKRRPEPSLSRGSRTALASVAAPAKKHRADGGLAAGLSRSADWTEELGARTPRVGGSAHLLERGVASDSGGGVSPALAAKASGAPAAADGFQNVFTGRTLLEKLFSQQENGPPEEAEKFCSRI

SEQ ID NO: 801287 - protein, 284 aa, Homo sapiens
MDGLETTETETIVETEIKEQSAEEDAEAEVDNSKQLIPTLQRSVSEESANSLVSVGVEAKISEQLCAFCYCGEKSSLGQGDLKQFRITPGFILPWRNQPSNKKDIDDNSNGTYEKMQNSAPRKQRGQRKERSPQQNIVSCVSVSTQTASDDQAGKLWDELSLVGLPDAIDIQALFDSTGTCWAHHRCVEWSLGVCQMEEPLLVNVDKAVQNDVHFVSTLEPLSNAVKRNVPRCIIILVLQEPAPFRISVTSSCFVQNTLTKLLKDQKEDANCAVHDSPNGTSSI

SEQ ID NO: 801288 - protein, 374 aa, Homo sapiens
RPRRREPPRRRTGIHVSFLVTRMSSEEDKSVEQPQPPPPPPEEPGAPAPSPAAADKRPRGRPRKDGASPFQRARKKPRSRGKTAVEDEDSMDGLETTETETIVETEIKEQSAEEDAEAEVDNSKQLIPTLQRSVSEESANSLVSVGVEAKISEQLCAFCYCGEKSSLGQGDLKQFRITPGFILPWRNQPSNKKDIDDNSNGTYEKMQNSAPRKQRGQRKERSPQQNIVSCVSVSTQTASDDQAGKLWDELSLVGLPDAIDIQALFDSTGTCWAHHRCVEWSLGVCQMEEPLLVNVDKAVQNDVHFVSTLEPLSNAVKRNVPRCIIILVLQEPAPFRISVTSSCFVQNTLTKLLKDQKEDANCAVHDSPNGTSSI

SEQ ID NO: 801289 - protein, 318 aa, Homo sapiens
LEIPFVYTKMRFPLPESQKEPRSRGKTAVEDEDSMDGLETTETETIVETEIKEQSAEEDAEAEVDNSKQLIPTLQRSVSEESANSLVSVGVEAKISEQLCAFCYCGEKSSLGQGDLKQFRITPGFILPWRNQPSNKKDIDDNSNGTYEKMQNSAPRKQRGQRKERSPQQNIVSCVSVSTQTASDDQAGKLWDELSLVGLPDAIDIQALFDSTGTCWAHHRCVEWSLGVCQMEEPLLVNVDKAVQNDVHFVSTLEPLSNAVKRNVPRCIIILVLQEPAPFRISVTSSCFVQNTLTKLLKDQKEDANCAVHDSPNGTSSI

SEQ ID NO: 801290 - protein, 103 aa, Homo sapiens
MGPHGREGRQCRGCAPEQVPQFFTCKASPEAQTLIESERKKWPVYLLSRVMPNSFSRSQFSPLGSQETISEQEVTSEEERTLGECTEKGQTESPWMKLIKKQT

SEQ ID NO: 801291 - protein, 273 aa, Homo sapiens
MFGFPTATLLDCHGRYAQNVAFFNVMTEAHHKYDHSEATGSSSWDIQNSFRREKLEQKSPDSKTLQEDSPGVRQRVYECQECGKSFRQKGSLTLHERIHTGQKPFECTHCGKSFRAKGNLVTHQRIHTGEKPYQCKECGKSFSQRGSLAVHERLHTGQKPYECAICQRSFRNQSNLAVHRRVHSGEKPYRCDQCGKAFSQKGSLIVHIRVHTGLKPYACTQCRKSFHTRGNCILHGKIHTGETPYLCGQCGKSFTQRGSLAVHQRSCSQRLTL

SEQ ID NO: 801292 - protein, 69 aa, Homo sapiens
PAKLLTEAHPLTTFLVHSQTPSLGEAFSTLAPERESGCAPAKLLTEAHPLTTFLKRSSLYELRVQNPLR

SEQ ID NO: 801293 - protein, 273 aa, Homo sapiens; identical to SEQ ID NO: 801291

SEQ ID NO: 801294 - protein, 277 aa, Homo sapiens
MRSAHRYSVSLFSALVGSLRKQRRPCFDVMTEAHHKYDHSEATGSSSWDIQNSFRREKLEQKSPDSKTLQEDSPGVRQRVYECQECGKSFRQKGSLTLHERIHTGQKPFECTHCGKSFRAKGNLVTHQRIHTGEKPYQCKECGKSFSQRGSLAVHERLHTGQKPYECAICQRSFRNQSNLAVHRRVHSGEKPYRCDQCGKAFSQKGSLIVHIRVHTGLKPYACTQCRKSFHTRGNCILHGKIHTGETPYLCGQCGKSFTQRGSLAVHQRSCSQRLTL

SEQ ID NO: 801295 - protein, 273 aa, Homo sapiens; identical to SEQ ID NO: 801291

SEQ ID NO: 801296 - protein, 173 aa, Homo sapiens
MFGFPTATLLDCHGRYAQNVAFFNVMTEAHHKYDHSEATGSSSWDIQNSFRREKLEQKSPDSKTLQEDSPGVRQRVYECQECGKSFRQKGSLTLHERIHTGQKPFECTHCGKSFRAKGNLVTHQRIHTRGNCILHGKIHTGETPYLCGQCGKSFTQRGSLAVHQRSCSQRLTL

SEQ ID NO: 801297 - protein, 273 aa, Homo sapiens; identical to SEQ ID NO: 801291

SEQ ID NO: 801298 - protein, 273 aa, Homo sapiens; identical to SEQ ID NO: 801291

SEQ ID NO: 801299 - protein, 292 aa, Homo sapiens
PTVEKASGPKAILLHINGYTRERSLISARSVGKASVNEVVSLSTRVHTVHKYDHSEATGSSSWDIQNSFRREKLEQKSPDSKTLQEDSPGVRQRVYECQECGKSFRQKGSLTLHERIHTGQKPFECTHCGKSFRAKGNLVTHQRIHTGEKPYQCKECGKSFSQRGSLAVHERLHTGQKPYECAICQRSFRNQSNLAVHRRVHSGEKPYRCDQCGKAFSQKGSLIVHIRVHTGLKPYACTQCRKSFHTRGNCILHGKIHTGETPYLCGQCGKSFTQRGSLAVHQRSCSQRLTL

SEQ ID NO: 801300 - protein, 171 aa, Homo sapiens
MTEAHHKYDHSEATGSSSWDIQNSFRREKLEQKSPDSKTLQEDSPGVRQRVYECQECGKSFRQKGSLTLHERIHTGQKPFECTHCGKSFRAKGNLVTHQRIHTGEKPYQCKECGKSFSQRGSLAVHERLHTGQKPYECAICQRSFRNQSNLAVHRRVHSGEKPYRCDQCGK

SEQ ID NO: 801301 - protein, 1634 aa, Homo sapiens
MSSTQGNGEHWKSLESVGISRKELAMAEALQMEYDALSRLRHDKEENRAKQNADPSLISWDEPGVDFYSKPAGRRTDLKLLRGLSGSDPTLNYNSLSPQEGPPNHSTSQGPQPGSDPWPKGSLSGDYLYIFDGSDGGVSSSPGPGDIEGSCKKLSPPPLPPRASIWDTPPLPPRKGSPSSSKISQPSDINTFSLVEQLPGKLLEHRILEEEEVLGGGGQGRLLGSVDYDGINDAITRLNLKSTYDAEMLRDATRGWKEGRGPLDFSKDTSGKPVARSKTMPPQVPPRTYASRYGNRKNATPGKNRRISAAPVGSRPHTVANGHELFEVSEERDEEVAAFCHMLDILRSGSDIQDYFLTGYVWSAVTPSPEHLGDEVNLKVTVLCDRLQEALTFTCNCSSTVDLLIYQTLCYTHDDLRNVDVGDFVLKPCGLEEFLQNKHALGSHEYIQYCRKFDIDIRLQLMEQKVVRSDLARTVNDDQSPSTLNYLVHLQERPVKQTISRQALSLLFDTYHNEVDAFLLADGDFPLKADRVVQSVKAICNALAAVETPEITSALNQLPPCPSRMQPKIQKDPSVLAVRENREKVVEALTAAILDLVELYCNTFNADFQTAVPGSRKHDLVQEACHFARSLAFTVYATHRIPIIWATSYEDFYLSCSLSHGGKELCSPLQTRRAHFSKYLFHLIVWDQQICFPVQVNRLPRETLLCATLYALPIPPPGSSSEANKQRRVPEALGWVTTPLFNFRQVLTCGRKLLGLWPATQENPSARWSAPNFHQPDSVILQIDFPTSAFDIKFTSPPGDKFSPRYEFGSLREEDQRKLKDIMQKESLYWLTDADKKRLWEKRYYCHSEVSSLPLVLASAPSWEWACLPDIYVLLKQWTHMNHQDALGLLHATFPDQEVRRMAVQWIGSLSDAELLDYLPQLVQALKYECYLDSPLVRFLLKRAVSDLRVTHYFFWLLKDGLKDSQFSIRYQYLLAALLCCCGKGLREEFNRQCWLVNALAKLAQQVREAAPSARQGILRTGLEEVKQFFALNGSCRLPLSPSLLVKGIVPRDCSYFNSNAVPLKLSFQNVDPLGENIRVIFKCGDDLRQDMLTLQMIRIMSKIWVQEGLDMRMVIFRCFSTGRGRGMVEMIPNAETLRKIQVEHGVTGSFKDRPLADWLQKHNPGEDEYEKAVENFIYSCAGCCVATYVLGICDRHNDNIMLKTTGHMFHIDFGRFLGHAQMFGNIKRDRAPFVFTSDMAYVINGGDKPSSRFHDFVDLCCQAYNLIRKHTHLFLNLLGLMLSCGIPELSDLEDLKYVYDALRPQDTEANATTYFTRLIESSLGSVATKLNFFIHNLAQMKFTGSDDRLTLSFASRTHTLKSSGRISDVFLCRHEKIFHPNKGYIYVVKVMRENTHEATYIQRTFEEFQELHNKLRLLFPSSHLPSFPSRFVIGRSRGEAVAERRREELNGYIWHLIHAPPEVAECDLVYTFFHPLPRDEKAMGTSPAPKSSDGTWARPVGKVGGEVKLSISYKNNKLFIMVMHIRGLQLLQDGNDPDPYVKIYLLPDPQKTTKRKTKVARKTCNPTYNEMLVYDGIPKGDLQQRELQLSVLSEQGFWENVLLGEVNIRLRELDLAQEKTGWFALGSRSHGTL

SEQ ID NO: 801302 - protein, 1634 aa, Homo sapiens; identical to SEQ ID NO: 801301

SEQ ID NO: 801303 - protein, 1412 aa, Homo sapiens
MRPWSSPAQLVAGAQPAGRGDPLGPRPIPPPRFRRASSQREPPYPRPAEPALELAGSKCQPDTPAASLCPADSPSQHRVMPPGPASWANVGSRPHTVANGHELFEVSEERDEEVAAFCHMLDILRSGSDIQDYFLTGYVWSAVTPSPEHLGDEVNLKVTVLCDRLQEALTFTCNCSSTVDLLIYQTLCYTHDDLRNVDVGDFVLKPCGLEEFLQNKHALGSHEYIQYCRKFDIDIRLQLMEQKVVRSDLARTVNDDQSPSTLNYLVHLQERPVKQTISRQALSLLFDTYHNEVDAFLLADGDFPLKADRVVQSVKAICNALAAVETPEITSALNQLPPCPSRMQPKIQKDPSVLAVRENREKVVEALTAAILDLVELYCNTFNADFQTAVPGSRKHDLVQEACHFARSLAFTVYATHRIPIIWATSYEDFYLSCSLSHGGKELCSPLQTRRAHFSKYLFHLIVWDQQICFPVQVNRLPRETLLCATLYALPIPPPGSSSEANKQRRVPEALGWVTTPLFNFRQVLTCGRKLLGLWPATQENPSARWSAPNFHQPDSVILQIDFPTSAFDIKFTSPPGDKFSPRYEFGSLREEDQRKLKDIMQKESLYWLTDADKKRLWEKRYYCHSEVSSLPLVLASAPSWEWACLPDIYVLLKQWTHMNHQDALGLLHATFPDQEVRRMAVQWIGSLSDAELLDYLPQLVQALKYECYLDSPLVRFLLKRAVSDLRVTHYFFWLLKDGLKDSQFSIRYQYLLAALLCCCGKGLREEFNRQCWLVNALAKLAQQVREAAPSARQGILRTGLEEVKQFFALNGSCRLPLSPSLLVKGIVPRDCSYFNSNAVPLKLSFQNVDPLGENIRVIFKCGDDLRQDMLTLQMIRIMSKIWVQEGLDMRMVIFRCFSTGRGRGMVEMIPNAETLRKIQVEHGVTGSFKDRPLADWLQKHNPGEDEYEKAVENFIYSCAGCCVATYVLGICDRHNDNIMLKTTGHMFHIDFGRFLGHAQMFGNIKRDRAPFVFTSDMAYVINGGDKPSSRFHDFVDLCCQAYNLIRKHTHLFLNLLGLMLSCGIPELSDLEDLKYVYDALRPQDTEANATTYFTRLIESSLGSVATKLNFFIHNLAQMKFTGSDDRLTLSFASRTHTLKSSGRISDVFLCRHEKIFHPNKGYIYVVKVMRENTHEATYIQRTFEEFQELHNKLRLLFPSSHLPSFPSRFVIGRSRGEAVAERRREELNGYIWHLIHAPPEVAECDLVYTFFHPLPRDEKAMGTSPAPKSSDGTWARPVGKVGGEVKLSISYKNNKLFIMVMHIRGLQLLQDGNDPDPYVKIYLLPDPQKTTKRKTKVARKTCNPTYNEMLVYDGIPKGDLQQRELQLSVLSEQGFWENVLLGEVNIRLRELDLAQEKTGWFALGSRSHGTL

SEQ ID NO: 801304 - protein, 1427 aa, Homo sapiens
MSSTQGNGEHWKSLESVGISRKELAMAEALQMEYDALSRLRHDKEENRAKQNADPSLISWDEPGVDFYSKPAGRRTDLKLLRGLSGSDPTLNYNSLSPQEGPPNHSTSQGPQPGSDPWPKGSLSGDYLYIFDGSDGGVSSSPGPGDIEGSCKKLSPPPLPPRASIWDTPPLPPRKGSPSSSKISQPSDINTFSLVEQLPGKLLEHRILEEEEVLGGGGQGRLLGSVDYDGINDAITRLNLKSTYDAEMLRDATRGWKEGRGPLDFSKDTSGKPVARSKTMPPQVPPRTYASRYGNRKNATPGKNRRISAAPVGSRPHTVANGHELFEVSEERDEEVAAFCHMLDILRSGSDIQDYFLTGYVWSAVTPSPEHLGDEVNLKVTVLCDRLQEALTFTCNCSSTVDLLIYQTLCYTHDDLRNVDVGDFVLKPCGLEEFLQNKHALGSHEYIQYCRKFDIDIRLQLMEQKVVRSDLARTVNDDQSPSTLNYLVHLQERPVKQTISRQALSLLFDTYHNEVDAFLLADGDFPLKADRVVQSVKAICNALAAVETPEITSALNQLPPCPSRMQPKIQKDPSVLAVRENREKVVEALTAAILDLVELYCNTFNADFQTAVPGSRKHDLVQEACHFARSLAFTVYATHRIPIIWATSYEDFYLSCSLSHGGKELCSPLQTRRAHFSKYLFHLIVWDQQICFPVQVNRLPRETLLCATLYALPIPPPGSSSEANKQRRVPEALGWVTTPLFNFRQVLTCGRKLLGLWPATQENPSARWSAPNFHQPDSVILQIDFPTSAFDIKFTSPPGDKFSPRYEFGSLREEDQRKLKDIMQKESLYWLTDADKKRLWEKRYYCHSEVSSLPLVLASAPSWEWACLPDIYVLLKQWTHMNHQDALGLLHATFPDQEVRRMAVQWIGSLSDAELLDYLPQLVQALKYECYLDSPLVRFLLKRAVSDLRVTHYFFWLLKDGLKDSQFSIRYQYLLAALLCCCGKGLREEFNRQCWLVNALAKLAQQVREAAPSARQGILRTGLEEVKQFFALNGSCRLPLSPSLLVKGIVPRDCSYFNSNAVPLKLSFQNVDPLGENIRVIFKCGDDLRQDMLTLQMIRIMSKIWVQEGLDMRMVIFRCFSTGRGRGMVEMIPNAETLRKIQVEHGVTGSFKDRPLADWLQKHNPGEDEYEKAVENFIYSCAGCCVATYVLGICDRHNDNIMLKTTGHMFHIDFGRFLGHAQMFGNIKRDRAPFVFTSDMAYVINGGDKPSSRFHDFVDLCCQAYNLIRKHTHLFLNLLGLMLSCGIPELSDLEDLKYVYDALRPQDTEANATTYFTRLIESSLGSVATKLNFFIHNLAQMKFTGSDDRLTLSFASRTHTLKSSGRISDVFLCRHEKIFHPNKGYIYVVKVMRENTHEATYIQRTFEEFQELHNKLRLLFPSSHLPR

SEQ ID NO: 801305 - protein, 130 aa, Homo sapiens
MPWQQGRACGGLMTFPSDPFTFPEKVVEALTAAILDLVELYCNTFNADFQTAVPGSRKHDLVQEACHFARSLAFTVYATHRIPIIWATSYEDFYLSCSLSHGGKELCSPLQTRRAHFSKYLFHLIVWDQQ

SEQ ID NO: 801306 - protein, 1634 aa, Homo sapiens; identical to SEQ ID NO: 801301

SEQ ID NO: 801307 - protein, 591 aa, Homo sapiens
MLVEAIVLQDCSYFNSNAVPLKLSFQNVDPLGENIRVIFKCGDDLRQDMLTLQMIRIMSKIWVQEGLDMRMVIFRCFSTGRGRGMVEMIPNAETLRKIQVEHGVTGSFKDRPLADWLQKHNPGEDEYEKAVENFIYSCAGCCVATYVLGICDRHNDNIMLKTTGHMFHIDFGRFLGHAQMFGNIKRDRAPFVFTSDMAYVINGGDKPSSRFHDFVDLCCQAYNLIRKHTHLFLNLLGLMLSCGIPELSDLEDLKYVYDALRPQDTEANATTYFTRLIESSLGSVATKLNFFIHNLAQMKFTGSDDRLTLSFASRTHTLKSSGRISDVFLCRHEKIFHPNKGYIYVVKVMRENTHEATYIQRTFEEFQELHNKLRLLFPSSHLPSFPSRFVIGRSRGEAVAERRREELNGYIWHLIHAPPEVAECDLVYTFFHPLPRDEKAMGTSPAPKSSDGTWARPVGKVGGEVKLSISYKNNKLFIMVMHIRGLQLLQDGNDPDPYVKIYLLPDPQKTTKRKTKVARKTCNPTYNEMLVYDGIPKGDLQQRELQLSVLSEQGFWENVLLGEVNIRLRELDLAQEKTGWFALGSRSHGTL

SEQ ID NO: 801308 - protein, 46 aa, Homo sapiens
MLTLQMIRIMSKIWVQEGLDMRMVIFRCFSTGRGRGQLGVGVRVEE

SEQ ID NO: 801309 - protein, 761 aa, Homo sapiens
GGFAVQHQGPCAFYCDLPVGTLSPSRSSMERRSESPCLRDSPDRRSGSPDVKGPPPVKVARLEQNGSPMGARGRPNGAVAKAVGGLMIPVFCVVEQLDGSLEYDNREEHAEFVLVRKDVLFSQLVETALLALGYSHSSAAQAQGIIKLGRWNPLPLSYVTDAPDATVADMLQDVYHVVTLKIQLQSCSKLEDLPAEQWNHATVRNALKELLKEMNQSTLAKECPLSQSMISSIVNSTYYANVSATKCQEFGRWYKKYKKIKVERVERENLSDYCVLGQRPMHLPNMNQLASLGKTNEQSPHSQIHHSTPIRNQVPALQPIMSPGLLSPQLSPQLVRQQIAMAHLINQQIAVSRLLAHQHPQAINQQFLNHPPIPRAVKPEPTNSSVEVSPDIYQQVRDELKRASVSQAVFARVAFNRTQGLLSEILRKEEDPRTASQSLLVNLRAMQNFLNLPEVERDRIYQDERERSMNPNVSMVSSASSSPSSSRTPQAKTSTPTTDLPIKVDGANINITAAIYDEIQQEMKRAKVSQALFAKVAANKSQGWLCELLRWKENPSPENRTLWENLCTIRRFLNLPQHERDVIYEEESRHHHSERMQHVVQLPPEPVQVLHRQQSQPAKESSPPREEAPPPPPPTEDSCAKKPRSRTKISLEALGILQSFIHDVGLYPDQEAIHTLSAQLDLPKHTIIKFFQNQRYHVKHHGKLKEHLGSAVDVAEYKDEELLTESEENDSEEGSEEMYKVEAEEENADKSKAAPAEIDQR

SEQ ID NO: 801310 - protein, 715 aa, Homo sapiens
MERRSESPCLRDSPDRRSGSPDVKGPPPVKVARLEQNGSPMGARGRPNGAVAKAVGGLMIPVFCVVEQLDGSLEYDNREEHAEFVLVRKDVLFSQLVETALLALGYSHSSAAQAQGIIKLGRWNPLPLSYVTDAPDATVADMLQDVYHVVTLKIQLQSCSKLEDLPAEQWNHATVRNALKELLKEMNQSTLAKECPLSQSMISSIVNSTYYANVSATKCQEFGRWYKKYKKIKVERVERENLSDYCVLGQRPMHLPNMNQLASLGKTNEQSPHSQIHHSTPIRNQVPALQPIMSPGLLSPQLSPQLVRQQIAMAHLINQQIAVSRLLAHQHPQAINQQFLNHPPIPRAVKPEPTNSSVEVSPDIYQQVRDELKRASVSQAVFARVAFNRTQGLLSEILRKEEDPRTASQSLLVNLRAMQNFLNLPEVERDRIYQDERERSMNPNVSMVSSASSSPSSSRTPQAKTSTPTTDLPIKVDGANINITAAIYDEIQQEMKRAKVSQALFAKVAANKSQGWLCELLRWKENPSPENRTLCVIYEEESRHHHSERMQHVVQLPPEPVQVLHRQQSQPAKESSPPREEAPPPPPPTEDSCAKKPRSRTKISLEALGILQSFIHDVGLYPDQEAIHTLSAQLDLPKHTIIKFFQNQRYHVKHHGKLKEHLGSAVDVAEYKDEELLTESEENDSEEGSEEMYKVEAEEENADKSKAAPAEIDQR

SEQ ID NO: 801311 - protein, 543 aa, Homo sapiens
MLRGKENPKPRKPHPLENLCTIRRFLKLTQHERDVIYEEESRHHHSERMRHVVQLPPEPVQVERVERENLSDYCVLGQRPMHLPNMNQLASLGKTNEQSPHSQIHHSTPIRNQVPALQPIMSPGLLSPQLSPQLVRQQIAMAHLINQQIAVSRLLAHQHPQAINQQFLNHPPIPRAVKPEPTNSSVEVSPDIYQQVRDELKRASVSQAVFARVAFNRTQGLLSEILRKEEDPRTASQSLLVNLRAMQNFLNLPEVERDRIYQDERERSMNPNVSMVSSASSSPSSSRTPQAKTSTPTTDLPIKVDGANINITAAIYDEIQQEMKRAKVSQALFAKVAANKSQGWLCELLRWKENPSPENRTLCVIYEEESRHHHSERMQHVVQLPPEPVQVLHRQQSQPAKESSPPREEAPPPPPPTEDSCAKKPRSRTKISLEALGILQSFIHDVGLYPDQEAIHTLSAQLDLPKHTIIKFFQNQRYHVKHHGKLKEHLGSAVDVAEYKDEELLTESEENDSEEGSEEMYKVEAEEENADKSKAAPAEIDQR

SEQ ID NO: 801312 - protein, 431 aa, Homo sapiens
NALKELLKEMNQSTLAKECPLSQSMISSIVNSTYYANVSATKCQEFGRWYKKYKKIKGLMIPVFCVVEQLDGSLEYDNREEHAEFVLVRKDVLFSQLVETALLALGYSHSSAAQAQGIIKLGRWNPLPLSYVTDAPDATVADMLQDVYHVVTLKIQLQSCSKLEDLPAEQWNHATVRNALKELLKEMNQSTLAKECPLSQSMISSIVNSTYYANVSATKCQEFGRWYKKYKKIKVERVERENLSDYCVLGQRPMHLPNMNQLASLGKTNEQSPHSQIHHSTPIRNQVPALQPIMSPGLLSPQLSPQLVRQQIAMAHLINQQIAVSRLLAHQHPQAINQQFLNHPPIPRAVKPEPTNSSVEVSPDIYQQVRDELKRASVSQAVFARVAFNRTQVQLALNTVINSNTGDRIEIGYNYFYLFKKLYGSQDIELD

SEQ ID NO: 801313 - protein, 716 aa, Homo sapiens
NALKELLKEMNQSTLAKECPLSQSMISSIVNSTYYANVSATKCQEFGRWYKKYKKIKGLMIPVFCVVEQLDGSLEYDNREEHAEFVLVRKDVLFSQLVETALLALGYSHSSAAQAQGIIKLGRWNPLPLSYVTDAPDATVADMLQDVYHVVTLKIQLQSCSKLEDLPAEQWNHATVRNALKELLKEMNQSTLAKECPLSQSMISSIVNSTYYANVSATKCQEFGRWYKKYKKIKVERVERENLSDYCVLGQRPMHLPNMNQLASLGKTNEQSPHSQIHHSTPIRNQVPALQPIMSPGLLSPQLSPQLVRQQIAMAHLINQQIAVSRLLAHQHPQAINQQFLNHPPIPRAVKPEPTNSSVEVSPDIYQQVRDELKRASVSQAVFARVAFNRTQGLLSEILRKEEDPRTASQSLLVNLRAMQNFLNLPEVERDRIYQDERERSMNPNVSMVSSASSSPSSSRTPQAKTSTPTTDLPIKVDGANINITAAIYDEIQQEMKRAKVSQALFAKVAANKSQGWLCELLRWKENPSPENRTLCVIYEEESRHHHSERMQHVVQLPPEPVQVLHRQQSQPAKESSPPREEAPPPPPPTEDSCAKKPRSRTKISLEALGILQSFIHDVGLYPDQEAIHTLSAQLDLPKHTIIKFFQNQRYHVKHHGKLKEHLGSAVDVAEYKDEELLTESEENDSEEGSEEMYKVEAEEENADKSKAAPAEIDQR

SEQ ID NO: 801314 - protein, 515 aa, Homo sapiens
MISSIVNSTYYANVSATKCQEFGRWYKKYKKIKVERVERENLSDYCVLGQRPMHLPNMNQLASLGKTNEQSPHSQIHHSTPIRNQVPALQPIMSPGLLSPQLSPQLVRQQIAMAHLINQQIAVSRLLAHQHPQAINQQFLNHPPIPRAVKPEPTNSSVEVSPDIYQQVRDELKRASVSQAVFARVAFNRTQGLLSEILRKEEDPRTASQSLLVNLRAMQNFLNLPEVERDRIYQDERERSMNPNVSMVSSASSSPSSSRTPQAKTSTPTTDLPIKVDGANINITAAIYDEIQQEMKRAKVSQALFAKVAANKSQGWLCELLRWKENPSPENRTLCVIYEEESRHHHSERMQHVVQLPPEPVQVLHRQQSQPAKESSPPREEAPPPPPPTEDSCAKKPRSRTKISLEALGILQSFIHDVGLYPDQEAIHTLSAQLDLPKHTIIKFFQNQRYHVKHHGKLKEHLGSAVDVAEYKDEELLTESEENDSEEGSEEMYKVEAEEENADKSKAAPAEIDQR

SEQ ID NO: 801315 - protein, 471 aa, Homo sapiens
NALKELLKEMNQSTLAKECPLSQSMISSIVNSTYYANVSATKCQEFGRWYKKYKKIKGLMIPVFCVVEQLDGSLEYDNREEHAEFVLVRKDVLFSQLVETALLALGYSHSSAAQAQGIIKLGRWNPLPLSYVTDAPDATVADMLQDVYHVVTLKIQLQSCSKLEDLPAEQWNHATVRNALKELLKEMNQSTLAKECPLSQSMISSIVNSTYYANVSATKCQEFGRWYKKYKKIKVERVERENLSDYCVLGQRPMHLPNMNQLASLGKTNEQSPHSQIHHSTPIRNQVPALQPIMSPGLLSPQLSPQLVRQQIAMAHLINQQIAVSRLLAHQHPQAINQQFLNHPPIPRAVKPEPTNSSVEVSPDIYQQVRDELKRASVSQAVFARVAFNRTQGLLSEILRKEEDPRTASQSLLVNLRAMQNFLNLPEVERDRIYQDERERSMNPNVSMVSSASSSPSSSRTPQAHHAAIYA

SEQ ID NO: 801316 - protein, 315 aa, Homo sapiens
MTGQGQSASGSSAWSTVFRHVRYENLIAGVSGGVLSNLALHPLDLVKIRFAVSDGLELRPKYNGILHCLTTIWKLDGLRGLYQGVTPNIWGAGLSWGLYFFFYNAIKSYKTEGRAERLEATEYLVSAAEAGAMTLCITNPLWVTKTRLMLQYDAVVNSPHRQYKGMFDTLVKIYKYEGVRGLYKGFVPGLFGTSHGALQFMAYELLKLKYNQHINRLPEAQLSTVEYISVAALSKIFAVAATYPYQVVRARLQDQHMFYSGVIDVITKTWRKEGVGGFYKGIAPNLIRVTPACCITFVVYENVSHFLLDLREKRK

SEQ ID NO: 801317 - protein, 183 aa, Homo sapiens
MTLCITNPLWVTKTRLMLQYDAVVNSPHRQYKGMFDTLVKIYKYEGVRGLYKGFVPGLFGTSHGALQFMAYELLKLKYNQHINRLPEAQLSTVEYISVAALSKIFAVAATYPYQVVRARLQDQHMFYSGVIDVITKTWRKEGVGGFYKGIAPNLIRVTPACCITFVVYENVSHFLLDLREKRK

SEQ ID NO: 801318 - protein, 183 aa, Homo sapiens; identical to SEQ ID NO: 801317

SEQ ID NO: 801319 - protein, 235 aa, Homo sapiens
MTGQGQSASGSSAWSTVFRHVRYENLIAGVSGGVLSNLALHPLDLVKIRFAVSDGLELRPKYNGILHCLTTIWKLDGLRGLYQGVTPNIWGAGLSWGLYFFFYNAIKSYKTEGRAERLEATEYLVSAAEAGAMTLCITNPLWVTKTRLMLQYDAVVNSPHRQYKGMFDTLVKIYKYEGVRGLYKGFVPGLFGTSHGALQFMAYELLKLKYNQHINRLPEAQLERRRRWILQGNCS

SEQ ID NO: 801320 - protein, 315 aa, Homo sapiens; identical to SEQ ID NO: 801316

SEQ ID NO: 801321 - protein, 283 aa, Homo sapiens
TRGSGRVGRRSTSVKIRFAVSDGLELRPKYNGILHCLTTIWKLDGLRGLYQGVTPNIWGAGLSWGLYFFFYNAIKSYKTEGRAERLEATEYLVSAAEAGAMTLCITNPLWVTKTRLMLQYDAVVNSPHRQYKGMFDTLVKIYKYEGVRGLYKGFVPGLFGTSHGALQFMAYELLKLKYNQHINRLPEAQLSTVEYISVAALSKIFAVAATYPYQVVRARLQDQHMFYSGVIDVITKTWRKEGVGGFYKGIAPNLIRVTPACCITFVVYENVSHFLLDLREKRK

SEQ ID NO: 801322 - protein, 315 aa, Homo sapiens; identical to SEQ ID NO: 801316

SEQ ID NO: 801323 - protein, 182 aa, Homo sapiens
GRGGGAAPRGGGARSPQTARGRGRPGRAAAGAAGGGCAAEGEGRGSGRRLCWSPTSRRPPPAGSQALVGAEHPAAPDPPAGAHQAQLRLRTAGRHLHCPGITERADSTASSEGRPYQSPASAWASPLRQLHCLCWSEGAACHGGSHLPGGPHRHRLQRSRGLLAAAALGHPLLGLPFSLCRR

SEQ ID NO: 801324 - protein, 182 aa, Homo sapiens; identical to SEQ ID NO: 801323

SEQ ID NO: 801325 - protein, 148 aa, Homo sapiens
MPSRCVQLQRIPLSAVYRICLGKFTFPGMSLDKRQGEGLRIYWGSPEEQSLLSRWNPWSTEVPYATFTEHPMKYTSEKFLEICKLSGFMSKLVPAIQNAHKNSTGSGRGKKLMVLTEPILIETYTGLMSFIGNRNKLGYSLARGSIGF

SEQ ID NO: 801326 - protein, 148 aa, Homo sapiens; identical to SEQ ID NO: 801325

SEQ ID NO: 801327 - protein, 148 aa, Homo sapiens; identical to SEQ ID NO: 801325

SEQ ID NO: 801328 - protein, 148 aa, Homo sapiens; identical to SEQ ID NO: 801325

SEQ ID NO: 801329 - protein, 148 aa, Homo sapiens; identical to SEQ ID NO: 801325

SEQ ID NO: 801330 - protein, 148 aa, Homo sapiens; identical to SEQ ID NO: 801325

SEQ ID NO: 801331 - protein, 85 aa, Homo sapiens
MPSRCVQLQRIPLSAVYRICLGKFTFPGMSLDKRQGEGLRIYWGSPEEQSLLSRWNPWSTEVPYATFTEHPMKYTSEKFLEICKQ

SEQ ID NO: 801332 - protein, 255 aa, Homo sapiens
IEVGEKNAASNILIDGHMEGEIWGLATHPSKDLFISASNDGTARIWDLADKKLLNKVSLGHAARCAAYSPDGEMVAIGMKNGEFVILLVNSLKVWGKKRDRKSAIQDIRISPDNRFLAVGSSEHTVDFYDLTQGTNLNRIGYCKDIPSFVIQMDFSADGKYIQRLGDEVIGIWPRNADKADVNCACVTHAGLNIVTGDDFGLVKLFDFPCTEKFAKHKRYFGHSAHVTNIRFSYDDKYVVSTGGDDCSVFVWRCL

SEQ ID NO: 801333 - protein, 255 aa, Homo sapiens; identical to SEQ ID NO: 801332

SEQ ID NO: 801334 - protein, 116 aa, Homo sapiens
EVPLGKQVTEAVVIEKITWASWTSVLGDEVIGIWPRNADKADVNCACVTHAGLNIVTGDDFGLVKLFDFPCTEKFAKHKRYFGHSAHVTNIRFSYDDKYVVSTGGDDCSVFVWRCL

SEQ ID NO: 801335 - protein, 36 aa, Homo sapiens
MGITIRTSSRCEAGCKWPRPGAARTTVIRAAAGGLG

SEQ ID NO: 801336 - protein, 102 aa, Homo sapiens
LASADPRPARLVGPAGALEDLERAVELSGGRGRAARQSFVQRGLLARLQGRDDDARRDFERAARLGSPFARRQLVLLNPYAALCNRMLADMMGQLRRPRDSR

SEQ ID NO: 801337 - protein, 151 aa, Homo sapiens
PDEVFPQAQLEQSKALELQGVMAAEAGDLSTALERFGQAICLLPERASAYNNRAQARRLQGDVAGALEDLERAVELSGGRGRAARQSFVQRGLLARLQGRDDDARRDFERAARLGSPFARRQLVLLNPYAALCNRMLADMMGQLRRPRDSR

SEQ ID NO: 801338 - protein, 109 aa, Homo sapiens [sequence omitted]

SEQ ID NO: 801339 - protein, 346 aa, Homo sapiens
MAAAEPASSGQQAPAGQGQGQRPPPQPPQAQAPQPPPPPQLGGAGGGSSRHEKSLGLLTTKFVSLLQEAKDGVLDLKAAADTLAVRQKRRIYDITNVLEGIDLIEKKSKNSIQWKGVGAGCNTKEVIDRLRYLKAEIEDLELKERELDQQKLWLQQSIKNVMDDSINNRFSYVTHEDICNCFNGDTLLAIQAPSGTQLEVPIPEMGQNGQKKYQINLKSHSGPIHVLLINKESSSSKPVVFPVPPPDDLTQPSSQSLTPVTPQKSSMATQNLPEQHVSERSQALQQTSATDISSAGSISGDIIDELMSSDVFPLLRLSPTPADDYNFNLDDNEGVCDLFDVQILNY

SEQ ID NO: 801340 - protein, 185 aa, Homo sapiens
MDDSINNRFSYVTHEDICNCFNGDTLLAIQAPSGTQLEVPIPEMGQNGQKKYQINLKSHSGPIHVLLINKESSSSKPVVFPVPPPDDLTQPSSQSLTPVTPQKSSMATQNLPEQHVSERSQALQQTSATDISSAGSISGDIIDELMSSDVFPLLRLSPTPADDYNFNLDDNEGVCDLFDVQILNY

SEQ ID NO: 801341 - protein, 240 aa, Homo sapiens
CSRGPDCEIGVGAGCNTKEVIDRLRYLKAEIEDLELKERELDQQKLWLQQSIKNVMDDSINNRFSYVTHEDICNCFNGDTLLAIQAPSGTQLEVPIPEMGQNGQKKYQINLKSHSGPIHVLLINKESSSSKPVVFPVPPPDDLTQPSSQSLTPVTPQKSSMATQNLPEQHVSERSQALQQTSATDISSAGSISGDIIDELMSSDVFPLLRLSPTPADDYNFNLDDNEGVCDLFDVQILNY

SEQ ID NO: 801342 - protein, 346 aa, Homo sapiens; identical to SEQ ID NO: 801339

SEQ ID NO: 801343 - protein, 109 aa, Homo sapiens [sequence omitted]

SEQ ID NO: 801344 - protein, 185 aa, Homo sapiens; identical to SEQ ID NO: 801340

SEQ ID NO: 801345 - protein, 67 aa, Homo sapiens
ADGRAHAAFAAGSVCWGANTPRSSREPPPGHHFTLFRYSNLISKVLDSAKEGIYLKKKKKKTPSFDS

SEQ ID NO: 801346 - protein, 102 aa, Homo sapiens
MCSGSGRRRSSLSPTMRPGTGAERGGLMMGHPGMHYAPMGMHPMGQRANMPPVPHGMMPQMMPPMGGPPMGQMPGMMSSVMPGMMMSHMSQASMQPALPVIM

SEQ ID NO: 801347 - protein, 102 aa, Homo sapiens
MCSGSGRRRSSLSPTMRPGTGAERGGLMMGHPGMHYAPMGMHPMGQRANMPPVPHGMMPQMMPPMGGPPMGQKDKIKQFATARCFSLFWGLLFPLGQSRCLE

SEQ ID NO: 801348 - protein, 144 aa, Homo sapiens
MCSGSGRRRSSLSPTMRPGTGAERGGLMVSEMESHPPSQGPGDGERRLSGSSLCSGSWVSADGFLRRRPSMGHPGMHYAPMGMHPMGQRANMPPVPHGMMPQMMPPMGGPPMGQMPGMMSSVMPGMMMSHMSQASMQPALPVIM

SEQ ID NO: 801349 - protein, 119 aa, Homo sapiens
MCSGSGRRRSSLSPTMRPGTGAERGGLMMGHPGMHYAPMGMHPMGQRANMPPVPHGMMPQMMPPMGGPPMGQKDKIKQFATARCFSLFWGLLFPLGQSSSCYHMSPSRHSPMPRLFNSF

SEQ ID NO: 801350 - protein, 184 aa, Homo sapiens
MCSGSGRRRSSLSPTMRPGTGAERGGLMMGHPGMHYAPMGMHPMGQRANMPPVPHGMMPQMMPPMGGPPMGQMPGMMSSVMPGMMMSHMSQASMQPALPPGVNSMDVAAGTASGAKSMWTEHKSPDGRTYYYNTETKQSTWEKPDDLKTPAEQLLSKCPWKEIPEYHCCWKSYYKIKPACNDQS

SEQ ID NO: 801351 - protein, 79 aa, Homo sapiens
HGFAGAVQLGLIGTWEQAMKMIINDPRYSALAKLSEKKQAFNAYKVQTEKEEKEEARSKYKEAKESFQRFLEIYMNKRM

SEQ ID NO: 801352 - protein, 108 aa, Homo sapiens
LRSLLVGMCSGSGRRRSSLSPTMRPGTGAERGGLMMGHPGMHYAPMGMHPMGQRANMPPVPHGMMPQMMPPMGGPPMGQMPGMMSSVMPGMMMSHMSQASMQPALPLN

SEQ ID NO: 801353 - protein, 119 aa, Homo sapiens
AYYYYTAVRRRQKGRKTVFNNQVGGQTWWLTPIIPTVWEAKASRWLEPRSSRPALATWQNPVSRGKKKNTKISRAWWHVPVVPPPWEAEVERSLEPGNVKAAVSHNCTTALQGDSETLS

SEQ ID NO: 801354 - protein, 452 aa, Homo sapiens
MCSGSGRRRSSLSPTMRPGTGAERGGLMMGHPGMHYAPMGMHPMGQRANMPPVPHGMMPQMMPPMGGPPMGQMPGMMSSVMPGMMMSHMSQASMQPALPPGVNSMDVAAGTASGAKSMWTEHKSPDGRTYYYNTETKQSTWEKPDDLKTPAEQLLSKCPWKEYKSDSGKPYYYNSQTKESRWAKPKELEDLEGYQNTIVAGSLITKSNLHAMIKAEESSKQEECTTTSTAPVPTTEIPTTMSTMAAAEAAAAVVAAAAAAAAAAAAANANASTSASNTVSGTVPVVPEPEVTSIVATVVDNENTVTISTEEQAQLTSTPAIQDQSVEVSSNTGEETSKQETVADFTPKKEEEESQPAKKTYTWNTKEEAKQAFKELLKEKRVPSNASWEQAMKMIINDPRYSALAKLSEKKQAFNAYKVQTEKEEKEEARSKYKEAKESFQRFLEIYMNKRM

SEQ ID NO: 801355 - protein, 198 aa, Homo sapiens
MCSGSGRRRSSLSPTMRPGTGAERGGLMMGHPGMHYAPMGMHPMGQRANMPPVPHGMMPQMMPPMGGPPMGQMPGMMSSVMPGMMMSHMSQASMQPALPPGVNSMDVAAGTASGAKSMWTEHKSPDGRTYYYNTETKQSTWEKPDDLKTPAEQLLSKCPWKEYKSDSGKPYYYNSQTKESRWAKPKELEDLEGTSTTY

SEQ ID NO: 801356 - protein, 83 aa, Homo sapiens
AAAAAANANASTSASNTVSGTVPVVPEPEVTSIVATVVDNENTVTISTEEQAQLTSTPAIQDQSVEVSSNTGEETSKQETVAE

SEQ ID NO: 801357 - protein, 522 aa, Homo sapiens
RAASGLQPCSGAGAEPAANPRSPRSLVPSLESTSTSVPPAPGTMATDSWALAVDEQEAAAESLSNLHLKEEKIKPDTNGAVVKTNANAEKTDEEEKEDRAAQSLLNKLIRSNLVDNTNQVEVLQRDPNSPLYSVKSFEELRLKPQLLQGVYAMGFNRPSKIQENALPLMLAEPPQNLIAQSQSGTGKTAAFVLAMLSQVEPANKYPQCLCLSPTYELALQTGKVIEQMGKFYPELKLAYAVRGNKLERGQKISEQIVIGTPGTVLDWCSKLKFIDPKKIKVFVLDEADVMIATQGHQDQSIRIQRMLPRNCQMLLFSATFEDSVWKFAQKVVPDPNVIKLKREEETLDTIKQYYVLCSSRDEKFQALCNLYGAITIAQAMIFCHTRKTASWLAAELSKEGHQVALLSGEMMVEQRAAVIERFREGKEKVLVTTNVCARGIDVEQVSVVINFDLPVDKDGNPDNETYLHRIGRTGRFGKRGLAVNMVDSKHSMNILNRIQEHFNKKIERLDTDDLDEIEKIAN

SEQ ID NO: 801358 - protein, 370 aa, Homo sapiens
MGFNRPSKIQENALPLMLAEPPQNLIAQSQSGTGKTAAFVLAMLSQVEPANKYPQCLCLSPTYELALQTGKVIEQMGKFYPELKLAYAVRGNKLERGQKISEQIVIGTPGTVLDWCSKLKFIDPKKIKVFVLDEADVMIATQGHQDQSIRIQRMLPRNCQMLLFSATFEDSVWKFAQKVVPDPNVIKLKREEETLDTIKQYYVLCSSRDEKFQALCNLYGAITIAQAMIFCHTRKTASWLAAELSKEGHQVALLSGEMMVEQRAAVIERFREGKEKVLVTTNVCARGIDVEQVSVVINFDLPVDKDGNPDNETYLHRIGRTGRFGKRGLAVNMVDSKHSMNILNRIQEHFNKKIERLDTDDLDEIEKIAN

SEQ ID NO: 801359 - protein, 491 aa, Homo sapiens
RAASGLQPCSGAGAEPAANPRSPRSLVPSLESTSTSVPPAPGTMATDSWALAVDEQEAAAESLSNLHLKEEKIKPDTNGAVVKTNANAEKTDEEEKEDRAAQSLLNKLIRSNLVDNTNQVEVLQRDPNSPLYSVKSFEELRLPQNLIAQSQSGTGKTAAFVLAMLSQVEPANKYPQCLCLSPTYELALQTGKVIEQMGKFYPELKLAYAVRGNKLERGQKISEQIVIGTPGTVLDWCSKLKFIDPKKIKVFVLDEADVMIATQGHQDQSIRIQRMLPRNCQMLLFSATFEDSVWKFAQKVVPDPNVIKLKREEETLDTIKQYYVLCSSRDEKFQALCNLYGAITIAQAMIFCHTRKTASWLAAELSKEGHQVALLSGEMMVEQRAAVIERFREGKEKVLVTTNVCARGIDVEQVSVVINFDLPVDKDGNPDNETYLHRIGRTGRFGKRGLAVNMVDSKHSMNILNRIQEHFNKKIERLDTDDLDEIEKIAN

SEQ ID NO: 801360 - protein, 484 aa, Homo sapiens
MAGAAGRVQDRALRRFPITLPVGDLSNLHLKEEKIKPDTNGAVVKTNANAEKTDEEEKEDRAAQSLLNKLIRSNLVDNTNQVEVLQRDPNSPLYSVKSFEELRLKPQLLQGVYAMGFNRPSKIQENALPLMLAEPPQNLIAQSQSGTGKTAAFVLAMLSQVEPANKYPQCLCLSPTYELALQTGKVIEQMGKFYPELKLAYAVRGNKLERGQKISEQIVIGTPGTVLDWCSKLKFIDPKKIKVFVLDEADVMIATQGHQDQSIRIQRMLPRNCQMLLFSATFEDSVWKFAQKVVPDPNVIKLKREEETLDTIKQYYVLCSSRDEKFQALCNLYGAITIAQAMIFCHTRKTASWLAAELSKEGHQVALLSGEMMVEQRAAVIERFREGKEKVLVTTNVCARGIDVEQVSVVINFDLPVDKDGNPDNETYLHRIGRTGRFGKRGLAVNMVDSKHSMNILNRIQEHFNKKIERLDTDDLDEIEKIAN

SEQ ID NO: 801361 - protein, 474 aa, Homo sapiens
GKAALTWLMQLREKLSNLHLKEEKIKPDTNGAVVKTNANAEKTDEEEKEDRAAQSLLNKLIRSNLVDNTNQVEVLQRDPNSPLYSVKSFEELRLKPQLLQGVYAMGFNRPSKIQENALPLMLAEPPQNLIAQSQSGTGKTAAFVLAMLSQVEPANKYPQCLCLSPTYELALQTGKVIEQMGKFYPELKLAYAVRGNKLERGQKISEQIVIGTPGTVLDWCSKLKFIDPKKIKVFVLDEADVMIATQGHQDQSIRIQRMLPRNCQMLLFSATFEDSVWKFAQKVVPDPNVIKLKREEETLDTIKQYYVLCSSRDEKFQALCNLYGAITIAQAMIFCHTRKTASWLAAELSKEGHQVALLSGEMMVEQRAAVIERFREGKEKVLVTTNVCARGIDVEQVSVVINFDLPVDKDGNPDNETYLHRIGRTGRFGKRGLAVNMVDSKHSMNILNRIQEHFNKKIERLDTDDLDEIEKIAN

SEQ ID NO: 801362 - protein, 328 aa, Homo sapiens
MLSQVEPANKYPQCLCLSPTYELALQTGKVIEQMGKFYPELKLAYAVRGNKLERGQKISEQIVIGTPGTVLDWCSKLKFIDPKKIKVFVLDEADVMIATQGHQDQSIRIQRMLPRNCQMLLFSATFEDSVWKFAQKVVPDPNVIKLKREEETLDTIKQYYVLCSSRDEKFQALCNLYGAITIAQAMIFCHTRKTASWLAAELSKEGHQVALLSGEMMVEQRAAVIERFREGKEKVLVTTNVCARGIDVEQVSVVINFDLPVDKDGNPDNETYLHRIGRTGRFGKRGLAVNMVDSKHSMNILNRIQEHFNKKIERLDTDDLDEIEKIAN

SEQ ID NO: 801363 - protein, 370 aa, Homo sapiens; identical to SEQ ID NO: 801358

SEQ ID NO: 801364 - protein, 315 aa, Homo sapiens
APLPVCSLVVGLEQSLPRTPGAHDPSCHPSNPPARASHPRLGPWPLTHGPWRWTSRKLRLSRPQNLIAQSQSGTGKTAAFVLAMLSQVEPANKYPQCLCLSPTYELALQTGKVIEQMGKFYPELKLAYAVRGNKLERGQKISEQIVIGTPGTVLDWCSKLKFIDPKKIKVFVLDEADVMIATQGHQDQSIRIQRMLPRNCQMLLFSATFEDSVWKFAQKVVPDPNVIKLKREEETLDTIKQYYVLCSSRDEKSAVYSTGTPWQPRLRLAHVRRPTRPGSRGMASGVPREIDQPPNISPRANGGGGAYDEKPPCTR

SEQ ID NO: 801365 - protein, 370 aa, Homo sapiens; identical to SEQ ID NO: 801358

SEQ ID NO: 801366 - protein, 328 aa, Homo sapiens; identical to SEQ ID NO: 801362

SEQ ID NO: 801367 - protein, 221 aa, Homo sapiens
REPRLGVETGRELELEVKHEDVTECCNLMIKFEMDEECFLGMSKESGFSRWNLLVCMLCSVGYHLFSCHRSEKTCRRWMALDYAGISIGILGCYVSGVFYAFYCNNYWRQVYLITVLAMILAVFFAQIHPNYLTQQWQRLRSIIFCSVSGYGVIPTLHWVWLNGGIGAPIVQDFAPRVIVMYMIALLAFLFYISKVPERYFPGQLNYLGSSHQIWHILAVV

SEQ ID NO: 801368 - protein, 361 aa, Homo sapiens
PGPPRRWRRVAGVSAEPGPGQQRQRGRTSRSVRGLRGGGASGEDPPPRGGGTWVELPSLGSWWRTGTMHQKLLKSAHYIELGSYQYWPVLVPRGIRLYTYEQIPGSLKDNPYITDGYRAYLPSRLCIKSLFILSNETVNIWSHLLGFFLFFTLGIYDMTSVLPSASASREDFVICSICLFCFQVCMLCSVGYHLFSCHRSEKTCRRWMALDYAGISIGILGCYVSGVFYAFYCNNYWRQVYLITVLAMILAVFFAQIHPNYLTQQWQRLRSIIFCSVSGYGVIPTLHWVWLNGGIGAPIVQDFAPRVIVMYMIALLAFLFYISKVPERYFPALKSYFRIRNEDSGNVCHILWHPTWTEYPI

SEQ ID NO: 801369 - protein, 306 aa, Homo sapiens
PGPPRRWRRVAGVSAEPGPGQQRQRGRTSRSVRGLRGGGASGEAPSPGRRDLGELPSLGSWWRTGTMHQKLLKSAHYIELGSYQYWPVLVPRGIRLYTYEQIPGSLKDNPYITRRLPGLPAVQAVYQKVCMLCSVGYHLFSCHRSEKTCRRWMALDYAGISIGILGCYVSGVFYAFYCNNYWRQVYLITVLAMILAVFFAQIHPNYLTQQWQRLRSIIFCSVSGYGVIPTLHWVWLNGGIGAPIVQDFAPRVIVMYMIALLAFLFYISKVPERYFPALKSYFRIRNEDSGNVCHILWHPTWTEYPI

SEQ ID NO: 801370 - protein, 361 aa, Homo sapiens; identical to SEQ ID NO: 801368

SEQ ID NO: 801371 - protein, 355 aa, Homo sapiens
PGPPRRWRRVAGVSAEPGPGQQRQRGRTSRSVRGLRGGGASGEDPPPRGGGTWVELPSLGSWWRTGTMHQKLLKSAHYIELGSYQYWPVLVPRGIRLYTYEQIPGSLKDNPYITDGYRAYLPSRLCIKSLFILSNETVNIWSHLLGFFLFFTLGIYDMTSVLPSASASREDFVICSICLFCFQVCMLCSVGYHLFSCHRSEKTCRRWMALDYAGISIGILGCYVSGVFYAFYCNNYWRQVYLITVLAMILAVFFAQIHPNYLTQQWQRLRSIIFCSVSGYGVIPTLHWVWLNGGIGAPIVQNQERRFRECLSHLMASHLDRISDLKIVIDFRKTVQLSIWQCLREVPKPKINQAE

SEQ ID NO: 801372 - protein, 170 aa, Homo sapiens
MLCSVGYHLFSCHRSEKTCRRWMALDYAGISIGILGCYVSGVFYAFYCNNYWRQVYLITVLAMILAVFFAQIHPNYLTQQWQRLRSIIFCSVSGYGVIPTLHWVWLNGGIGAPIVQNQERRFRECLSHLMASHLDRISDLKIVIDFRKTVQLSIWQCLREVPKPKINQAE

SEQ ID NO: 801373 - protein, 361 aa, Homo sapiens; identical to SEQ ID NO: 801368

SEQ ID NO: 801374 - protein, 697 aa, Homo sapiens
PRQASPPAPRSAAATVTATARSRPKPRPCAERSGAASTRAQPAGAAGAGPGSSADLPFSGREPESGRPGSGWARAHGKRGLPGPWGPCHVRQARAGGPAMAGERPPLRGPGPGPGEVPGEGPPGPGGTGGGPGRGRPSSYRALRSAVSSLARVDDFHCAEKIGAGFFSEVYKVRHRQSGQVMVLKMNKLPSNRGNTLREVQLMNRLRHPNILRFMGVCVHQGQLHALTEYMNGGTLEQLLSSPEPLSWPVRLHLALDIARGLRYLHSKVYFTATSHPREGARKEPLAVVGSPYWMAPEVLRGELYDEKADVFAFGIVLCELIARVPADPDYLPRTEDFGLDVPAFRTLVGDDCPLPFLLLAIHCCNLEPSTRAPFTEITQHLEWILEQLPEPAPLTRTALTHNQGSVARGGPSATLPRPDPRLSRSRSDLFLPPSPESPPNWGDNLTRVNPFSLREDLRGGKIKLLDTPSKPVLPLVPPSPFPSTQLPLVTTPETLVQPGTPARRCRSLPSSPELPRRMETALPGPGPPAVGPSAEEKMECEGSSPEPEPPGPAPQLPLAVATDNFISTCSSASQPWSPRSGPVLNNNPPAVVVNSPQGWAGEPWNRAQHSLPRAAALERTEPSPPPSAPREPDEGLPCPGCCLGPFSFGFLSMCPRPTPAVARYRNLNCEAGSLLCHRGHHAKPPTPSLQLPGARS

SEQ ID NO: 801375 - protein, 782 aa, Homo sapiens
PRQASPPAPRSAAATVTATARSRPKPRPCAERSGAASTRAQPAGAAGAGPGSSADLPFSGREPESGRPGSGWARAHGKRGLPGPWGPCHVRQARAGGPAMAGERPPLRGPGPGPGEVPGEGPPGPGGTGGGPGRGRPSSYRALRSAVSSLARVDDFHCAEKIGAGFFSEVYKVRHRQSGQVMVLKMNKLPSNRGNTLREVQLMNRLRHPNILRFMGVCVHQGQLHALTEYMNGGTLEQLLSSPEPLSWPVRLHLALDIARGLRYLHSKGVFHRDLTSKNCLVRREDRGFTAVVGDFGLAEKIPVYREMNVPVPPKSPRVPLSDGPQSPRDVSLGERREFTSSPFAWGGCLNRMLLTTLPLPLQEGARKEPLAVVGSPYWMAPEVLRGELYDEKADVFAFGIVLCELIARVPADPDYLPRTEDFGLDVPAFRTLVGDDCPLPFLLLAIHCCNLEPSTRAPFTEITQHLEWILEQLPEPAPLTRTALTHNQGSVARGGPSATLPRPDPRLSRSRSDLFLPPSPESPPNWGDNLTRVNPFSLREDLRGGKIKLLDTPSKPVLPLVPPSPFPSTQLPLVTTPETLVQPGTPARRCRSLPSSPELPRRMETALPGPGPPAVGPSAEEKMECEGSSPEPEPPGPAPQLPLAVATDNFISTCSSASQPWSPRSGPVLNNNPPAVVVNSPQGWAGEPWNRAQHSLPRAAALERTEPSPPPSAPREPDEGLPCPGCCLGPFSFGFLSMCPRPTPAVARYRNLNCEAGSLLCHRGHHAKPPTPSLQLPGARS

SEQ ID NO: 801376 - protein, 306 aa, Homo sapiens
PRQASPPAPRSAAATVTATARSRPKPRPCAERSGAASTRAQPAGAAGAGPGSSADLPFSGREPESGRPGSGWARAHGKRGLPGPWGPCHVRQARAGGPAMAGERPPLRGPGPGPGEVPGEGPPGPGGTGGGPGRGRPSSYRALRSAVSSLARVDDFHCAEKIGAGFFSEVYKVRHRQSGQVMVLKMNKLPSNRGNTLREVQLMNRLRHPNILRFMGVCVHQGQLHALTEYMNGGTLEQLLSSPEPLSWPVRLHLALDIARGLRYLHSKGVFHRDLTSKNCLVRREDRGFTAVVGDFGLAEKIPVYR

SEQ ID NO: 801377 - protein, 725 aa, Homo sapiens
PRQASPPAPRSAAATVTATARSRPKPRPCAERSGAASTRAQPAGAAGAGPGSSADLPFSGREPESGRPGSGWARAHGKRGLPGPWGPCHVRQARAGGPAMAGERPPLRGPGPGPGEVPGEGPPGPGGTGGGPGRGRPSSYRALRSAVSSLARVDDFHCAEKIGAGFFSEVYKVRHRQSGQVMVLKMNKLPSNRGNTLREVQLMNRLRHPNILRFMGVCVHQGQLHALTEYMNGGTLEQLLSSPEPLSWPVRLHLALDIARGLRYLHSKGVFHRDLTSKNCLVRREDRGFTAVVGDFGLAEKIPVYREGARKEPLAVVGSPYWMAPEVLRGELYDEKADVFAFGIVLCELIARVPADPDYLPRTEDFGLDVPAFRTLVGDDCPLPFLLLAIHCCNLEPSTRAPFTEITQHLEWILEQLPEPAPLTRTALTHNQGSVARGGPSATLPRPDPRLSRSRSDLFLPPSPESPPNWGDNLTRVNPFSLREDLRGGKIKLLDTPSKPVLPLVPPSPFPSTQLPLVTTPETLVQPGTPARRCRSLPSSPELPRRMETALPGPGPPAVGPSAEEKMECEGSSPEPEPPGPAPQLPLAVATDNFISTCSSASQPWSPRSGPVLNNNPPAVVVNSPQGWAGEPWNRAQHSLPRAAALERTEPSPPPSAPREPDEGLPCPGCCLGPFSFGFLSMCPRPTPAVARYRNLNCEAGSLLCHRGHHAKPPTPSLQLPGARS

SEQ ID NO: 801378 - protein, 656 aa, Homo sapiens
PRQASPPAPRSAAATVTATARSRPKPRPCAERSGAASTRAQPAGAAGAGPGSSADLPFSGREPESGRPGSGWARAHGKRGLPGPWGPCHVRQARAGGPAMAGERPPLRGPGPGPGEVPGEGPPGPGGTGGGPGRGRPSSYRALRSAVSSLARVDDFHCAEKIGAGFFSEVYKVRHRQSGQVMVLKMNKLPSNRGNTLREVQLMNRLRHPNILRFMGVCVHQGQLHALTEYMNGGTLEQLLSSPEPLSWPVRLHLALDIARGLRYLHSKGVFHRDLTSKNCLVRREDRGFTAVVGDFGLAEKIPVYREGARKEPLAVVGSPYWMAPEVLRGELYDEKADVFAFGIVLCELIARVPADPDYLPRTEDFGLDVPAFRTLVGDDCPLPFLLLAIHCCNLEPSTRAPFTEITQHLEWILEQLPEPAPLTRTALTHNQGSVARGGPSATLPRPDPRLSRSRSDLFLPPSPESPPNWGDNLTRVNPFSLREDLRGGKIKLLDTPSKPVLPLVPPSPFPSTQLPLVTTPETLVQPGTPARRCRSLPSSPELPRRMETALPGPGPPAVGPSAEEKMECEGSRAAALERTEPSPPPSAPREPDEGLPCPGCCLGPFSFGFLSMCPRPTPAVARYRNLNCEAGSLLCHRGHHAKPPTPSLQLPGARS

SEQ ID NO: 801379 - protein, 487 aa, Homo sapiens
PRQASPPAPRSAAATVTATARSRPKPRPCAERSGAASTRAQPAGAAGAGPGSSADLPFSGREPESGRPGSGWARAHGKRGLPGPWGPCHVRQARAGGPAMAGERPPLRGPGPGPGEVPGEGPPGPGGTGGGPGRGRPSSYRALRSAVSSLARVDDFHCAEKIGAGFFSEVYKVRHRQSGQVMVLKMNKLPSNRGNTLREVQLMNRLRHPNILRFMGVCVHQGQLHALTEYMNGGTLEQLLSSPEPLSWPVRLHLALDIARGLRYLHSKGVFHRDLTSKNCLVRREDRGFTAVVGDFGLAEKIPVYREGARKEPLAVVGSPYWMAPEVLRGELYDEKADVFAFGIVLCELIARVPADPDYLPRTEDFGLDVPAFRTLVGDDCPLPFLLLAIHCCNLEPSTRAPFTEITQHLEWILEQLPEPAPLTRTALTHNQGSVARGGPSATLPRPDPRLSRSRSDLFLPPLTGFLPKWAIIEEFTKNNSLIIPTS

SEQ ID NO: 801380 - protein, 43 aa, Homo sapiens
SNAEDSDSRLLYLQALLQEGVPLPRFPGQIPGFPEAGQTSSCP

SEQ ID NO: 801381 - protein, 725 aa, Homo sapiens; identical to SEQ ID NO: 801377

SEQ ID NO: 801382 - protein, 403 aa, Homo sapiens
MAPEVLRGELYDEKADVFAFGIVLCELIARVPADPDYLPRTEDFGLDVPAFRTLVGDDCPLPFLLLAIHCCNLEPSTRAPFTEITQHLEWILEQLPEPAPLTRTALTHNQGSVARGGPSATLPRPDPRLSRSRSDLFLPPSPESPPNWGDNLTRVNPFSLREDLRGGKIKLLDTPSKPVLPLVPPSPFPSTQLPLVTTPETLVQPGTPARRCRSLPSSPELPRRMETALPGPGPPAVGPSAEEKMECEGSSPEPEPPGPAPQLPLAVATDNFISTCSSASQPWSPRSGPVLNNNPPAVVVNSPQGWAGEPWNRAQHSLPRAAALERTEPSPPPSAPREPDEGLPCPGCCLGPFSFGFLSMCPRPTPAVARYRNLNCEAGSLLCHRGHHAKPPTPSLQLPGARS

SEQ ID NO: 801383 - protein, 725 aa, Homo sapiens; identical to SEQ ID NO: 801377

SEQ ID NO: 801384 - protein, 697 aa, Homo sapiens
PRQASPPAPRSAAATVTATARSRPKPRPCAERSGAASTRAQPAGAAGAGPGSSADLPFSGREPESGRPGSGWARAHGKRGLPGPWGPCHVRQARAGGPAMAGERPPLRGPGPGPGEVPGEGPPGPGGTGGGPGRGRPSSYRALRSAVSSLARVDDFHCAEKIGAGFFSEVYKVRHRQSGQVMVLKMNKLPSNRGNTLREVQLMNRLRHPNILRFMGVCVHQGQLHALTEYMNGGTLEQLLSSPEPLSWPVRLHLALDIARGLRYLHSKGVFHRDLTSKNCLVRREDRGFTAVVGDFGLAEKIPVYREGARKEPLAVVGSPYWMAPEVLRGELYDEKADVFAFGIVLCELIARVPADPDYLPRTEDFGLDVPAFRTLVGDDCPLPFLLLAIHCCNLEPSTRAPFTEITQHLEWILEQLPEPAPLTRTALTHNQGSVARGGPSATLPRPDPRLSRSRSDLFLPPSPESPPNWGDNLTRVNPFSLREDLRGGKIKLLDTPSKPVLPLVPPSPFPSTQLPLVTTPETLVQPGTPARRCRSLPSSPELPRRMETALPGPGPPAVGPSAEEKMECEGSSPEPEPPGPAPQLPLAVATDNFISTCSSASQPWSPRSGPVLNNNPPAVVVNSPQGWAGEPWNRAQHSLPRCLGPFSFGFLSMCPRPTPAVARYRNLNCEAGSLLCHRGHHAKPPTPSLQLPGARS

SEQ ID NO: 801385 - protein, 355 aa, Homo sapiens
PRQASPPAPRSAAATVTATARSRPKPRPCAERSGAASTRAQPAGAAGAGPGSSADLPFSGREPESGRPGSGWARAHGKRGLPGPWGPCHVRQARAGGPAMAGERPPLRGPGPGPGEVPGEGPPGPGGTGGGPGRGRPSSYRALRSAVSSLARVDDFHCAEKIGAGFFSEVYKVRHRQSGQVMVLKMNKLPSNRGNTLREVQLMNRLRHPNILRFMGVCVHQGQLHALTEYMNGGTLEQLLSSPEPLSWPVRLHLALDIARGLRYLHSKGVFHRDLTSKNCLVRREDRGFTAVVGDFGLAEKIPVYREGARKEPLAVVGSPYWMAPEVLRGELYDEKVRHQPFRSPRPSETLEVFS

SEQ ID NO: 801386 - protein, 600 aa, Homo sapiens
LDDCQKLIEHGVNTAEDLVREGEIAMLGGVGEENGKLWSFTKKASHIQLDSLPEVPLLVDVPCLSAQLDDSILNIVKDHIFKHGTVASRPPVQIEELIEKPGGIIVRWCKVDDDFTAQDYRLQFRKCTSNHFEDVYVGSETEFIVLHIDPNVDYQFKSAPEEMELEPELLLQEARENVEAAQSYRRELGHRLEGLREARRQIKESASQTRDVLKQHFNDLKGTLGKLLDERLVTLLQEVDTIEQETIKPLDDCQKLIEHGVNTAEDLVREGEIAMLGGVGEENEKLWSFTKKASHIQLDSLPEVPLLVDVPCLSAQLDDSILNIVKDHIFKHGTVASRPPVQIEELIEKPGGIIVRWCKVDDDFTAQDYRLQFRKCTSNHFEDVYVGSETEFIVLHIDPNVDYQFRVCARGDGRQEWSPWSVPQIGHSTLVPHEWTAGFEGYSLSSRRNIALRNDSESSGVLYSRAPTYFCGQTLTFRVETVGQPDRRDSIGVCAEKQDGYDSLQRDQAVCISTNGAVFVNGKEMTNQLPAVTSGSTVTFDIEAVTLGTTSNNEGGHFKLRVTISSNNREVVFDWLLDQSCGSLYFGCSFFYPGWKVLVF

SEQ ID NO: 801387 - protein, 406 aa, Homo sapiens
VAFRGVPEVPFTSQTRDVLKQHFNDLKGTLGKLLDERLVTLLQEVDTIEQETIKPLDDCQKLIEHGVNTAEDLVREGEIAMLGGVGEENEKLWSFTKKASHIQLDSLPEVPLLVDVPCLSAQLDDSILNIVKDHIFKHGTVASRPPVQIEELIEKPGGIIVRWCKVDDDFTAQDYRLQFRKCTSNHFEDVYVGSETEFIVLHIDPNVDYQFRVCARGDGRQEWSPWSVPQIGHSTLVPHEWTAGFEGYSLSSRRNIALRNDSESSGVLYSRAPTYFCGQTLTFRVETVGQPDRRDSIGVCAEKQDGYDSLQRDQAVCISTNGAVFVNGKEMTNQLPAVTSGSTVTFDIEAVTLGTTSNNEGGHFKLRVTISSNNREVVFDWLLDQSCGSLYFGCSFFYPGWKVLVF

SEQ ID NO: 801388 - protein, 438 aa, Homo sapiens
MELEPELLLQEARENVEAAQSYRRELGHRLEGLREARRQIKESASQTRDVLKQHFNDLKGTLGKLLDERLVTLLQEVDTIEQETIKPLDDCQKLIEHGVNTAEDLVREGEIAMLGGVGEENEKLWSFTKKASHIQLDSLPEVPLLVDVPCLSAQLDDSILNIVKDHIFKHGTVASRPPVQIEELIEKPGGIIVRWCKVDDDFTAQDYRLQFRKCTSNHFEDVYVGSETEFIVLHIDPNVDYQFRVCARGDGRQEWSPWSVPQIGHSTLVPHEWTAGFEGYSLSSRRNIALRNDSESSGVLYSRAPTYFCGQTLTFRVETVGQPDRRDSIGVCAEKQDGYDSLQRDQAVCISTNGAVFVNGKEMTNQLPAVTSGSTVTFDIEAVTLGTTSNNEGGHFKLRVTISSNNREVVFDWLLDQSCGSLYFGCSFFYPGWKVLVF

SEQ ID NO: 801389 - protein, 236 aa, Homo sapiens
SACARPRRAAWRRPVQSGTRARFRRPRGQMRGAMELEPELLLQEARENVEAAQSYRRELGHRLEGLREARRQIKESASQTRDVLKQHFNDLKGTLGKLLDERLVTLLQEVDTIEQETIKPLDDCQKLIEHGVNTAEDLVREGEIAMLGGVGEENEKLWSFTKKASHIQLDSLPEVPLLVDVPCLSAQLDDSILNIVKDHIFKHGTVASRPPVQIEELIEKPGGIIVRWCKVCNSEF

SEQ ID NO: 801390 - protein, 1157 aa, Homo sapiens
MTYVYSTDFKTMVNFNLHSQNDSAFKKFFYFLKHKNVDQNLVYLGQWRLFQFYKGNLRTANPTTWCVIVSYVIGKGSLYRFHWRQCGLEYLYGAYMNLQNASQKPDWLVGNKVRPYEMNCKLYIAQVLIAFSRGIQSFYKFMHTFFTRGYPQQPLENCTSLKTVTGLSLTLPSGLLIMRSWGQIDYVTGCSPCNSYLSASATALQCHLFINSCLKKIGREAFFFLFFFFNHTLWKNISRDSKFQKGGQILEVSISSFLKIWFEPYAHSLTFPFLLSFLFLCGSELSDIKMHVKSMYVLEGKVLAFETEVKWAQVAPAAVPSLSTLARSRSGSRSMRIDPQKNHFNSICYSIAYEDVKCELPVLLVDSSHNCPRPWSTHPGAEPALTHALLWCLGSCAGTLAQAGEGRPGGRGLVLLLEYRGLKCSFLHNVSVIAVTKAASSRKPGMELGDRYLSMTEIITIKEHLGESGHLISEFLSSGASVLTMLWVLTCLFHKSLAFSGQSVFDQKWPFGLVALAMLQGYEASPFTFQTMESVYGFRKRTLWLRGQLPVTFNQLHHFLNRYLLKKSVILFIEADCSKALKYDNLCSSNCSRMGTHPGLLNFTVPLGKEQGPLEFPSVSLSPFHKSLPVGATTPSLGLSTFNTSLIPFPGFLPSQLQVVLTESISSASCQSLEKSLRKTMRVGHKDMGPHICFGFAGNSGLGVFHVTCIGIFEDSILLEKKVRVVFLSLKPTVNGMIVASSEIPWPPEIKHGAMAPLSNLLSGRFLSPASYRPNLRAREHGGRVVLARTICLSYLVDSYPLSFMETHFLISETVAELATYLGLNWRRGDIFLISEMLSDFPLPGHCLTCTLQTQVSGKLVCLDTELRFCSAPFSSILSGSSSSSWSLNLMLIVLRTKMGPEDTKMSSTVSALRNRLRDFTRSVQYLISGEVTTAAVREEEPLSTDFGRNLFFVVCLFVCLFVCLRQGLALYPGWGAMARSWLTATSASWVQVILLPQPPEELGLQVRATTPSYFCIFSRDGVSLCWPGWSRTPDLMICPLSLPKCWDYKCEPPHLAWKEPLKISLRLVILFCDGGHWRELLFQSIMSSHWTLKILLVPLFYLSLEFPSGLYYVWQMTWVITFPPGLDHRSWKLLREHFAPTKDQILEPHIIDFISL

SEQ ID NO: 801391 - protein, 1068 aa, Homo sapiens
MCTEKINIPIGPCGGMCLSVKRRCEPVLKEFGFAWPESLNCSKFPPQNDHNHMCMEGPGDEEVPLPHKTPIQPGEECHSVGTNSDQYIWVKRSLNCVLKCGYDAGLYSRSAKEFTDIWMAVWASLCFISTAFTVLTFLIDSSRFSYPERPIIFLSMCYNIYSIAYIVRLTVGRERISCDFEEAAEPVLIQEGLKNTGCAIIFLLMYFFGMASSIWWVILTLTWFLAAGLKWGHEAIEMHSSYFHIAAWAIPAVKTIVILIMRLVDADELTGLCYVGNQNLDALTGFVVAPLFTYLVIGTLFIAAGLVALFKIRSNLQKDGTKTDKLERLMVKIGVFSVLYTVPATCVIACYFYEISNWALFRYSADDSNMAVEMLKIFMSLLVGITSGMWIWSAKTLHTWQKCSNRLVNSGKVKREKRGNGWVKLEKAVRLWYKASQPPCFLHFEGGNASILEEILLKVLCSESQFEQTQQQLSDPRQPTASHPDPSIKKPMILLQTLEDPKWKSQLEAFKAVKNQNVDHFSRLQLGAWRSCLDSRKSRAILFSPAGWDLSCELVTAGRNINFFNPFTILNTNWVFQIAKQSINTGNAGFRKVLQEFYSLADEHKHLLWCAVCCLELCGLHSQEVVLESFSAFVIKQLFEQTKVLYSHNIRYPVDFSSLSSSLKFQHLSSWLLLFSSFYVNDFKKGIFIEFLYCSMLKEGKRKGDSLSDNHLIQRKMRFTKLTYLTDPRDLIALSSGDLIYFTCVIASMQTPVWKSRNVKFLGNFAFTQIELCNFCVSITIKSTLLDHDIVYSTDFKTMVNFNLHSQNDSAFEKFFYFLKHKNVIRIWSTYDNGDFFSFIKGTEDSYSNYLVRNCFLVIGKGSLKISLEAVWPGVFIWCLMNLQNASQKPDWLVGNKVRPYEMNCKLYIAQVLIAFSRGIQKLLKFMHTFFTRGYPQQPLENCTSLKTVTGLSLTLPSGLLIMRSWGQIDYVTGCSPCNSYLSASATALQCHLFINSCLKKIGREAFFFLFFFFNHTLWKNISRDSKFQKGGQILEVSISSFLKIWFEPYAHSLTFPFLLSFLFLCGS

SEQ ID NO: 801392 - protein, 1068 aa, Homo sapiens; identical to SEQ ID NO: 801391

SEQ ID NO: 801393 - protein, 122 aa, Homo sapiens
MAWRGAGPSVPGAPGGVGLSLGLLLQLLLLLGPARGFGDEEERRCDPIRISMCQNLGYNVTKMPNLVGHELQTDAELQLTTFTPLIQYGCSSQLQVGAPTPTPGGTPWGGTLQTNFAEPMPS

SEQ ID NO: 801394 - protein, 122 aa, Homo sapiens; identical to SEQ ID NO: 801393

SEQ ID NO: 801395 - protein, 1068 aa, Homo sapiens; identical to SEQ ID NO: 801391

SEQ ID NO: 801396 - protein, 1068 aa, Homo sapiens; identical to SEQ ID NO: 801391

SEQ ID NO: 801397 - protein, 122 aa, Homo sapiens; identical to SEQ ID NO: 801393

SEQ ID NO: 801398 - protein, 187 aa, Homo sapiens
MATEPGGTPRGRRPPPLPNGPCAGGDGKREGGGAGEGRRGGARRPPARLGPAPRPRVPAWSPRPAGRRALPAGILGPPSQSSRLAPRPRDPCVSQDGGAGLGVTTGDDGAFSLRQDPTHQASLARAPLRRVAIRQRGRPPSAAYLRFTSADPVLRSVLQCAVLCCTHFCAYLLVQYALLCTVCPLCM

SEQ ID NO: 801399 - protein, 585 aa, Homo sapiens
MENRNLHSPEYLEMALPLFCKAMSKLPLAAQGKLIRLWSKYNADQIRRMMETFQQLITYKVISNEFNSRNLVNDDDAIVAASKCLKMVYYANVVGGEVDTNHNEEDDEEPIPESSELTLQELLGEERRNKKGPRVDPLETELGVKTLDCRKPLIPFEEFINEPLNEVLEMDKDYTFFKVETENKFSFMTCPFILNAVTKNLGLYYDNRIRMYSERRITVLYSLVQGQQLNPYLRLKVRRDHIIDDALVRLEMIAMENPADLKKQLYVEFEGEQGVDEGGVSKEFFQLVVEEIFNPDIGMFTYDESTKLFWFNPSSFETEGQFTLIGIVLGLAIYNNCILDVHFPMVVYRKLMGKKGTFRDLGDSHPVLYQSLKDLLEYEGNVEDDMMITFQISQTDLFGNPMMYDLKENGDKIPITNENRKEFVNLYSDYILNKSVEKQFKAFRRGFHMVTNESPLKYLFRPEEIELLICGSRNLDFQALEETTEYDGGYTRDSVLIREFWEIVHSFTDEQKRLFLQFTTGTDRAPVGGLGKLKMIIAKNGPDTERLPTSHTCFNVLLLPEYSSKEKLKERLLKAITYAKGFGML

SEQ ID NO: 801400 - protein, 585 aa, Homo sapiens; identical to SEQ ID NO: 801399

SEQ ID NO: 801401 - protein, 585 aa, Homo sapiens; identical to SEQ ID NO: 801399

SEQ ID NO: 801402 - protein, 585 aa, Homo sapiens; identical to SEQ ID NO: 801399

SEQ ID NO: 801403 - protein, 852 aa, Homo sapiens
MKRAAAKHLIERYYHQLTEGCGNEACTNEFCASCPTFLRMDNNAAAIKALELYKINAKLCDPHPSKKGASSAYLENSKGAPNNSCSEIKMNKKGARIDFKDVTYLTEEKVYEILELCREREDYSPLIRVIGRVFSSAEALVQSFRKVKQHTKEELKSLQAKDEDKDEDEKEKAACSAAAMEEDSEASSSRIGDSSQGDNNLQKLGPDDVSVDIDAIRRVYTRLLSNEKIETAFLNALVYLSPNVECDLTYHNVYSRDPNYLNLFIIVMENRNLHSPEYLEMALPLFCKAMSKLPLAAQGKLIRLWSKYNADQIRRMMETFQQLITYKVISNEFNSRNLVNDDDAIVAASKCLKMVYYANVVGGEVDTNHNEEDDEEPIPESSELTLQELLGEERRNKKGPRVDPLETELGVKTLDCRKPLIPFEEFINEPLNEVLEMDKDYTFFKVETENKFSFMTCPFILNAVTKNLGLYYDNRIRMYSERRITVLYSLVQGQQLNPYLRLKVRRDHIIDDALVRLEMIAMENPADLKKQLYVEFEGEQGVDEGGVSKEFFQLVVEEIFNPDIGMFTYDESTKLFWFNPSSFETEGQFTLIGIVLGLAIYNNCILDVHFPMVVYRKLMGKKGTFRDLGDSHPVLYQSLKDLLEYEGNVEDDMMITFQISQTDLFGNPMMYDLKENGDKIPITNENRKEFVNLYSDYILNKSVEKQFKAFRRGFHMVTNESPLKYLFRPEEIELLICGSRNLDFQALEETTEYDGGYTRDSVLIREFWEIVHSFTDEQKRLFLQFTTGTDRAPVGGLGKLKMIIAKNGPDTERLPTSHTCFNVLLLPEYSSKEKLKERLLKAITYAKGFGML

SEQ ID NO: 801404 - protein, 852 aa, Homo sapiens
MKRAAAKHLIERYYHQLTEGCGNEACTNEFCASCPTFLRMDNNAAAIKALELYKINAKLCDPHPSKKGASSAYLENSKGAPNNSCSEIKMNKKGARIDFKDVTYLTEEKVYEILELCREREDYSPLIRVIGRVFSSAEALVQSFRKVKQHTKEELKSLQAKDEDKDEDEKEKAACSAAAMEEDSEASSSRIGDSSQGDNNLQKLGPDDVSVDIDAIRRVYTRLLSNEKIETAFLNALVYLSPNVECDLTYHNVYSRDPNYLNLFIIVMENRNLHSPEYLEMALPLFCKAMSKLPLAAQGKLIRLWSKYNADQIRRMMETFQQLITYKVISNEFNSRNLVNDDDAIVAASKCLKMVYYANVVGGEVDTNHNEEDDEEPIPESSELTLQELLGEERRNKKGPRVDPLETELGVKTLDCRKPLIPFEEFINEPLNEVLEMDKDYTFFKVETENKFSFMTCPFILNAVTKNLGLYYDNRIRMYSERRITVLYSLVQGQQLNPYLRLKVRRDHIIDDALVRLEMIAMENPADLKKQLYVEFEGEQGVDEGGVSKEFFQLVVEEIFNPDIGMFTYDESTKLFWFNPSSFETEGQFTLIGIVLGLAIYNNCILDVHFPMVVYRKLMGKKGTFRDLGDSHPVLYQSLKDLLEYEGNVEDDMMITFQISQTDLFGNPMMYDLKENGDKIPITNENRKEFVNLYSDYILNKSVEKQFKAFRRGFHMVTNESPLKYLFRPEEIELLICGSRNLGFQALEETTEYDGGYTRDSVLIREFWEIVHSFTDEQKRLFLQFTTGTDRAPVGGLGKLKMIIAKNGPDTERLPTSHTCFNVLLLPEYSSKEKLKERLLKAITYAKGFGML

SEQ ID NO: 801405 - protein, 585 aa, Homo sapiens; identical to SEQ ID NO: 801399

SEQ ID NO: 801406 - protein, 852 aa, Homo sapiens; identical to SEQ ID NO: 801403

SEQ ID NO: 801407 - protein, 585 aa, Homo sapiens; identical to SEQ ID NO: 801399

SEQ ID NO: 801408 - protein, 585 aa, Homo sapiens; identical to SEQ ID NO: 801399

SEQ ID NO: 801409 - protein, 852 aa, Homo sapiens; identical to SEQ ID NO: 801403

SEQ ID NO: 801410 - protein, 852 aa, Homo sapiens
MLLIPPRYRHSVRTDGCNGAASLPIPIKNMTILRFQAPSRNFSQEFHTNCQRKKCRPKTSPCVVLIPLPAYCNFFSLTFRQCLKGHLYPSHPSMSHCIIQKHTFHLLPHLSPFTSTVLVCKELPGEGRGFYKYRVPSLFSPPRYGLAFINRHCKILMQVWGRYHCERLLMHGSFTESTVFKDPYNLLIAKISNIYNLDNTLAWAVASLATCFSIPVYPDFRWILLQFCLKSLPVLAQFPLVNLSHSQRFFPNPISFAQTSVSGISLLPHSQSPKNKILHLASLSTDHSLFLFKKCNLHPNHQNLSFLNVSQVVTSFPLNLSHHSFLLYTALTGPDPLTHPDILSSCLISLPDSHLPLPILFIVLEHYLANFNILCIQCLHRLPPHCPFQFGLVLHTFLAAFLPSIFTCHISQILFMTRYLKYLIHEDFINPQSASNASVVAQHNGVHFLVEQEESLGFLQSVLGSPLDTLSTFQLRNFLTSFFLLITFAWSVSKFMIETVIFKKKKQTILPFTCYYLHLSVILSVLPPKLLKMTEHAVECSEVSYFIHFLHKCIGICISILPKHQLLKRLLFPHEWSWYPCQRTVDHKYKTFWILSLTPLPYMSVVIPAPHCLDCCSLVVSLDLGCASPPFFFFFSPKSFCLFWVPCIAYEFLYDHCVNSCKTAGILIGISVELVDKFEKITAILMVLGFLFHDCGMSLHLLRSLFQCCFRDFSVQSLDVFNFFLSILLMPLELYDYFLIFIFVFITGVRNKINFCILILYIVAFLKFFFCHLVFFAYEICICEQKYFYFFLSSLDSYYFIFLPYVLASTSSTILDRSDKSRHLFLVPDFKGKAFSLSPLSMMLASCGFASS

SEQ ID NO: 801411 - protein, 545 aa, Homo sapiens
MATACKRSGEPQSDDIEASRMKRAAAKHLIERYYHQLTEGCGNEACTNEFCASCPTFLRMDNNAAAIKALELYKINAKLCDPHPSKKGASSAYLENSKGAPNNSCSEIKMNKKGARIDFKDVTYLTEEKVYEILELCREREDYSPLIRVIGRVFSSAEALVQSFRKVKQHTKEELKSLQAKDEDKDEDEKEKAACSAAAMEEDSEASSSRIGDSSQGDNNLQKLGPDDVSVDIDAIRRVYTRLLSNEKIETAFLNALVYLSPNVECDLTYHNVYSRDPNYLNLFIIVMENRNLHSPEYLEMALPLFCKAMSKLPLAAQGKLIRLWSKYNADQIRRMMETFQQLITYKVISNEFNSRNLVNDDDAIVAASKCLKMVYYANVVGGEVDTNHNEEDDEEPIPESSELTLQELLGEERRNKKGPRVDPLETELGVKTLDCRKPLIPFEEFINEPLNEVLEMDKDYTFFKVETENKFSFMTCPFILNAVTKNLGLYYDNRIRMYSERRITVLYSLVQGQQLNPYLRLKVRRDHIIDDALVRVSWAARLKT

SEQ ID NO: 801412 - protein, 346 aa, Homo sapiens
MATACKRSGEPQSDDIEASRMKRAAAKHLIERYYHQLTEGCGNEACTNEFCASCPTFLRMDNNAAAIKALELYKINAKLCDPHPSKKGASSAYLENSKGAPNNSCSEIKMNKKGARIDFKDVTYLTEEKVYEILELCREREDYSPLIRVIGRVFSSAEALVQSFRKVKQHTKEELKSLQAKDEDKDEDEKEKAACSAAAMEEDSEASSSRIGDSSQGDNNLQKLGPDDVSVDIDAIRRVYTRLLSNEKIETAFLNALVYLSPNVECDLTYHNVYSRDPNYLNLFIIVMENRNLHSPEYLEMALPLFCKAMSKLPGLGLPGQVDLTAATNSSNSSTVKAIQFPAFTN

SEQ ID NO: 801413 - protein, 170 aa, Homo sapiens
  misc_feature (162)..(162): Xaa can be any naturally occurring amino acid
  misc_feature (169)..(169): Xaa can be any naturally occurring amino acid
MATACKRSGEPQSDDIEASRMKRAAAKHLIERYYHQLTEGCGNEACTNEFCASCPTFLRMDNNAAAIKALELYKINAKLCDPHPSKKGASSAYLENSKGAPNNSCSVVAAAAQAGGDDRSGEPQSDDIEASRMKRAAAKHLIERYYHQLTEGCGNEACTNEXCASCPTXL

SEQ ID NO: 801414 - protein, 852 aa, Homo sapiens; identical to SEQ ID NO: 801403

SEQ ID NO: 801415 - protein, 1001 aa, Homo sapiens
MSLNNKEEQNIDILTTVDTSSTPNVMLLKYFFCPGTLLYILVFFELDLNLQEALEGKKGTINKVTGFPNKCKLFYTFYYYRTFQTYIKHENSLQPNFSGPWQLQQMSWSSSPWFPETTTFGDACLYREMIDREIHIKKKLEKGFEQNLPMLLIPPRYRHSVRTDGCNGAASLPIPIKNMTILRFQAPSRNFSQEFHTNCQRKKCRPKTSPCVVLIPLPAYCNFFSLTFRQCLKGHLYPSHPSMSHCIIQKHTFHLLPHLSPFTSTVLVCKELPGEGRGFYKYRVPSLFSLPVSGLAFINRHCKILMQVWGRYHCERLLMHGSFTESTVFKDPYNLLIAKISNIYNLDNTLAWAVASLATCFSIPVYPDFRWILLQFCLKSLPVLAQFPLVNLSHSQRFFPNPISFAQTSVSGISLLPHQSVVLKTKFFILHLYRPTILCFFLRNVTFTPIIKISHSSIVTGCHFFPPKPLPSFLPSFTALTGPDPLTHPDILSSCLISLPDSHLPLPILFIVLEHYLANFNILCIQCLHRLPPHCPFQFGLVLHTFLAAFLPSIFTCHISQILFMTRYLKYLIHEDFINPQSASNASVVAQHNGVHFLVEQEESLGFLQSVLGSPLDTLSTFQLRNFLTSFFLLITFAWSVSKFMIETVIFKKKKQTILPFTCYYLHLSVILSVLPPKLLKMTEHAVECSEVSYFIHFLHKCIGICISILPKHQLLKRLLFPHEWSWYPCQRTVDHKYKTFWILSLTPLPYMSVVIPAPHCLDCCSLVVSLDLGCASPPFFFFFSPKSFCLFWVPCIAYEFLYDHCVNSCKTAGILIGISVELVDKFEKYTAILMVLGFLFHDCGMSLHLLRSLFQCCFRDFSVQSLDVFNFFLSILLMPLELYDYFLIFIFVFITGVRNKINFCILILYIVAFLKFFFCHLVFLHMRSCICEQKYFYFFLSSLDSYYFIFFLSVLASTSSTILDRSDKSRHLFLVPDFKGKAFSLSPLSMMLASCGFASS

SEQ ID NO: 801416 - protein, 807 aa, Homo sapiens
MATACKRSGEPQSDDIEASRMKRAAAKHLIERYYHQLTEGCGNEACTNEFCASCPTFLRMDNNAAAIKALELYKINAKLCDPHPSKKGASSAYLENSKGAPNNSCSEIKMNKKGARIDFKDVTYLTEEKVYEILELCREREDYSPLIRVIGRVFSSAEALVQSFRKVKQHTKEELKSLQAKDEDKDEDEKEKAACSAAAMEEDSEASSSRIGDSSQGDNNLQKLGPDDVSVDIDAIRRVYTRLLSNEKIETAFLNALVYLSPNVECDLTYHNVYSRDPNYLNLFIIVMENRNLHSPEYLEMALPLFCKAMSKLPLAAQGKLIRLWSKYNADQIRRMMETFQQLITYKVISNEFNSRNLVNDDDAIVAASKCLKMVYYANVVGGEVDTNHNEEDDEEPIPESSELTLQELLGEERRNKKGPRVDPLETELGVKTLDCRKPLIPFEEFINEPLNEVLEMDKDYTFFKVETENKFSFMTCPFILNAVTKNLGLYYDNRIRMYSERRITVLYSLVQGQQLNPYLRLKVRRDHIIDDALVRLEMIAMENPADLKKQLYVEFEGEQGVDEGGVSKEFFQLVVEEIFNPDIGMFTYDESTKLFWFNPSSFETEGQFTLIGIVLGLAIYNNCILDVHFPMVVYRKLMGKKGTFRDLGDSHPVLYQSLKDLLEYEGNVEDDMMITFQISQTDLFGNPMMYDLKENGDKIPITNENRKEFVNLYSDYILNKSVEKQFKAFRRGFHMVTNESPLKYLFRPEEIELLICGSRNLDFQALEETTEYDGGYTRDSVLIRELWEVVQSIAVDQCRLTARESA

SEQ ID NO: 801417 - protein, 132 aa, Homo sapiens
MATACKRSGEPQSDDIEASRMKRAAAKHLIERYYHQLTEGCGNEACTNEFCASCPTFLRMDNNAAAIKALELYKINAKLCDPHPSKKGASSAYLENSKGAPNNSCSEIKMNKKGARIDFKGKMFYFQLRIVA

SEQ ID NO: 801418 - protein, 168 aa, Homo sapiens [sequence omitted]

SEQ ID NO: 801419 - protein, 585 aa, Homo sapiens; identical to SEQ ID NO: 801399

SEQ ID NO: 801420 - protein, 585 aa, Homo sapiens; identical to SEQ ID NO: 801399

SEQ ID NO: 801421 - protein, 585 aa, Homo sapiens; identical to SEQ ID NO: 801399

SEQ ID NO: 801422 - protein, 585 aa, Homo sapiens; identical to SEQ ID NO: 801399

SEQ ID NO: 801423 - protein, 852 aa, Homo sapiens [sequence omitted]

SEQ ID NO: 801424 - protein, 585 aa, Homo sapiens; identical to SEQ ID NO: 801399

SEQ ID NO: 801425 - protein, 293 aa, Homo sapiens
  misc_feature (233)..(233): Xaa can be any naturally occurring amino acid
MKHYEVEILDAKTREKLCFLDKVEPHATIAEIKNLFTKTHPQWYPARQSLRLDPKGKSLKDEDVLQKLPVGTTATLYFRDLGAQISWVTVFLTEYAGPLFIYLLFYFRVPFIYGHKYDFTSSRHTVVHLACICHSFHYIKRLLETLFVHRFSHGTMPLRNIFKNCTYYWGFAAWMAYYINHPLYTPPTYGAQQVKLALAIFVICQLGNFSIHMALRDLRPAVGPKAEDPYPPXPLTWFFCWGPPHYHLKVGSGLVPLMTKSPVPCFLGANQYLWPGSTEYEDSGTRLDGLSFC

SEQ ID NO: 801426 - protein, 308 aa, Homo sapiens [sequence omitted]

SEQ ID NO: 801427 - protein, 153 aa, Homo sapiens
MPLRNIFKNCTYYWGFAAWMAYYINHPLYTPPTYGAQQVKLALAIFVICQLGNFSIHMALRDLRPAGSKTRKIPYPTKNPFTWLFLLVSCPNYTYEVGSWIGFAIMTQCLPVALFSLVGFTQMTIWAKGKHRSYLKEFRDYPPLRMPIIPFLL

SEQ ID NO: 801428 - protein, 85 aa, Homo sapiens
CWILKEFRDYPPFTWLFLLVSCPNYTYEVGSWIGFAIMTQCLPVALFSLVGFTQMTIWAKGKHRSYLKEFRDYPPLRMPIIPFLL

SEQ ID NO: 801429 - protein, 308 aa, Homo sapiens [sequence omitted]

SEQ ID NO: 801430 - protein, 308 aa, Homo sapiens [sequence omitted]

SEQ ID NO: 801431 - protein, 308 aa, Homo sapiens [sequence omitted]

SEQ ID NO: 801432 - protein, 308 aa, Homo sapiens [sequence omitted]

SEQ ID NO: 801433 - protein, 308 aa, Homo sapiens [sequence omitted]

SEQ ID NO: 801434 - protein, 327 aa, Homo sapiens
TFFASYSLMKHYEGGDSGRKDKGEAVFLGQELTSLRLCFPQVEPHATIAEIKNLFTKTHPQWYPARQSLRLDPKGKSLKDEDVLQKLPVGTTATLYFRDLGAQISWVTVFLTEYAGPLFIYLLFYFRVPFIYGHKYDFTSSRHTVVHLACICHSFHYIKRLLETLFVHRFSHGTMPLRNIFKNCTYYWGFAAWMAYYINHPLYTPPTYGAQQVKLALAIFVICQLGNFSIHMALRDLRPAGSKTRKIPYPTKNPFTWLFLLVSCPNYTYEVGSWIGFAIMTQCLPVALFSLVGFTQMTIWAKGKHRSYLKEFRDYPPLRMPIIPFLL

SEQ ID NO: 801435 - protein, 292 aa, Homo sapiens
RRTSWRPPARRTVAEIKNLFTKTHPQWYPARQSLRLDPKGKSLKDEDVLQKLPVGTTATLYFRDLGAQISWVTVFLTEYAGPLFIYLLFYFRVPFIYGHKYDFTSSRHTVVHLACICHSFHYIKRLLETLFVHRFSHGTMPLRNIFKNCTYYWGFAAWMAYYINHPLYTPPTYGAQQVKLALAIFVICQLGNFSIHMALRDLRPAGSKTRKIPYPTKNPFTWLFLLVSCPNYTYEVGSWIGFAIMTQCLPVALFSLVGFTQMTIWAKGKHRSYLKEFRDYPPLRMPIIPFLL

SEQ ID NO: 801436 - protein, 282 aa, Homo sapiens
EVTLPDPYTSLMTHPQWYPARQSLRLDPKGKSLKDEDVLQKLPVGTTATLYFRDLGAQISWVTVFLTEYAGPLFIYLLFYFRVPFIYGHKYDFTSSRHTVVHLACICHSFHYIKRLLETLFVHRFSHGTMPLRNIFKNCTYYWGFAAWMAYYINHPLYTPPTYGAQQVKLALAIFVICQLGNFSIHMALRDLRPAGSKTRKIPYPTKNPFTWLFLLVSCPNYTYEVGSWIGFAIMTQCLPVALFSLVGFTQMTIWAKGKHRSYLKEFRDYPPLRMPIIPFLL

SEQ ID NO: 801437 - protein, 306 aa, Homo sapiens
LHLAMKDLLTNSLSFLTNLRVPPPMQATSPPSSLNVVPSPPSKGNIPYPSRLFSLQEKRRDVLQKLPVGTTATLYFRDLGAQISWVTVFLTEYAGPLFIYLLFYFRVPFIYGHKYDFTSSRHTVVHLACICHSFHYIKRLLETLFVHRFSHGTMPLRNIFKNCTYYWGFAAWMAYYINHPLYTPPTYGAQQVKLALAIFVICQLGNFSIHMALRDLRPAGSKTRKIPYPTKNPFTWLFLLVSCPNYTYEVGSWIGFAIMTQCLPVALFSLVGFTQMTIWAKGKHRSYLKEFRDYPPLRMPIIPFLL

SEQ ID NO: 801438 - protein, 336 aa, Homo sapiens
MKHYEVEILDAKTREKLCFLDKVEPHATIAEIKNLFTKTHPQWYPARQSLRLDPKGKSLKDEDVLQKLPVGTTATLYFRDLGAQISWVTVFLTEYAGPLFIYLLFYFRVPFIYGHKYDFTSSRHTVVQYVGQVGGGKGKAEDLPDQPQLSLLPPTSLACICHSFHYIKRLLETLFVHRFSHGTMPLRNIFKNCTYYWGFAAWMAYYINHPLYTPPTYGAQQVKLALAIFVICQLGNFSIHMALRDLRPAGSKTRKIPYPTKNPFTWLFLLVSCPNYTYEVGSWIGFAIMTQCLPVALFSLVGFTQMTIWAKGKHRSYLKEFRDYPPLRMPIIPFLL

SEQ ID NO: 801439 - protein, 335 aa, Homo sapiens
MKHYEVEILDAKTREKLCFLDKVEPHATIAEIKNLFTKTHPQWYPARQSLRLDPKGKSLKDEDVLQKLPVGTTATLYFRDLGAQISWVTVFLTEYAGPLFIYLLFYFRVPFIYGHKYDFTSSRHTVVHLACICHSFHYIKRLLETLFVHRFSHGTMPLRNIFKNCTYYWGFAAWMAYYINHPLYTPPTYGAQQVKLALAIFVICQLGNFSIHMALRDLRPAGRVPVLGAGGQLGWVRGSDFLLLSCLPGSKTRKIPYPTKNPFTWLFLLVSCPNYTYEVGSWIGFAIMTQCLPVALFSLVGFTQMTIWAKGKHRSYLKEFRDYPPLRMPIIPFLL

SEQ ID NO: 801440 - protein, 134 aa, Homo sapiens
MAYYINHPLYTPPTYGAQQVKLALAIFVICQLGNFSIHMALRDLRPAGSKTRKIPYPTKNPFTWLFLLVSCPNYTYEVGSWIGFAIMTQCLPVALFSLVGFTQMTIWAKGKHRSYLKEFRDYPPLRMPIIPFLL

SEQ ID NO: 801441 - protein, 241 aa, Homo sapiens
MKHYEVEILDAKTREKLCFLDKVEPHATIAEIKNLFTKTHPQWYPARQSLRLDPKGKSLKDEDVLQKLPVGTTATLYFRDLGAQISWVTVFLTEYAGPLFIYLLFYFRVPFIYGHKYDFTSSRHTVVHLACICHSFHYIKRLLETLFVHRFSHGTMPLRNIFKNCTYYWGFAAWMAYYINHPLYTPPTYGAQQVKLALAIFVGPRRGRSHTPPRTPSRGSSCWCPAPTTPTRWGPGSVSPS

SEQ ID NO: 801442 - protein, 170 aa, Homo sapiens
MKHYEVEILDAKTREKLCFLDKVEPHATIAEIKNLFTKTHPQWYPARQSLRLDPKGKSLKDEDVLQKLPVGTTATLYFRDLGAQISWVTVFLTEYAGPLFIYLLFYFRVPFIYGHKYDFTSSRHTVVHLACICHSFHYIKRLLETLFVHRFSHGTMPLRNIFKRGDPHRT

SEQ ID NO: 801443 - protein, 90 aa, Homo sapiens
  misc_feature (5)..(5): Xaa can be any naturally occurring amino acid
KKKKXYRPNPGWVYCAAQLGSSSRGAVAAVGGSHEALRGKKRETGAVWPLLTHSFSFFAGPRDPTFWSCAPKEEPDGAGAVGKRCAPGHS

SEQ ID NO: 801444 - protein, 154 aa, Homo sapiens
MKHYEVEILDAKTREKLCFLDKVEPHATIAEIKNLFTKTHPQWYPARQSLRLDPKGKSLKDEDVLQKLPVGTTATLYFRDLGAQISWVTVFLTEYAGPLFIYLLFYFRVPFIYGHKYDFTSSRHTVVHLACICHSFHSSPAPGIKPACPSRKKK

SEQ ID NO: 801445 - protein, 86 aa, Homo sapiens
  misc_feature (6)..(7): Xaa can be any naturally occurring amino acid
MDRGKXXFRCRDSLFNPDQVEILDAKTREKLCFLDKVEPHATIAEIKNLFTKTRGRSCGVLGSLHPGNPEKLAQLSSNRNKTRIGK

SEQ ID NO: 801446 - protein, 121 aa, Homo sapiens
MHDVIFHPQWYPARQSLRLDPKGKSLKDEDVLQKLPVGTTATLYFRDLGAQISWVTVFLTEYAGPLFIYLLFYFRVPFIYGHKYDFTSSRHTVVHLACICHSFHSSPAPGIKPACPSRKKK

SEQ ID NO: 801447 - protein, 308 aa, Homo sapiens [sequence omitted]

SEQ ID NO: 801448 - protein, 70 aa, Homo sapiens
MKHYEVEILDAKTREKLCFLDKVEPHATIAEIKNLFTKTHPQWYPARQSLRLDPKGKSREGSLMSVEWGH

SEQ ID NO: 801449 - protein, 308 aa, Homo sapiens [sequence omitted]

SEQ ID NO: 801450 - protein, 308 aa, Homo sapiens [sequence omitted]

SEQ ID NO: 801451 - protein, 322 aa, Homo sapiens
  misc_feature (6)..(7): Xaa can be any naturally occurring amino acid
MDRGKXXFRCRDSLFNPDQVEILDAKTREKLCFLDKVEPHATIAEIKNLFTKTHPQWYPARQSLRLDPKGKSLKDEDVLQKLPVGTTATLYFRDLGAQISWVTVFLTEYAGPLFIYLLFYFRVPFIYGHKYDFTSSRHTVVHLACICHSFHYIKRLLETLFVHRFSHGTMPLRNIFKNCTYYWGFAAWMAYYINHPLYTPPTYGAQQVKLALAIFVICQLGNFSIHMALRDLRPAGSKTRKIPYPTKNPFTWLFLLVSCPNYTYEVGSWIGFAIMTQCLPVALFSLVGFTQMTIWAKGKHRSYLKEFRDYPPLRMPIIPFLL

SEQ ID NO: 801452 - protein, 327 aa, Homo sapiens
MKHYEVEILDAKTREKLCFLDKVEPHATIAEIKNLFTKTHPQWYPARQSLRLDPKGKSLKDEDVLQKLPVGTTATLYFRDLGAQISWVTVFLTEYAGPLFIYLLFYFRVPFIYGHKYDFTSSRHTVVHLACICHSFHYIKRLLETLFVHRFSHGTMPLRNIFKNCTYYWGFAAWMAYYINHPLYTPPTYGAQQVKLALAIFVICQLGNFSIHMALRDLRPAGSKTRKIPYPTKNPFTWLFLLVSCPNYTYEVGSWIGFAIMTQCLPVALFSLVGFTQMTIWAKGKHRSYLKEFRDYPPLGMQNPSVEVTCESAHRGRERGQVRRKRA

SEQ ID NO: 801453 - protein, 320 aa, Homo sapiens
  misc_feature (7)..(9): Xaa can be any naturally occurring amino acid
PEDVLGXXXFATHSPLQEEPSGRIEREKLCLLDKVEPHATIAEIKNLFTKTHPQWYPARQSLRLDPKGKSLKDEDVLQKLPVGTTATLYFRDLGAQISWVTVFLTEYAGPLFIYLLFYFRVPFIYGHKYDFTSSRHTVVHLACICHSFHYIKRLLETLFVHRFSHGTMPLRNIFKNCTYYWGFAAWMAYYINHPLYTPPTYGAQQVKLALAIFVICQLGNFSIHMALRDLRPAGSKTRKIPYPTKNPFTWLFLLVSCPNYTYEVGSWIGFAIMTQCLPVALFSLVGFTQMTIWAKGKHRSYLKEFRDYPPLRMPIIPFLL

SEQ ID NO: 801454 - protein, 340 aa, Homo sapiens
MKHYEVEILDAKTREKLCFLDKVEPHATIAEIKNLFTKTHPQWYPARQSLRLDPSEYSCPLGPPPGLLGGSGRRPGYPLSPGRLSAEGKSLKDEDVLQKLPVGTTATLYFRDLGAQISWVTVFLTEYAGPLFIYLLFYFRVPFIYGHKYDFTSSRHTVVHLACICHSFHYIKRLLETLFVHRFSHGTMPLRNIFKNCTYYWGFAAWMAYYINHPLYTPPTYGAQQVKLALAIFVICQLGNFSIHMALRDLRPAGSKTRKIPYPTKNPFTWLFLLVSCPNYTYEVGSWIGFAIMTQCLPVALFSLVGFTQMTIWAKGKHRSYLKEFRDYPPLRMPIIPFLL

SEQ ID NO: 801455 - protein, 338 aa, Homo sapiens
MKHYEVEILDAKTREKLCFLDKVEPHATIAEIKNLFTKTHPQWYPARQSLRLDPKGKSLKDEDVLQKLPVGTTATLYFRDLGAQISWVTVFLTEYAGPLFIYLLFYFRVPFIYGHKYDFTSSRHTVVHLACICHSFHYIKRLLETLFVHRFSHGTMPLRNIFKNCTYYWGFAAWMAYYINHPLYTPPSKWPQTILPSPTVPTQRVLPSWAPLPASSSAYGAQQVKLALAIFVICQLGNFSIHMALRDLRPAGSKTRKIPYPTKNPFTWLFLLVSCPNYTYEVGSWIGFAIMTQCLPVALFSLVGFTQMTIWAKGKHRSYLKEFRDYPPLRMPIIPFLL

SEQ ID NO: 801456 - protein, 262 aa, Homo sapiens
MKHYEVEILDAKTREKLCFLDKVEPHATIAEIKNLFTKTHPQWYPARQSLRLDPKGKSLKDEDVLQKLPVGTTATLYFRDLGAQISWVTVFLTEYAGPLFIYLLFYFRVPFIYGHKYDFTSSRHTVVHLACICHSFHYIKRLLETLFVHRFSHGTMPLRNIFKNCTYYWGFAAWMAYYINHPLYTPPTYGAQQVKLALAIFVICQLGNFSIHMALRDLRPAGSKTRKIPYPTKNPFTWLFLLVSCPNYTYEWPCSPWWASPR

SEQ ID NO: 801457 - protein, 299 aa, Homo sapiens
MKHYEVEILDAKTREKLCFLDKVEPHATIAEIKNLFTKTHPQWYPARQSLRLDPKGKSLKDEDVLQKLPVGTTATLYFRDLGAQISWVTVFLTEYAGPLFIYLLFYFRVPFIYGHKYDFTSSRHTVVHLACICHSFHYIKRLLETLFVHRFSHGTMPLRNIFKNCTYYWGFAAWMAYYINHPLYTPPNLPARQLLHPHGPAGPAARWVQDAEDPIPHQEPLHVALPAGVLPQLHLRGGVLDRFRHHDAVSPSGPVLPGGLHPDDHLGQGQAPQLPEGVPGLPAPAHAHHPLPALSAHPC

SEQ ID NO: 801458 - protein, 363 aa, Homo sapiens
MKHYEVEILDAKTREKLCFLDKVEPHATIAEIKNLFTKTHPQWYPARQSLRLDPKGKSLKDEDVLQKLPVGTTATLYFRDLGAQISWVTVFLTEYAGPLFIYLLFYFRVPFIYGHKYDFTSSRHTVVQYVGQVGGGKGKAEDLPDQPQLSLLPPTSLACICHSFHYIKRLLETLFVHRFSHGTMPLRNIFKNCTYYWGFAAWMAYYINHPLYTPPTYGAQQVKLALAIFVICQLGNFSIHMALRDLRPAGRVPVLGAGGQLGWVRGSDFLLLSCLPGSKTRKIPYPTKNPFTWLFLLVSCPNYTYEVGSWIGFAIMTQCLPVALFSLVGFTQMTIWAKGKHRSYLKEFRDYPPLRMPIIPFLL

SEQ ID NO: 801459 - protein, 123 aa, Homo sapiens
MKHYEVEILDAKTREKLCFLDKVEPHATIAEIKNLFTKTHPQWYPARQSLRLDPKGKSLKDEDVLQKLPVGTTATLYFRDLGAQISWVTVFLTEYAGPLFIYLLFSCIQERDEMISFTGEGAL

SEQ ID NO: 801460 - protein, 336 aa, Homo sapiens
MKLGAREAGIGSQTPAEAKVTVRASPSLGSKYSIHVWTHGSLDRRVSHTFSAAWTGPPRLSRPLALARYPCRATDRSGVLDELFGKKWQKRCEGETDEEEQSAKNKISKLVEEVKYFSKFHTPLVKLPESHFPLLLQRLLSLYGNSFTSSFIPFLLSSEPLKTQLYPLCTTETECPYHKPLGFESGEVTPDQITCSNPEQYVGWYSSWTANKARLNSQGFGCAWLSKFQDSSQWLQIDLKEIKVISGILTQGRCDIDEWMTKYSVQYRTDERLNWIYYKDQTGNNRVFYGNSDRTSTVQNLLRPPIISRFIRLIPLGWHVRIAIRMELLECVSKCA

SEQ ID NO: 801461 - protein, 229 aa, Homo sapiens
EDEGKMSRKIEGFLLLLLFGYEATLGLSSTEDEGEDPWYQKACKCDCQGGPNALWSAGATSLDCIPECPYHKPLGFESGEVTPDQITCSNPEQYVGWYSSWTANKARLNSQGFGCAWLSKFQDSSQWLQIDLKEIKVISGILTQGRCDIDEWMTKYSVQYRTDERLNWIYYKDQTGNNRVFYGNSDRTSTVQNLLRPPIISRFIRLIPLGWHVRIAIRMELLECVSKCA

SEQ ID NO: 801462 - protein, 124 aa, Homo sapiens
WTHGSLDRRVSHTFSAAWTGPPRLSRPLALARYPCRATDRSGVLDELFGKKWQKRCEGETDEEEQSAKNKVTGRGGTGFFPSPLPTLSELVALSGAAAAGGGGKQKGGSVIKCSKWRGLRDTQG

SEQ ID NO: 801463 - protein, 644 aa, Homo sapiens
MNAAASSYPMASLYVGDLHSDVTEAMLYEKFSPAGPVLSIRVCRDMITRRSLGYAYVNFQQPADAERALDTMNFDVIKGKPIRIMWSQRDPSLRKSGVGNVFIKNLDKSIDNKALYDTFSAFGNILSCKVVCDENGSKGYAFVHFETQEAADKAIEKMNGMLLNDRKVFVGRFKSRKEREAELGAKAKEFTNVYIKNFGEEVDDESLKELFSQFGKTLSVKVMRDPNGKSKGFGFVSYEKHEDANKAVEEMNGKEISGKIIFVGRAQKKVERQAELKRKFEQLKQERISRYQGVNLYIKNLDDTIDDEKLRKEFSPFGSITSAKVMLEDGRSKGFGFVCFSSPEEATKAVTEMNGRIVGSKPLYVALAQRKEERKAHLTNQYMQRVAGMRALPANAILNQFQPAAGGYFVPAVPQAQGRPPYYTPNQLAQMRPNPRWQQGGRPQGFQGMPSAIRQSGPRPTLRHLAPTGSECPDRLAMDFGGAGAAQQGLTDSCQSGGVPTAVQNLAPRAAVAAAAPRAVAPYKYASSVRSPHPAIQPLQAPQPAVHVQGQEPLTASMLAAAPPQEQKQMLGERLFPLIQTMHSNLAGKITGMLLEIDNSELLHMLESPESLRSKVDEAVAVLQAHHAKKEAAQKVGAVAAATS

SEQ ID NO: 801464 - protein, 660 aa, Homo sapiens
MNAAASSYPMASLYVGDLHSDVTEAMLYEKFSPAGPVLSIRVCRDMITRRSLGYAYVNFQQPADAERALDTMNFDVIKGKPIRIMWSQRDPSLRKSGVGNVFIKNLDKSIDNKALYDTFSAFGNILSCKVVCDENGSKGYAFVHFETQEAADKAIEKMNGMLLNDRKVFVGRFKSRKEREAELGAKAKEFTNVYIKNFGEEVDDESLKELFSQFGKTLSVKVMRDPNGKSKGFGFVSYEKHEDANKAVEEMNGKEISGKIIFVGRAQKKVERQAELKRKFEQLKQERISRYQGVNLYIKNLDDTIDDEKLRKEFSPFGSITSAKVMLEDGRSKGFGFVCFSSPEEATKAVTEMNGRIVGSKPLYVALAQRKEERKAHLTNQYMQRVAGMRALPANAILNQFQPAAGGYFVPAVPQAQGRPPYYTPNQLAQMRPNPRWQQGGRPQGFQGMPSAIRQSGPRPTLRHLAPTGNAPASRGLPTTTQRVGSECPDRLAMDFGGAGAAQQGLTDSCQSGGVPTAVQNLAPRAAVAAAAPRAVAPYKYASSVRSPHPAIQPLQAPQPAVHVQGQEPLTASMLAAAPPQEQKQMLGERLFPLIQTMHSNLAGKITGMLLEIDNSELLHMLESPESLRSKVDEAVAVLQAHHAKKEAAQKVGAVAAATS

SEQ ID NO: 801465 - protein, 651 aa, Homo sapiens [sequence omitted]

SEQ ID NO: 801466 - protein, 631 aa, Homo sapiens
MNAAASSYPMASLYVGDLHSDVTEAMLYEKFSPAGPVLSIRVCRDMITRRSLGYAYVNFQQPADAERALDTMNFDVIKGKPIRIMWSQRDPSLRKSGVGNVFIKNLDKSIDNKALYDTFSAFGNILSCKVVCDENGSKGYAFVHFETQEAADKAIEKMNGMLLNDRKVFVGRFKSRKEREAELGAKAKEFTNVYIKNFGEEVDDESLKELFSQFGKTLSVKVMRDPNGKSKGFGFVSYEKHEDANKAVEEMNGKEISGKIIFVGRAQKKVERQAELKRKFEQLKQERISRYQGVNLYIKNLDDTIDDEKLRKEFSPFGSITSAKVMLEDGRSKGFGFVCFSSPEEATKAVTEMNGRIVGSKPLYVALAQRKEERKAHLTNQYMQRVAGMRALPANAILNQFQPAAGGYFVPAVPQAQGRPPYYTPNQLAQMRPNPRWQQGGRPQGFQGMPSAIRQSGPRPTLRHLAPTGNAPASRGLPTTTQRVGVPTAVQNLAPRAAVAAAAPRAVAPYKYASSVRSPHPAIQPLQAPQPAVHVQGQEPLTASMLAAAPPQEQKQMLGERLFPLIQTMHSNLAGKITGMLLEIDNSELLHMLESPESLRSKVDEAVAVLQAHHAKKEAAQKVGAVAAATS

SEQ ID NO: 801467 - protein, 548 aa, Homo sapiens
MNAAASSYPMASLYVGDLHSDVTEAMLYEKFSPAGPVLSIRVCRDMITRRSLGYAYVNFQQPADAERALDTMNFDVIKGKPIRIMWSQRDPSLRKSGVGNVFIKNLDKSIDNKALYDTFSAFGNILSCKVVCDENGSKGYAFVHFETQEAADKAIEKMNGMLLNDRKVFVGRFKSRKEREAELGAKAKEFTNVYIKNFGEEVDDESLKELFSQFGKTLSVKVMRDPNGKSKGFGFVSYEKHEDANKAVEEMNGKEISGKIIFVGRAQKKVERQAELKRKFEQLKQERISRYQGVNLYIKNLDDTIDDEKLRKEFSPFGSITSAKVMLEDGRSKGFGFVCFSSPEEATKAVTEMNGRIVGSKPLYVALAQRKEERKAHLTNQYMQRVAGMRALPANAILNQFQPAAGGYFVPAVPQAQGRPPYYTPNQLAQMRPNPRWQQGGRPQGFQGMPSAIRQSGPRPTLRHLAPTGSECPDRLAMDFGGAGAAQQGLTDSCQSGGVPTAVQNLAPRAAVAAAAPRAVAPYKYASSVRSPHPAIQPLQVRFTRQNA

SEQ ID NO: 801468 - protein, 615 aa, Homo sapiens
MNAAASSYPMASLYVGDLHSDVTEAMLYEKFSPAGPVLSIRVCRDMITRRSLGYAYVNFQQPADAERALDTMNFDVIKGKPIRIMWSQRDPSLRKSGVGNVFIKNLDKSIDNKALYDTFSAFGNILSCKVVCDENGSKGYAFVHFETQEAADKAIEKMNGMLLNDRKVFVGRFKSRKEREAELGAKAKEFTNVYIKNFGEEVDDESLKELFSQFGKTLSVKVMRDPNGKSKGFGFVSYEKHEDANKAVEEMNGKEISGKIIFVGRAQKKVERQAELKRKFEQLKQERISRYQGVNLYIKNLDDTIDDEKLRKEFSPFGSITSAKVMLEDGRSKGFGFVCFSSPEEATKAVTEMNGRIVGSKPLYVALAQRKEERKAHLTNQYMQRVAGMRALPANAILNQFQPAAGGYFVPAVPQAQGRPPYYTPNQLAQMRPNPRWQQGGRPQGFQGMPSAIRQSGPRPTLRHLAPTGVPTAVQNLAPRAAVAAAAPRAVAPYKYASSVRSPHPAIQPLQAPQPAVHVQGQEPLTASMLAAAPPQEQKQMLGERLFPLIQTMHSNLAGKITGMLLEIDNSELLHMLESPESLRSKVDEAVAVLQAHHAKKEAAQKVGAVAAATS

SEQ ID NO: 801469 - protein, 642 aa, Homo sapiens
MNAAASSYPMASLYVGDLHSDVTEAMLYENRRSLGYAYVNFQQPADAERALDTMNFDVIKGKPIRIMWSQRDPSLRKSGVGNVFIKNLDKSIDNKALYDTFSAFGNILSCKVVCDENGSKGYAFVHFETQEAADKAIEKMNGMLLNDRKVFVGRFKSRKEREAELGAKAKEFTNVYIKNFGEEVDDESLKELFSQFGKTLSVKVMRDPNGKSKGFGFVSYEKHEDANKAVEEMNGKEISGKIIFVGRAQKKVERQAELKRKFEQLKQERISRYQGVNLYIKNLDDTIDDEKLRKEFSPFGSITSAKVMLEDGRSKGFGFVCFSSPEEATKAVTEMNGRIVGSKPLYVALAQRKEERKAHLTNQYMQRVAGMRALPANAILNQFQPAAGGYFVPAVPQAQGRPPYYTPNQLAQMRPNPRWQQGGRPQGFQGMPSAIRQSGPRPTLRHLAPTGNAPASRGLPTTTQRVGSECPDRLAMDFGGAGAAQQGLTDSCQSGGVPTAVQNLAPRAAVAAAAPRAVAPYKYASSVRSPHPAIQPLQAPQPAVHVQGQEPLTASMLAAAPPQEQKQMLGERLFPLIQTMHSNLAGKITGMLLEIDNSELLHMLESPESLRSKVDEAVAVLQAHHAKKEAAQKVGAVAAATS

SEQ ID NO: 801470 - protein, 550 aa, Homo sapiens
RYEALGVTFSALETNCSCKVVCDENGSKGYAFVHFETQEAADKAIEKMNGMLLNDRKVFVGRFKSRKEREAELGAKAKEFTNVYIKNFGEEVDDESLKELFSQFGKTLSVKVMRDPNGKSKGFGFVSYEKHEDANKAVEEMNGKEISGKIIFVGRAQKKVERQAELKRKFEQLKQERISRYQGVNLYIKNLDDTIDDEKLRKEFSPFGSITSAKVMLEDGRSKGFGFVCFSSPEEATKAVTEMNGRIVGSKPLYVALAQRKEERKAHLTNQYMQRVAGMRALPANAILNQFQPAAGGYFVPAVPQAQGRPPYYTPNQLAQMRPNPRWQQGGRPQGFQGMPSAIRQSGPRPTLRHLAPTGNAPASRGLPTTTQRVGSECPDRLAMDFGGAGAAQQGLTDSCQSGGVPTAVQNLAPRAAVAAAAPRAVAPYKYASSVRSPHPAIQPLQAPQPAVHVQGQEPLTASMLAAAPPQEQKQMLGERLFPLIQTMHSNLAGKITGMLLEIDNSELLHMLESPESLRSKVDEAVAVLQAHHAKKEAAQKVGAVAAATS

SEQ ID NO: 801471 - protein, 668 aa, Homo sapiens
  misc_feature (340)..(340): Xaa can be any naturally occurring amino acid
MNAAASSYPMASLYVGDLHSDVTEAMLYEKFSPAGPVLSIRVCRDMITRRSLGYAYVNFQQPADAERALDTMNFDVIKGKPIRIMWSQRDPSLRKSGVGNVFIKNLDKSIDNKALYDTFSAFGNILSCKVVCDENGSKGYAFVHFETQEAADKAIEKMNGMLLNDRKVFVGRFKSRKEREAELGAKAKEFTNVYIKNFGEEVDDESLKELFSQFGKTLSVKVMRDPNGKSKGFGFVSYEKHEDANKAVEEMNGKEISGKIIFVGRAQKKVERQAELKRKFEQLKQERISRYQGVNLYIKNLDDTIDDEKLRKEFSPFGSITSAKNAGRSGNVRHTGVLDXLFLHVIHSSLEASYTLEMQVQLTMTWTALVGIRERIVLLQHHGAPRGNGKKRRGSTVYTNPTYNGTELASDNGGALPANAILNQFQPAAGGYFVPAVPQAQGRPPYYTPNQLAQMRPNPRWQQGGRPQGFQGMPSAIRQSGPRPTLRHLAPTGSECPDRLAMDFGGAGAAQQGLTDSCQSGGVPTAVQNLAPRAAVAAAAPRAVAPYKYASSVRSPHPAIQPLQAPQPAVHVQGQEPLTASMLAAAPPQEQKQMLGERLFPLIQTMHSNLAGKITGMLLEIDNSELLHMLESPESLRSKVDEAVAVLQAHHAKKEAAQKVGAVAAATS

SEQ ID NO: 801472 - protein, 500 aa, Homo sapiens
DAVVLPGDSVVSVEPGLLREAELGAKAKEFTNVYIKNFGEEVDDESLKELFSQFGKTLSVKVMRDPNGKSKGFGFVSYEKHEDANKAVEEMNGKEISGKIIFVGRAQKKVERQAELKRKFEQLKQERISRYQGVNLYIKNLDDTIDDEKLRKEFSPFGSITSAKVMLEDGRSKGFGFVCFSSPEEATKAVTEMNGRIVGSKPLYVALAQRKEERKAHLTNQYMQRVAGMRALPANAILNQFQPAAGGYFVPAVPQAQGRPPYYTPNQLAQMRPNPRWQQGGRPQGFQGMPSAIRQSGPRPTLRHLAPTGNAPASRGLPTTTQRVGSECPDRLAMDFGGAGAAQQGLTDSCQSGGVPTAVQNLAPRAAVAAAAPRAVAPYKYASSVRSPHPAIQPLQAPQPAVHVQGQEPLTASMLAAAPPQEQKQMLGERLFPLIQTMHSNLAGKITGMLLEIDNSELLHMLESPESLRSKVDEAVAVLQAHHAKKEAAQKVGAVAAATS

SEQ ID NO: 801473 - protein, 644 aa, Homo sapiens; identical to SEQ ID NO: 801463

SEQ ID NO: 801474 - protein, 648 aa, Homo sapiens
MNAAASSYPMASLYVGDLHSDVTEAMLYEKFSPAGPVLSIRVCRDMITRRSLGYAYVNFQQPADAERALDTMNFDVIKGKPIRIMWSQRDPSLRKSGVGNVFIKNLDKSIDNKALYDTFSAFGNILSCKVVCDENGSKGYAFVHFETQEAADKAIEKMNGMLLNDRKVFVGRFKSRKEREAELGAKAKEFTNVYIKNFGEEVDDESLKELFSQFGKTLSVKVMRDPNGKSKGFGFVSYEKHEDANKAVEEMNGKEISGKIIFVGRAQKKVERQAELKRKFEQLKQERISRYQGVNLYIKNLDDTIDDEKLRKEFSPFGSITSAKVMLEDGRSKGFGFVCFSSPEEATKAVTEMNGRIVGSKPLYVALAQRKEERKAHLTNQYMQRVAGMRALPANAILNQFQPAAGGYFVPAVPQAQGRPPYYTPNQLAQMRPNPRWQQGGRPQGFQGMPSAIRQSGPRPTLRHLAPTGSECPDRLAMDFGGAGAAQQGLTDSCQSGGVPTAVQNLAPRAAVAAAAPRAVAPYKYASSVRSPHPAIQPLQAPQPAVHVQGQEPLTASMLAAAPPQEQKQMLGERLFPLIQTMHSNLAGKITGMLLEIDNSELLHMLESPESLRSKVDEAVAVLQAHHAKKEAARFKSQITPYGIQLKV

SEQ ID NO: 801475 - protein, 648 aa, Homo sapiens; identical to SEQ ID NO: 801474

SEQ ID NO: 801476 - protein, 587 aa, Homo sapiens
MNAAASSYPMASLYVGDLHSDVTEAMLYEKFSPAGPVLSIRVCRDMITRRSLGYAYVNFQQPADAERALDTMNFDVIKGKPIRIMWSQRDPSLRKSGVGNVFIKNLDKSIDNKALYDTFSAFGNILSCKVVCDENGSKGYAFVHFETQEAADKAIEKMNGMLLNDRKVFVGRFKSRKEREAELGAKAKEFTNVYIKNFGEEVDDESLKELFSQFGKTLSVKVMRDPNGKSKGFGFVSYEKHEDANKAVEEMNGKEISGKIIFVGRAQKKVERQAELKRKFEQLKQERISRYQGVNLYIKNLDDTIDDEKLRKEFSPFGSITSAKVMLEDGRSKGFGFVCFSSPEEATKAVTEMNGRIVGSKPLYVALAQRKEERKAHLTNQYMQRVAGMRALPANAILNQFQPAAGGYFVPAVPQAQGRPPYYTPNQLAQMRPNPRWQQGGRPQGFQGMPSAIRQSGPRPTLRHLAPTGSECPDRLAMDFGGAGAAQQGLTDSCQSGGVPTAVQNLAPRAAVAAAAPRAVAPYKYASSVRSPHPAIQPLQAPQPAVHVQGQEPLTASMLAAAPPQEQKQMLGERIVPTHPKQSQGIL

SEQ ID NO: 801477 - protein, 490 aa, Homo sapiens
MNAAASSYPMASLYVGDLHSDVTEAMLYEKFSPAGPVLSIRVCRDMITRRSLGYAYVNFQQPADAERALDTMNFDVIKGKPIRIMWSQRDPSLRKSGVGNVFIKNLDKSIDNKALYDTFSAFGNILSCKVVCDENGSKGYAFVHFETQEAADKAIEKMNGMLLNDRKVFVGRFKSRKEREAELGAKAKEFTNVYIKNFGEEVDDESLKELFSQFGKTLSVKVMRDPNGKSKGFGFVSYEKHEDANKAVEEMNGKEISGKIIFVGRAQKKVERQAELKRKFEQLKQERISRYQGVNLYIKNLDDTIDDEKLRKEFSPFGSITSAKVMLEDGRSKGFGFVCFSSPEEATKAVTEMNGRIVGSKPLYVALAQRKEERKAHLTNQYMQRVAGMRALPANAILNQFQPAAGGYFVPAVPQAQGRPPYYTPNQLAQMRPNPRWQQGGRPQGFQGMPSAIRQSGPRPTLRHLAPTGNAPASRGLPTTTQRVGEQTGL

SEQ ID NO: 801478 - protein, 339 aa, Homo sapiens
MNAAASSYPMASLYVGDLHSDVTEAMLYEKFSPAGPVLSIRVCRDMITRRSLGYAYVNFQQPADAERALDTMNFDVIKGKPIRIMWSQRDPSLRKSGVGNVFIKNLDKSIDNKALYDTFSAFGNILSCKVVCDENGSKGYAFVHFETQEAADKAIEKMNGMLLNDRKVFVGRFKSRKEREAELGAKAKEFTNVYIKNFGEEVDDESLKELFSQFGKTLSVKVMRDPNGKSKGFGFVSYEKHEDANKAVEEMNGKEISGKIIFVGRAQKKVERQAELKRKFEQLKQERISRYQGVNLYIKNLDDTIDDEKLRKEFSPFGSITSAKVLYCDLGIESSGIPL

SEQ ID NO: 801479 - protein, 272 aa, Homo sapiens
MNAAASSYPMASLYVGDLHSDVTEAMLYEKFSPAGPVLSIRVCRDMITRRSLGYAYVNFQQPADAERALDTMNFDVIKGKPIRIMWSQRDPSLRKSGVGNVFIKNLDKSIDNKALYDTFSAFGNILSCKVVCDENGSKGYAFVHFETQEAADKAIEKMNGMLLNDRKVFVGRFKSRKEREAELGAKAKEFTNVYIKNFGEEVDDESLKELFSQFGKTLSVKVMRDPNGKSKGFGFVSYEKHEDANKVSIPQRLGKAFKRLPQSMGRVLLAPT

SEQ ID NO: 801480 - protein, 162 aa, Homo sapiens
MNAAASSYPMASLYVGDLHSDVTEAMLYEKFSPAGPVLSIRVCRDMITRRSLGYAYVNFQQPADAERALDTMNFDVIKGKPIRIMWSQRDPSLRKSGVGNVFIKNLDKSIDNKALYDTFSAFGNILSCKLVCYENRSKGIAFVHTRTQGVADRHSDSRWILL

SEQ ID NO: 801481 - protein, 660 aa, Homo sapiens; identical to SEQ ID NO: 801464

SEQ ID NO: 801482 - protein, 644 aa, Homo sapiens; identical to SEQ ID NO: 801463

SEQ ID NO: 801483 - protein, 644 aa, Homo sapiens; identical to SEQ ID NO: 801463

SEQ ID NO: 801484 - protein, 490 aa, Homo sapiens; identical to SEQ ID NO: 801477

SEQ ID NO: 801485 - protein, 533 aa, Homo sapiens
MNAAASSYPMASLYVGDLHSDVTEAMLYEKFSPAGPVLSIRVCRDMITRRSLGYAYVNFQQPADAERALDTMNFDVIKGKPIRIMWSQRDPSLRKSGVGNVFIKNLDKSIDNKALYDTFSAFGNILSCKVVCDENGSKGYAFVHFETQEAADKAIEKMNGMLLNDRKVFVGRFKSRKEREAELGAKAKEFTNVYIKNFGEEVDDESLKELFSQFGKTLSVKVMRDPNGKSKGFGFVSYEKHEDANKAVEEMNGKEISGKIIFVGRAQKKVERQAELKRKFEQLKQERISRYQGVNLYIKNLDDTIDDEKLRKEFSPFGSITSAKVMLEDGRSKGFGFVCFSSPEEATKAVTEMNGRIVGSKPLYVALAQRKEERKAHLTNQYMQRVAGMRALPANAILNQFQPAAGGYFVPAVPQAQGRPPYYTPNQLAQMRPNPRWQQGGRPQGFQGMPSAIRQSGPRPTLRHLAPTGNAPASRGLPTTTQRVGSECPDRLAMDFGGAGAAQQGLTDSCQSGGGIGCTQKGERWDLTGLCPD

SEQ ID NO: 801486 - protein, 517 aa, Homo sapiens
MNAAASSYPMASLYVGDLHSDVTEAMLYEKFSPAGPVLSIRVCRDMITRRSLGYAYVNFQQPADAERALDTMNFDVIKGKPIRIMWSQRDPSLRKSGVGNVFIKNLDKSIDNKALYDTFSAFGNILSCKVVCDENGSKGYAFVHFETQEAADKAIEKMNGMLLNDRKVFVGRFKSRKEREAELGAKAKEFTNVYIKNFGEEVDDESLKELFSQFGKTLSVKVMRDPNGKSKGFGFVSYEKHEDANKAVEEMNGKEISGKIIFVGRAQKKVERQAELKRKFEQLKQERISRYQGVNLYIKNLDDTIDDEKLRKEFSPFGSITSAKVMLEDGRSKGFGFVCFSSPEEATKAVTEMNGRIVGSKPLYVALAQRKEERKAHLTNQYMQRVAGMRALPANAILNQFQPAAGGYFVPAVPQAQGRPPYYTPNQLAQMRPNPRWQQGGRPQGFQGMPSAIRQSGPRPTLRHLAPTGSECPDRLAMDFGGAGAAQQGLTDSCQSGGGIGCTQKGERWDLTGLCPD

SEQ ID NO: 801487 - protein, 706 aa, Homo sapiens
MNAAASSYPMASLYVGDLHSDVTEAMLYEKFSPAGPVLSIRVCRDMITRRSLGYAYVNFQQPADAERALDTMNFDVIKGKPIRIMWSQRDPSLRKSGVGNVFIKNLDKSIDNKALYDTFSAFGNILSCKVVCDENGSKGYAFVHFETQEAADKAIEKMNGMLLNDRKVLSVPVRSNNHRMSQPWPHLAINWHTQGGYWFSAQVWPAPTSPLQGRFVGRFKSRKEREAELGAKAKEFTNVYIKNFGEEVDDESLKELFSQFGKTLSVKVMRDPNGKSKGFGFVSYEKHEDANKAVEEMNGKEISGKIIFVGRAQKKVERQAELKRKFEQLKQERISRYQGVNLYIKNLDDTIDDEKLRKEFSPFGSITSAKVMLEDGRSKGFGFVCFSSPEEATKAVTEMNGRIVGSKPLYVALAQRKEERKAHLTNQYMQRVAGMRALPANAILNQFQPAAGGYFVPAVPQAQGRPPYYTPNQLAQMRPNPRWQQGGRPQGFQGMPSAIRQSGPRPTLRHLAPTGNAPASRGLPTTTQRVGSECPDRLAMDFGGAGAAQQGLTDSCQSGGVPTAVQNLAPRAAVAAAAPRAVAPYKYASSVRSPHPAIQPLQAPQPAVHVQGQEPLTASMLAAAPPQEQKQMLGERLFPLIQTMHSNLAGKITGMLLEIDNSELLHMLESPESLRSKVDEAVAVLQAHHAKKEAAQKVGAVAAATS

SEQ ID NO: 801488 - protein, 660 aa, Homo sapiens; identical to SEQ ID NO: 801464

SEQ ID NO: 801489 - protein, 660 aa, Homo sapiens; identical to SEQ ID NO: 801464

SEQ ID NO: 801490 - protein, 644 aa, Homo sapiens; identical to SEQ ID NO: 801463

SEQ ID NO: 801491 - protein, 644 aa, Homo sapiens; identical to SEQ ID NO: 801463

SEQ ID NO: 801492 - protein, 646 aa, Homo sapiens
MNAAASSYPMASLYVGDLHSDVTEAMLYEKFSPAGPVLSIRVCRDMITRRSLGYAYVNFQQPADAERALDTMNFDVIKGKPIRIMWSQRDPSLRKSGVGNVFIKNLDKSIDNKALYDTFSAFGNILSCKVVCDENGSKGYAFVHFETQEAADKAIEKMNGMLLNDRKVFVGRFKSRKEREAELGAKAKEFTNVYIKNFGEEVDDESLKELFSQFGKTLSVKVMRDPNGKSKGFGFVSYEKHEDANKAVEEMNGKEISGKIIFVGRAQKKVERQAELKRKFEQLKQERISRYQGVNLYIKNLDDTIDDEKLRKEFSPFGSITSAKVMLEDGRSKGFGFVCFSSPEEATKAVTEMNGRIVGSKPLYVALAQRKEERKAHLTNQYMQRVAGMRALPANAILNQFQPAAGGYFVPAVPQAQGRPPYYTPNQLAQMRPNPRWQQGGRPQGFQGMPSAIRQSGPRPTLRHLAPTGSECPDRLAMDFGGAGAAQQGLTDSCQSGGVPTAVQNLAPRAAVAAAAPRAVAPYKYASSVRSPHPAIQPLQAPQPAVHVQGQEPLTASMLAAAPPQEQKQMLGERLFPLIQTMHSNLAGKITGMLLEIDNSELLHMLESPESLRSKVDEAVAVLQAHHAKKEAAQHHESHSTGSSRS

SEQ ID NO: 801493 - protein, 483 aa, Homo sapiens
MNAAASSYPMASLYVGDLHSDVTEAMLYEKFSPAGPVLSIRVCRDMITRRSLGYAYVNFQQPADAERALDTMNFDVIKGKPIRIMWSQRDPSLRKSGVGNVFIKNLDKSIDNKALYDTFSAFGNILSCKVVCDENGSKGYAFVHFETQEAADKAIEKMNGMLLNDRKVFVGRFKSRKEREAELGAKAKEFTNVYIKNFGEEVDDESLKELFSQFGKTLSVKVMRDPNGKSKGFGFVSYEKHEDANKAVEEMNGKEISGKIIFVGRAQKKVERQAELKRKFEQLKQERISRYQGVNLYIKNLDDTIDDEKLRKEFSPFGSITSAKVMLEDGRSKGFGFVCFSSPEEATKAVTEMNGRIVGSKPLYVALAQRKEERKAHLTNQYMQRVAGMRALPANAILNQFQPAAGGYFVPAVPQAQGRPPYYTPNQLAQMRPNPRWQQGGRPQVQRMPRIYASRGPSILATGPTGKVGSLAPITLAGRCGRG

SEQ ID NO: 801494 - protein, 290 aa, Homo sapiens
MNAAASSYPMASLYVGDLHSDVTEAMLYEKFSPAGPVLSIRVCRDMITRRSLGYAYVNFQQPADAERALDTMNFDVIKGKPIRIMWSQRDPSLRKSGVGNVFIKNLDKSIDNKALYDTFSAFGNILSCKVVCDENGSKGYAFVHFETQEAADKAIEKMNGMLLNDRKVFVGRFKSRKEREAELGAKAKEFTNVYIKNFGEEVDDESLKELFSQFGKTLSVKVMRDPNGKSKGFGFVSYEKHEDANKAVEEMNGKEISGKIIFVGRAQKKVERQAELKRKLKFLILGISHL

SEQ ID NO: 801495 - protein, 168 aa, Homo sapiens
MNAAASSYPMASLYVGDLHSDVTEAMLYEKFSPAGPVLSIRVCRDMITRRSLGYAYVNFQQPADAERALDTMNFDVIKGKPIRIMWSQRDPSLRKSGVGNVFIKNLDKSIDNKALYDTFSAFGNILSCKVVCDENGSKGYAFVHFETQEAADKAIEKMNGMLLNDRKV

SEQ ID NO: 801496 - protein, 338 aa, Homo sapiens
MELWGRMLWALLSGPGRRGSTRGWAFSSWQPQPPLAGLSSAIELVSHWTGVFEKRGIPEARESSEYIVAHVLGAKTFQSLRPALWTQPLTSQQLQCIRELSSRRLQRMPVQYILGEWDFQGLSLRMVPPVFIPRPETEELVEWVLEEVAQRSHAVGSPGSPLILEVGCGSGAISLSLLSQLPQSRVIAVDKREAAISLTHENAQRLRLQDRIWIIHLDMTSERSWTHLPWGPMDLIVSNPPYVFHQDMEQLAPEIRSYEDPAALDGGEEGMDIITHILALAPRLLKDSGSIFLEVDPRHPELVSSWLQSRPDLYLNLVAVRRDFCGRPRFLHIRRSGP

SEQ ID NO: 801497 - protein, 1084 aa, Homo sapiens
MECAWLGTLWHFSLPSSEGRHREEGPSALRRPSDAWDQHKAGRDTRQSGKKGRQEFQSWALDSSLLSRDGASRLVAWQPTSPLSLSSLWPQCLEAQARAASGSSSGKARPTCPIPSLAPEAKARDSNSLPTTTSICQGALAGRMGGGHGADGVQAVQAPEVLRDVPTARAASFSQSPEHRQECRSPCLMYSGRVILSPLLIVGETEALSHSWMLFPVVSGFLHGSHTAAFIEIGPEPPKCKKYSFLLLYPHLDPGLLAAPNPCPKHLAGSPGLKCVLLCPMESSSEEVGEDNCGKSPGGPSQGPISALSRLSSEQRAPLLTRFENCWLEVRTPLTSGDSMSFPIHLRFFSLFFLHWLLLSGFSSLLPWASAFVQYSRCPEHTPSLCPGGANNPLLQAPTQMLPPLGCLLCALPASPSPYLCWHLLYHAFRNLLIPLISGAPCGSGIPKFSKCAISKLMVHAFSRIELGLPMWPTSDLAAHVFRSLGMGSHEDLAFCPTQAAIQVEQMATSKTQVHLIPAQQPHQENRLSLAAVGAGARFPGALGFSQPPARVLAEDSDLISSSGPSALDKPPELDLGLSKQLYPCSGRLNSDPPKWQCLNHLNLNMVTILPSHSKMDFADVIKDLEMEGVSWIFQVTEYNHKGLCKGGRSVRVTEENVCNNGSRGQSDAIAGGRAMSRGMQTASSPLGPQEECSPANTLILSPVKLIQIADLQNSKIINLCCFHMCENTCVIICYSSHGKRIYIVVPKLECCCNTRLLIEVALELQRGNGQRLEEFLRVMINCLNHLSSDEVMWPGELFLNLQTYTAQAPPFFTHIWREVALSQSEKTERLTSMGPRREWVRNGTGMWGESARLASMAHLQRLGPERTSETGTKPVPALLWSYVTGPGPLGCVRMAGALYSLGCRYCICEMSTAAPDFELMGLAPPCEAIGLSRAVSPFCSYGGVGLSLGFSTSWFLKLNWPTGALSPVPVQAGTRTSLSRGTKGLWRHHPTQPRLGAPEASPNPGATWRATGRPDMGLMLGFRAEKLGDREHGHLGSRVSLAPNHLDTLWMKPGGPVYTGRGGSWQDLYSIPDLFSQRGMGLT

SEQ ID NO: 801498 - protein, 1314 aa, Homo sapiens
MAGGHLVEVTLQLPVPQCPALCPAPAAWTLSCPWLPLRRLLQKEPGWGGRRGCTTRARLPTSLVPHAHRPLPAKVLTSIALSVFLLVPFGSCCLQQHLRVAALTSEQSVAPLTSASPGFPDGLSLLASGPFLRKGLGELVDVAPEESAVLESDTVGAAGATSRSRPRAQLSAQKNVQLDSAEEKVQAKRTGRRGLKPAATGLIGPWTLSPDVGATPAWISIPESAPHQDVTLEQMTSPHSALASKAEKWDLMLFYFKDACEEPMECAWLGTLWHFSLPSSEGRHREEGPSALRRPSDAWDQHKAGRDTRQSGKKGRQEFQSWALDSSLLSRDGASRLVAWQPTSPLSLSSLWPQCLEAQARAASGSSSGKARPTCPIPSLAPEAKARDSNSLPTTTSICQGALAGRMGGGHGADGVQAVQAPEVLRDVPTARAASFSQSPEHRQECRSPCLMYSGRVILSPLLIVGETEALSHSWMLFPVVSGFLHGSHTAAFIEIGPEPPKCKKYSFLLLYPHLDPGLLAAPNPCPKHLAGSPGLKCVLLCPMESSSEEVGEDNCGKSPGGPSQGPISALSRLSSEQKGSTADKFENCWLEVRTPLTLRDSMSFPIHLRFFSLFFLHWLLLSGFSSLLPWASAFVQYSRCPEHTPSLCPGGANNPLLQAPTQMLPPLGCLLCALPASPSPYLCWHLLYHAFRNLLIPLISGAPCGSGIPKFSKCAISKLMVHAFSRIELGLPMWPTSDLAAHVFRSLGMGSHEDLAFCPTQAAIQVEQMATSKTQVHLIPAQQPHQENRLSLAAVGAGARFPGALGFSQPPARVLAEDSDLISSSGPSALDKPPELDLGLSKQLYPCSGRLNSDPPKWQCLNHLNLNMVTILPSHSKMDFADVIKDLEMEGVSWIFQETEYNHKGLCKGGRSVRVTEENVCNNGSRGQSDAIAGGRAMSRGMQTASSPLGPQEECSPANTLILSPVKLISDADLQNSKIINLCCFHMCENTCVIICYSSHGKRIYIVVPKLECCCNTRLLIEVALELQRGNGQRLEEFLRVMINCLNHLSSDEVMWPGELFLNLQTYTAQAPPFFTHIWREVALSQSEKTERLTSMGPRREWVRNGTGMWGESARLASMAHLQRLGPERTSETGTKPVPALLWSYVTGPGPLGCVRMAGALYSLGCRYCICEMSTAAPDFELMGLAPPCKPWPEQSCVTILFLWWSGAIPGVLNLLVPKTELAKLVPSALSLSKLGLGPPFPGVLKDSGDTIPPSQGLGLLKPVLTQEPHGELLGGQTWASCWVSELRSWGTESMDTWVQGSAWPQITWIRFG

SEQ ID NO: 801499 - protein, 1314 aa, Homo sapiens
MAGGHLVEVTLQLPVPQCPALCPAPAAWTLSCPWLPLRRLLQKEPGWGGRRGCTTRARLPTSLVPHAHRPLPAKVLTSIALSVFLLVPFGSCCLQQHLRVAALTSEQSVPPYTSASPGFPDGLSLLASGPFLRKGLGELVDVAPEESAVLESDTVGAAGATSRSRPRAQLSAQKNVQLDSAEEKVQAKRTGRRGLKPAATGLIGPWTLSPDVGATPAWISIPESAPHQDVTLEQMTSPHSALASKAEKWDLMLFYFMDACEEPMECAWLGTLWHFSLPSSEGRHREEGPSALRRPSDAWDQHKAGRDTRQSGKKGRQEFQSWALDSSLLSRDGASRLVAWQPTSPLSLSSLWPQCLEAQARAASGSSSGKARPTCPIPSLAPEAKARDSNSLPTTTSICQGALAGRMGGGHGADGVQAVQAPEVLRDVPTARAASFSQSPEHRQECRSPCLMYSGRVILSPLLIVGETEALSHSWMLFPVVSGFLHGSHTAAFIEIGPEPPKCKKYSFLLLYPHLDPGLLAAPNPCPKHLAGSPGLKCVLLCPMESSSEEVGEDNCGKSPGGPSQGPISALSRLSSEQRAPLLTRFENCWLEVRTPLTLRDSMSFPIHLRFFSLFFLHWLLLSGFSSLLPWASAFVQYSRCPEHTPSLCPGGANNPLLQAPTQMLPPLGCLLCALPASPSPYLCWHLLYHAFRNLLIPLISGAPCGSGIPKFSKCAISKLMVHAFSRIELGLPMWPTSDLAAHVFRSLGMGSHEDLAFCPTQAAIQVEQMATSKTQVHLIPAQQPHQENRLSLAAVGAGARFPGALGFSQPPARVLAEDSDLISSSGPSALDKPPELDLGLSKQLYPCSGRLNSDPPKWQCLNHLNLNMVTILPSHSKMDFADVIKDLEMEGVSWIFQETEYNHKGLCKGGRSVRVTEENVCNNGSRGQSDAIAGGRAMSRGMQTASSPLGPQEECSPANTLILSPVKLISDADLQNSKIINLCCFHMCENTCVIICYSSHGKRIYIVVPKLECCCNTRLLIEVALELQRGNGQRLEEFLRVMINCLNHLSSDEVMWPGELFLNLQTYTAQAPPFFTHIWREVALSQSEKTERLTSMGPRREWVRNGTGMWGESARLASMAHLQRLGPERTSETGTKPVPALLWSYVTGPGPLGCVRMAGALYSLGCRYCICEMSTAAPDFELMGLAPPCKPWPEQSCVTILFLWWSGAIPGVLNLLVPKTELAKLVPSALSLSKLGLGPPFPGVLKDSGDTIPPSQGLGLLKPVLTQEPHGELLGGQTWASCWVSELRSWGTESMDTWVQGSAWPQITWIRFG

SEQ ID NO: 801500 - protein, 1287 aa, Homo sapiens
MSIRQAWRAREGMYCLRSHDSDQVETVSEIPPFGEPILLESYPAYVLPCTMAGGHLVEVTLQLPVPQCPALCPAPAAWTLSCPWLPLRRLLQKEPGWGGRRGCTTRARLPTSLVPHAHRPLPAKVLTSIALSVFLLVPFGSCCLQQHLRVAALTSEQSVPPYTSASPGFPDGLSLLASGPFLRKGLGELVDVAPEESAVLESDTVGAAGATSRSRPRAQLSAQKNVQLDSAEEKVQAKRTGRRGLKPAATGLIGPWTLSPDVGATPAWISIPESAPHQDVTLEQMTSPHSALASKAEKWDLMLFYFKDACEEPMECAWLGTLWHFSLPSSEGRHREEGPSALRRPSDAWDQHKAGRDTRQSGKKGRQEFQSWALDSSLLSRDGASRLVAWQPTSPLSLSSLWPQCLEAQARAASGSSSGKARPTCPIPSLAPEAKARDSNSLPTTTSICQGALAGRMGGGHGADGVQAVQAPEVLRDVPTARAASFSQSPEHRQECRSPCLMYSGRVILSPLLIVGETEALSHSWMLFPVVSGFLHGSHTAAFIEIGPEPPKCKKYSFLLLYPHLDPGLLAAPNPCPKHLAGSPWLKCVLLCPMESSSEEVGEDNCGKSPGGPSQGPISALSRLSSEQRAPLLTRFENCWLEVRTPLTLRDSMSFPIHLRFFSLFFLHWLLLSGFSSLLPWASAFVQYSRCPEHTPSLCPGGANNPLLQAPTQMLPPLGCLLCALPASPSPYLCWHLLYHAFRNLLIPLISGAPCGSGIPKFSKCAISKLMVHAFSRIELGLPMWPTSDLAAHVFRSLGMGSHEDLAFCPTQAAIQVEQMATSKTQVHLIPAQQPHQENRLSLAAVGAGARFPGALGFSQPPARVLAEDSDLISSSWPSALDKPPELDLGLSKQLYPCSGRLNSDPPKWQCLNHLNLNMVTILPSHSKMDFADVIKDLEMEGVSWIFQETEYNHKGLCKGGRSVRVTEENVCNNGSRGQSDAIAGGRAMSRGMQTASSPLGPQEECSPANTLILSPVKLISDADLQNSKIINLCCFHMCENTCVIICYSSHGKRIYIVVPKLECCCNTRLLIEVALELQRGNGQRLEEFLRVMINCLNHLSSDEVMWPGELFLNLQTYTAQAPPFFTHIWREVALSQSEKTERLTSMGPRREWVRNGTGMWGESARLASMAHLQRLGPERTSETGTKPVPALLWSYVTGPGPLGCVRMAGALYSLGCRYCICEMSTAAPDFELMGLAPPCKPWPEQSCVTILFLWWSGAIPGVLNLLVPKTELANWCPQPCPCPSWD

SEQ ID NO: 801501 - protein, 1347 aa, Homo sapiens
MAGGHLVEVTLQLPVPQCPALCPAPAAWTLSCPWLPLRRLLQKEPGWGGRRGCTTRARLPTSLVPHAHRPLPAKVLTSIALSVFLLVPFGSCCLQQHLRVAALTSEQSVPPYTSASPGFPDGLSLLASGPFLRKGLGELVDVAPEESAVLESDTVGAAGATSRSRPRAQLSAQKNVQLDSAEEKVQAKRTGRRGLKPAATGLIGPWTLSPDVGATPAWISIPESAPHQDVTLEQMTSPHSALASKAEKWDLMLFYFKDACEEPMECAWLGTLWHFSLPSSEGRHREEGPSALRRPSDAWDQHKAGRDTRQSGKKGRQEFQSWALDSSLLSRDGASRLVAWQPTSPLSLSSLWPQCLEAQARAASGSSSGKARPTCPIPSLAPEAKARDSNSLPTTTSICQGALAGRMGGGHGADGVQAVQAPEVLRDVPTARAASFSQSPEHRQECRSPCLMYSGRVILSPLLIVGETEALSHSWMLFPVVSGFLHGSHTAAFIEIGPEPPKCKKYSFLLLYPHLDPGLLAAPNPCPKHLAGSPGLKCVLLCPMESSSEEVGEDNCGKSPGGPSQGPISALSRLSSEQKGSTADKFENCWLEVRTPLTLRDSMSFPIHLRFFSLFFLHWLLLSGFSSLLPWASAFVQYSRCPEHTPSLCPGGANNPLLQAPTQMLPPLGCLLCALPASPSPYLCWHLLYHAFRNLLIPLISGAPCGSGIPKFSKCAISKLMVHAFSRIELGLPMWPTSDLAAHVFRSLGMGSHEDLAFCPTQAAIQVEQMATSKTQVHLIPAQQPHQENRLSLAAVGAGARFPGALGFSQPPARVLAEDSDLISSSGPSALDKPPELDLGLSKQLYPCSGRLNSDPPKWQCLNHLNLNMVTILPSHSKMDFADVIKDLEMEGVSWIFQETEYNHKGLCKGGRSVRVTEENVCNNGSRGQSDAIAGGRAMSRGMQTASSPLGPQEECSPANTLILSPVKLISDADLQNSKIINLCCFHMCENTCVIICYSSHGKRIYIVVPKLECCCNTRLLIEVALELQRGNGQRLEEFLRVMINCLNHLSSDEVMWPGELFLNLQTYTAQAPPFFTHIWREVALSQSEKTERLTSMGPRREWVRNGTGMWGESARLASMAHLQRLGPERTSETGTKPVPALLWSYVTGPGPLGCVRMAGALYSLGCRYCICEMSTAAPDFELMGLAPPCEAIGLSRAVSPFCSYGGVGLSLGFSTSWFLKLNWPTGALSPVPVQAGTRTSLSRGTKGLWRHHPTQPRLGAPEASPNPGATWRATGRPDMGLMLGFRAEKLGDREHGHLGSRVSLAPNHLDTLWMKPGGPVYTGRGGSWQDLYSIPDLFSQRGMGLT

SEQ ID NO: 801502 - protein, 327 aa, Homo sapiens [sequence omitted]

SEQ ID NO: 801503 - protein, 306 aa, Homo sapiens [sequence omitted]

SEQ ID NO: 801504 - protein, 1314 aa, Homo sapiens
MAGGHLVEVTLQLPVPQCPALCPAPAAWTLSCPWLPLRRLLQKEPGWGGRRGCTTRARLPTSLVPHAHRPLPAKVLTSIALSVFLLVPFGSCCLQQHLRVAALTSEQSVAPLTSASPGFPDGLSLLASGPFLRKGLGELVDVAPEESAVLESDTVGAAGATSRSRPRAQLSAQKNVQLDSAEEKVQAKRTGRRGLKPAATGLIGPWTLSPDVGATPAWISIPESAPHQDVTLEQMTSPHSALASKAEKWDLMLFYFKDACEEPMECAWLGTLWHFSLPSSEGRHREEGPSALRRPSDAWDQHKAGRDTRQSGKKGRQEFQSWALDSSLLSRDGASRLVAWQPTSPLSLSSLWPQCLEAQARAASGSSSGKARPTCPIPSLAPEAKARDSNSLPTTTSICQGALAGRMGGGHGADGVQAVQAPEVLRDVPTARAASFSQSPEHRQECRSPCLMYSGRVILSPLLIVGETEALSHSWMLFPVVSGFLHGSHTAAFIEIGPEPPKCKKYSFLLLYPHLDPGLLAAPNPCPKHLAGSPGLKCVLLCPMESSSEEVGEDNCGKSPGGPSQGPISALSRLSSEQKGSTADKFENCWLEVRTPLTSGDSMSFPIHLRFFSLFFLHWLLLSGFSSLLPWASAFVQYSRCPEHTPSLCPGGANNPLLQAPTQMLPPLGCLLCALPASPSPYLCWHLLYHAFRNLLIPLISGAPCGSGIPKFSKCAISKLMVHAFSRIELGLPMWPTSDLAAHVFRSLGMGSHEDLAFCPTQAAIQVEQMATSKTQVHLIPAQQPHQENRLSLAAVGAGARFPGALGFSQPPARVLAEDSDLISSSGPSALDKPPELDLGLSKQLYPCSGRLNSDPPKWQCLNHLNLNMVTILPSHSKMDFADVIKDLEMEGVSWIFQETEYNHKGLCKGGRSVRVTEENVCNNGSRGQSDAIAGGRAMSRGMQTASSPLGPQEECSPANTLILSPVKLISDADLQNSKIINLCCFHMCENTCVIICYSSHGKRIYIVVPKLECCCNTRLLIEVALELQRGNGQRLEEFLRVMINCLNHLSSDEVMWPGELFLNLQTYTAQAPPFFTHIWREVALSQSEKTERLTSMGPRREWVRNGTGMWGESARLASMAHLQRLGPERTSETGTKPVPALLWSYVTGPGPLGCVRMSRGPVLSGLQDCICEMSTAAPDFELMGLAPPCKPWPEQSCVTILFLWWSGAIPGVLNLLVPKTELANLVPSALSLSKLGLGPPFPGVLKDSGDTIPPSQGLGLLKPVLTQEPHGELLGGQTWASCWVSELRSWGTESMDTWVQGSAWPQITWIRFG

SEQ ID NO: 801505 - protein, 1314 aa, Homo sapiens
MAGGHLVEVTLQLPVPQCPALCPAPAAWTLSCPWLPLRRLLQKEPGWGGRRGCTTRARLPTSLVPHAHRPLPAKVLTSIALSVFLLVPFGSCCLQQHLRVAALTSEQSVPPYTSASPGFPDGLSLLASGPFLRKGLGELVDVAPEESAVLESDTVGAAGATSRSRPRAQLSAQKNVQLDSAEEKVQAKRTGRRGLKPAATGLIGPWTLSPDVGATPAWISIPESAPHQDVTLEQMTSPHSALASKAEKWDLMLFYFKDACEEPMECAWLGTLWHFSLPSSEGRHREEGPSALRRPSDAWDQHKAGRDTRQSGKKGRQEFQSWALDSSLLSRDGASRLVAWQPTSPLSLSSLWPQCLEAQARAASGSSSGKARPTCPIPSLAPEAKARDSNSLPTTTSICQGALAGRMGGGHGADGVQAVQAPEVLRDVPTARAASFSQSPEHRQECRSPCLMYSGRVILSPLLIVGETEALSHSWMLFPVVSGFLHGSHTAAFIEIGPEPPKCKKYSFLLLYPHLDPGLLAAPNPCPKHLAGSPWLKCVLLCPMESSSEEVGEDNCGKSPGGPSQGPISALSRLSSEQRAPLLTRFENCWLEVRTPLTLRDSMSFPIHLRFFSLFFLHWLLLSGFSSLLPWASAFVQYSRCPEHTPSLCPGGANNPLLQAPTQMLPPLGCLLCALPASPSPYLCWHLLYHAFRNLLIPLISGAPCGSGIPKFSKCAISKLMVHAFSRIELGLPMWPTSDLAAHVFRSLGMGSHEDLAFCPTQAAIQVEQMATSKTQVHLIPAQQPHQENRLSLAAVGAGARFPGALGFSQPPARVLAEDSDLISSSWPSALDKPPELDLGLSKQLYPCSGRLNSDPPKWQCLNHLNLNMVTILPSHSKMDFADVIKDLEMEGVSWIFQETEYNHKGLCKGGRSVRVTEENVCNNGSRGQSDAIAGGRAMSRGMQTASSPLGPQEECSPANTLILSPVKLISDADLQNSKIINLCCFHMCENTCVIICYSSHGKRIYIVVPKLECCCNTRLLIEVALELQRGNGQRLEEFLRVMINCLNHLSSDEVMWPGELFLNLQTYTAQAPPFFTHIWREVALSQSEKTERLTSMGPRREWVRNGTGMWGESARLASMAHLQRLGPERTSETGTKPVPALLWSYVTGPGPLGCVRMAGALYSLGCRYCICEMSTAAPDFELMGLAPPCKPWPEQSCVTILFLWWSGAIPGVLNLLVPKTELAKLVPSALSLSKLGLGPPFPGVLKDSGDTIPPSQGLGLLKPVLTQEPHGELLGGQTWASCWVSELRSWGTESMDTWVQGSAWPQITWIRFG

SEQ ID NO: 801506 - protein, 1352 aa, Homo sapiens
MYCLRSHDSDQVETVKLDPSLWGAYIAGVIPSLSVALHMAGGHLVEVTLQLPVPQCPALCPAPAAWTLSCPWLPLRRLLQKEPGWGGRRGCTTRARLPTSLVPHAHRPLPAKVLTSIALSVFLLVPFGSCCLQQHLRVAALTSEQSVPPYTSASPGFPDGLSLLASGPFLRKGLGELVDVAPEESAVLESDTVGAAGATSRSRPRAQLSAQKNVQLDSAEEKVQAKRTGRRGLKPAATGLIGPWTLSPDVGATPAWISIPESAPHQDVTLEQMTSPHSALASKAEKWDLMLFYFMDACEEPMECAWLGTLWHFSLPSSEGRHREEGPSALRRPSDAWDQHKAGRDTRQSGKKGRQEFQSWALDSSLLSRDGASRLVAWQPTSPLSLSSLWPQCLEAQARAASGSSSGKARPTCPIPSLAPEAKARDSNSLPTTTSICQGALAGRMGGGHGADGVQAVQAPEVLRDVPTARAASFSQSPEHRQECRSPCLMYSGRVILSPLLIVGETEALSHSWMLFPVVSGFLHGSHTAAFIEIGPEPPKCKKYSFLLLYPHLDPGLLAAPNPCPKHLAGSPGLKCVLLCPMESSSEEVGEDNCGKSPGGPSQGPISALSRLSSEQRAPLLTRFENCWLEVRTPLTLRDSMSFPIHLRFFSLFFLHWLLLSGFSSLLPWASAFVQYSRCPEHTPSLCPGGANNPLLQAPTQMLPPLGCLLCALPASPSPYLCWHLLYHAFRNLLIPLISGAPCGSGIPKFSKCAISKLMVHAFSRIELGLPMWPTSDLAAHVFRSLGMGSHEDLAFCPTQAAIQVEQMATSKTQVHLIPAQQPHQENRLSLAAVGAGARFPGALGFSQPPARVLAEDSDLISSSGPSALDKPPELDLGLSKQLYPCSGRLNSDPPKWQCLNHLNLNMVTILPSHSKMDFADVIKDLEMEGVSWIFQETEYNHKGLCKGGRSVRVTEENVCNNGSRGQSDAIAGGRAMSRGMQTASSPLGPQEECSPANTLILSPVKLISDADLQNSKIINLCCFHMCENTCVIICYSSHGKRIYIVVPKLECCCNTRLLIEVALELQRGNGQRLEEFLRVMINCLNHLSSDEVMWPGELFLNLQTYTAQAPPFFTHIWREVALSQSEKTERLTSMGPRREWVRNGTGMWGESARLASMAHLQRLGPERTSETGTKPVPALLWSYVTGPGPLGCVRMAGALYSLGCRYCICEMSTAAPDFELMGLAPPCKPWPEQSCVTILFLWWSGAIPGVLNLLVPKTELAKLVPSALSLSKLGLGPPFPGVLKDSGDTIPPSQGLGLLKPVLTQEPHGELLGGQTWASCWVSELRSWGTESMDTWVQGSAWPQITWIRFG

SEQ ID NO: 801507 - protein, 1050 aa, Homo sapiens
MECAWLGTLWHFSLPSSEGRHREEGPSALRRPSDAWDQHKAGRDTRQSGKKGRQEFQSWALDSSLLSRDGASRLVAWQPTSPLSLSSLWPQCLEAQARAASGSSSGKARPTCPIPSLAPEAKARDSNSLPTTTSICQGALAGRMGGGHGADGVQAVQAPEVLRDVPTARAASFSQSPEHRQECRSPCLMYSGRVILSPLLIVGETEALSHSWMLFPVVSGFLHGSHTAAFIEIGPEPPKCKKYSFLLLYPHLDPGLLAAPNPCPKHLAGSPGLKCVLLCPMESSSEEVGEDNCGKSPGGPSQGPISALSRLSSEQRAPLLTRFENCWLEVRTPLTLRDSMSFPIHLRFFSLFFLHWLLLSGFSSLLPWASAFVQYSRCPEHTPSLCPGGANNPLLQAPTQMLPPLGCLLCALPASPSPYLCWHLLYHAFRNLLIPLISGAPCGSGIPKFSKCAISKLMVHAFSRIELGLPMWPTSDLAAHVFRSLGMGSHEDLAFCPTQAAIQVEQMATSKTQVHLIPAQQPHQENRLSLAAVGAGARFPGALGFSQPPARVLARTVTCSPPHDPSALDKPPELDLGLSKQLYPCSGRLNSDPPKWQCLNHLNLNMVTILPSHSKMDFADVIKDLEMEGVSWIFQVNWYNHKGLCKGGRSVRVTEENVCNNGSRGQSDAIAGGRAMSRGMQTASSPLGPQEECSPANTLILSPVKLISDADLQNSKIINLCCFHMCENTCVIICYSSHGKRIYIVVPKLECCCNTRLLIEVALELQRGNGQRLEEFLRVMINCLNHLSSEGDVARGTLPQPSDLNCPGPPFFYSYLEKVALSQSEKTERLTSMGPRREWVRNGTGMWGESARLASMAHLQRLGPERTSETGTKPVPALLWSYVTGPGPLGCVRMAGALYSLGCRYCICEMSTAAPDFELMGLAPPCKPWPEQSCVTILFLWWSGAIPGVLNLLVPKTELAKLVPSALSLSKLGLGPPFPGVLKDSGDTIPPSQGLGLLKPVLTQEPHGELLGGQTWASCWVSELRSWGTESMDTWVQGSAWPQITWIRFG

SEQ ID NO: 801508 - protein, 359 aa, Homo sapiens
MELWGRMLWALLSGPGRRGSTRGWAFSSWQPQPPLAGLSSAIELVSHWTGVFEKRGIPEARESSEYIVAHVLGAKTFQSLRPALWTQPLTSQQLQCIRELSSRRLQSSVPDDHPAAPSARMPVQYILGEWDFQGLSLRMVPPVFIPRPETEELVEWVLEEVAQRSHAVGSPGSPLILEVGCGSGAISLSLLSQLPQSRVIAVDKREAAISLTHENAQRLRLQDRIWIIHLDMTSERSWTHLPWGPMDLIVSNPPYVFHQDMEQLAPEIRSYEDPAALDGGEEGMDIITHILALAPRLLKDSGSFSYEVTQHRTAEVVQNRLTVLIWVWPDFVEPAWNRGGKMGRVLERTTRGGVNRFVP

SEQ ID NO: 801509 - protein, 388 aa, Homo sapiens
MPCLQSASTWSSYEHNSESYLLREHVSELDSSFHSVLSLPSDVPLHFHFETLLKKTEIKGNLAENKFVDEYIISPSPVHSTLNQWRNGYSPICKPQIRSESSAQLLQGRKKRHLSETALGERTKLEESDFQHTESGSHSNFTAVSNVNVLSRIQNSSRNTARRRLRSESSYDIDNIVIPMSLVAPAKLEKLQYKEILTPSWRMVVLQPLDEYNLGKEEIEDLSDEVFSLRHKKYEEREQARWSLWEQSKWHRRNSRAYSKNVEGQDLLLKEYPNNFSSSQQCAAASPPGLPSENQDLCAYGLPSLNQSQETKSLWWERRAFPLKGEDMAALLCQDEKKDQVERSSTAFHGEIFGTSVPENGHHPKKQSDGMEEYKTFGLGLTNVKKNR

SEQ ID NO: 801510 - protein, 275 aa, Homo sapiens [sequence omitted]

SEQ ID NO: 801511 - protein, 3014 aa, Homo sapiens
MASQQDSGFFEISIKYLLKSWSNTSPVGNGYIKPPVPPASGTHREKGPPTMLPINVDPDSKPGEYVLKSLFVNFTTQAERKIRIIMAEPLEKPLTKSLQRGEDPQFDQVISSMSSLSEYCLPSILRTLFDWYKRQNGIEDESHEYRPRTSNKSKSDEQQRDYLMERRDLAIDFIFSLVLIEVLKQIPLHPVIDSLIHDVINLAFKHFKYKEGYLGPNTGNMHIVADLYAEVIGVLAQAKFPAVKKKFMAELKELRHKEQNPYVVQSIISLIMGMKFFRIKMYPVEDFEASLQFMQECAHYFLEVKDKDIKHALAGLFVEILVPVAAAVKNEVNVPCLRNFVESLYDTTLELSSRKKHSLALYPLVTCLLCVSQKQLFLNRWHIFLNNCLSNLKNKDPKMARVALESLYRLLWVYMIRIKCESNTATQSRLITIITTLFPKGSRGVVPRDMPLNIFVKIIQFIAQERLDFAMKEIIFDFLCVGKPAKAFSLNPERMNIGLRAFLVIADSLQQKDGEPPMPVTGAVLPSGNTLRVKKTYLSKTLTEEEAKMIGMSLYYSQVRKAVDNILRHLDKEVGRCMMLTNVQMLNKEPEDMITGERKPKIDLFRTCVAAIPRLLPDGMSKLELIDLLARLSIHMDDELRHIAQNSLQGLLVDFSDWREDVLFGFTNFLLREVNDMHHTLLDSSLKLLLQLLTQWKLVIQTQGKVYEQANKIRNSELIANGSSHRIQSERGPHCSVLHAVEGFALVLLCSFQVATRKLSVLILKEIRALFIALGQPEDDDRPMIDVMDQLSSSILESFIHVAVSDSATLPLTHNVDLQWLVEWNAVLVNSHYDVKSPSHVWIFAQSVKDPWVLCLFSFLRQENLPKHCPTALSYAWPYAFTRLQSVMPLVDPNSPINAKKTSTAGSGDNYVTLWRNYLILCFGVAKPSIMSPGHLRASTPEIMATTPDGTVSYDNKAIGTPSVGVLLKQLVPLMRLESIEITESLVLGFGRTNSLVFRELVEELHPLMKEALERRPENKKRRERRDLLRLQLLRIFELLADAGVISDSTNGALERDTLALGALFLEYVDLTRMLLEAENDKEVEILKDIRAHFSAMVANLIQCVPVHHRRFLFPQQSLRHHLFILFSQWAGPFSIMFTPLDRYSDRNHQITRYQYCALKAMSAVLCCGPVFDNVGLSPDGYLYKWLDNILACQDLRVHQLGCEVVVLLLELNPDQINLFNWAIDRCYTGSYQLASGCFKAIATVCGSRNYPFDIVTLLNLVLFKASDTNREIYEISMQLMQILEAKLFVYSKKVAEQRPGSILYGTHGPLPPLYSVSLALLSCELARMYPELTLPLFSEVSQRFPTTHPNGRQIMLTYLLPWLHNIELVDSRLLLPGSSPSSPEDEVKDREGDVTASHGLRGNGWGSPEATSLVLNNLMYMTAKYGDEVPGPEMENAWNALANNEKWSNNLRITLQFLISLCGVSSDTVLLPYIKKVAIYLCRNNTIQTMEELLFELQQTEPVNPIVQHCDNPPFYRFTASSKASAAASGTTSSSNTVVAGQENFPDAEENKILKESDERFSNVIRAHTRLESRYSNSSGGSYDEDKNDPISPYTGWLLTITETKQPQPLPMPCTGGCWAPLVDYLPETITPRGPLHRCNIAVIFMTEMVVDHSVREDWALHLPLLLHAVFLGLDHYRPEVFEHSKKLLLHLLIALSCNSNFHSIASVLLQTREMGEAKTLTVQPAYQPEYLYTGGFDFLREDQSSPVPDSGLSSSSTSSSISLGGSSGNLPQMTQEVEDVDTAAETDEKANKLIEFLTTRAFGPLWCHEDITPKNQNSKSAEQLTNFLRHVVSVFKDSKSGFHLEHQLSEVALQTALASSSRHYAGRSFQIFRALKQPLSAHALSDLLSRLVEVIGEHGDEIQGYVMEALLTLEAAVDNLSDCLKNSDLLTVLSRSSSPDLSSSSKLTASRKSTGQLNMNPGTTSGNTATAERSRHQRSFSVPKKFGVIDRSSDPPRSATLDRIQACTQQGLSSKTRSSSSLKDSLTDPSHINHPTNLLATIFWVTVALMESDFEFEYLMALRLLSRLLAHMPLDKAENREKLEKLQAQLKWADFSGLQQLLLKGFTSLTTTDLTLQLFSLLTPVSKISMVDASHAIGFPLNVLCLLPQLIQHFENPNQFCKDIAERIAQVCLEEKNPKLSNLAHVMTLYKTHSYTRDCATWVNVVCRYLHEAYADITLNMVTYLAELLEKGLPSVQQPLLQVIYSLLSYMDLSVVPVKQFNVEVLKTIEKYVQSVHWREALNILKLVVSRSASLVLPSYQHSDLSKIEIHRVWTSASKELPGKTLDFHFDISETPIIGRRYDELQNSSGRDGKPRAMAVTRSTSSTSSGSNSNVLVPVSWKRPQYSQKRTKEKLVHVLSLCGQEVGLSKNPSVIFSSCGDLDLLEHQTSLVSSEDGAREQENMDDTNSEQQFRVFRDFDFLDVELEDGEGESMDNFNWGVRRRSLDSLDKCDMQILEERQLSGSTPSLNKMHHEDSDESSEEEDLTASQILEHSDLIMTLSPSEETNPMELLTTACDSTPAEPHSFNTRMSSFDASLPDMNNLQISEGSKAEAVREEEDTTVHEDDLSSSINELPAAFECSDSFSLDMTEGEEKGNRALDQFTLASFGEGDRGVSPPPSPFFSAILAAFQPAACDDAEEAWRSHINQLMCDSDGSCAVYTFHVFSSLFKNIQKRFCFLTCDAASYLGDNLRGIGSKFVSSSQMLTSCSECPTLFVDAETLLSCGLLDKLKFSVLELQEYLDTYNNRKEATLSWLANCKATFAGGSRDGVITCQPGDSEEKVQLELCQRLYKLHFQLLLLFQSYCKLIGQVHEVSSMPELLNMSRELSDLKKHLKEASAVIAADPLYSDGAWSEPTFTSTEAAIQSMLECLKNNELGKALRQIRECRSLWPNDIFGSSSDDEVQTLLNIYFRHQTLGQTGTYALVGSNQSLTEICTKLMELNMEIRDMIRRAQSYRVLTTFLPDSSVSGTSL

SEQ ID NO: 801512 - protein, 2379 aa, Homo sapiens
MDDELRHIAQNSLQGLLVDFSDWREDVLFGFTNFLLREVNDMHHTLLDSSLKLLLQLLTQWKLVIQTQGKVYEQANKIRNSELIANGSSHRIQSERGPHCSVLHAVEGFALVLLCSFQVATRKLSVLILKEIRALFIALGQPEDDDRPMIDVMDQLSSSILESFIHVAVSDSATLPLTHNVDLQWLVEWNAVLVNSHYDVKSPSHVWIFAQSVKDPWVLCLFSFLRQENLPKHCPTALSYAWPYAFTRLQSVMPLVDPNSPINAKKTSTAGSGDNYVTLWRNYLILCFGVAKPSIMSPGHLRASTPEIMATTPDGTVSYDNKAIGTPSVGVLLKQLVPLMRLESIEITESLVLGFGRTNSLVFRELVEELHPLMKEALERRPENKKRRERRDLLRLQLLRIFELLADAGVISDSTNGALERDTLALGALFLEYVDLTRMLLEAENDKEVEILKDIRAHFSAMVANLIQCVPVHHRRFLFPQQSLRHHLFILFSQWAGPFSIMFTPLDRYSDRNHQITRYQYCALKAMSAVLCCGPVFDNVGLSPDGYLYKWLDNILACQDLRVHQLGCEVVVLLLELNPDQINLFNWAIDRCYTGSYQLASGCFKAIATVCGSRNYPFDIVTLLNLVLFKASDTNREIYEISMQLMQILEAKLFVYSKKVAEQRPGSILYGTHGPLPPLYSVSLALLSCELARMYPELTLPLFSEVSQRFPTTHPNGRQIMLTYLLPWLHNIELVDSRLLLPGSSPSSPEDEVKDREGDVTASHGLRGNGWGSPEATSLVLNNLMYMTAKYGDEVPGPEMENAWNALANNEKWSNNLRITLQFLISLCGVSSDTVLLPYIKKVAIYLCRNNTIQTMEELLFELQQTEPVNPIVQHCDNPPFYRFTASSKASAAASGTTSSSNTVVAGQENFPDAEENKILKESDERFSNVIRAHTRLESRYSNSSGGSYDEDKNDPISPYTGWLLTITETKQPQPLPMPCTGGCWAPLVDYLPETITPRGPLHRCNIAVIFMTEMVVDHSVREDWALHLPLLLHAVFLGLDHYRPEVFEHSKKLLLHLLIALSCNSNFHSIASVLLQTREMGEAKTLTVQPAYQPEYLYTGGFDFLREDQSSPVPDSGLSSSSTSSSISLGGSSGNLPQMTQEVEDVDTAAETDEKANKLIEFLTTRAFGPLWCHEDITPKNQNSKSAEQLTNFLRHVVSVFKDSKSGFHLEHQLSEVALQTALASSSRHYAGRSFQIFRALKQPLSAHALSDLLSRLVEVIGEHGDEIQGYVMEALLTLEAAVDNLSDCLKNSDLLTVLSRSSSPDLSSSSKLTASRKSTGQLNMNPGTTSGNTATAERSRHQRSFSVPKKFGVIDRSSDPPRSATLDRIQACTQQGLSSKTRSSSSLKDSLTDPSHINHPTNLLATIFWVTVALMESDFEFEYLMALRLLSRLLAHMPLDKAENREKLEKLQAQLKWADFSGLQQLLLKGFTSLTTTDLTLQLFSLLTPVSKISMVDASHAIGFPLNVLCLLPQLIQHFENPNQFCKDIAERIAQVCLEEKNPKLSNLAHVMTLYKTHSYTRDCATWVNVVCRYLHEAYADITLNMVTYLAELLEKGLPSVQQPLLQVIYSLLSYMDLSVVPVKQFNVEVLKTIEKYVQSVHWREALNILKLVVSRSASLVLPSYQHSDLSKIEIHRVWTSASKELPGKTLDFHFDISETPIIGRRYDELQNSSGRDGKPRAMAVTRSTSSTSSGSNSNVLVPVSWKRPQYSQKRTKEKLVHVLSLCGQEVGLSKNPSVIFSSCGDLDLLEHQTSLVSSEDGAREQENMDDTNSEQQFRVFRDFDFLDVELEDGEGESMDNFNWGVRRRSLDSLDKCDMQILEERQLSGSTPSLNKMHHEDSDESSEEEDLTASQILEHSDLIMTLSPSEETNPMELLTTACDSTPAEPHSFNTRMSSFDASLPDMNNLQISEGSKAEAVREEEDTTVHEDDLSSSINELPAAFECSDSFSLDMTEGEEKGNRALDQFTLASFGEGDRGVSPPPSPFFSAILAAFQPAACDDAEEAWRSHINQLMCDSDGSCAVYTFHVFSSLFKNIQKRFCFLTCDAASYLGDNLRGIGSKFVSSSQMLTSCSECPTLFVDAETLLSCGLLDKLKFSVLELQEYLDTYNNRKEATLSWLANCKATFAGGSRDGVITCQPGDSEEKVQLELCQRLYKLHFQLLLLFQSYCKLIGQVHEVSSMPELLNMSRELSDLKKHLKEASAVIAADPLYSDGAWSEPTFTSTEAAIQSMLECLKNNELGKALRQIRECRSLWPNDIFGSSSDDEVQTLLNIYFRHQTLGQTGTYALVGSNQSLTEICTKLMELNMEIRDMIRRAQSYRVLTTFLPDSSVSGTSL

SEQ ID NO: 801513 - protein, 1402 aa, Homo sapiens
MPCTGGCWAPLVDYLPETITPRGPLHRCNIAVIFMTEMVVDHSVREDWALHLPLLLHAVFLGLDHYRPEVFEHSKKLLLHLLIALSCNSNFHSIASVLLQTREMGEAKTLTVQPAYQPEYLYTGGFDFLREDQSSPVPDSGLSSSSTSSSISLGGSSGNLPQMTQEVEDVDTAAETDEKANKLIEFLTTRAFGPLWCHEDITPKNQNSKSAEQLTNFLRHVVSVFKDSKSGFHLEHQLSEVALQTALASSSRHYAGRSFQIFRALKQPLSAHALSDLLSRLVEVIGEHGDEIQGYVMEALLTLEAAVDNLSDCLKNSDLLTVLSRSSSPDLSSSSKLTASRKSTGQLNMNPGTTSGNTATAERSRHQRSFSVPKKFGVIDRSSDPPRSATLDRIQACTQQGLSSKTRSSSSLKDSLTDPSHINHPTNLLATIFWVTVALMESDFEFEYLMALRLLSRLLAHMPLDKAENREKLEKLQAQLKWADFSGLQQLLLKGFTSLTTTDLTLQLFSLLTPVSKISMVDASHAIGFPLNVLCLLPQLIQHFENPNQFCKDIAERIAQVCLEEKNPKLSNLAHVMTLYKTHSYTRDCATWVNVVCRYLHEAYADITLNMVTYLAELLEKGLPSVQQPLLQVIYSLLSYMDLSVVPVKQFNVEVLKTIEKYVQSVHWREALNILKLVVSRSASLVLPSYQHSDLSKIEIHRVWTSASKELPGKTLDFHFDISETPIIGRRYDELQNSSGRDGKPRAMAVTRSTSSTSSGSNSNVLVPVSWKRPQYSQKRTKEKLVHVLSLCGQEVGLSKNPSVIFSSCGDLDLLEHQTSLVSSEDGAREQENMDDTNSEQQFRVFRDFDFLDVELEDGEGESMDNFNWGVRRRSLDSLDKCDMQILEERQLSGSTPSLNKMHHEDSDESSEEEDLTASQILEHSDLIMTLSPSEETNPMELLTTACDSTPAEPHSFNTRMSSFDASLPDMNNLQISEGSKAEAVREEEDTTVHEDDLSSSINELPAAFECSDSFSLDMTEGEEKGNRALDQFTLASFGEGDRGVSPPPSPFFSAILAAFQPAACDDAEEAWRSHINQLMCDSDGSCAVYTFHVFSSLFKNIQKRFCFLTCDAASYLGDNLRGIGSKFVSSSQMLTSCSECPTLFVDAETLLSCGLLDKLKFSVLELQEYLDTYNNRKEATLSWLANCKATFAGGSRDGVITCQPGDSEEKVQLELCQRLYKLHFQLLLLFQSYCKLIGQVHEVSSMPELLNMSRELSDLKKHLKEASAVIAADPLYSDGAWSEPTFTSTEAAIQSMLECLKNNELGKALRQIRECRSLWPNDIFGSSSDDEVQTLLNIYFRHQTLGQTGTYALVGSNQSLTEICTKLMELNMEIRDMIRRAQSYRVLTTFLPDSSVSGTSL

SEQ ID NO: 801514 - protein, 2990 aa, Homo sapiens
MASQQDSGFFEISIKYLLKSWSNTSPVGNGYIKPPVPPASGTHREKGPPTMLPINVDPDSKPGEYVLKSLFVNFTTQAERKIRIIMAEPLEKPLTKSLQRGEDPQFDQVISSMSSLSEYCLPSILRTLFDWYKRQNGIEDESHEYRPRTSNKSKSDEQQRDYLMERRDLAIDFIFSLVLIEVLKQIPLHPVIDSLIHDVINLAFKHFKYKEGYLGPNTGNMHIVADLYAEVIGVLAQAKFPAVKKKFMAELKELRHKEQNPYVVQSIISLIMGMKFFRIKMYPVEDFEASLQFMQECAHYFLEVKDKDIKHALAGLFVEILVPVAAAVKNEVNVPCLRNFVESLYDTTLELSSRKKHSLALYPLVTCLLCVSQKQLFLNRWHIFLNNCLSNLKNKDPKMARVALESLYRLLWVYMIRIKCESNTATQSRLITIITTLFPKGSRGVVPRDMPLNIFVKIIQFIAQERLDFAMKEIIFDFLCVGKPAKAFSLNPERMNIGLRAFLVIADSLQQKDGEPPMPVTGAVLPSGNTLRVKKTYLSKTLTEEEAKMIGMSLYYSQVRKAVDNILRHLDKEVGRCMMLTNVQMLNKEPEDMITGERKPKIDLFRTCVAAIPRLLPDGMSKLELIDLLARLSIHMDDELRHIAQNSLQGLLVDFSDWREDVLFGFTNFLLREVNDMHHTLLDSSLKLLLQLLTQWKLVIQTQGKVYEQANKIRNSELIANGSSHRIQSERGPHCSVLHAVEGFALVLLCSFQVATRKLSVLILKEIRALFIALGQPEDDDRPMIDVMDQLSSSILESFIHVAVSDSATLPLTHNVDLQWLVEWNAVLVNSHYDVKSPSHVWIFAQSVKDPWVLCLFSFLRQENLPKHCPTALSYAWPYAFTRLQSVMPLVDPNSPINAKKTSTAGSGDNYVTLWRNYLILCFGVAKPSIMSPGHLRASTPEIMATTPDGTVSYDNKAIGTPSVGVLLKQLVPLMRLESIEITESLVLGFGRTNSLVFRELVEELHPLMKEALERRPENKKRRERRDLLRLQLLRIFELLADAGVISDSTNGALERDTLALGALFLEYVDLTRMLLEAENDKEVEILKDIRAHFSAMVANLIQCVPVHHRRFLFPQQSLRHHLFILFSQWAGPFSIMFTPLDRYSDRNHQITRYQYCALKAMSAVLCCGPVFDNVGLSPDGYLYKWLDNILACQDLRVHQLGCEVVVLLLELNPDQINLFNWAIDRCYTGSYQLASGCFKAIATVCGSRNYPFDIVTLLNLVLFKASDTNREIYEISMQLMQILEAKLFVYSKKVAEQRPGSILYGTHGPLPPLYSVSLALLSCELARMYPELTLPLFSEVSQRFPTTHPNGRQIMLTYLLPWLHNIELVDSRLLLPGSSPSSPEDEVKDREGDVTASHGLRGNGWGSPEATSLVLNNLMYMTAKYGDEVPGPEMENAWNALANNEKWSNNLRITLQFLISLCGVSSDTVLLPYIKKVAIYLCRNNTIQTMEELLFELQQTEPVNPIVQHCDNPPFYRFTASSKASAAASGTTSSSNTVVAGQENFPDAEENKILKESDERFSNVIRAHTRLESRYSNSSGGSYDEDKNDPISPYTGWLLTITETKQPQPLPMPCTGGCWAPLVDYLPETITPRGPLHRCNIAVIFMTEMVVDHSVREDWALHLPLLLHAVFLGLDHYRPEVFEHSKKLLLHLLIALSCNSNFHSIASVLLQTREMGEAKTLTVQPAYQPEYLYTGGFDFLREDQSSPVPDSGLSSSSTSSSISLGGSSGNLPQMTQEVEDVDTAAETDEKANKLIEFLTTRAFGPLWCHEDITPKNQNSKSAEQLTNFLRHVVSVFKDSKSGFHLEHQLSEVALQTALASSSRHYAGRSFQIFRALKQPLSAHALSDLLSRLVEVIGEHGDEIQGYVMEALLTLEAAVDNLSDCLKNSDLLTVLSRSSSPDLSSSSKLTASRKSTGQLNMNPGTTSGNTATAERSRHQRSFSVPKKFGVIDRSSDPPRSATLDRIQACTQQGLSSKTRSSSSLKDSLTDPSHINHPTNLLATIFWVTVALMESDFEFEYLMALRLLSRLLAHMPLDKAENREKLEKLQAQLKWADFSGLQQLLLKGFTSLTTTDLTLQLFSLLTPVSKISMVDASHAIGFPLNVLCLLPQLIQHFENPNQFCKDIAERIAQVCLEEKNPKLSNLAHVMTLYKTHSYTRDCATWVNVVCRYLHEAYADITLNMVTYLAELLEKGLPSVQQPLLQVIYSLLSYMDLSVVPVKQFNVEVLKTIEKYVQSVHWREALNILKLVVSRSASLVLPSYQHSDLSKIEIHRVWTSASKELPGKTLDFHFDISETPIIGRRYDELQNSSGRDGKPRAMAVTRSTSSTSSGSNSNVLVPVSWKRPQYSQKRTKEKLVHVLSLCGQEVGLSKNPSVIFSSCGDLDLLEHQTSLVSSEDGAREQENMDDTNSEQQFRVFRDFDFLDVELEDGEGESMDNFNWGVRRRSLDSLDKCDMQILEERQLSGSTPSLNKMHHEDSDESSEEEDLTASQILEHSDLIMTLSPSEETNPMELLTTACDSTPAEPHSFNTRMSSFDASLPDMNNLQISEGSKAEAVREEEDTTVHEDDLSSSINELPAAFECSDSFSLDMTEGEEKGNRALDQFTLASPQPVTMPRRPGAATSTSLCVTQMAPVLCIHFMCSPPCLRIFKKRFCFLTCDAASYLGDNLRGIGSKFVSSSQMLTSCSECPTLFVDAETLLSCGLLDKLKFSVLELQEYLDTYNNRKEATLSWLANCKATFAGGSRDGVITCQPGDSEEKVQLELCQRLYKLHFQLLLLFQSYCKLIGQVHEVSSMPELLNMSRELSDLKKHLKEASAVIAADPLYSDGAWSEPTFTSTEAAIQSMLECLKNNELGKALRQIRECRSLWPNDIFGSSSDDEVQTLLNIYFRHQTLGQTGTYALVGSNQSLTEICTKLMELNMEIRDMIRRAQSYRVLTTFLPDSSVSGTSL

SEQ ID NO: 801515 - protein, 2996 aa, Homo sapiens
MASQQDSGFFEISIKYLLKSWSNTSPVGNGYIKPPVPPASGTHREKGPPTMLPINVDPDSKPGEYVLKSLFVNFTTQAERKIRIIMAEPLEKPLTKSLQRGEDPQFDQVISSMSSLSEYCLPSILRTLFDWYKRQNGIEDESHEYRPRTSNKSKSDEQQRDYLMERRDLAIDFIFSLVLIEVLKQIPLHPVIDSLIHDVINLAFKHFKYKEGYLGPNTGNMHIVADLYAEVIGVLAQAKFPAVKKKFMAELKELRHKEQNPYVVQSIISLIMGMKFFRIKMYPVEDFEASLQFMQECAHYFLEVKDKDIKHALAGLFVEILVPVAAAVKNEVNVPCLRNFVESLYDTTLELSSRKKHSLALYPLVTCLLCVSQKQLFLNRWHIFLNNCLSNLKNKDPKMARVALESLYRLLWVYMIRIKCESNTATQSRLITIITTLFPKGSRGVVPRDMPLNIFVKIIQFIAQERLDFAMKEIIFDFLCVGKPAKAFSLNPERMNIGLRAFLVIADSLQQKDGEPPMPVTGAVLPSGNTLRVKKTYLSKTLTEEEAKMIGMSLYYSQVRKAVDNILRHLDKEVGRCMMLTNVQMLNKEPEDMITGERKPKIDLFRTCVAAIPRLLPDGMSKLELIDLLARLSIHMDDELRHIAQNSLQGLLVDFSDWREDVLFGFTNFLLREVNDMHHTLLDSSLKLLLQLLTQWKLVIQTQGKVYEQANKIRNSELIANGSSHRIQSERGPHCSVLHAVEGFALVLLCSFQVATRKLSVLILKEIRALFIALGQPEDDDRPMIDVMDQLSSSILESFIHVAVSDSATLPLTHNVDLQWLVEWNAVLVNSHYDVKSPSHVWIFAQSVKDPWVLCLFSFLRQENLPKHCPTALSYAWPYAFTRLQSVMPLVDPNSPINAKKTSTAGSGDNYVTLWRNYLILCFGVAKPSIMSPGHLRASTPEIMATTPDGTVSYDNKAIGTPSVGVLLKQLVPLMRLESIEITESLVLGFGRTNSLVFRELVEELHPLMKEALERRPENKKRRERRDLLRLQLLRIFELLADAGVISDSTNGALERDTLALGALFLEYVDLTRMLLEAENDKEVEILKDIRAHFSAMVANLIQCVPVHHRRFLFPQQSLRHHLFILFSQWAGPFSIMFTPLDRYSDRNHQITRYQYCALKAMSAVLCCGPVFDNVGLSPDGYLYKWLDNILACQDLRVHQLGCEVVVLLLELNPDQINLFNWAIDRCYTGSYQLASGCFKAIATVCGSRNYPFDIVTLLNLVLFKASDTNREIYEISMQLMQILEAKLFVYSKKVAEQRPGSILYGTHGPLPPLYSVSLALLSCELARMYPELTLPLFSEVSQRFPTTHPNGRQIMLTYLLPWLHNIELVDSRLLLPGSSPSSPEDEVKDREGDVTASHGLRGNGWGSPEATSLVLNNLMYMTAKYGDEVPGPEMENAWNALANNEKWSNNLRITLQFLISLCGVSSDTVLLPYIKKVAIYLCRNNTIQTMEELLFELQQTEPVNPIVQHCDNPPFYRFTASSKASAAASGTTSSSNTVVAGQENFPDAEENKILKESDERFSNVIRAHTRLESRYSNSSGGSYDEDKNDPISPYTGWLLTITETKQPQPLPMPCTGGCWAPLVDYLPETITPRGPLHRCNIAVIFMTEMVVDHSVREDWALHLPLLLHAVFLGLDHYRPEVFEHSKKLLLHLLIALSCNSNFHSIASVLLQTREMGEAKTLTVQPAYQPEYLYTGGFDFLREDQSSPVPDSGLSSSSTSSSISLGGSSGNLPQMTQEVEDVDTAAETDEKANKLIEFLTTRAFGPLWCHEDITPKNQNSKSAEQLTNFLRHVVSVFKDSKSGFHLEHQLSEVALQTALASSSRHYAGRSFQIFRALKQPLSAHALSDLLSRLVEVIGEHGDEIQGYVMEALLTLEAAVDNLSDCLKNSDLLTVLSRSSSPDLSSSSKLTASRKSTGQLNMNPGTTSGNTATAERSRHQRSFSVPKKFGVIDRSSDPPRSATLDRIQACTQQGLSSKTRSSSSLKDSLTDPSHINHPTNLLATIFWVTVALMESDFEFEYLMALRLLSRLLAHMPLDKAENREKLEKLQAQLKWADFSGLQQLLLKGFTSLTTTDLTLQLFSLLTPVSKISMVDASHAIGFPLNVLCLLPQLIQHFENPNQFCKDIAERIAQVCLEEKNPKLSNLAHVMTLYKTHSYTRDCATWVNVVCRYLHEAYADITLNMVTYLAELLEKGLPSVQQPLLQVIYSLLSYMDLSVVPVKQFNVEVLKTIEKYVQSVHWREALNILKLVVSRSASLVLPSYQHSDLSKIEIHRVWTSASKELPGKTLDFHFDISETPIIGRRYDELQNSSGRDGKPRAMAVTRSTSSTSSGSNSNVLVPVSWKRPQYSQKRTKEKLVHVLSLCGQEVGLSKNPSVIFSSCGDLDLLEHQTSLVSSEDGAREQENMDDTNSEQQFRVFRDFDFLDVELEDGEGESMDNFNWGVRRRSLDSLDKCDMQILEERQLSGSTPSLNKMHHEDSDESSEEEDLTASQILEHSDLIMTLSPSEETNPMELLTTACDSTPAEPHSFNTRMSSFDASLPDMNNLQISEGSKAEAVREEEDTTVHEDDLSSSINELPAAFECSDSFSLDMTEGEEKGNRALDQFTLASFGEGDRGVSPPPSPFFSAILAAFQPAACDDAEEAWRSHINQLMCDSDGSCAVYTFHVFSSLFKITSGESDPNFVSSSQMLTSCSECPTLFVDAETLLSCGLLDKLKFSVLELQEYLDTYNNRKEATLSWLANCKATFAGGSRDGVITCQPGDSEEKVQLELCQRLYKLHFQLLLLFQSYCKLIGQVHEVSSMPELLNMSRELSDLKKHLKEASAVIAADPLYSDGAWSEPTFTSTEAAIQSMLECLKNNELGKALRQIRECRSLWPNDIFGSSSDDEVQTLLNIYFRHQTLGQTGTYALVGSNQSLTEICTKLMELNMEIRDMIRRAQSYRVLTTFLPDSSVSGTSL

SEQ ID NO: 801516 - protein, 195 aa, Homo sapiens
MESLAQLELCQRLYKLHFQLLLLFQSYCKLIGQVHEVSSMPELLNMSRELSDLKKHLKEASAVIAADPLYSDGAWSEPTFTSTEAAIQSMLECLKNNELGKALRQIRECRSLWPNDIFGSSSDDEVQTLLNIYFRHQTLGQTGTYALVGSNQSLTEICTKLMELNMEIRDMIRRAQSYRVLTTFLPDSSVSGTSL

SEQ ID NO: 801517 - protein, 2788 aa, Homo sapiens
MASQQDSGFFEISIKYLLKSWSNTSPVGNGYIKPPVPPASGTHREKGPPTMLPINVDPDSKPGEYVLKSLFVNFTTQAERKIRIIMAEPLEKPLTKSLQRGEDPQFDQVISSMSSLSEYCLPSILRTLFDWYKRQNGIEDESHEYRPRTSNKSKSDEQQRDYLMERRDLAIDFIFSLVLIEVLKQIPLHPVIDSLIHDVINLAFKHFKYKEGYLGPNTGNMHIVADLYAEVIGVLAQAKFPAVKKKFMAELKELRHKEQNPYVVQSIISLIMGMKFFRIKMYPVEDFEASLQFMQECAHYFLEVKDKDIKHALAGLFVEILVPVAAAVKNEVNVPCLRNFVESLYDTTLELSSRKKHSLALYPLVTCLLCVSQKQLFLNRWHIFLNNCLSNLKNKDPKMARVALESLYRLLWVYMIRIKCESNTATQSRLITIITTLFPKGSRGVVPRDMPLNIFVKIIQFIAQERLDFAMKEIIFDFLCVGKPAKAFSLNPERMNIGLRAFLVIADSLQQKDGEPPMPVTGAVLPSGNTLRVKKTYLSKTLTEEEAKMIGMSLYYSQVRKAVDNILRHLDKEVGRCMMLTNVQMLNKEPEDMITGERKPKIDLFRTCVAAIPRLLPDGMSKLELIDLLARLSIHMDDELRHIAQNSLQGLLVDFSDWREDVLFGFTNFLLREVNDMHHTLLDSSLKLLLQLLTQWKLVIQTQGKVYEQANKIRNSELIANGSSHRIQSERGPHCSVLHAVEGFALVLLCSFQVATRKLSVLILKEIRALFIALGQPEDDDRPMIDVMDQLSSSILESFIHVAVSDSATLPLTHNVDLQWLVEWNAVLVNSHYDVKSPSHVWIFAQSVKDPWVLCLFSFLRQENLPKHCPTALSYAWPYAFTRLQSVMPLVDPNSPINAKKTSTAGSGDNYVTLWRNYLILCFGVAKPSIMSPGHLRASTPEIMATTPDGTVSYDNKAIGTPSVGVLLKQLVPLMRLESIEITESLVLGFGRTNSLVFRELVEELHPLMKEALERRPENKKRRERRDLLRLQLLRIFELLADAGVISDSTNGALERDTLALGALFLEYVDLTRMLLEAENDKEVEILKDIRAHFSAMVANLIQCVPVHHRRFLFPQQSLRHHLFILFSQWAGPFSIMFTPLDRYSDRNHQITRYQYCALKAMSAVLCCGPVFDNVGLSPDGYLYKWLDNILACQDLRVHQLGCEVVVLLLELNPDQINLFNWAIDRCYTGSYQLASGCFKAIATVCGSRNYPFDIVTLLNLVLFKASDTNREIYEISMQLMQILEAKLFVYSKKVAEQRPGSILYGTHGPLPPLYSVSLALLSCELARMYPELTLPLFSEVSQRFPTTHPNGRQIMLTYLLPWLHNIELVDSRLLLPGSSPSSPEDEVKDREGDVTASHGLRGNGWGSPEATSLVLNNLMYMTAKYGDEVPGPEMENAWNALANNEKWSNNLRITLQFLISLCGVSSDTVLLPYIKKVAIYLCRNNTIQTMEELLFELQQTEPVNPIVQHCDNPPFYRFTASSKASAAASGTTSSSNTVVAGQENFPDAEENKILKESDERFSNVIRAHTRLESRYSNSSGGSYDEDKNDPISPYTGWLLTITETKQPQPLPMPCTGGCWAPLVDYLPETITPRGPLHRCNIAVIFMTEMVVDHSVREDWALHLPLLLHAVFLGLDHYRPEVFEHSKKLLLHLLIALSCNSNFHSIASVLLQTREMGEAKTLTVQPAYQPEYLYTGGFDFLREDQSSPVPDSGLSSSSTSSSISLGGSSGNLPQMTQEVEDVDTAAETDEKANKLIEFLTTRAFGPLWCHEDITPKNQNSKSAEQLTNFLRHVVSVFKDSKSGFHLEHQLSEVALQTALASSSRHYAGRSFQIFRALKQPLSAHALSDLLSRLVEVIGEHGDEIQGYVMEALLTLEAAVDNLSDCLKNSDLLTVLSRSSSPDLSSSSKLTASRKSTGQLNMNPGTTSGNTATAERSRHQRSFSVPKKFGVIDRSSDPPRSATLDRIQACTQQGLSSKTRSSSSLKDSLTDPSHINHPTNLLATIFWVTVALMESDFEFEYLMALRLLSRLLAHMPLDKAENREKLEKLQAQLKWADFSGLQQLLLKGFTSLTTTDLTLQLFSLLTPVSKISMVDASHAIGFPLNVLCLLPQLIQHFENPNQFCKDIAERIAQVCLEEKNPKLSNLAHVMTLYKTHSYTRDCATWVNVVCRYLHEAYADITLNMVTYLAELLEKGLPSVQQPLLQVIYSLLSYMDLSVVPVKQFNVEVLKTIEKYVQSVHWREALNILKLVVSRSASLVLPSYQHSDLSKIEIHRVWTSASKELPGKTLDFHFDISETPIIGRRYDELQNSSGRDGKPRAMAVTRSTSSTSSGSNSNVLVPVSWKRPQYSQKRTKEKLVHVLSLCGQEVGLSKNPSVIFSSCGDLDLLEHQTSLVSSEDGAREQENMDDTNSEQQFRVFRDFDFLDVELEDGEGESMDNFNWGVRRRSLDSLDKCDMQILEERQLSGSTPSLNKMHHEDSDESSEEEDLTASQILEHSDLIMTLSPSEETNPMELLTTACDSTPAEPHSFNTRMSSFDASLPDMNNLQISEGSKAEAVREEEDTTVHEDDLSSSINELPAAFECSDSFSLDMTEGEEKGNRALDQFTLASFGEGDRGVSPPPSPFFSAILAAFQPAACDDAEEAWRSHINQLMCDSDGSCAVYTFHVFSSLFKNIQKRFCFLTCDAASYLGDNLRGIGSKFVSSSQMLTSCSPFMWTSGQAQVQCVRTARIFGYLQQQERGHTLLACKL

SEQ ID NO: 801518 - protein, 35 aa, Homo sapiens
MAFVEQDKTQLNLIFFHTNVFHLIDAIHHIPFNIA

SEQ ID NO: 801519 - protein, 626 aa, Homo sapiens
MKSQLQFFVAQTTKGRTVSQERTLDSQVIFSSCGDLDLLEHQTSLVSSEDGAREQENMDDTNSEQQFRVFRDFDFLDVELEDGEGESMDNFNWGVRRRSLDSLDKCDMQILEERQLSGSTPSLNKMHHEDSDESSEEEDLTASQILEHSDLIMTLSPSEETNPMELLTTACDSTPAEPHSFNTRMSSFDASLPDMNNLQISEGSKAEAVREEEDTTVHEDDLSSSINELPAAFECSDSFSLDMTEGEEKGNRALDQFTLASFGEGDRGVSPPPSPFFSAILAAFQPAACDDAEEAWRSHINQLMCDSDGSCAVYTFHVFSSLFKNIQKRFCFLTCDAASYLGDNLRGIGSKFVSSSQMLTSCSECPTLFVDAETLLSCGLLDKLKFSVLELQEYLDTYNNRKEATLSWLANCKATFAGGSRDGVITCQPGDSEEKVQLELCQRLYKLHFQLLLLFQSYCKLIGQVHEVSSMPELLNMSRELSDLKKHLKEASAVIAADPLYSDGAWSEPTFTSTEAAIQSMLECLKNNELGKALRQIRECRSLWPNDIFGSSSDDEVQTLLNIYFRHQTLGQTGTYALVGSNQSLTEICTKLMELNMEIRDMIRRAQSYRVLTTFLPDSSVSGTSL

SEQ ID NO: 801520 - protein, 519 aa, Homo sapiens
MQILEERQLSGSTPSLNKMHHEDSDESSEEEDLTASQILEHSDLIMTLSPSEETNPMELLTTACDSTPAEPHSFNTRMSSFDASLPDMNNLQISEGSKAEAVREEEDTTVHEDDLSSSINELPAAFECSDSFSLDMTEGEEKGNRALDQFTLASFGEGDRGVSPPPSPFFSAILAAFQPAACDDAEEAWRSHINQLMCDSDGSCAVYTFHVFSSLFKNIQKRFCFLTCDAASYLGDNLRGIGSKFVSSSQMLTSCSECPTLFVDAETLLSCGLLDKLKFSVLELQEYLDTYNNRKEATLSWLANCKATFAGGSRDGVITCQPGDSEEKVQLELCQRLYKLHFQLLLLFQSYCKLIGQVHEVSSMPELLNMSRELSDLKKHLKEASAVIAADPLYSDGAWSEPTFTSTEAAIQSMLECLKNNELGKALRQIRECRSLWPNDIFGSSSDDEVQTLLNIYFRHQTLGQTGTYALVGSNQSLTEICTKLMELNMEIRDMIRRAQSYRVLTTFLPDSSVSGTSL

SEQ ID NO: 801521 - protein, 2828 aa, Homo sapiens
MASQQDSGFFEISIKYLLKSWSNTSPVGNGYIKPPVPPASGTHREKGPPTMLPINVDPDSKPGEYVLKSLFVNFTTQAERKIRIIMAEPLEKPLTKSLQRGEDPQFDQVISSMSSLSEYCLPSILRTLFDWYKRQNGIEDESHEYRPRTSNKSKSDEQQRDYLMERRDLAIDFIFSLVLIEVLKQIPLHPVIDSLIHDVINLAFKHFKYKEGYLGPNTGNMHIVADLYAEVIGVLAQAKFPAVKKKFMAELKELRHKEQNPYVVQSIISLIMGMKFFRIKMYPVEDFEASLQFMQECAHYFLEVKDKDIKHALAGLFVEILVPVAAAVKNEVNVPCLRNFVESLYDTTLELSSRKKHSLALYPLVTCLLCVSQKQLFLNRWHIFLNNCLSNLKNKDPKMARVALESLYRLLWVYMIRIKCESNTATQSRLITIITTLFPKGSRGVVPRDMPLNIFVKIIQFIAQERLDFAMKEIIFDFLCVGKPAKAFSLNPERMNIGLRAFLVIADSLQQKDGEPPMPVTGAVLPSGNTLRVKKTYLSKTLTEEEAKMIGMSLYYSQVRKAVDNILRHLDKEVGRCMMLTNVQMLNKEPEDMITGERKPKIDLFRTCVAAIPRLLPDGMSKLELIDLLARLSIHMDDELRHIAQNSLQGLLVDFSDWREDVLFGFTNFLLREVNDMHHTLLDSSLKLLLQLLTQWKLVIQTQGKVYEQANKIRNSELIANGSSHRIQSERGPHCSVLHAVEGFALVLLCSFQVATRKLSVLILKEIRALFIALGQPEDDDRPMIDVMDQLSSSILESFIHVAVSDSATLPLTHNVDLQWLVEWNAVLVNSHYDVKSPSHVWIFAQSVKDPWVLCLFSFLRQENLPKHCPTALSYAWPYAFTRLQSVMPLVDPNSPINAKKTSTAGSGDNYVTLWRNYLILCFGVAKPSIMSPGHLRASTPEIMATTPDGTVSYDNKAIGTPSVGVLLKQLVPLMRLESIEITESLVLGFGRTNSLVFRELVEELHPLMKEALERRPENKKRRERRDLLRLQLLRIFELLADAGVISDSTNGALERDTLALGALFLEYVDLTRMLLEAENDKEVEILKDIRAHFSAMVANLIQCVPVHHRRFLFPQQSLRHHLFILFSQWAGPFSIMFTPLDRYSDRNHQITRYQYCALKAMSAVLCCGPVFDNVGLSPDGYLYKWLDNILACQDLRVHQLGCEVVVLLLELNPDQINLFNWAIDRCYTGSYQLASGCFKAIATVCGSRNYPFDIVTLLNLVLFKASDTNREIYEISMQLMQILEAKLFVYSKKVAEQRPGSILYGTHGPLPPLYSVSLALLSCELARMYPELTLPLFSEVSQRFPTTHPNGRQIMLTYLLPWLHNIELVDSRLLLPGSSPSSPEDEVKDREGDVTASHGLRGNGWGSPEATSLVLNNLMYMTAKYGDEVPGPEMENAWNALANNEKWSNNLRITLQFLISLCGVSSDTVLLPYIKKVAIYLCRNNTIQTMEELLFELQQTEPVNPIVQHCDNPPFYRFTASSKASAAASGTTSSSNTVVAGQENFPDAEENKILKESDERFSNVIRAHTRLESRYSNSSGGSYDEDKNDPISPYTGWLLTITETKQPQPLPMPCTGGCWAPLVDYLPETITPRGPLHRCNIAVIFMTEMVVDHSVREDWALHLPLLLHAVFLGLDHYRPEVFEHSKKLLLHLLIALSCNSNFHSIASVLLQTREMGEAKTLTVQPAYQPEYLYTGGFDFLREDQSSPVPDSGLSSSSTSSSISLGGSSGNLPQMTQEVEDVDTAAETDEKANKLIEFLTTRAFGPLWCHEDITPKNQNSKSAEQLTNFLRHVVSVFKDSKSGFHLEHQLSEVALQTALASSSRHYAGRSFQIFRALKQPLSAHALSDLLSRLVEVIGEHGDEIQGYVMEALLTLEAAVDNLSDCLKNSDLLTVLSRSSSPDLSSSSKLTASRKSTGQLNMNPGTTSGNTATAERSRHQRSFSVPKKFGVIDRSSDPPRSATLDRIQACTQQGLSSKTRSSSSLKDSLTDPSHINHPTNLLATIFWVTVALMESDFEFEYLMALRLLSRLLAHMPLDKAENREKLEKLQAQLKWADFSGLQQLLLKGFTSLTTTDLTLQLFSLLTPVSKISMVDASHAIGFPLNVLCLLPQLIQHFENPNQFCKDIAERIAQVCLEEKNPKLSNLAHVMTLYKTHSYTRDCATWVNVVCRYLHEAYADITLNMVTYLAELLEKGLPSVQQPLLQVIYSLLSYMDLSVVPVKQFNVEVLKTIEKYVQSVHWREALNILKLVVSRSASLVLPSYQHSDLSKIEIHRVWTSASKELPGKTLDFHFDISETPIIGRRYDELQNSSGRDGKPRAMAVTRSTSSTSSGSNSNVLVPVSWKRPQYSQKRTKEKLVHVLSLCGQEVGLSKNPSVIFSSCGDLDLLEHQTSLVSSEDGAREQENMDDTNSEQQFRVFRDFDFLDVELEDGEGESMDNFNWGVRRRSLDSLDKCDMQILEERQLSGSTPSLNKMHHEDSDESSEEEDLTASQILEHSDLIMTLSPSEETNPMELLTTACDSTPAEPHSFNTRMSSFDASLPDMNNLQISEGSKAEAVREEEDTTVHEDDLSSSINELPAAFECSDSFSLDMTEGEEKGNRALDQFTLASFGEGDRGVSPPPSPFFSAILAAFQPAACDDAEEAWRSHINQLMCDSDGSCAVYTFHVFSSLFKNIQKRFCFLTCDAASYLGDNLRGIGSKFVSSSQMLTSCSECPTLFVDAETLLSCGLLDKLKFSVLELQEYLDTYNNRKEATLSWLANCKATFAGGSRDGVITCQPGDSEEKVIKAC

SEQ ID NO: 801522 - protein, 171 aa, Homo sapiens
QLTLQQGPERIGTDLASRRNSQASGSESQRSIQLGASEPEGGHGKDKDFPLLLTQRPIFRILEPPFHQALPMSIILMTSSAEFNQMLLQPHHLHLLLAVLQHAQLGLLVEQVKQLCQAGGMRLRPLGTRHPTRLLPPTSLPSSDKSQQQERQRIRTDGCQPSRGQYTWDLS

SEQ ID NO: 801523 - protein, 135 aa, Homo sapiens
MIDKNQTCGVGQDSVPYMICLIHILEEWFGVEQLEDYLNFANYLLWVFTPLILLILPYFTIFLLYLTIIFLHIYKRKNVLKEAYSHNLWDGARKTVATLWDGHAAVWHGKQGYFHLCVAIHVCCIGTVLPFHFID

SEQ ID NO: 801524 - protein, 135 aa, Homo sapiens; identical to SEQ ID NO: 801523

SEQ ID NO: 801525 - protein, 319 aa, Homo sapiens
MIDKNQTCGVGQDSVPYMICLIHILEEWFGVEQLEDYLNFANYLLWVFTPLILLILPYFTIFLLYLTIIFLHIYKRKNVLKEAYSHNLWDGARKTVATLWDGHAAVWHGYEVHGMEKIPEDGPALIIFYHGAIPIDFYYFMAKIFIHKGRTCRVVADHFVFKIPGFSLLLDVFCALHGPREKCVEILRSGHLLAISPGGVREALISDETYNIVWGHRRGFAQVAIDAKVPIIPMFTQNIREGFRSLGGTRLFRWLYEKFRYPFAPMYGGFPVKLRTYLGDPIPYDPQITAEELAEKTKNAVQALIDKHQRIPGNIMSAC

SEQ ID NO: 801526 - protein, 244 aa, Homo sapiens [sequence omitted]

SEQ ID NO: 801527 - protein, 319 aa, Homo sapiens; identical to SEQ ID NO: 801525

SEQ ID NO: 801528 - protein, 205 aa, Homo sapiens
MEKIPEDGPALIIFYHGAIPIDFYYFMAKIFIHKGRTCRVVADHFVFKIPGFSLLLDVFCALHGPREKCVEILRSGHLLAISPGGVREALISDETYNIVWGHRRGFAQVAIDAKVPIIPMFTQNIREGFRSLGGTRLFRWLYEKFRYPFAPMYGGFPVKLRTYLGDPIPYDPQITAEELAEKTKNAVQALIDKHQRIPGNIMSAC

SEQ ID NO: 801529 - protein, 135 aa, Homo sapiens; identical to SEQ ID NO: 801523

SEQ ID NO: 801530 - protein, 135 aa, Homo sapiens; identical to SEQ ID NO: 801523

SEQ ID NO: 801531 - protein, 231 aa, Homo sapiens
MIDKNQTCGVGQDSVPYMICLIHILEEWFGVEQLEDYLNFANYLLWVFTPLILLILPYFTIFLLYLTIIFLHIYKRKNVLKEAYSHNLWDGARKTVATLWDGHAAVWHGYEVHGMEKIPEDGPALIIFYHGAIPIDFYYFMAKIFIHKGRTCRVVADHFVFKIPGFSLLLDVFCALHGPREKCVEILRSGHLLAISPGGVREALISDETYNIVWGHRRGFAQVAIDAKVVI

SEQ ID NO: 801532 - protein, 319 aa, Homo sapiens; identical to SEQ ID NO: 801525

SEQ ID NO: 801533 - protein, 73 aa, Homo sapiens
KSRLDCRHRRTLAPGGFSFPSTRSVKTQRLIALAKMAEAKACPTCPRSSEGFSDPRRLRSGIRTRGCPKPRAV

SEQ ID NO: 801534 - protein, 73 aa, Homo sapiens; identical to SEQ ID NO: 801533

SEQ ID NO: 801535 - protein, 815 aa, Homo sapiens
VADGRTRAGGRCGAGRAAGQAAGMLRAALSLLALPLAGAAEEPTQKPESPGEPPPGLELFRWQWHEVEAPYLVALWILVASLAKIAPRVQAGLLDFLLFGSLISAVDPVAVLAVFEEVHVNETLFIIVFGESLLNDAVTVVLYKVCNSFVEMGSANVQATDYLKGVAGRIIEPLLVFLLAYAAYLTAEMASLSAILAVTMCGLGCKKYVEANISHKSRTTVKYTMKTLASCAETVIFMLLGISAVDSSKWAWDSGLVLGTLIFILFFRALGVVLQTWVLNQFRLVPLDKIDQVVMSYGGLRGAVAFALVILLDRTKVPAKDYFVATTIVVVFFTVIVQGLTIKPLVKWLKVKRSEHHKPTLNQELHEHTFDHILAAVEDVVGHHGYHYWRDRWEQFDKKYLSQLLMRRSAYRIRDQIWDVYYRLNIRDAISFVDQGGHVLSSTGLTLPSMPSRNSVAETSVTNLLRESGSGACLDLQVIDTVRSGRDREDAVMHHLLCGGLYKPRRRDRAEDRALWHATKDFPPDCHGSSIFGYKASCSRHFISEDAQERQDKEVFQQNMKRRLESFKSTKHNICFTKSKPRPRKTGRRKKDGVANAEATNGKHRGLGFQDTAAVILTVESEEEEEESDSSETEKEDDEGIIFVARATSEVLQEGKVSGSLEVCPSPRIIPPSPTCAEKELPWKSGQGDLAVYVSSETTKIVPVDMQTGWNQSISSLESLASPPCNQAPILTCLPPHPRGTEEPQVPLHLPSDPRSSFAFPPSLAKAGRSRSESSADLPQQQELQPLMGHKDHTHLSPGTATSHWCIQFNRGSRL

SEQ ID NO: 801536 - protein, 578 aa, Homo sapiens
GRPTASGTRAPPQVRLIRRAVRMAEPSSWHPSSVSPQLERGLPRRRGRVDPGTPAQDFSGEEHSLQPLPAEHLPPVFMAPTLNPRSPQPFSGLPHLERRSQQAVHRGYLRAQGQRPVQAAGGGPARLRKVGTCEGVGVFQVFHLSRKVTSLVPESCLLILLGLVLGGIVLAVAKKAEYQLEPGTFFLFLLPPIVLDSGYFMPSRLFFDNLGAILTYAVVGTLWNAFTTGAALWGLQQAGLVAPRVQAGLLDFLLFGSLISAVDPVAVLAVFEEVHVNETLFIIVFGESLLNDAVTVYKASCSRHFISEDAQERQDKEVFQQNMKRRLESFKSTKHNICFTKSKPRPRKTGRRKKDGVANAEATNGKHRGLGFQDTAAVILTVESEEEEEESDSSETEKEDDEGIIFVARATSEVLQEGKVSGSLEVCPSPRIIPPSPTCAEKELPWKSGQGDLAVYVSSETTKIVPVDMQTGWNQSISSLESLASPPCNQAPILTCLPPHPRGTEEPQVPLHLPSDPRSSFAFPPSLAKAGRSRSESSADLPQQQELQPLMGHKDHTHLSPGTATSHWCIQFNRGSRL

SEQ ID NO: 801537 - protein, 961 aa, Homo sapiens
VADGRTRAGGRCGAGRAAGQAAGMLRAALSLLALPLAGAAEEPTQKPESPGEPPPGLELFRWQWHEVEAPYLVALWILVASLAKIAPRVQAGLLDFLLFGSLISAVDPVAVLAVFEEVHVNETLFIIVFGESLLNDAVTVVLYKVCNSFVEMGSANVQATDYLKGVAGRIIEPLLVFLLAYAAYLTAEMASLSAILAVTMCGLGCKKYVEANISHKSRTTVKYTMKTLASCAETVIFMLLGISAVDSSKWAWDSGLVLGTLIFILFFRALGVVLQTWVLNQFRLVPLDKIDQVVMSYGGLRGAVAFALVILLDRTKVPAKDYFVATTIVVVFFTVIVQGLTIKPLVKWLKVKRSEHHKPTLNQELHEHTFDHILAAVEDVVGHHGYHYWRDRWEQFDKKYLSQLLMRRSAYRIRDQIWDVYYRLNIRDAISFVDQGGHVLSSTGLTLPSMPSRNSVAETSVTNLLRESGSGACLDLQVIDTVRSGRDREDAVMHHLLCGGLYKPRRRYKASCSRHFISEDAQERQDKEVFQQNMKRRLESFKSTKHNICFTKSKPRPRKTGRRKACLPSGTPLGSWRLTASSFEPPSVRIQLRGNPSWDSPQGLDDYSSLGSLLMFLESQKGKVRPSEGEQPLGHVVTCWEAAGPPTKDEKGRRKGDSFEGQLHELLSQPTLMHPDFLLGHGSLLPGWPRDGRTTGTDINSLPCWVRKTCPVDPTRCQGWGGKPGPEAQVFFLGPQKDGVANAEATNGKHRGLGFQDTAAVILTVESEEEEEESDSSETEKEDDEGIIFVARATSEVLQEGKVSGSLEVCPSPRIIPPSPTCAEKELPWKSGQGDLAVYVSSETTKIVPVDMQTGWNQSISSLESLASPPCNQAPILTCLPPHPRGTEEPQVPLHLPSDPRSSFAFPPSLAKAGRSRSESSADLPQQQELQPLMGHKDHTHLSPGTATSHWCIQFNRGSRL

SEQ ID NO: 801538 - protein, 613 aa, Homo sapiens
GRPTASGTRAPPQVRLIRRAVRMAEPSSWHPSSVSPQLERGLPRRRGRVDPGTPAQDFSGEEHSLQPLPAEHLPPVFMAPTLNPRSPQPFSGLPHLERRSQQAVHRGYLRAQGQRPVQAAGGGPARLRKVGTCEGVGVFQVFHLSRKVTSLVPESCLLILLGLVLGGIVLAVAKKAEYQLEPGTFFLFLLPPIVLDSGYFMPSRLFFDNLGAILTYAVVGTLWNAFTTGAALWGLQQAGLVGLTLPSMPSRNSVAETSVTNLLRESGSGACLDLQVIDTVRSGRDREDAVMHHLLCGGLYKPRRRDRAEDRALWHATKDFPPDCHGSSIFGYKASCSRHFISEDAQERQDKEVFQQNMKRRLESFKSTKHNICFTKSKPRPRKTGRRKKDGVANAEATNGKHRGLGFQDTAAVILTVESEEEEEESDSSETEKEDDEGIIFVARATSEVLQEGKVSGSLEVCPSPRIIPPSPTCAEKELPWKSGQGDLAVYVSSETTKIVPVDMQTGWNQSISSLESLASPPCNQAPILTCLPPHPRGTEEPQVPLHLPSDPRSSFAFPPSLAKAGRSRSESSADLPQQQELQPLMGHKDHTHLSPGTATSHWCIQFNRGSRL

SEQ ID NO: 801539 - protein, 525 aa, Homo sapiens
VADGRTRAGGRCGAGRAAGQAAGMLRAALSLLALPLAGAAEEPTQKPESPGEPPPGLELFRWQWHEVEAPYLVALWILVASLAKIAPRVQAGLLDFLLFGSLISAVDPVAVLAVFEEVHVNETLFIIVFGESLLNDAVTVVLYKVCNSFVEMGSANVQATDYLKGVAGRIIEPLLVFLLAYAAYLTAEMASLSAILAVTMCGLGCKKYVEANISHKSRTTVKYTMKTLASCAETVIFMLLGISAVDSSKWAWDSGLVLGTLIFILFFRALGVVLQTWVLNQFRLVPLDKIDQVVMSYGGLRGAVAFALVILLDRTKVPAKDYFVATTIVVVFFTVIVQGLTIKPLVKWLKVKRSEHHKPTLNQELHEHTFDHILAAVEDVVGHHGYHYWRDRWEQFDKKYLSQLLMRRSAYRIRDQIWDVYYRLNIRDAISFVDQGGHVLSSTGLTLPSMPSRNSVAETSVTNLLRESGSGACLDLQVIDTVRSGRDREDAVMHHLLCGGLYKPRRRDRAEDRALWHATKDFPPD

SEQ ID NO: 801540 - protein, 919 aa, Homo sapiens
VADGRTRAGGRCGAGRAAGQAAGMLRAALSLLALPLAGAAEEPTQKPESPGEPPPGLELFRWQWHEVEAPYLVALWILVASLAKIVFHLSRKVTSLVPESCLLILLGLVLGGIVLAVAKKAEYQLEPGTFFLFLLPPIVLDSGYFMPSRLFFDNLGAILTYAVVGTLWNAFTTGAALWGLQQAGLVAPRVQAGLLDFLLFGSLISAVDPVAVLAVFEEVHVNETLFIIVFGESLLNDAVTVVLYKVCNSFVEMGSANVQATDYLKGVASLFVVSLGGAAVGLVFAFLLALTTRFTKRVRIIEPLLVFLLAYAAYLTAEMASLSAILAVTMCGLGCKKYVEANISHKSRTTVKYTMKTLASCAETVIFMLLGISAVDSSKWAWDSGLVLGTLIFILFFRALGVVLQTWVLNQFRLVPLDKIDQVVMSYGGLRGAVAFALVILLDRTKVPAKDYFVATTIVVVFFTVIVQGLTIKPLVKWLKVKRSEHHKPTLNQELHEHTFDHILAAVEDVVGHHGYHYWRDRWEQFDKKYLSQLLMRRSAYRIRDQIWDVYYRLNIRDAISFVDQGGHVLSSTGLTLPSMPSRNSVAETSVTNLLRESGSGACLDLQVIDTVRSGRDREDAVMHHLLCGGLYKPRRRYKASCSRHFISEDAQERQDKEVFQQNMKRRLESFKSTKHNICFTKSKPRPRKTGRRKKDGVANAEATNGKHRGLGFQDTAAVILTVESEEEEEESDSSETEKEDDEGIIFVARATSEVLQEGKVSGSLEVCPSPRIIPPSPTCAEKELPWKSGQGDLAVYVSSETTKIVPVDMQTGWNQSISSLESLASPPCNQAPILTCLPPHPRGTEEPQVPLHLPSDPRSSFAFPPSLAKAGRSRSESSADLPQQQELQPLMGHKDHTHLSPGTATSHWCIQFNRGSRL

SEQ ID NO: 801541 - protein, 468 aa, Homo sapiens
VADGRTRAGGRCGAGRAAGQAAGMLRAALSLLALPLAGAAEEPTQKPESPGEPPPGLELFRWQWHEVEAPYLVALWILVASLAKIVFHLSRKVTSLVPESCLLILLGLVLGGIVLAVAKKAEYQLEPGTFFLFLLPPIVLDSGYFMPSRLFFDNLGAILTYAVVGTLWNAFTTGAALWGLQQAGLVVQSQLQSPLHLRGCAGAQDKEVFQQNMKRRLESFKSTKHNICFTKSKPRPRKTGRRKKDGVANAEATNGKHRGLGFQDTAAVILTVESEEEEEESDSSETEKEDDEGIIFVARATSEVLQEGKVSGSLEVCPSPRIIPPSPTCAEKELPWKSGQGDLAVYVSSETTKIVPVDMQTGWNQSISSLESLASPPCNQAPILTCLPPHPRGTEEPQVPLHLPSDPRSSFAFPPSLAKAGRSRSESSADLPQQQELQPLMGHKDHTHLSPGTATSHWCIQFNRGSRL

SEQ ID NO: 801542 - protein, 347 aa, Homo sapiens
MFLESQKGKVRPSEGEQPLGHVVTCWEAAGPPTKDEKGRRKGDSFEGQLHELLSQPTLMHPDFLLGHGSLLPGWPRDGRTTGTDINSLPCWVRKTCPVDPTRCQGWGGKPGPEAQVFFLGPQKDGVANAEATNGKHRGLGFQDTAAVILTVESEEEEEESDSSETEKEDDEGIIFVARATSEVLQEGKVSGSLEVCPSPRIIPPSPTCAEKELPWKSGQGDLAVYVSSETTKIVPVDMQTGWNQSISSLESLASPPCNQAPILTCLPPHPRGTEEPQVPLHLPSDPRSSFAFPPSLAKAGRSRSESSADLPQQQELQPLMGHKDHTHLSPGTATSHWCIQFNRGSRL

SEQ ID NO: 801543 - protein, 344 aa, Homo sapiens
AGPRPMAAAAAAALESWQAAAPRKRRSAARRPRRREAAPRGREAAPRGREAAPRGPEAEFESDSGVVLRRIWEAEKDLFISDFWSSALETINRCLTKHLEQLKTPVGTLSDIFGNLHLDSLPEESDVATDSIPREILVTGTCHLKCVCYGIGNFATCIVARNQLTFLLLLLEKCQIPRSHCWVYDPLFSQLEIEVLNTLGVTVLSENEEGKRSIRGEPTIFYMLHCGTALYNNLLWSNWSVDALSKMVIIGNSFKGLEERLLARILQKNYPYIAKILKGLEELEFPQTSQYMDIFNDTSVHWFPVQKLEQLSIDIWEFREEPDYQDCEDLEIIRNKREDPSATD

SEQ ID NO: 801544 - protein, 275 aa, Homo sapiens
MAAAAAAALESWQAAAPRKRRSAARRPRRREAAPRGREAAPRGREAAPRGPEAEFESDSGVVLRRIWEAEGTCHLKCVCYGIGNFATCIVARNQLTFLLLLLEKCQIPRSHCWVYDPLFSQLEIEVLNTLGVTVLSENEEGKRSIRGEPTIFYMLHCGTALYNNLLWSNWSVDALSKMVIIGNSFKGLEERLLARILQKNYPYIAKILKGLEELEFPQTSQYMDIFNDTSVHWFPVQKLEQLSIDIWEFREEPDYQDCEDLEIIRNKREDPSATD

SEQ ID NO: 801545 - protein, 337 aa, Homo sapiens
AGPRPMAAAAAAALESWQAAAPRKRRSAARRPRRREAAPRGREAAPRGPEAEFESDSGVVLRRIWEAEKDLFISDFWSSALETINRCLTKHLEQLKTPVGTLSDIFGNLHLDSLPEESDVATDSIPREILVTGTCHLKCVCYGIGNFATCIVARNQLTFLLLLLEKCQIPRSHCWVYDPLFSQLEIEVLNTLGVTVLSENEEGKRSIRGEPTIFYMLHCGTALYNNLLWSNWSVDALSKMVIIGNSFKGLEERLLARILQKNYPYIAKILKGLEELEFPQTSQYMDIFNDTSVHWFPVQKLEQLSIDIWEFREEPDYQDCEDLEIIRNKREDPSATD

SEQ ID NO: 801546 - protein, 241 aa, Homo sapiens
MAAAAAAALESWQAAAPRKRRSAARRPRRREAAPRGREAAPRGPEAEFESDSGVVLRRIWEAEKDLFISDFWSSALETINRCLTKHLEQLKTPVGTLSDIFGNLHLDSLPEESDVATDSIPREILVTGTCHLKCVCYGIGNFATCIVARNQLTFLLLLLEKCQIPRSHCWVYDPLFSQLEIEVLNTLGVTVLSENEVSGLKGSRQNCKNPDQTHPRPCLWTPAFFAVAAIPLLPPAHFCSA

SEQ ID NO: 801547 - protein, 111 aa, Homo sapiens
MVSRQGPSVTTGGGRGDERALSDTLETARRPLPDVGPSILDFPASLQNWKLPRLCPLPLTLLKEDKEDNDKWRLQQSNTNSQLDAQERTLCLFLMVSSALHILRNFSGNKL

SEQ ID NO: 801548 - protein, 66 aa, Homo sapiens
MFYAQKCHCFLADIIMDSIRQKDPKAITAKVVSLANRLWVCVTGLRPWGTLYLLHLFPCPTISGAR

SEQ ID NO: 801549 - protein, 201 aa, Homo sapiens
GTLKDWSKQRTKERESPAPEQPLPEASEVDSLGVILKVTHPPVVGSDGFCMFFEDSIIYTTEMDNLRHTTPTASPQPQEVTFLSFSLSWEEMFYAQKCHCFLADIIMDSIRQKDPKAITAKVVSLANRLWTLHISPKQFVVDLLAITGFKDDRHTQERLYSWVELTLPFARKYGRCMDLLIQRGLSRSVSYSILGKYLQED

SEQ ID NO: 801550 - protein, 150 aa, Homo sapiens
NSSRQSQVQLGSDGEATLLARLTEGCRAQQSLAGLGSQALPRAPWASLPQLRRPLHGAPDGWGLALRSHEHRGPQPRQLPSHQPPRLSLSSRHSRDLAEATDPLPMLIALACIFLLLATCLLFMTLCKPAALDPSRRRAHECMPHHPGSP

SEQ ID NO: 801551 - protein, 153 aa, Homo sapiens
LDSQAGVQWHDLGSLQSPPPGFKQFSCPSLSSSWDYRRPPPHPANFVFLVETGFHHVGQAGLELLTSGDPSTSASQRAGITGVRHRARQKYFKISQRCRFNPNPPSASWSWDKYCLHRAHTHRHPPDTLAWRPRTWGSWAQLCQRPILPLLAV

SEQ ID NO: 801552 - protein, 314 aa, Homo sapiens
MGPLINRCKKILLPTTVPPATMRIWLLGGLLPFLLLLSGLQRPTEGSEVAIKIDFDFAPGSFDDQYQGCSKQVMEKLTQGDYFTKDIEAQKNYFRMWQKAHLAWLNQGKVLPQNMTTTHAVAILFYTLNSNVHSDFTRAMASVARTPQQYERSFHFKYLHYYLTSAIQLLRKDSIMENGTLCYEVHYRTKDVHFNAYTGATIRFGQFLSTSLLKEEAQEFGNQTLFTIFTCLGAPVQYFSLKKEVLIPPYELFKVINMSYHPRGDWLQLRSTGNLSTYNCQLLKASSKKCIPDPIAIASLSFLTSVIIFSKSRV

SEQ ID NO: 801553 - protein, 459 aa, Homo sapiens
MAASASAAAGEEDWVLPSEVEVLESIYLDELQVIKGNGRTSPWEIYITLHPATAEDQDSQYVCFTLVLQVPAEYPHEVPQISIRNPRGLSDEQIHTILQVLGHVAKAGLGTAMLYELIEKGKEILTDNNIPHGQCVICLYGFQEKEAFTKTPCYHYFHCHCLARYIQHMEQELKAQGQEQEQERQHATTKQKAVGVQCPVCREPLVYDLASLKAAPEPQQPMELYQPSAESLRQQEERKRLYQRQQERGGIIDLEAERNRYFISLQQPPAPAEPESAVDVSKGSQPPSTLAAELSTSPAVQSTLPPPLPVATQHICEKIPGTRSNQQRLGETQKAMLDPPKPSRGPWRQPERRHPKGGECHAPKGTRDTQELPPPEGPLKEPMDLKPEPHSQGVEGPPQEKGPGSWQGPPPRRTRDCVRWERSKGRTPGSSYPRLPRGQGAYRPGTRRESLGLESKDGS

SEQ ID NO: 801554 - protein, 347 aa, Homo sapiens
MLYELIEKGKEILTDNNIPHGQCVICLYGFQEKEAFTKTPCYHYFHCHCLARYIQHMEQELKAQGQEQEQERQHATTKQKAVGVQCPVCREPLVYDLASLKAAPEPQQPMELYQPSAESLRQQEERKRLYQRQQERGGIIDLEAERNRYFISLQQPPAPAEPESAVDVSKGSQPPSTLAAELSTSPAVQSTLPPPLPVATQHICEKIPGTRSNQQRLGETQKAMLDPPKPSRGPWRQPERRHPKGGECHAPKGTRDTQELPPPEGPLKEPMDLKPEPHSQGVEGPPQEKGPGSWQGPPPRRTRDCVRWERSKGRTPGSSYPRLPRGQGAYRPGTRRESLGLESKDGS

SEQ ID NO: 801555 - protein, 404 aa, Homo sapiens [sequence omitted]

SEQ ID NO: 801556 - protein, 388 aa, Homo sapiens
RLGGGWCESAEARNPRGLSDEQIHTILQVLGHVAKAGLGTAMLYELIEKGKEILTDNNIPHGQCVICLYGFQEKEAFTKTPCYHYFHCHCLARYIQHMEQELKAQGQEQEQERQHATTKQKAVGVQCPVCREPLVYDLASLKAAPEPQQPMELYQPSAESLRQQEERKRLYQRQQERGGIIDLEAERNRYFISLQQPPAPAEPESAVDVSKGSQPPSTLAAELSTSPAVQSTLPPPLPVATQHICEKIPGTRSNQQRLGETQKAMLDPPKPSRGPWRQPERRHPKGGECHAPKGTRDTQELPPPEGPLKEPMDLKPEPHSQGVEGPPQEKGPGSWQGPPPRRTRDCVRWERSKGRTPGSSYPRLPRGQGAYRPGTRRESLGLESKDGS

SEQ ID NO: 801557 - protein, 355 aa, Homo sapiens
MLYELIEKGKEILTDNNIPHGQCVICLYGFQCPTSAFPLEKEAFTKTPCYHYFHCHCLARYIQHMEQELKAQGQEQEQERQHATTKQKAVGVQCPVCREPLVYDLASLKAAPEPQQPMELYQPSAESLRQQEERKRLYQRQQERGGIIDLEAERNRYFISLQQPPAPAEPESAVDVSKGSQPPSTLAAELSTSPAVQSTLPPPLPVATQHICEKIPGTRSNQQRLGETQKAMLDPPKPSRGPWRQPERRHPKGGECHAPKGTRDTQELPPPEGPLKEPMDLKPEPHSQGVEGPPQEKGPGSWQGPPPRRTRDCVRWERSKGRTPGSSYPRLPRGQGAYRPGTRRESLGLESKDGS

SEQ ID NO: 801558 - protein, 306 aa, Homo sapiens
MAASASAAAGEEDWVLPSEVEVLESIYLDELQVIKGNGRTSPWEIYITLHPATAEDQDSQYVCFTLVLQVPAEYPHEVPQISIRNPRGLSDEQIHTILQVLGHVAKAGLGTAMLYELIEKGKEILTDNNIPHGQCVICLYGFQEKEAFTKTPCYHYFHCHCLARYIQHMEQELKAQGQEQEQERQHATTKQKAVGVQCPVCREPLVYDLASLKAAPEPQQPMELYQPSAESLRQQEERKRLYQRQQERGGIIDLEAERNRYFISLQQPPAPAEPESAVDVSKGSQPPSTPSRTYTPSTSLPPRGSS

SEQ ID NO: 801559 - protein, 459 aa, Homo sapiens; identical to SEQ ID NO: 801553

SEQ ID NO: 801560 - protein, 347 aa, Homo sapiens; identical to SEQ ID NO: 801554

SEQ ID NO: 801561 - protein, 337 aa, Homo sapiens
MAASASAAAGEEDWVLPSEVEVLESIYLDELQVIKGNGRTSPWEIYITLHPATAEDQDSQYVCFTLVLQVPAEYPHEVPQISIRNPRGLSDEQIHTILQVLGHVAKAGLGTAMLYELIEKGKEILTDNNIPHGQCVICLYGFQEKEAFTKTPCYHYFHCHCLARYIQHMEQELKAQGQEQEQERQHATTKQKAVGVQCPVCREPLVYDLASLKAAPEPQQPMELYQPSAESLRQQEERKRLYQRQQERGGIIDLEAERNRYFISLQQPPAPAEPESAVDVSKGSQPPSTLAAELSTSPAVQSTLPPPLPVATQHICEKIPGTRSNQQSYPLHFLQNP

SEQ ID NO: 801562 - protein, 467 aa, Homo sapiens
MAASASAAAGEEDWVLPSEVEVLESIYLDELQVIKGNGRTSPWEIYITLHPATAEDQDSQYVCFTLVLQVPAEYPHEVPQISIRNPRGLSDEQIHTILQVLGHVAKAGLGTAMLYELIEKGKEILTDNNIPHGQCVICLYGFQCPTSAFPLEKEAFTKTPCYHYFHCHCLARYIQHMEQELKAQGQEQEQERQHATTKQKAVGVQCPVCREPLVYDLASLKAAPEPQQPMELYQPSAESLRQQEERKRLYQRQQERGGIIDLEAERNRYFISLQQPPAPAEPESAVDVSKGSQPPSTLAAELSTSPAVQSTLPPPLPVATQHICEKIPGTRSNQQRLGETQKAMLDPPKPSRGPWRQPERRHPKGGECHAPKGTRDTQELPPPEGPLKEPMDLKPEPHSQGVEGPPQEKGPGSWQGPPPRRTRDCVRWERSKGRTPGSSYPRLPRGQGAYRPGTRRESLGLESKDGS

SEQ ID NO: 801563 - protein, 246 aa, Homo sapiens
SLRGLQQPMELYQPSAESLRQQEERKRLYQRQQERGGIIDLEAERNRYFISLQQPPAPAEPESAVDVSKGSQPPSTLAAELSTSPAVQSTLPPPLPVATQHICEKIPGTRSNQQRLGETQKAMLDPPKPSRGPWRQPERRHPKGGECHAPKGTRDTQELPPPEGPLKEPMDLKPEPHSQGVEGPPQEKGPGSWQGPPPRRTRDCVRWERSKGRTPGSSYPRLPRGQGAYRPGTRRESLGLESKDGS

SEQ ID NO: 801564 - protein, 118 aa, Homo sapiens
IPRPQEYLMPFFSSCLCPSHYSGPSLPSSTSSSLPTGPENQLGFVLLQAMVHHANSSCVRNAFWLQITEKLTPALSIIISVVYLRCPEMVENRIGFLLNVKDSKTLSVVGPHPKPCIL

SEQ ID NO: 801565 - protein, 118 aa, Homo sapiens; identical to SEQ ID NO: 801564

SEQ ID NO: 801566 - protein, 555 aa, Homo sapiens
MGKAFKVMNELRSKQLLCDVMIVAEDVEIEAHRVVLAACSPYFCAMFTGDMSESKAKKIEIKDVDGQTLSKLIDYIYTAEIEVTEENVQVLLPAASLLQLMDVRQNCCDFLQSQLHPTNCLGIRAFADVHTCTDLLQQANAYAEQHFPEVMLGEEFLSLSLDQVCSLISSDKLTVSSEEKVFEAVISWINYEKENRLEHMAKLMEHVRLPLLPRDYLVQTVEEEALIKNNNTCKDFLIEAMKYHLLPLDQRLLIKNPRTKPRTPVSLPKVMIVVGGQAPKAIRSVECYDFEEDRWDQIAELPSRRCRAGVVFMAGHVYAVGGFNGSLRVRTVDVYDGVKDQWTSIASMQERRSTLGAAVLNDLLYAVGGFDGSTGLASVEAYSYKTNEWFFVAPMNTRQSSVGVGVVEGKLYAVGGYDGASRQCLSTVEQYNPATNEWIYVADMSTRRSGAGVGVLSGQLYATGGHDGPLVRKSVEVYDPGTNTWKQVADMNMCRRNAGVCAVNGLLYVVGGDDGSCNLASVEYYNPVTDKWTLLPTNMSTGRSYAGVAVIHKSL

SEQ ID NO: 801567 - protein, 650 aa, Homo sapiens
MPFATAVDRGLLKPQKVKLDNEGKHYPSLNKELDLGTETGERDLPCLPYPTGRCFLFSQYILTYGYKGVKLSSQTLIQAGDDEKNQRTITVNPAHMGKAFKVMNELRSKQLLCDVMIVAEDVEIEAHRVVLAACSPYFCAMFTGDMSESKAKKIEIKDVDGQTLSKLIDYIYTAEIEVTEENVQVLLPAASLLQLMDVRQNCCDFLQSQLHPTNCLGIRAFADVHTCTDLLQQANAYAEQHFPEVMLGEEFLSLSLDQVCSLISSDKLTVSSEEKVFEAVISWINYEKENRLEHMAKLMEHVRLPLLPRDYLVQTVEEEALIKNNNTCKDFLIEAMKYHLLPLDQRLLIKNPRTKPRTPVSLPKVMIVVGGQAPKAIRSVECYDFEEDRWDQIAELPSRRCRAGVVFMAGHVYAVGGFNGSLRVRTVDVYDGVKDQWTSIASMQERRSTLGAAVLNDLLYAVGGFDGSTGLASVEAYSYKTNEWFFVAPMNTRQSSVGVGVVEGKLYAVGGYDGASRQCLSTVEQYNPATNEWIYVADMSTRRSGAGVGVLSGQLYATGGHDGPLVRKSVEVYDPGTNTWKQVADMNMCRRNAGVCAVNGLLYVVGGDDGSCNLASVEYYNPVTDKWTLLPTNMSTGRSYAGVAVIHKSL

SEQ ID NO: 801568 - protein, 555 aa, Homo sapiens; identical to SEQ ID NO: 801566

SEQ ID NO: 801569 - protein, 189 aa, Homo sapiens
MGKAFKVMNELRSKQLLCDVMIVAEDVEIEAHRVVLAACSPYFCAMFTGDMSESKAKKIEIKDVDGQTLSKLIDYIYTAEIEVTEENVQVLLPAASLLQLMDVRQNCCDFLQSQLHPTNCLGIRAFADVHTCTDLLQQANAYAEQHFPEVMLGEEFLSLSLDQVCSLISSDKLTVSSEEKMESCSVGQG

SEQ ID NO: 801570 - protein, 587 aa, Homo sapiens
MEGESVKLSSQTLIQAGDDEKNQRTITVNPAHMGKAFKVMNELRSKQLLCDVMIVAEDVEIEAHRVVLAACSPYFCAMFTGDMSESKAKKIEIKDVDGQTLSKLIDYIYTAEIEVTEENVQVLLPAASLLQLMDVRQNCCDFLQSQLHPTNCLGIRAFADVHTCTDLLQQANAYAEQHFPEVMLGEEFLSLSLDQVCSLISSDKLTVSSEEKVFEAVISWINYEKENRLEHMAKLMEHVRLPLLPRDYLVQTVEEEALIKNNNTCKDFLIEAMKYHLLPLDQRLLIKNPRTKPRTPVSLPKVMIVVGGQAPKAIRSVECYDFEEDRWDQIAELPSRRCRAGVVFMAGHVYAVGGFNGSLRVRTVDVYDGVKDQWTSIASMQERRSTLGAAVLNDLLYAVGGFDGSTGLASVEAYSYKTNEWFFVAPMNTRQSSVGVGVVEGKLYAVGGYDGASRQCLSTVEQYNPATNEWIYVADMSTRRSGAGVGVLSGQLYATGGHDGPLVRKSVEVYDPGTNTWKQVADMNMCRRNAGVCAVNGLLYVVGGDDGSCNLASVEYYNPVTDKWTLLPTNMSTGRSYAGVAVIHKSL

SEQ ID NO: 801571 - protein, 505 aa, Homo sapiens
MSESKAKKIEIKDVDGQTLSKLIDYIYTAEIEVTEENVQVLLPAASLLQLMDVRQNCCDFLQSQLHPTNCLGIRAFADVHTCTDLLQQANAYAEQHFPEVMLGEEFLSLSLDQVCSLISSDKLTVSSEEKVFEAVISWINYEKENRLEHMAKLMEHVRLPLLPRDYLVQTVEEEALIKNNNTCKDFLIEAMKYHLLPLDQRLLIKNPRTKPRTPVSLPKVMIVVGGQAPKAIRSVECYDFEEDRWDQIAELPSRRCRAGVVFMAGHVYAVGGFNGSLRVRTVDVYDGVKDQWTSIASMQERRSTLGAAVLNDLLYAVGGFDGSTGLASVEAYSYKTNEWFFVAPMNTRQSSVGVGVVEGKLYAVGGYDGASRQCLSTVEQYNPATNEWIYVADMSTRRSGAGVGVLSGQLYATGGHDGPLVRKSVEVYDPGTNTWKQVADMNMCRRNAGVCAVNGLLYVVGGDDGSCNLASVEYYNPVTDKWTLLPTNMSTGRSYAGVAVIHKSL

SEQ ID NO: 801572 - protein, 650 aa, Homo sapiens; identical to SEQ ID NO: 801567

SEQ ID NO: 801573 - protein, 187 aa, Homo sapiens
MGKAFKVMNELRSKQLLCDVMIVAEDVEIEAHRVVLAACSPYFCAMFTGDMSESKAKKIEIKDVDGQTLSKLIDYIYTAEIEVTEENVQVLLPAASLLQLMDVRQNCCDFLQSQLHPTNCLGIRAFADVHTCTDLLQQANAYAEQHFPEVMLGEEFLSLSLDQVCSLISSDKLTVSSEEKIFSFLFF

SEQ ID NO: 801574 - protein, 357 aa, Homo sapiens
TIAAATCFPEPFINEGKRLGYIHRNFAGNRFSDHVALLSVFQAWDDARMGGEEAEIRFCEHKRLNMATLRMTWEAKVQLKEILINSGFPEDCLLTQVFTNTGPDNNLDVVISLLALVCTSQDMKYPSPFFVFGEKIRTRAISAKGMTLVTPLQLLLFASKKVQSDGQIVLVDDWIKLQISHEAAACITGLRAAMEALVVEVTKQPAIISQLDPVNERMLNMIRQISRPSAAGINLMIGSTRYGDGPRPPKMARYDNGSGYRRGGSSYSGGGYGGGYSSGGYGSGGYGGSANSFRAGYGAGVGGGYRGVSRGGFRGNSGGDYRGPSGGYRGSGGFQRGGGRGAYGTGYFGQGRGGGGY

SEQ ID NO: 801575 - protein, 279 aa, Homo sapiens
GWYRPDVWDPNVCYHKEKRKILTTEGRNALIHKSSVNCPFSSQDMKYPSPFFVFGEKIRTRAISAKGMTLVTPLQLLLFASKKVQSDGQIVLVDDWIKLQISHEAAACITGLRAAMEALVVEVTKQPAIISQLDPVNERMLNMIRQISRPSAAGINLMIGSTRYGDGPRPPKMARYDNGSGYRRGGSSYSGGGYGGGYSSGGYGSGGYGGSANSFRAGYGAGVGGGYRGVSRGGFRGNSGGDYRGPSGGYRGSGGFQRGGGRGAYGTGYFGQGRGGGGY

SEQ ID NO: 801576 - protein, 162 aa, Homo sapiens [sequence omitted]

SEQ ID NO: 801577 - protein, 389 aa, Homo sapiens
TIAAATCFPEPFINEGKRLGYIHRNFAGNRFSDHVALLSVFQAWDDARMGGEEAEIRFCEHKRLNMATLRMTWEAKVQLKEILINSGFPEDCLLTQVFTNTGPDNNLDVVISLLAFGVYPNVCYHKEKRKILTTEGRNALIHKSSVNCPFSSQDMKYPSPFFVFGEKIRTRAISAKGMTLVTPLQLLLFASKKVQSDGQIVLVDDWIKLQISHEAAACITGLRAAMEALVVEVTKQPAIISQLDPVNERMLNMIRQISRPSAAGINLMIGSTRYGDGPRPPKMARYDNGSGYRRGGSSYSGGGYGGGYSSGGYGSGGYGGSANSFRAGYGAGVGGGYRGVSRGGFRGNSGGDYRGPSGGYRGSGGFQRGGGRGAYGTGYFGQGRGGGGY

SEQ ID NO: 801578 - protein, 389 aa, Homo sapiens; identical to SEQ ID NO: 801577

SEQ ID NO: 801579 - protein, 389 aa, Homo sapiens; identical to SEQ ID NO: 801577

SEQ ID NO: 801580 - protein, 389 aa, Homo sapiens; identical to SEQ ID NO: 801577

SEQ ID NO: 801581 - protein, 235 aa, Homo sapiens
LGRGRVVAVFGEKIRTRAISAKGMTLVTPLQLLLFASKKVQSDGQIVLVDDWIKLQISHEAAACITGLRAAMEALVVEVTKQPAIISQLDPVNERMLNMIRQISRPSAAGINLMIGSTRYGDGPRPPKMARYDNGSGYRRGGSSYSGGGYGGGYSSGGYGSGGYGGSANSFRAGYGAGVGGGYRGVSRGGFRGNSGGDYRGPSGGYRGSGGFQRGGGRGAYGTGYFGQGRGGGGY

SEQ ID NO: 801582 - protein, 389 aa, Homo sapiens; identical to SEQ ID NO: 801577

SEQ ID NO: 801583 - protein, 389 aa, Homo sapiens; identical to SEQ ID NO: 801577

SEQ ID NO: 801584 - protein, 254 aa, Homo sapiens
GWYRPDVWDPNVCYHKEKRKILTTEGRNALIHKSSVNCPFSSQDMKYPSPFFVFGEKIRTRAISAKGMTLVTPLQLLLFASKKVQSDGQIVLVDDWIKLQISHEAAACITGLRAAMEALVVEVTKQPAIISQLDPVNERMLNMIRQISRPSAAGINLMIGSTRYGDGPRPPKMARYDNGSGYRRGGSSYSGGGYGGGYSSGGYGSGGIKTWLCQFLCVDSKEKKACYVLRVFSSMFICHQKVNAFSPILWFIVV

SEQ ID NO: 801585 - protein, 153 aa, Homo sapiens
MGGFGSRFWQEGVWDRDLEKSTRLEEDAMESEPLAGTKTRGRGRRRWEARRAWTLPAHASQPSPRTVVATATGAEVSARAGRSAGTRVARPESQLSHLYGWDKYSNPRPSRRARAVARVHALEQAPILCRALRRGLTQFLRGTSPVTQSVPFS

SEQ ID NO: 801586 - protein, 153 aa, Homo sapiens; identical to SEQ ID NO: 801585

SEQ ID NO: 801587 - protein, 153 aa, Homo sapiens; identical to SEQ ID NO: 801585

SEQ ID NO: 801588 - protein, 153 aa, Homo sapiens; identical to SEQ ID NO: 801585

SEQ ID NO: 801589 - protein, 327 aa, Homo sapiens
PRRQELPGRSPSSWSALGWPAALGGGVVAVAVCEPVARLLWAGTLKIAAMAENGDNEKMAALEAKICHQIEYYFGDFNLPRDKFLKEQIKLDEGWVPLEIMIKFNRLNRLTTDFNVIVEALSKSKAELMEISEDKTKIRRSPSKPLPEVTDEYKNDVKNRSVYIKGFPTDATLDDIKEWLEDKGQVLNIQMRRTLHKAFKGSIFVVFDSIESAKKFVETPGQKYKETDLLILFKDDYFAKKNEERKQNKVEAKLRAKQEQEAKQKLEEDAEMKSLEEKIGCLLKFSGDLDDQTCREDLHILFSNHGEIKWIDFVRGAKEVWIHPYPF

SEQ ID NO: 801590 - protein, 269 aa, Homo sapiens
ALVSTQSGSLLARVRSRFISWPAALGGGVVAVAVCEPVARLLWAGTLKIAAMAENGDNEKMAALEAKICHQIEYYFGDFNLPRDKFLKEQIKLDEGWVPLEIMIKFNRLNRLTTDFNVIVEALSKSKAELMEISEDKTKIRRSPSKPLPEVTDEYKNDVKNRSVYIKGFPTDATLDDIKEWLEDKGQVLNIQMRRTLHKAFKGSIFVVFDSIESAKKFVETPGQKYKETDLLILFKRDEYFAKKLRKEPISGLISSNGAEQPVEKTSVS

SEQ ID NO: 801591 - protein, 383 aa, Homo sapiens
PRRQELPGRSPSSWSALGWPAALGGGVVAVAVCEPVARLLWAGTLKIAAMAENGDNEKMAALEAKICHQIEYYFGDFNLPRDKFLKEQIKLDEGWVPLEIMIKFNRLNRLTTDFNVIVEALSKSKAELMEISEDKTKIRRSPSKPLPEVTDEYKNDVKNRSVYIKGFPTDATLDDIKEWLEDKGQVLNIQMRRTLHKAFKGSIFVVFDSIESAKKFVETPGQKYKETDLLILFKDDYFAKKNEERKQNKVEAKLRAKQEQEAKQKLEEDAEMKSLEEKIGCLLKFSGDLDDQTCREDLHILFSNHGEIKWIDFVRGAKEGIILFKEKAKEALGKAKDANNGNLQLRNKEVTWEVLEGEVEKRSTEENNRRPTRIPKQMEVKRS

SEQ ID NO: 801592 - protein, 385 aa, Homo sapiens
ALVSTQSGSLLARVRSRFISWPAALGGGVVAVAVCEPVARLLWAGTLKIAAMAENGDNEKMAALEAKICHQIEYYFGDFNLPRDKFLKEQIKLDEGWVPLEIMIKFNRLNRLTTDFNVIVEALSKSKAELMEISEDKTKIRRSPSKPLPEVTDEYKNDVKNRSVYIKGFPTDATLDDIKEWLEDKGQVLNIQMRRTLHKAFKGSIFVVFDSIESAKKFVETPGQKYKETDLLILFKDDYFAKKNEERKQNKVEAKLRAKQEQEAKQKLEEDAEMKSLEEKIGCLLKFSGDLDDQTCREDLHILFSNHGEIKWIDFVRGAKEGIILFKEKAKEALGKAKDANNGNLQLRNKEVTWEVLEGEVEKRSTEENNRRPTRIPKQMEVKRS

SEQ ID NO: 801593 - protein, 383 aa, Homo sapiens; identical to SEQ ID NO: 801591

SEQ ID NO: 801594 - protein, 383 aa, Homo sapiens; identical to SEQ ID NO: 801591

SEQ ID NO: 801595 - protein, 383 aa, Homo sapiens; identical to SEQ ID NO: 801591

SEQ ID NO: 801596 - protein, 283 aa, Homo sapiens
MIKFNRLNRLTTDFNVIVEALSKSKAELMEISEDKTKIRRSPSKPLPEVTDEYKNDVKNRSVYIKGFPTDATLDDIKEWLEDKGQVLNIQMRRTLHKAFKGSIFVVFDSIESAKKFVETPGQKYKETDLLILFKDDYFAKKNEERKQNKVEAKLRAKQEQEAKQKLEEDAEMKSLEEKIGCLLKFSGDLDDQTCREDLHILFSNHGEIKWIDFVRGAKEGIILFKEKAKEALGKAKDANNGNLQLRNKEVTWEVLEGEVEKRSTEENNRRPTRIPKQMEVKRS

SEQ ID NO: 801597 - protein, 283 aa, Homo sapiens; identical to SEQ ID NO: 801596

SEQ ID NO: 801598 - protein, 283 aa, Homo sapiens; identical to SEQ ID NO: 801596

SEQ ID NO: 801599 - protein, 296 aa, Homo sapiens
MVIMKRWLPWRPKSVIKLRLNRLTTDFNVIVEALSKSKAELMEISEDKTKIRRSPSKPLPEVTDEYKNDVKNRSVYIKGFPTDATLDDIKEWLEDKGQVLNIQMRRTLHKAFKGSIFVVFDSIESAKKFVETPGQKYKETDLLILFKDDYFAKKNEERKQNKVEAKLRAKQEQEAKQKLEEDAEMKSLEEKIGCLLKFSGDLDDQTCREDLHILFSNHGEIKWIDFVRGAKEGIILFKEKAKEALGKAKDANNGNLQLRNKEVTWEVLEGEVEKRSTEENNRRPTRIPKQMEVKRS

SEQ ID NO: 801600 - protein, 201 aa, Homo sapiens
PRRQELPGRSPSSWSALGWPAALGGGVVAVAVCEPVARLLWAGTLKIAAMAENGDNEKMAALEAKICHQIEYYFGDFNLPRDKFLKEQIKLDEGWVPLEIMIKFNRLNRLTTDFNVIVEALSKSKAELMEISEDKTKIRRSPSKPLPEVTDEYKNDVKNRSVYIKGFPTDATLDDIKEWLEDKGQVLNIQMRRTLHKAFKV

SEQ ID NO: 801601 - protein, 201 aa, Homo sapiens; identical to SEQ ID NO: 801600

SEQ ID NO: 801602 - protein, 162 aa, Homo sapiens
LRRSEDPLFVLQRDDYFAKKNEERKQNKVEAKLRAKQEQEAKQKLEEDAEMKSLEEKIGCLLKFSGDLDDQTCREDLHILFSNHGEIKWIDFVRGAKEGIILFKEKAKEALGKAKDANNGNLQLRNKEVTWEVLEGEVEKRSTEENNRRPTRIPKQMEVKRS

SEQ ID NO: 801603 - protein, 150 aa, Homo sapiens
MDDYFAKKNEERKQNKVEAKLRAKQEQEAKQKLEEDAEMKSLEEKIGCLLKFSGDLDDQTCREDLHILFSNHGEIKWIDFVRGAKEGIILFKEKAKEALGKAKDANNGNLQLRNKEVTWEVLEGEVEKRSTEENNRRPTRIPKQMEVKRS

SEQ ID NO: 801604 - protein, 182 aa, Homo sapiens
MYDYAYMAAGRTEEAITVRKASEMHSGLDVRLEQEYLRYIEHTIDCERYRTDLRLKMTASCVGKDQRLVGLDSACHIAGVVDDELNLNSDSSRISTVDFPHLIGDPEPGIDFVRGAKEGIILFKEKAKEALGKAKDANNGNLQLRNKEVTWEVLEGEVEKRSTEENNRRPTRIPKQMEVKRS

SEQ ID NO: 801605 - protein, 180 aa, Homo sapiens
PRRQELPGRSPSSWSALGWPAALGGGVVAVAVCEPVARLLWAGTLKIAAMAENGDNEKMAALEAKICHQIEYYFGDFNLPRDKFLKEQIKLDEGWVPLEIMIKFNRLNRLTTDFNVIVEALSKSKAELMEISEDKTKIRRSPSKPLPEVTDEYKNDVKNRSVYIVSGPVMHLNILHLFRK

SEQ ID NO: 801606 - protein, 334 aa, Homo sapiens
MAENGDNEKMAALEAKICHQIEYYFGDFNLPRDKFLKEQIKLDEGWVPLEIMIKFNRLNRLTTDFNVIVEALSKSKAELMEISEDKTKIRRSPSKPLPEVTDEYKNDVKNRSVYIKGFPTDATLDDIKEWLEDKGQVLNIQMRRTLHKAFKGSIFVVFDSIESAKKFVETPGQKYKETDLLILFKDDYFAKKNEERKQNKVEAKLRAKQEQEAKQKLEEDAEMKSLEEKIGCLLKFSGDLDDQTCREDLHILFSNHGEIKWIDFVRGAKEGIILFKEKAKEALGKAKDANNGNLQLRNKEVTWEVLEGEVEKRSTEENNRRPTRIPKQMEVKRS

SEQ ID NO: 801607 - protein, 295 aa, Homo sapiens
PRRQELPGRSPSSWSALGWPAALGGGVVAVAVCEPVARLLWAGTLKIAAMAENGDNEKMAALEAKICHQIEYYFGDFNLPRDKFLKEQIKLDEGWVPLEIMIKFNRLNRLTTDFNVIVEALSKSKAELMEISEDKTKIRRSPSKPLPEVTDEYKNDVKNRSVYIKGFPTDATLDDIKEWLEDKGQVLNIQMRRTLHKAFKGSIFVVFDSIESAKKFVETPGQKYKETDLLILFKDDTWQKMRRNNKGVIRVKGKKKKKKFGGAEILNLWGAGECRSDAEGFQNGGVQSCCSGFTG

SEQ ID NO: 801608 - protein, 334 aa, Homo sapiens; identical to SEQ ID NO: 801606

SEQ ID NO: 801609 - protein, 383 aa, Homo sapiens; identical to SEQ ID NO: 801591

SEQ ID NO: 801610 - protein, 383 aa, Homo sapiens; identical to SEQ ID NO: 801591

SEQ ID NO: 801611 - protein, 258 aa, Homo sapiens
PRRQELPGRSPSSWSALGWPAALGGGVVAVAVCEPVARLLWAGTLKIAAMAENGDNEKMAALEAKICHQIEYYFGDFNLPRDKFLKEQIKLDEGWVPLEIMIKFNRLNRLTTDFNVIVEALSKSKAELMEISEDKTKIRRSPSKPLPEVTDEYKNDVKNRSVYIKGFPTDATLDDIKEWLEDKGQVLNIQMRRTLHKAFKGSIFVVFDSIESAKKFVETPGQKYKETDLLILFKDDYFAKKNEERKQNKVEAKLRAKQ

SEQ ID NO: 801612 - protein, 283 aa, Homo sapiens; identical to SEQ ID NO: 801596

SEQ ID NO: 801613 - protein, 283 aa, Homo sapiens; identical to SEQ ID NO: 801596

SEQ ID NO: 801614 - protein, 279 aa, Homo sapiens
RGSRGLQRNFNVIVEALSKSKAELMEISEDKTKIRRSPSKPLPEVTDEYKNDVKNRSVYIKGFPTDATLDDIKEWLEDKGQVLNIQMRRTLHKAFKGSIFVVFDSIESAKKFVETPGQKYKETDLLILFKDDYFAKKNEERKQNKVEAKLRAKQEQEAKQKLEEDAEMKSLEEKIGCLLKFSGDLDDQTCREDLHILFSNHGEIKWIDFVRGAKEGIILFKEKAKEALGKAKDANNGNLQLRNKEVTWEVLEGEVEKRSTEENNRRPTRIPKQMEVKRS

SEQ ID NO: 801615 - protein, 267 aa, Homo sapiens
PRRQELPGRSPSSWSALGWPAALGGGVVAVAVCEPVARLLWAGTLKIAAMAENGDNEKMAALEAKICHQIEYYFGDFNLPRDKFLKEQIKLDEGWVPLEIMIKFNRLNRLTTDFNVIVEALSKSKAELMEISEDKTKIRRSPSKPLPEVTDEYKNDVKNRSVYIKGFPTDATLDDIKEWLEDKGQVLNIQMRRTLHKAFKGSIFVVFDSIESAKKFVETPGQKYKETDLLILFKDDYFAKKNEERKQNKVEAKLRAKQEQEAKQKFR

SEQ ID NO: 801616 - protein, 243 aa, Homo sapiens
RFFAKLNEERKLNKVEAKLRAKQEKGFPTDATLDDIKEWLEDKGQVLNIQMRRTLHKAFKGSIFVVFDSIESAKKFVETPGQKYKETDLLILFKDDYFAKKNEERKQNKVEAKLRAKQEQEAKQKLEEDAEMKSLEEKIGCLLKFSGDLDDQTCREDLHILFSNHGEIKWIDFVRGAKEGIILFKEKAKEALGKAKDANNGNLQLRNKEVTWEVLEGEVEKRSTEENNRRPTRIPKQMEVKRS

SEQ ID NO: 801617 - protein, 267 aa, Homo sapiens
PRRQELPGRSPSSWSALGWPAALGGGVVAVAVCEPVARLLWAGTLKIAAMAENGDNEKMAALEAKICHQIEYYFGDFNLPRDKFLKEQIKLDEGWVPLEIMIKFNRLNRLTTDFNVIVEALSKSKAELMEISEDKTKIRRSPSKPLPEVTDEYKNDVKNRSVYIKGFPTDATLDDIKEWLEDKGQVLNIQMRRTLHKAFKGSIFVVFDSIESAKKFVETPGQKYKETDLLILFKRDEYFAKKLRKEPISGLISSNGAEQPVEKTSVS

SEQ ID NO: 801618 - protein, 184 aa, Homo sapiens
MIKFNRLNRLTTDFNVIVEALSKSKAELMEISEDKTKIRRSPSKPLPEVTDEYKNDVKNRSVYIKGFPTDATLDDIKEWLEDKGQVLNIQMRRTLHKAFKGSIFVVFDSIESAKKFVETPGQKYKETDLLILFKDDYFAKKNEERKQNKVEAKLRAKQEQEAKQSYEEDLNEILGRKIGVLKFG

SEQ ID NO: 801619 - protein, 949 aa, Homo sapiens
ADLKGLGPLGPGMAAAAEPGARAWLGGGSPRPGSPACSPVLGSGGRARPGPGPGPGRDRAGGVRARARAAPGHSFRKVTLTKPTFCHLCSDFIWGLAGFLCDVCNFMSHEKCLKHVRIPCTSVAPSLVRVPVAHCFGPRGLHKRKFCAVCRKVLEAPALHCEVCELHLHPDCVPFACSDCRQCHQDGHQDHDTHHHHWREGNLPSGARCEVCRKTCGSSDVLAGVRCEWCGVQAHSLCSAALAPECGFGRLRSLVLPPACVRLLPGGFSKTQSFRIVEAAEPGEGGDGADGSAAVGPGRETQATPESGKQTLKIFDGDDAVRRSQFRLVTVSRLAGAEEVLEAALRAHHIPEDPGHLELCRLPPSSQACDAWAGGKAGSAVISEEGRSPGSGEATPEAWVIRALPRAQEVLKIYPGWLKVGVAYVSVRVTPKSTARSVVLEVLPLLGRQAESPESFQLVEVAMGCRHVQRTMLMDEQPLLDRLQDIRQMSVRQVSQTRFYVAESRDVAPHVSLFVGGLPPGLSPEEYSSLLHEAGATKATVVSVSHIYSSQGAVVLDVACFAEAERLYMLLKDMAVRGRLLTALVLPDLLHAKLPPDSCPLLVFVNPKSGGLKGRDLLCSFRKLLNPHQVFDLTNGGPLPGLHLFSQVPCFRVLVCGGDGTVGWVLGALEETRYRLACPEPSVAILPLGTGNDLGRVLRWGAGYSGEDPFSVLLSVDEADAVLMDRWTILLDAHEAGSAENDTADAEPPKIVQMSNYCGIGIDAELSLDFHQAREEEPGKFTSRLHNKGVYVRVGLQKISHSRSLHKQIRLQVERQEVELPSIEGLIFINIPSWGSGADLWGSDSDTRFEKPRMDDGLLEVVGVTGVVHMGQVQGGLRSGIRIAQGSYFRVTLLKATPVQVDGEPWVQAPGHMIISAAGPKVHMLRKAKQKPRRAGTTRDARADACACP

SEQ ID NO: 801620 - protein, 455 aa, Homo sapiens
MRPRGVPGVKWDSPGPHVAPDLSLGQPWAGETSWFGSCPGTVGAMGQAPPESWAPAAGAVVLDVACFAEAERLYMLLKDMAVRGRLLTALVLPDLLHAKLPPDSCPLLVFVNPKSGGLKGRDLLCSFRKLLNPHQVFDLTNGGPLPGLHLFSQVPCFRVLVCGGDGTVGWVLGALEETRYRLACPEPSVAILPLGTGNDLGRVLRWGAGYSGEDPFSVLLSVDEADAVLMDRWTILLDAHEAGSAENDTADAEPPKIVQMSNYCGIGIDAELSLDFHQAREEEPGKFTSRLHNKGVYVRVGLQKISHSRSLHKQIRLQVERQEVELPSIEGLIFINIPSWGSGADLWGSDSDTRFEKPRMDDGLLEVVGVTGVVHMGQVQGGLRSGIRIAQGSYFRVTLLKATPVQVDGEPWVQAPGHMIISAAGPKVHMLRKAKQKPRRAGTTRDARADACACP

SEQ ID NO: 801621 - protein, 170 aa, Homo sapiens
ADLKGLGPLGPGMAAAAEPGARAWLGGGSPRPGSPACSPVLGSGGRARPGPGPGPGRDRAGGVRARARAAPGHSFRKVTLTKPTFCHLCSDFIWGLAGFLCDVCNFMSHEKCLKHVRIPCTSVAPSLVRVPVAHCFGPRGLHKRKFCAVCRKVLEAPALHCEVCEMFPLL

SEQ ID NO: 801622 - protein, 975 aa, Homo sapiens
ADLKGLGPLGPGMAAAAEPGARAWLGGGSPRPGSPACSPVLGSGGRARPGPGPGPGRDRAGGVRARARAAPGHSFRKVTLTKPTFCHLCSDFIWGLAGFLCDVCNFMSHEKCLKHVRIPCTSVAPSLVRVPVAHCFGPRGLHKRKFCAVCRKVLEAPALHCEVCELHLHPDCVPFACSDCRQCHQDGHQDHDTHHHHWREGNLPSGARCEVCRKTCGSSDVLAGVRCEWCGVQAHSLCSAALAPECGFGRLRSLVLPPACVRLLPGGFSKTQSFRIVEAAEPGEGGDGADGSAAVGPGRETQATPESGKQTLKIFDGDDAVRRSQFRLVTVSRLAGAEEVLEAALRAHHIPEDPGHLELCRLPPSSQACDAWAGGKAGSAVISEEGRSPGSGEATPEAWVIRALPRAQEVLKIYPGWLKVGVAYVSVRVTPKSTARSVVLEVLPLLGRQAESPESFQLVEVAMGCRHVQRTMLMDEQPLLDRLQDIRQGGLELQISPRSSRGTDRGCPQQGSLCGPFPRFPVDLIPGSVPDALFCCFAGEETEGLVRWCRSPRPSIPAPLPADAATVVSVSHIYSSQGAVVLDVACFAEAERLYMLLKDMAVRGRLLTALVLPDLLHAKLPPDSCPLLVFVNPKSGGLKGRDLLCSFRKLLNPHQVFDLTNGGPLPGLHLFSQVPCFRVLVCGGDGTVGWVLGALEETRYRLACPEPSVAILPLGTGNDLGRVLRWGAGYSGEDPFSVLLSVDEADAVLMDRWTILLDAHEAGSAENDTADAEPPKIVQMSNYCGIGIDAELSLDFHQAREEEPGKFTSRLHNKGVYVRVGLQKISHSRSLHKQIRLQVERQEVELPSIEGLIFINIPSWGSGADLWGSDSDTRFEKPRMDDGLLEVVGVTGVVHMGQVQGGLRSGIRIAQGSYFRVTLLKATPVQVDGEPWVQAPGHMIISAAGPKVHMLRKAKQKPRRAGTTRDARADACACP

SEQ ID NO: 801623 - protein, 56 aa, Homo sapiens
MSPWSSVPCPGTGAHAEEGQAEAEEGRDHQGCPGGCVRLPLRAILGRGGWGSPRAR

SEQ ID NO: 801624 - protein, 140 aa, Homo sapiens
GFFSRRTFCGRSGRSCRGQLVQVSRPEVSAGSLLLPAPQAEDHSSRILYPRPKSLLPKMMNADMDAVDAENQVELEEKTRLINQVLELQHTLEDLSARVDAVKEENLKLKSENQVLGQYIENLMSASSVFQTTDTKSKRK

SEQ ID NO: 801625 - protein, 140 aa, Homo sapiens; identical to SEQ ID NO: 801624

SEQ ID NO: 801626 - protein, 140 aa, Homo sapiens; identical to SEQ ID NO: 801624

SEQ ID NO: 801627 - protein, 140 aa, Homo sapiens; identical to SEQ ID NO: 801624

SEQ ID NO: 801628 - protein, 112 aa, Homo sapiens
GFFSRRTFCGRSGRSCRGQLVQVSRPEVSAGSLLLPAPQAEDHSSRILYPRPKSLLPKMMNADMDDLSARVDAVKEENLKLKSENQVLGQYIENLMSASSVFQTTDTKSKRK

SEQ ID NO: 801629 - protein, 144 aa, Homo sapiens
GFFSRRTFCGRSGRSCRGQLVQVSRPEVSAGSLLLPAPQAEDHSSRILYPRPKSLLPKMMNADMDAVDAENQVELEEKTRLINQVLELQHTLEDLSARVDAVKEENLKLKSENQVLGQYIENLMSASSVFQTTDTKITVPLWLH

SEQ ID NO: 801630 - protein, 122 aa, Homo sapiens
MDGSRKEEEEDSTFTNISLADDIDHSSRILYPRPKSLLPKMMNADMDAVDAENQVELEEKTRLINQVLELQHTLEDLSARVDAVKEENLKLKSENQVLGQYIENLMSASSVFQTTDTKSKRK

SEQ ID NO: 801631 - protein, 140 aa, Homo sapiens; identical to SEQ ID NO: 801624

SEQ ID NO: 801632 - protein, 140 aa, Homo sapiens; identical to SEQ ID NO: 801624

SEQ ID NO: 801633 - protein, 122 aa, Homo sapiens; identical to SEQ ID NO: 801630

SEQ ID NO: 801634 - protein, 606 aa, Homo sapiens
MAATAAVSPSDYLQPAASTTQDSQPSPLALLAATCSKIGPPAVEAAVTPPAPPQPTPRKLVPIKPAPLPLSPGKNSFGILSSKGNILQIQGSQLSASYPGGQLVFAIQNPTMINKGTRSNANIQYQAVPQIQASNSQTIQVQPNLTNQIQIIPGTNQAIITPSPSSHKPVPIKPAPIQKSSTTTTPVQSGANVVKLTGGGGNVTLTLPVNNLVNASDTGAPTQLLTESPPTPLSKTNKKARKKSLPASQPPVAVAEQVETVLIETTADNIIQAGNNLLIVQSPGGGQPAVVQQVQVVPPKAEQQQVVQIPQQALRVVQAASATLPTVPQKPSQNFQIQAAEPTPTQVYIRTPSGEVQTVLVQDSPPATAAATSNTTCSSPASRAPHLSGTSKKHSAAILRKERPLPKIAPAGSIISLNAAQLAAAAQAMQTININGVQVQGVPVTITNTGGQQQLTVQNVSGNNLTISGLSPTQIQLQMEQALAGETQPGEKRRRMACTCPNCKDGEKRSGEQGKKKHVCHIPDCGKTFRKTSLLRAHVRLHTGERPFVCNWFFCGKRFTRSDELQRHARTHTGDKRFECAQCQKRFMRSDHLTKHYKTHLVTKNL

SEQ ID NO: 801635 - protein, 71 aa, Homo sapiens
SEVSLPVTCSPQVRPRKTRGTRDTLPSPVLNGTSARRVPRSMHWQVAGSPSLSLHLTPARPKLYLCTVYIV

SEQ ID NO: 801636 - protein, 145 aa, Homo sapiens
  misc_feature (91)..(91): Xaa can be any naturally occurring amino acid
MTTRIKNQTTTRLSIYTSDEIHLPNTEKKPVIVIRLKALIPDQERQANLGPYCRRSQKSNCRKRVPTIDQYQTGGPESNGPGDTEPKYDCXKPSNTQNAMRPKPDPNPEGPKQGTAVNNQGPKTTKIARDPENQRPNTPQTRVKN

SEQ ID NO: 801637 - protein, 606 aa, Homo sapiens; identical to SEQ ID NO: 801634

SEQ ID NO: 801638 - protein, 606 aa, Homo sapiens; identical to SEQ ID NO: 801634

SEQ ID NO: 801639 - protein, 675 aa, Homo sapiens
DKRMRVSQLWSSRSGGAPKAEQQQVVQIPQQALRVVQAASATLPTVTPEASQNFQIQAAEPTPTHPQTSMAATAAVSPSDYLQPAASTTQDSQPSPLALLAATCSKIGPPAVEAAVTPPAPPQPTPRKLVPIKPAPLPLSPGKNSFGILSSKGNILQIQGSQLSASYPGGQLVFAIQNPTMINKGTRSNANIQYQAVPQIQASNSQTIQVQPNLTNQIQIIPGTNQAIITPSPSSHKPVPIKPAPIQKSSTTTTPVQSGANVVKLTGGGGNVTLTLPVNNLVNASDTGAPTQLLTESPPTPLSKTNKKARKKSLPASQPPVAVAEQVETVLIETTADNIIQAGNNLLIVQSPGGGQPAVVQQVQVVPPKAEQQQVVQIPQQALRVVQAASATLPTVPQKPSQNFQIQAAEPTPTQVYIRTPSGEVQTVLVQDSPPATAAATSNTTCSSPASRAPHLSGTSKKHSAAILRKERPLPKIAPAGSIISLNAAQLAAAAQAMQTININGVQVQGVPVTITNTGGQQQLTVQNVSGNNLTISGLSPTQIQLQMEQALAGETQPGEKRRRMACTCPNCKDGEKRSGEQGKKKHVCHIPDCGKTFRKTSLLRAHVRLHTGERPFVCNWFFCGKRFTRSDELQRHARTHTGDKRFECAQCQKRFMRSDHLTKHYKTHLVTKNL

SEQ ID NO: 801640 - protein, 282 aa, Homo sapiens
IGGCLAGGVRLSVAAEAAEAREEDVVMSDPQTSMAATAAVSPSDYLQPAASTTQDSQPSPLALLAATCSKIGPPAVEAAVTPPAPPQPTPRKLVPIKPAPLPLSPGKNSFGILSSKGNILQIQGSQLSASYPGGQLVFAIQNPTMINKGTRSNANIQYQAVPQIQASNSQTIQVQPNLTNQIQIIPGTNQAIITPSPSSHKPVPIKPAPIQKSSTTTTPVQSGANVVKLTGGGGNVTLTLPVNNLVNASDTGAPTQLLTASCQTGMLNSTRMFLFLAFINVL

SEQ ID NO: 801641 - protein, 282 aa, Homo sapiens; identical to SEQ ID NO: 801640

SEQ ID NO: 801642 - protein, 65 aa, Homo sapiens
MAATAAVSPSDYLQPAASTTQDSQPSPLALLAATCSKIGPPAVEAAVTPPAPPQPTPRFLKKGRE

SEQ ID NO: 801643 - protein, 633 aa, Homo sapiens
  misc_feature (11)..(11): Xaa can be any naturally occurring amino acid
SSWSRSEKYEXSEAREEDVVMSDPQTSMAATAAVSPSDYLQPAASTTQDSQPSPLALLAATCSKIGPPAVEAAVTPPAPPQPTPRKLVPIKPAPLPLSPGKNSFGILSSKGNILQIQGSQLSASYPGGQLVFAIQNPTMINKGTRSNANIQYQAVPQIQASNSQTIQVQPNLTNQIQIIPGTNQAIITPSPSSHKPVPIKPAPIQKSSTTTTPVQSGANVVKLTGGGGNVTLTLPVNNLVNASDTGAPTQLLTESPPTPLSKTNKKARKKSLPASQPPVAVAEQVETVLIETTADNIIQAGNNLLIVQSPGGGQPAVVQQVQVVPPKAEQQQVVQIPQQALRVVQAASATLPTVPQKPSQNFQIQAAEPTPTQVYIRTPSGEVQTVLVQDSPPATAAATSNTTCSSPASRAPHLSGTSKKHSAAILRKERPLPKIAPAGSIISLNAAQLAAAAQAMQTININGVQVQGVPVTITNTGGQQQLTVQNVSGNNLTISGLSPTQIQLQMEQALAGETQPGEKRRRMACTCPNCKDGEKRSGEQGKKKHVCHIPDCGKTFRKTSLLRAHVRLHTGERPFVCNWFFCGKRFTRSDELQRHARTHTGDKRFECAQCQKRFMRSDHLTKHYKTHLVTKNL

SEQ ID NO: 801644 - protein, 639 aa, Homo sapiens
IGGCLAGGVRLSVAAEAAEAREEDVVMSDPQTSMAATAAVSPSDYLQPAASTTQDSQPSPLALLAATCSKIGPPAVEAAVTPPAPPQPTPRKLVPIKPAPLPLSPGKNSFGILSSKGNILQIQGSQLSASYPGGQLVFAIQNPTMINKGTRSNANIQYQAVPQIQASNSQTIQVQPNLTNQIQIIPGTNQAIITPSPSSHKPVPIKPAPIQKSSTTTTPVQSGANVVKLTGGGGNVTLTLPVNNLVNASDTGAPTQLLTESPPTPLSKTNKKARKKSLPASQPPVAVAEQVETVLIETTADNIIQAGNNLLIVQSPGGGQPAVVQQVQVVPPKAEQQQVVQIPQQALRVVQAASATLPTVPQKPSQNFQIQAAEPTPTQVYIRTPSGEVQTVLVQDSPPATAAATSNTTCSSPASRAPHLSGTSKKHSAAILRKERPLPKIAPAGSIISLNAAQLAAAAQAMQTININGVQVQGVPVTITNTGGQQQLTVQNVSGNNLTISGLSPTQIQLQMEQALAGETQPGEKRRRMACTCPNCKDGEKRSGEQGKKKHVCHIPDCGKTFRKTSLLRAHVRLHTGERPFVCNWFFCGKRFTRSDELQRHARTHTGDKRFECAQCQKRFMRSDHLTKHYKTHLVTKNL

SEQ ID NO: 801645 - protein, 343 aa, Homo sapiens
  misc_feature (11)..(11): Xaa can be any naturally occurring amino acid
SSWSRSEKYEXSEAREEDVVMSDPQTSMAATAAVSPSDYLQPAASTTQDSQPSPLALLAATCSKIGPPAVEAAVTPPAPPQPTPRKLVPIKPAPLPLSPGKNSFGILSSKGNILQIQGSQLSASYPGGQLVFAIQNPTMINKGTRSNANIQYQAVPQIQASNSQTIQVQPNLTNQIQIIPGTNQAIITPSPSSHKPVPIKPAPIQKSSTTTTPVQSGANVVKLTGGGGNVTLTLPVNNLVNASDTGAPTQLLTESPPTPLSKTNKKARKKSLPASQPPVAVAEQVETVLIETTADNIIQAGNNLLIVQSPGGGQPAVVQQVQVVPPKAEQQQVVQIPQQAHEQ

SEQ ID NO: 801646 - protein, 125 aa, Homo sapiens
MAGAGPTMLLREENGCCSRRQSSSSAGDSDGEREDSAAERARQQLEALLNKTMRIRMTDGRTLVGCFLCTDRDCNVILGSAQEFLKPSDSFSAGEPRVLGLAMVPGHHIVSIEVQRESLTGPPYL

SEQ ID NO: 801647 - protein, 125 aa, Homo sapiens; identical to SEQ ID NO: 801646

SEQ ID NO: 801648 - protein, 105 aa, Homo sapiens
MLGHLRRREIATLKILQVWPSHQAPARHGSCSVGHWISWLLLCSSARTHYYYDLRRVREPRGERLSADMETIVLFRPPSTEINIRGGVWTARVHGKRSMSPAWGI

SEQ ID NO: 801649 - protein, 132 aa, Homo sapiens
KALMQSLGGISETERPTWETKKSLKEPNLTFWTMDSDGEREDSAAERARQQLEALLNKTMRIRMTDGRTLVGCFLCTDRDCNVILGSAQEFLKPSDSFSAGEPRVLGLAMVPGHHIVSIEVQRESLTGPPYL

SEQ ID NO: 801650 - protein, 115 aa, Homo sapiens
MAGAGPTMLLREENGCCSRRQSSSSAGDSDGEREDSAAERARQQLEALLNKTMRIRMTDGREQVGGTSGLTGTPWTPRARQTPSDDTPRREPRCKARAGTRHQRSPEAEATRPHR

SEQ ID NO: 801651 - protein, 125 aa, Homo sapiens; identical to SEQ ID NO: 801646

SEQ ID NO: 801652 - protein, 152 aa, Homo sapiens
RPPTTTKFAAARRVLRKLKGPEEASGQMAGAGPTMLLREENGCCSRRQSSSSAGDSDGEREDSAAERARQQLEALLNKTMRIRMTDGRTLVGCFLCTDRDCNVILGSAQEFLKPSDSFSAGEPRVLGLAMVPGHHIVSIEVQRESLTGPPYL

SEQ ID NO: 801653 - protein, 125 aa, Homo sapiens; identical to SEQ ID NO: 801646

SEQ ID NO: 801654 - protein, 125 aa, Homo sapiens; identical to SEQ ID NO: 801646

SEQ ID NO: 801655 - protein, 131 aa, Homo sapiens [sequence omitted]

SEQ ID NO: 801656 - protein, 117 aa, Homo sapiens
MKQLRYRERERSWNCEKAEDSDGEREDSAAERARQQLEALLNKTMRIRMTDGRTLVGCFLCTDRDCNVILGSAQEFLKPSDSFSAGEPRVLGLAMVPGHHIVSIEVQRESLTGPPYL

SEQ ID NO: 801657 - protein, 135 aa, Homo sapiens
MAGAGPTMLLREENGCCSRRQSSSSAGDSDGEREDSAAERARQQLEALLNKTMRIRMTDGRTLVGCFLCTDRDCNVILGSAQEFLKPSGQCPGNAHPPDSFSAGEPRVLGLAMVPGHHIVSIEVQRESLTGPPYL

SEQ ID NO: 801658 - protein, 118 aa, Homo sapiens
  misc_feature (13)..(13): Xaa can be any naturally occurring amino acid
MWPRCGHPPATAXASASPRKDSDGEREDSAAERARQQLEALLNKTMRIRMTDGRTLVGCFLCTDRDCNVILGSAQEFLKPSDSFSAGEPRVLGLAMVPGHHIVSIEVQRESLTGPPYL

SEQ ID NO: 801659 - protein, 70 aa, Homo sapiens
GNSCAEPRMTLQSRSVQEFLKPSGQCPGNAHPPDSFSAGEPRVLGLAMVPGHHIVSIEVQRESLTGPPYL

SEQ ID NO: 801660 - protein, 125 aa, Homo sapiens; identical to SEQ ID NO: 801646

SEQ ID NO: 801661 - protein, 125 aa, Homo sapiens; identical to SEQ ID NO: 801646

SEQ ID NO: 801662 - protein, 190 aa, Homo sapiens
MRVSRKEAESGAPRREGRASPRPELDRGPLQPCAREDDRTQGGRQDPGGRGSQEKRGAAPGRGLGPSALSRLTPLFHPQTRIVLILPLDKRQPLANAGQRIDYASGAGLGSPAAPRLRGAGEGSEREPRMPVLLLLRRQEARRPEEGGARAALSWPRLLSRFRSPGKAPREAGPAEEQPRKRCRCPRPQL

SEQ ID NO: 801663 - protein, 175 aa, Homo sapiens
ARAQGAEQTECGPSSPVVTSPAMGNYSSHKRTKAPKQARKERPADMDKAWWKSFLNHLTRKKPATRIVLILPLDKRQPLANAGQRIDYASGAGLGSPAAPRLRGAGEGSEREPRMPVLLLLRRQEARRPEEGGARAALSWPRLLSRFRSPGKAPREAGPAEEQPRKRCRCPRPQL

SEQ ID NO: 801664 - protein, 91 aa, Homo sapiens
LGCEERHERSEEGAVGSSQQVSELKPVDLGALGSLAGCGVRMEWAGKQRDFQVRAAPGWDHLASFPGPSLRLFSGSQASVCSLCSGFGAQE

SEQ ID NO: 801665 - protein, 269 aa, Homo sapiens
  misc_feature (226)..(226): Xaa can be any naturally occurring amino acid
  misc_feature (260)..(261): Xaa can be any naturally occurring amino acid
LDPAVNPVPKPKRTFEYEADKNPKSKPSNGLPPSPTPAAPPPLPSTPAPPVTRRPKKDMRGHRKSQSRKSFEFEDASSLQSLYPSSPTENGTENQPKFGSKSTLEENAYEDIVGDLPKENPYEDVDLKSRKAGRKSQQLSENSLDSLHRMWSPQDRKYNSPPTQLSLKPNSQSLRSGNWSERKSHRLPRLPKRHSHDDMLLLAQLSLPSSTSKPQWKTSLSNNKRXCCPNRRARPQSQSLSKRNLNSHPTNGQRRRESKXXLKKRLSQG

SEQ ID NO: 801666 - protein, 171 aa, Homo sapiens
MTANKNSSITHGAGGTKAPRGTLSRSQSVSPPPVLSPPRSPIYPLSDSETSACRYPSHSSSRVLLKDRHPPAPSPQNPQDPSPDTSPPTCPFKTASFGYLDRSPSACKRDAQKESVQGAAQDVAGVAACLPLAQSTPFPGPAAGPRGVLLTRTGTRAHSLGIPEKISAWEG

SEQ ID NO: 801667 - protein, 1135 aa, Homo sapiens
MTANKNSSITHGAGGTKAPRGTLSRSQSVSPPPVLSPPRSPIYPLSDSETSACRYPSHSSSRVLLKDRHPPAPSPQNPQDPSPDTSPPTCPFKTASFGYLDRSPSACKRDTQKESVQGAAQDVAGVAACLPLAQSTPFPGPAAGPRGVLLTRTGTRSPQPGHPGEDIAWEGRREASPRMSMCGEKREGSGSEWAASEGCPSLGCPSVVPSPCSSEKTFDFKGLRRMSRTFSECSYPETEEEGEALPVRDSFYRLEKRLGRSEPSAFLRGHGSRKESSAVLSRIQKIEQVLKEQPGRGLPQLPSSCYSVDRGKRKTGTLGSLEEPAGGASVSAGSRAVGVAGVAGEAGPPPEREGSGSTKPGTPGNSPSSQRLPSKSSLDPAVNPVPKPKRTFEYEAEKNPKSKPSNGLPPSPTPAAPPPLPSTPAPPVTRRPKKDMRGHRKSQSRKSFEFEDASSLQSLYPSSPTENGTENQPKFGSKSTLEENAYEDIVGDLPKENPYEDVDLKSRRAGRKSQQLSENSLDSLHRMWSPQDRKYNSPPTQLSLKPNSQSLRSGNWSERKSHRLPRLPKRHSHDDMLLLAQLSLPSSPSSLNEDSLSTTSELLSSRRARRIPKLVQRINSIYNAKRGKKRLKKLSMSSIETASLRDENSESESDSDDRFKAHTQRLVHIQSMLKRAPSYRTLELELLEWQERELFEYFVVVSLKKKPSRNTYLPEVSYQFPKLDRPTKQMREAEERLKAIPQFCFPDAKDWLPVSEYSSETFSFMLTGEDGSRRFGYCRRLLPSGKGPRLPEVYCVISRLGCFGLFSKVLDEVERRRGISAALVYPFMRSLMESPFPAPGKTIKVKTFLPGAGNEVLELRRPMDSRLEHVDFECLFTCLSVRQLIRIFASLLLERRVIFVADKLSTLSSCSHAVVALLYPFSWQHTFIPVLPASMIDIVCCPTPFLVGLLSSSLPKLKELPVEEALMVNLGSDRFIRQMDDEDTLLPRKLQAALEQALERKNELISQDSDSDSDDECNTLNGLVSEVFIRFFVETVGHYSLFLTQSEKGERAFQREAFRKSVASKSIRRFLEVFMESQMFAGFIQDRELRKCRAKGLFEQRVEQYLEELPDTEQSGMNKFLRGLGNKMKFLHKKN

SEQ ID NO: 801668 - protein, 609 aa, Homo sapiens
MWSPQDRKYNSPPTQLSLKPNSQSLRSGNWSERKSHRLPRLPKRHSHDDMLLLAQLSLPSSPSSLNEDSLSTTSELLSSRRARRIPKLVQRINSIYNAKRGKKRLKKLSMSSIETASLRDENSESESDSDDRFKAHTQRLVHIQSMLKRAPSYRTLELELLEWQERELFEYFVVVSLKKKPSRNTYLPEVSYQFPKLDRPTKQMREAEERLKAIPQFCFPDAKDWLPVSEYSSETFSFMLTGEDGSRRFGYCRRLLPSGKGPRLPEVYCVISRLGCFGLFSKVLDEVERRRGISAALVYPFMRSLMESPFPAPGKTIKVKTFLPGAGNEVLELRRPMDSRLEHVDFECLFTCLSVRQLIRIFASLLLERRVIFVADKLSTLSSCSHAVVALLYPFSWQHTFIPVLPASMIDIVCCPTPFLVGLLSSSLPKLKELPVEEALMVNLGSDRFIRQMDDEDTLLPRKLQAALEQALERKNELISQDSDSDSDDECNTLNGLVSEVFIRFFVETVGHYSLFLTQSEKGERAFQREAFRKSVASKSIRRFLEVFMESQMFAGFIQDRELRKCRAKGLFEQRVEQYLEELPDTEQSGMNKFLRGLGNKMKFLHKKN

SEQ ID NO: 801669 - protein, 443 aa, Homo sapiens
YTTLYHPDTTNIYLLSTYCVPGAGGVVEEALDRPTKQMREAEERLKAIPQFCFPDAKDWLPVSEYSSETFSFMLTGEDGSRRFGYCRRLLPSGKGPRLPEVYCVISRLGCFGLFSKVLDEVERRRGISAALVYPFMRSLMESPFPAPGKTIKVKTFLPGAGNEVLELRRPMDSRLEHVDFECLFTCLSVRQLIRIFASLLLERRVIFVADKLSTLSSCSHAVVALLYPFSWQHTFIPVLPASMIDIVCCPTPFLVGLLSSSLPKLKELPVEEALMVNLGSDRFIRQMDDEDTLLPRKLQAALEQALERKNELISQDSDSDSDDECNTLNGLVSEVFIRFFVETVGHYSLFLTQSEKGERAFQREAFRKSVASKSIRRFLEVFMESQMFAGFIQDRELRKCRAKGLFEQRVEQYLEELPDTEQSGMNKFLRGLGNKMKFLHKKN

SEQ ID NO: 801670 - protein, 201 aa, Homo sapiens
MIDIVCCPTPFLVGLLSSSLPKLKELPVEEALMVNLGSDRFIRQMDDEDTLLPRKLQAALEQALERKNELISQDSDSDSDDECNTLNGLVSEVFIRFFVETVGHYSLFLTQSEKGERAFQREAFRKSVASKSIRRFLEVFMESQMFAGFIQDRELRKCRAKGLFEQRVEQYLEELPDTEQSGMNKFLRGLGNKMKFLHKKN

SEQ ID NO: 801671 - protein, 342 aa, Homo sapiens
MEARRTGIKVCSPGAGVEQGHRRRGISAALVYPFMRSLMESPFPAPGKTIKVKTFLPGAGNEVLELRRPMDSRLEHVDFECLFTCLSVRQLIRIFASLLLERRVIFVADKLSTLSSCSHAVVALLYPFSWQHTFIPVLPASMIDIVCCPTPFLVGLLSSSLPKLKELPVEEALMVNLGSDRFIRQMDDEDTLLPRKLQAALEQALERKNELISQDSDSDSDDECNTLNGLVSEVFIRFFVETVGHYSLFLTQSEKGERAFQREAFRKSVASKSIRRFLEVFMESQMFAGFIQDRELRKCRAKGLFEQRVEQYLEELPDTEQSGMNKFLRGLGNKMKFLHKKN

SEQ ID NO: 801672 - protein, 232 aa, Homo sapiens
MSTLSSCSHAVVALLYPFSWQHTFIPVLPASMIDIVCCPTPFLVGLLSSSLPKLKELPVEEALMVNLGSDRFIRQMDDEDTLLPRKLQAALEQALERKNELISQDSDSDSDDECNTLNGLVSEVFIRFFVETVGHYSLFLTQSEKGERAFQREAFRKSVASKSIRRFLEVFMESQMFAGFIQDRELRKCRAKGLFEQRVEQYLEELPDTEQSGMNKFLRGLGNKMKFLHKKN

SEQ ID NO: 801673 - protein, 886 aa, Homo sapiens
MTANKNSSITHGAGGTKAPRGTLSRSQSVSPPPVLSPPRSPIYPLSDSETSACRYPSHSSSRVLLKDRHPPAPSPQNPQDPSPDTSPPTCPFKTASFGYLDRSPSACKRDTQKESVQGAAQDVAGVAACLPLAQSTPFPGPAAGPRGVLLTRTGTRSPQPGHPGEDIAWEGRREASPRMSMCGEKREGSGSEWAASEGCPSLGCPSVVPSPCSSEKTFDFKGLRRMSRTFSECSYPETEEEGEALPVRDSFYRLEKRLGRSEPSAFLRGHGSRKESSAVLSRIQKIEQVLKEQPGRGLPQLPSSCYSVDRGKRKTGTLGSLEEPAGGASVSAGSRAVGVAGVAGEAGPPPEREGSGSTKPGTPGNSPSSQRLPSKSSLDPAVNPVPKPKRTFEYEAEKNPKSKPSNGLPPSPTPAAPPPLPSTPAPPVTRRPKKDMRGHRKSQSRKSFEFEDASSLQSLYPSSPTENGTENQPKFGSKSTLEENAYEDIVGDLPKENPYEDVDLKSRRAGRKSQQLSENSLDSLHRMWSPQDRKYNSPPTQLSLKPNSQSLRSGNWSERKSHRLPRLPKRHSHDDMLLLAQLSLPSSPSSLNEDSLSTTSELLSSRRARRIPKLVQRINSIYNAKRGKKRLKKLSMSSIETASLRDENSESESDSDDRFKAHTQRLVHIQSMLKRAPSYRTLELELLEWQERELFEYFVVVSLKKKPSRNTYLPEVSYQFPKLDRPTKQMREAEERLKAIPQFCFPDAKDWLPVSEYSSETFSFMLTGEDGSRRFGYCRRLLPSGKGPRLPEVYCVISRLGCFGLFSKVLDEVERRRGISAALVYPFMRSLMESPFPAPGKTIKVKTFLPGAGNEYPLQLLPRGGGLALPLLLAAHLHSCPPGLHD

SEQ ID NO: 801674 - protein, 1135 aa, Homo sapiens; identical to SEQ ID NO: 801667

SEQ ID NO: 801675 - protein, 672 aa, Homo sapiens
MTANKNSSITHGAGGTKAPRGTLSRSQSVSPPPVLSPPRSPIYPLSDSETSACRYPSHSSSRVLLKDRHPPAPSPQNPQDPSPDTSPPTCPFKTASFGYLDRSPSACKRDTQKESVQGAAQDVAGVAACLPLAQSTPFPGPAAGPRGVLLTRTGTRSPQPGHPGEDIAWEGRREASPRMSMCGEKREGSGSEWAASEGCPSLGCPSVVPSPCSSEKTFDFKGLRRMSRTFSECSYPETEEEGEALPVRDSFYRLEKRLGRSEPSAFLRGHGSRKESSAVLSRIQKIEQVLKEQPGRGLPQLPSSCYSVDRGKRKTGTLGSLEEPAGGASVSAGSRAVGVAGVAGEAGPPPEREGSGSTKPGTPGNSPSSQRLPSKSSLDPAVNPVPKPKRTFEYEAEKNPKSKPSNGLPPSPTPAAPPPLPSTPAPPVTRRPKKDMRGHRKSQSRKSFEFEDASSLQSLYPSSPTENGTENQPKFGSKSTLEENAYEDIVGDLPKENPYEDVDLKSRRAGRKSQQLSENSLDSLHRMWSPQDRKYNSPPTQLSLKPNSQSLRSGNWSERKSHRLPRLPKRHSHDDMLLLAQLSLPSSPSSLNEDSLSTTSELLSSRRARRIPKLVQRINSIYNAKRGKKRLKKLSCYVQEDLLKKSSFYFLLVVRIPIPSVFERQRPISPHL

SEQ ID NO: 801676 - protein, 54 aa, Homo sapiens
SRVDERPGKEQVGRGKQLQLLRGGPEGSTHLAGPGPLSHRSPAGVRAAAAHGLK

SEQ ID NO: 801677 - protein, 171 aa, Homo sapiens; identical to SEQ ID NO: 801666

SEQ ID NO: 801678 - protein, 171 aa, Homo sapiens; identical to SEQ ID NO: 801666

SEQ ID NO: 801679 - protein, 156 aa, Homo sapiens
DPDNSWSDGEEVRAVQFGGQLLLPAAPGPRLPHPCPPPSLAHSRRGFLAASGASERSPPPGSSSPPSLSWVEAHILHAPSTQICAPSPLSPCSPAAARGADACPPPALSAGAAPPPGRAAPGETPSRRRARPGWGTQRKMRDCLGATTSTMSPCTG

SEQ ID NO: 801680 - protein, 715 aa, Homo sapiens
MTANKNSSITHGAGGTKAPRGTLSRKSFEFEDASSLQSLYPSSPTENGTENQPKFGSKSTLEENAYEDIVGDLPKENPYEDVDLKSRRAGRKSQQLSENSLDSLHRMWSPQDRKYNSPPTQLSLKPNSQSLRSGNWSERKSHRLPRLPKRHSHDDMLLLAQLSLPSSPSSLNEDSLSTTSELLSSRRARRIPKLVQRINSIYNAKRGKKRLKKLSMSSIETASLRDENSESESDSDDRFKAHTQRLVHIQSMLKRAPSYRTLELELLEWQERELFEYFVVVSLKKKPSRNTYLPEVSYQFPKLDRPTKQMREAEERLKAIPQFCFPDAKDWLPVSEYSSETFSFMLTGEDGSRRFGYCRRLLPSGKGPRLPEVYCVISRLGCFGLFSKVLDEVERRRGISAALVYPFMRSLMESPFPAPGKTIKVKTFLPGAGNEVLELRRPMDSRLEHVDFECLFTCLSVRQLIRIFASLLLERRVIFVADKLSTLSSCSHAVVALLYPFSWQHTFIPVLPASMIDIVCCPTPFLVGLLSSSLPKLKELPVEEALMVNLGSDRFIRQMDDEDTLLPRKLQAALEQALERKNELISQDSDSDSDDECNTLNGLVSEVFIRFFVETVGHYSLFLTQSEKGERAFQREAFRKSVASKSIRRFLEVFMESQMFAGFIQDRELRKCRAKGLFEQRVEQYLEELPDTEQSGMNKFLRGLGNKMKFLHKKN

SEQ ID NO: 801681 - protein, 1120 aa, Homo sapiens
MTANKNSSITHGAGGTKAPRGTLSRSQSVSPPPVLSPPRSPIYPLSDSETSACRYPSHSSSRVLLKDRHPPAPSPQNPQDPSPDTSPPTCPFKTASFGYLDRSPSACKRDTQKESVQGAAQDVAGVAACLPLAQSTPFPGPAAGPRGVLLTRTGTRSPQPGHPGEDIAWEGRREASPRMSMCGEKREGSGSEWAASEGCPSLGCPSVVPSPCSSEKTFDFKGLRRMSRTFSECSYPETEEEGEALPVRDSFYRLEKRLGRSEPSAFLRGHGSRKESSAVLSRIQKIEQVLKEQPGRGLPQLPSSCYSVDRGKRKTGTLGSLEEPAGGASVSAGSRAVGVAGVAGEAGPPPEREGSGSTKPGTPGNSPSSQRLPSKSSLDPAVNPVPKPKRTFEYEAEKNPKSKPSNGLPPSPTPAAPPPLPSTPAPPVTRRPKKDMRGHRKSQSRKSFEFEDASSLQSLYPSSPTENGTENQPKFGSKSTLEENAYEDIVGDLPKENPYEDVDLKSRRAGRKSQQLSENSLDSLHRMWSPQDRKYNSPPTQLSLKPNSQSLRSGNWSERKSHRLPRLPKRHSHDDMLLLAQLSLPSSPSSLNEDSLSTTSELLSSRRARRIPKLVQRINSIYNAKRGKKRLKKLSMSSIETASLRAHTQRLVHIQSMLKRAPSYRTLELELLEWQERELFEYFVVVSLKKKPSRNTYLPEVSYQFPKLDRPTKQMREAEERLKAIPQFCFPDAKDWLPVSEYSSETFSFMLTGEDGSRRFGYCRRLLPSGKGPRLPEVYCVISRLGCFGLFSKVLDEVERRRGISAALVYPFMRSLMESPFPAPGKTIKVKTFLPGAGNEVLELRRPMDSRLEHVDFECLFTCLSVRQLIRIFASLLLERRVIFVADKLSTLSSCSHAVVALLYPFSWQHTFIPVLPASMIDIVCCPTPFLVGLLSSSLPKLKELPVEEALMVNLGSDRFIRQMDDEDTLLPRKLQAALEQALERKNELISQDSDSDSDDECNTLNGLVSEVFIRFFVETVGHYSLFLTQSEKGERAFQREAFRKSVASKSIRRFLEVFMESQMFAGFIQDRELRKCRAKGLFEQRVEQYLEELPDTEQSGMNKFLRGLGNKMKFLHKKN

SEQ ID NO: 801682 - protein, 368 aa, Homo sapiens
MKTVRARATLMTGSKPSGKGPRLPEVYCVISRLGCFGLFSKVLDEVERRRGISAALVYPFMRSLMESPFPAPGKTIKVKTFLPGAGNEVLELRRPMDSRLEHVDFECLFTCLSVRQLIRIFASLLLERRVIFVADKLSTLSSCSHAVVALLYPFSWQHTFIPVLPASMIDIVCCPTPFLVGLLSSSLPKLKELPVEEALMVNLGSDRFIRQMDDEDTLLPRKLQAALEQALERKNELISQDSDSDSDDECNTLNGLVSEVFIRFFVETVGHYSLFLTQSEKGERAFQREAFRKSVASKSIRRFLEVFMESQMFAGFIQDRELRKCRAKGLFEQRVEQYLEELPDTEQSGMNKFLRGLGNKMKFLHKKN

SEQ ID NO: 801683 - protein, 293 aa, Homo sapiens
LHSRVDERPGKEQVLELRRPMDSRLEHVDFECLFTCLSVRQLIRIFASLLLERRVIFVADKLSTLSSCSHAVVALLYPFSWQHTFIPVLPASMIDIVCCPTPFLVGLLSSSLPKLKELPVEEALMVNLGSDRFIRQMDDEDTLLPRKLQAALEQALERKNELISQDSDSDSDDECNTLNGLVSEVFIRFFVETVGHYSLFLTQSEKGERAFQREAFRKSVASKSIRRFLEVFMESQMFAGFIQDRELRKCRAKGLFEQRVEQYLEELPDTEQSGMNKFLRGLGNKMKFLHKKN

SEQ ID NO: 801684 - protein, 75 aa, Homo sapiens
GCLEDPFGSCSDVFMESQMFAGFIQDRELRKCRAKGLFEQRVEQYLEELPDTEQSGMNKFLRGLGNKMKFLHKKN

SEQ ID NO: 801685 - protein, 111 aa, Homo sapiens
KIVGSLIVIRRERAGDWSGYDTWMKFRWVLVTGQFCAADCLSQTTDLPWRPSACLPACLRSPLPVPGPGEQMLSCYVQEDLLKKSSFYFLLVVRIPIPSVFERQRPISPHL

SEQ ID NO: 801686 - protein, 654 aa, Homo sapiens
MTANKNSSITHGAGGTKAPRGTLSRSQSVSPPPVLSPPRSPIYPLSDSETSACRYPSHSSSRVLLKDRHPPAPSPQNPQDPSPDTSPPTCPFKTASFGYLDRSPSACKRDTQKESVQGAAQDVAGVAACLPLAQSTPFPGPAAGPRGVLLTRTGTRSPQPGHPGEDIAWEGRREASPRMSMCGEKREGSGSEWAASEGCPSLGCPSVVPSPCSSEKTFDFKGLRRMSRTFSECSYPETEEEGEALPVRDSFYRLEKRLGRSEPSAFLRGHGSRKESSAVLSRIQKIEQVLKEQPGRGLPQLPSSCYSVDRGKRKTGTLGSLEEPAGGASVSAGSRAVGVAGVAGEAGPPPEREGSGSTKPGTPGNSPSSQRLPSKSSLDPAVNPVPKPKRTFEYEAEKNPKSKPSNGLPPSPTPAAPPPLPSTPAPPVTRRPKKDMRGHRKSQSRKSFEFEDASSLQSLYPSSPTENGTENQPKFGSKSTLEENAYEDIVGDLPKENPYEDVDLKSRRAGRKSQQLSENSLDSLHRMWSPQDRKYNSPPTQLSLKPNSQSLRSGNWSERKSHRLPRLPKRHSHDDMLLLAQLSLPSSPSSLNEDSLSTTSELLSSRRARRIPKVPSPEAAHWSRAGGRAGSQPFSLFPGFLPSLIWTASSIPFE

SEQ ID NO: 801687 - protein, 97 aa, Homo sapiens
LGVLWAHQALVKKSSPTAGMSWVQQFQEAPPVYQPWSLSANKAPDCPALVPWPGLTLVAPKRAWTMRFLFLKVLPSNSGLSFLFATLPPPRPAPVGL

SEQ ID NO: 801688 - protein, 165 aa, Homo sapiens
MAPEENSGSELLLQSFKRRFLAARALRSFPWQSLEAKLRDSSDSELLRDILQKHEAVHTEPLDELYEVLAETLMAKESTQGHRSYLLTCCIAQKPSCRWSGSCGGWLPAGSTSGLLNSTWPLPSATQRCASCSPPSYAGLGSDGKRKLIMTRNCFPTESTWRWQS

SEQ ID NO: 801689 - protein, 125 aa, Homo sapiens
MAPEENSGSELLLQSFKRRFLAARALRSFPWQSLEAKLRDSSDSELLRDILQKTCCIAQKPSCRWSGSCGGWLPAGSTSGLLNSTWPLPSATQRCASCSPPSYVSPHAHPGLHGPQAVPTGLQWK

SEQ ID NO: 801690 - protein, 160 aa, Homo sapiens
MAPEENSGSELLLQSFKRRFLAARALRSFPWQSLEAKLRDSSDSELLRDILQKTVKHPVCVKHPPSVKYARCFLSELIKKPSGGSVTLSKSTAIISHGITVLVTWDAALYLAEWAIENPAAFTDRTVLELGSGAGLTGLAICKMCHPRAYIFRDCHSWVL

SEQ ID NO: 801691 - protein, 131 aa, Homo sapiens
MAPEENSGSELLLQSFKRRFLAARALRSFPWQSLEAKLRDSSDSELLRDILQKTCCIAQKPSCRWSGSCGGWLPAGSTSGLLNSTWPLPSATQRCASCSPPSYAGLGSDGKRKLIMTRNCFPTESTWRWQS

SEQ ID NO: 801692 - protein, 72 aa, Homo sapiens
MPRLPTDLDVEGPWFRHYDFRQSCWVRAISQEDQLAPCWQAEHPAERVRSAFAAPSTDSDQGTPFRARDEQQ

SEQ ID NO: 801693 - protein, 273 aa, Homo sapiens
QDKKDLCGQCSPLGCLIRILIDGISLGLTLRLWDVYLVEGEQALMPITRIAFKVQQKRLTKTSRCGPWARFCNRFVDTWARDEDTVLKHLRASMKKLTRKQGDLQPPAKPEQGSSASRPVPASRGGKTLCKGDRQAPPGPPARFPRPIWSASPPRAPRSSTPCPGGAVREDTYPVGTQGVPSPALAQGGPQGSWRFLQWNSMPRLPTDLDVEGPWFRHYDFRQSCWVRAISQEDQLAPCWQAEHPAERVRSAFAAPSTDSDQGTPFRARDEQQ

SEQ ID NO: 801694 - protein, 168 aa, Homo sapiens
LGAVSQAQQPWDEGVWQEAPSQSEPWGQSQEPPAMPRQLPHARQHAPLPLGSADYRRVLGVRPRGPHRDPEDSEMQAGGAQPGKACVGSLEMLTASVFLSAKPEQGSSASRPVPASRGGKTLCKGDRQAPPGPPARFPRPIWSASPPRAPRSSTPCPGGAVREDTYPV

SEQ ID NO: 801695 - protein, 556 aa, Homo sapiens
MAREKEMQEFTRSFFRGRPDLSTLTHSIVRRRYLAHSGRSHLEPEEKQALKRLVEEELLKMQVDEAASREDKLDLTKKGKRPPTPCSDPERKRFRFNSESESGSEASSPDYFGPPAKNGVAAEVSPAKEENPRRASKAVEESSDEERQRDLPAQRGEESSEEEEKGYKGKTRKKPVVKKQAPGKASVSRKQAREESEESEAEPVQRTAKKVEGNKGTKSLKESEQESEEEILAQKKEQREEEVEEEEKEEDEEKGDWKPRTRSNGRRKSAREERSCKQKSQAKRLLGDSDSEEEQKEAASSGDDSGRDREPPVQRKSEDRTQLKGGKRLSGSSEDEEDSGKGEPTAKGSRKMARLGSTSGEESDLEREVSDSEAGGGPQGERKNRSSKKSSRKGRTRSSSSSSDGSPEAKGGKAGSGRRGEDHPAVMRLKRYIRACGAHRNYKKLLGSCCSHKERLSILRAELEALGMKGTPSLGKCRALKEQREEAAEVASLDVANIISGSGRPRRRTAWNPLGEAAPPGELYRRTLDSDEERPRPAPPDWSHMRGIISSDGESN

SEQ ID NO: 801696 - protein, 556 aa, Homo sapiens; identical to SEQ ID NO: 801695

SEQ ID NO: 801697 - protein, 252 aa, Homo sapiens
MQEFTRSFFRGRPDLSTLTHSIVRRRYLAHSGRSHLEPEEKQALKRLVEEELLKMQVDEAASREDKLDLTKKGKRPPTPCSDPERKRFRFNSESESGSEASSPDYFGPPAKNGVAAEVSPAKEENPRRASKAVEESSDEERQRDLPAQRGEESSEEEEKGYKGKTRKKPVVKKQAPGKASVSRKQAREESEESEAEPVQRTAKKVEGNKGTKSLKESEQESEEEILAQKKEQREEEVEEEEKEALRMKGTLP

SEQ ID NO: 801698 - protein, 544 aa, Homo sapiens
MAREKEMQEFTRSFFRGRPDLSTLTHSIVRRRYLAHSGRSHLEPEEKQALKRLVEEELLKMQVDEAASREDKLDLTKKGKRPPTPCSDPERKRFRFNSESESGSEASSPDYFGPPAKNGVAAEVSPAKEENPRRASKAVEESSDEERQRDLPAQRGEESSEEEEKGYKGKTRKKPVVKKQAPGKASVSRKQAREESEESEAEPVQRTAKKVEGNKGTKSLKESEQESEEEILAQKKEQREEEVEEEEKEEDEEKGDWKPRTRSNGRRKSAREERSCKQKSQAKRLLGDSDSEEEQKEAASSGDDSGRDREPPVQRKSEDRTQLKGGKRLSGSSEDEEDSGKGEPTAKGSRKMARLGSTSGEESDLEREVSDSEAGGGPQGERKNRSSKNSSDGSPEAKGGKAGSGRRGEDHPAVMRLKRYIRACGAHRNYKKLLGSCCSHKERLSILRAELEALGMKGTPSLGKCRALKEQREEAAEVASLDVANIISGSGRPRRRTAWNPLGEAAPPGELYRRTLDSDEERPRPAPPDWSHMRGIISSDGESN

SEQ ID NO: 801699 - protein, 380 aa, Homo sapiens
MAREKEMQEFTRSFFRGRPDLSTLTHSIVRRRYLAHSGRSHLEPEEKQALKRLVEEELLKMQVDEAASREDKLDLTKKGKRPPTPCSDPERKRFRFNSESESGSEASSPDYFGPPAKNGVAAEVSPAKEENPRRASKAVEESSDEERQRDLPAQRGEESSEEEEKGYKGKTRKKPVVKKQAPGKASVSRKQAREESEESEAEPVQRTAKKVEGNKGTKSLKESEQESEEEILAQKKEQREEEVEEEEKEEDEEKGDWKPRTRSNGRRKSAREERSCKQKSQELQERQDTKLLFLLRWKSRGQRREGWLRSPWRGPPGCDEAEALHSGLWCPSKLQEAVGLLLLTQGAPEYPPGRTGSARHEGYPFPREVSGPEGAEGGGS

SEQ ID NO: 801700 - protein, 556 aa, Homo sapiens; identical to SEQ ID NO: 801695

SEQ ID NO: 801701 - protein, 551 aa, Homo sapiens
VHARETIIPEELTETSDTLTHSIVRRRYLAHSGRSHLEPEEKQALKRLVEEELLKMQVDEAASREDKLDLTKKGKRPPTPCSDPERKRFRFNSESESGSEASSPDYFGPPAKNGVAAEVSPAKEENPRRASKAVEESSDEERQRDLPAQRGEESSEEEEKGYKGKTRKKPVVKKQAPGKASVSRKQAREESEESEAEPVQRTAKKVEGNKGTKSLKESEQESEEEILAQKKEQREEEVEEEEKEEDEEKGDWKPRTRSNGRRKSAREERSCKQKSQAKRLLGDSDSEEEQKEAASSGDDSGRDREPPVQRKSEDRTQLKGGKRLSGSSEDEEDSGKGEPTAKGSRKMARLGSTSGEESDLEREVSDSEAGGGPQGERKNRSSKKSSRKGRTRSSSSSSDGSPEAKGGKAGSGRRGEDHPAVMRLKRYIRACGAHRNYKKLLGSCCSHKERLSILRAELEALGMKGTPSLGKCRALKEQREEAAEVASLDVANIISGSGRPRRRTAWNPLGEAAPPGELYRRTLDSDEERPRPAPPDWSHMRGIISSDGESN

SEQ ID NO: 801702 - protein, 456 aa, Homo sapiens
MAREKEMQEFTRSFFRGRPDLSTLTHSIVRRRYLAHSGRSHLEPEEKQALKRLVEEELLKMQEEKGYKGKTRKKPVVKKQAPGKASVSRKQAREESEESEAEPVQRTAKKVEGNKGTKSLKESEQESEEEILAQKKEQREEEVEEEEKEEDEEKGDWKPRTRSNGRRKSAREERSCKQKSQAKRLLGDSDSEEEQKEAASSGDDSGRDREPPVQRKSEDRTQLKGGKRLSGSSEDEEDSGKGEPTAKGSRKMARLGSTSGEESDLEREVSDSEAGGGPQGERKNRSSKKSSRKGRTRSSSSSSDGSPEAKGGKAGSGRRGEDHPAVMRLKRYIRACGAHRNYKKLLGSCCSHKERLSILRAELEALGMKGTPSLGKCRALKEQREEAAEVASLDVANIISGSGRPRRRTAWNPLGEAAPPGELYRRTLDSDEERPRPAPPDWSHMRGIISSDGESN

SEQ ID NO: 801703 - protein, 202 aa, Homo sapiens
AGWGAVSAALVHSLPSWRTHRWMKPLPGKTNWTLPRRARGLPPLVATRREKGSASIQSRAGSGRRGEDHPAVMRLKRYIRACGAHRNYKKLLGSCCSHKERLSILRAELEALGMKGTPSLGKCRALKEQREEAAEVASLDVANIISGSGRPRRRTAWNPLGEAAPPGELYRRTLDSDEERPRPAPPDWSHMRGIISSDGESN

SEQ ID NO: 801704 - protein, 69 aa, Homo sapiens
LQQNKRPGDNIISGSGRPRRRTAWNPLGEAAPPGELYRRTLDSDEERPRPAPPDWSHMRGIISSDGESN

SEQ ID NO: 801705 - protein, 556 aa, Homo sapiens; identical to SEQ ID NO: 801695

SEQ ID NO: 801706 - protein, 550 aa, Homo sapiens [sequence omitted]

SEQ ID NO: 801707 - protein, 180 aa, Homo sapiens [sequence omitted]

SEQ ID NO: 801708 - protein, 111 aa, Homo sapiens
GRGGPRWQKLQERLLAYSGAPPLRGGASSTFLFLEPGLLRALRGEDASRGGLGPTPPRKGGSFTSDPLATPGPVWESSPAALLGNAEAACRFLSQFCGPRLGRISSHQHPY

SEQ ID NO: 801709 - protein, 127 aa, Homo sapiens
MRRERDLGRTGEKHNRERRRRLSLTGCVRSRRERVAPEAEGPRELQPGSGFVSGARRLAVFSQVKLILKPFLGVLKTSNKSFCRAKTLFTFPYHILEVANLVTTHQEGDHLQARNRALTVELNWLLP

SEQ ID NO: 801710 - protein, 629 aa, Homo sapiens
MAISPRSDATFSSQKSTPSESPRTKKFPLTEEEIFYMNCRAAYLTVFKSSLENIISKDQLYLALQHAGRNPSQKTINKYWTPQTAKLNFDDFCIILRKEKPTSKAELLKSFKQLDVNDDGCILHTDLYKFLTKRGEKMTREEVNAIINLADVNADGKFDYIKFCKLYMTTNEQCLKTTLEKLEVDSKLMRHQFGNHIEGSPERDPSPVPKPSPKITRKTDPETFLNKGDTRSSLLSATRKFKTSVSFTVTMGANGNRNSKLMEPNLIKDWQHMQSKGCFFLEEDGEIISHQYRMQIAQRSMVYLTIKPLNLSQVEGKPSPWLSVDTALYILKENESQANLQLVCFTELRNREVFGWTGELGPGIYWLIPSTTGCRLRKKIKPVTDEAQLVYRDETGELFLTKEFKSTLSDIFEVIDLDGNGLLSLEEYNFFELRTSGEKCDEDAWAVCRENFDTKRNELTRQGFMDLNLMEANDREGDPCDLWVTLHSMGYNKALELTEACPFVIDIYAEKCKPKIKAVHMEACSGQLEKAICKSVLSNGDAKVMDGYENIIVHTYSCDTWITSVIENKSDEKVIIHISNELSKNCINNRGLNIFAVEVGPKSTMVCQHVMPLNERQEWIYYCIYSLIS

SEQ ID NO: 801711 - protein, 288 aa, Homo sapiens
MIVLFHCFEKKVFGWTGELGPGIYWLIPSTTGCRLRKKIKPVTDEAQLVYRDETGELFLTKEFKSTLSDIFEVIDLDGNGLLSLEEYNFFELRTSGEKCDEDAWAVCRENFDTKRNELTRQGFMDLNLMEANDREGDPCDLWVTLHSMGYNKALELTEACPFVIDIYAEKCKPKIKAVHMEACSGQLEKAICKSVLSNGDAKVMDGYENIIVHTYSCDTWITSVIENKSDEKVIIHISNELSKNCINNRGLNIFAVEVGPKSTMVCQHVMPLNERQEWIYYCIYSLIS

SEQ ID NO: 801712 - protein, 358 aa, Homo sapiens
MAISPRSDATFSSQKSTPSESPRTKKFPLTEEEIFYMNCRAAYLTVFKSSLENIISKDQLYLALQHAGRNPSQKTINKYWTPQTAKLNFDDFCIILRKEKPTSKAELLKSFKQLDVNDDGCILHTDLYKFLTKRGEKMTREEVNAIINLADVNADGKFDYIKFCKLYMTTNEQCLKTTLEKLEVDSKLMRHQFGNHIEGSPERDPSPVPKPSPKITRKTDPETFLNKGDTRSSLLSATRKFKTSVSFTVTMGANGNRNSKLMEPNLIKDWQHMQSKGCFFLEEDGEIISHQYRMQIAQRSMVYLTIKPLNLSQVEGKPSPWLSVDTALYILKENESQANLQLVCFTELRNREVYIFIF

SEQ ID NO: 801713 - protein, 606 aa, Homo sapiens
MAISPRSDATFSSQKSTPSESPRTKKFPLTEEEIFYMNCRAAYLTVFKSSLENIISKDQLYLALQHAGRNPSQKTINKYWTPQTAKLNFDDFCIILRKEKPTSKAELLKSFKQLDVNDDGCILHTDLYKFLTKRGEKMTREEVNAIINLADVNADGKFDYIKFCKLYMTTNEQCLKTTLEKLEVDSKLMRHQFGNHIEGSPERDPSPVPKPSPKITRKTDPETFLNKGDTRSSLLSATRKFKTSVSFTVTMGANGNRNSKLMEPNLIKDWQHMQSKGCFFLEEDGEIISHQYRMQIAQRSMVYLTIKPLNLSQVEGKPSPWLSVDTALYILKENESQANLQLVCFTELRNREVFGWTGELGPGIYWLIPSTTGCRLRKKIKPVTDEAQLVYRDETGELFLTKEFKSTLSDIFEVIDLDGNGLLSLEEYNFFELRTSGEKCDEDAWAVCRENFDTKRNELTRQGFMDLNLMEANDREGDPCDLWVTLHSMGYNKALELTEACPFVIDIYAEKCKPKIKAVHMEACSGQLEKAICKSVLSNGDAKVMDGYENIIVHTYSCDTWITSVIENKSDEKVIIHISNELSKNCINNRGLNIFAVEVGPKSTMP

SEQ ID NO: 801714 - protein, 269 aa, Homo sapiens [sequence omitted]

SEQ ID NO: 801715 - protein, 71 aa, Homo sapiens
GADLKIEYRLPSYYACAEVTVHLEFLDSSGCRPSVGDHISHKASGARFRKTSDAASSWGVVRRFPGWYLYC

SEQ ID NO: 801716 - protein, 371 aa, Homo sapiens
GPRASDRVPGHTGGGCGRRAEMQRLGATLLCLLLAAAVPTAPAPAPTATSAPVKPGPALSYPQEEATLNEMFREVEELMEDTQHKLRSAVEEMEAEEAAAKASSEVNLANLPPSYHNETNTDTKVGNNTIHVHREIHKITNNQTGQMVFSETVITSVGDEEGRRSHECIIDEDCGPSMYCQFASFQYTCQPCRGQRMLCTRDSECCGDQLCVWGHCTKMATRGSNGTICDNQRDCQPGLCCAFQRGLLFPVCTPLPVEGELCHDPASRLLDLITWELEPDGALDRCPCASGLLCQPHSHSLVYVCKPTFVGSRDQDGEILLPREVPDEYEVGSFMEEVRQELEDLERSLTEEMALGEPAAAAAALLGGEEI

SEQ ID NO: 801717 - protein, 276 aa, Homo sapiens
MCPEILGMLCLCSRWFRKFYHNETNTDTKVGNNTIHVHREIHKITNNQTGQMVFSETVITSVGDEEGRRSHECIIDEDCGPSMYCQFASFQYTCQPCRGQRMLCTRDSECCGDQLCVWGHCTKMATRGSNGTICDNQRDCQPGLCCAFQRGLLFPVCTPLPVEGELCHDPASRLLDLITWELEPDGALDRCPCASGLLCQPHSHSLVYVCKPTFVGSRDQDGEILLPREVPDEYEVGSFMEEVRQELEDLERSLTEEMALGEPAAAAAALLGGEEI

SEQ ID NO: 801718 - protein, 210 aa, Homo sapiens
ARLAGSLGYRRCRTPPRSRTRGPPTAPLPHLHPQPGGLPAGASRSSPARSATRSSRGGGCGRRAEMQRLGATLLCLLLAAAVPTAPAPAPTATSAPVKPGPALSYPQEEATLNEMFREVEELMEDTQHKLRSAVEEMEAEEAAAKASSEVNLANLPPSYHNETNTDTKVGNNTIHVHREIHKKSWPALPPFYSVQSHQRTKVFLFLFFHM

SEQ ID NO: 801719 - protein, 179 aa, Homo sapiens
RQTKASGDGLNARLGAGIFPEDFTGQRLAWKDQGGGCGRRAEMQRLGATLLCLLLAAAVPTAPAPAPTATSAPVKPGPALSYPQEEATLNEMFREVEELMEDTQHKLRSAVEEMEAEEAAAKASSEVNLANLPPSYHNETNTDTKVGNNTIHVHREIHKEECKYDIPHFQKRNPLLLQN

SEQ ID NO: 801720 - protein, 383 aa, Homo sapiens
WSGSRVIGRADAKGRGLTCAWSTPGGGCGRRAEMQRLGATLLCLLLAAAVPTAPAPAPTATSAPVKPGPALSYPQEEATLNEMFREVEELMEDTQHKLRSAVEEMEAEEAAAKASSEVNLANLPPSYHNETNTDTKVGNNTIHVHREIHKITNNQTGQMVFSETVITSVGDEEGRRSHECIIDEDCGPSMYCQFASFQYTCQPCRGQRMLCTRDSECCGDQLCVWGHCTKMATRGSNGTICDNQRDCQPGLCCAFQRGLLFPVCTPLPVEGELCHDPASRLLDLITWELEPDGALDRCPCASGLLCQPHSHSLVYVCKPTFVGSRDQDGEILLPREVPDEYEVGSFMEEVRQELEDLERSLTEEMALGEPAAAAAALLGGEEI

SEQ ID NO: 801721 - protein, 371 aa, Homo sapiens; identical to SEQ ID NO: 801716

SEQ ID NO: 801722 - protein, 124 aa, Homo sapiens
SFQRQLSHLWETKKAEGATSASSTATSAPVKPGPALSYPQEEATLNEMFREVEELMEDTQHKLRSAVEEMEAEEAAAKASSEVNLANLPPSYHNETNTDTKVGNNTIHVHREIHKAALLGGEEI

SEQ ID NO: 801723 - protein, 371 aa, Homo sapiens; identical to SEQ ID NO: 801716

SEQ ID NO: 801724 - protein, 371 aa, Homo sapiens; identical to SEQ ID NO: 801716

SEQ ID NO: 801725 - protein, 371 aa, Homo sapiens; identical to SEQ ID NO: 801716

SEQ ID NO: 801726 - protein, 350 aa, Homo sapiens
MQRLGATLLCLLLAAAVPTAPAPAPTATSAPVKPGPALSYPQEEATLNEMFREVEELMEDTQHKLRSAVEEMEAEEAAAKASSEVNLANLPPSYHNETNTDTKVGNNTIHVHREIHKITNNQTGQMVFSETVITSVGDEEGRRSHECIIDEDCGPSMYCQFASFQYTCQPCRGQRMLCTRDSECCGDQLCVWGHCTKMATRGSNGTICDNQRDCQPGLCCAFQRGLLFPVCTPLPVEGELCHDPASRLLDLITWELEPDGALDRCPCASGLLCQPHSHSLVYVCKPTFVGSRDQDGEILLPREVPDEYEVGSFMEEVRQELEDLERSLTEEMALGEPAAAAAALLGGEEI

SEQ ID NO: 801727 - protein, 298 aa, Homo sapiens
ARLAGSLGYRRCRTPPRSRTRGPPTAPLPHLHPQPGGLPAGASRSSPARSATRSSRGGGCGRRAEMQRLGATLLCLLLAAAVPTAPAPAPTATSAPVKPGPALSYPQEEATLNEMFREVEELMEDTQHKLRSAVEEMEAEEAAAKASSEVNLANLPPSYHNETNTDTKVGNNTIHVHREIHKITNNQTGQMVFSETVITSVGDEEGRRSHECIIDEDCGPSMYCQFASFQYTCQPCRGQRMLCTRDSECCGDQLCVWGHCTKMATRGSNGTICDNQRDCQPGLCCAFQRGEWPPLRCR

SEQ ID NO: 801728 - protein, 415 aa, Homo sapiens
ARLAGSLGYRRCRTPPRSRTRGPPTAPLPHLHPQPGGLPAGASRSSPARSATRSSRGGGCGRRAEMQRLGATLLCLLLAAAVPTAPAPAPTATSAPVKPGPALSYPQEEATLNEMFREVEELMEDTQHKLRSAVEEMEAEEAAAKASSEVNLANLPPSYHNETNTDTKVGNNTIHVHREIHKITNNQTGQMVFSETVITSVGDEEGRRSHECIIDEDCGPSMYCQFASFQYTCQPCRGQRMLCTRDSECCGDQLCVWGHCTKMATRGSNGTICDNQRDCQPGLCCAFQRGLLFPVCTPLPVEGELCHDPASRLLDLITWELEPDGALDRCPCASGLLCQPHSHSLVYVCKPTFVGSRDQDGEILLPREVPDEYEVGSFMEEVRQELEDLERSLTEEMALGEPAAAAAALLGGEEI

SEQ ID NO: 801729 - protein, 279 aa, Homo sapiens
MEAEEAAAKASSEVNLANLPPSYHNETNTDTKVGNNTIHVHREIHKITNNQTGQMVFSETVITSVGDEEGRRSHECIIDEDCGPSMYCQFASFQYTCQPCRGQRMLCTRDSECCGDQLCVWGHCTKMATRGSNGTICDNQRDCQPGLCCAFQRGLLFPVCTPLPVEGELCHDPASRLLDLITWELEPDGALDRCPCASGLLCQPHSHSLVYVCKPTFVGSRDQDGEILLPREVPDEYEVGSFMEEVRQELEDLERSLTEEMALGEPAAAAAALLGGEEI

SEQ ID NO: 801730 - protein, 172 aa, Homo sapiens
  misc_feature (167)..(167): Xaa can be any naturally occurring amino acid
MQRLGATLLCLLLAAAVPTAPAPAPTATSAPVKPGPALSYPQEEATLNEMFREVEELMEDTQHKLRSAVEEMEAEEAAAKASSEVNLANLPPSYHNETNTDTKVGNNTIHVHREIHKITNNQTGQMVFSETVITSVGDEEGRRSHSASSTRTVGPALSYPQRRPPSXRCSAS

SEQ ID NO: 801731 - protein, 371 aa, Homo sapiens; identical to SEQ ID NO: 801716

SEQ ID NO: 801732 - protein, 71 aa, Homo sapiens
AIHRHLAIHRHLAIHRRLRDCKLLAQVTQLVKTRAVSSGCDSKLSALSTTPHQPWCHQKCSPKGRRMGFFF

SEQ ID NO: 801733 - protein, 103 aa, Homo sapiens
MAEAITYADLRYPGADDDGEITYENVQVPAVLGVPSSLASSVLGDKAAVKSEQPTASWRAVTSPAVGRILPCRTTCLRYLLLGLLLTCLLLGVTAICLGVRCE

SEQ ID NO: 801734 - protein, 120 aa, Homo sapiens
MAEAITYADLRFVKAPLKKSISSRLGQDPGADDDGEITYENVQVPAVLGVPSSLASSVLGDKAAVKSEQPTASWRAVTSPAVGRILPCECACAGQPRGQVLAPVPAADGAGPRGVQLLPG

SEQ ID NO: 801735 - protein, 119 aa, Homo sapiens
MAEAITYADLRFVKAPLKKSISSRLGQDPGADDDGEITYENVQVPAVLGVPSSLASSVLGDKAAVKSEQPTASWRAVTSPAVGRILPCRTTCLRYLLLGLLLTCLLLGVTAICLGVRCE

SEQ ID NO: 801736 - protein, 307 aa, Homo sapiens
MAEAITYADLRSVKSEQPTASWRAVTSPAVGRILPCRTTCLRYLLLGLLLTCLLLGVTAICLGVRYLQVSQQLQQTNRVLEVTNSSLRQQLRLKITQLGQSAEDLQGSRRELAQSQEALQVEQRAHQAAEGQLQACQADRQKTKETLQSEEQQRRALEQKLSNMENRLKPFFTCGSADTCCPSGWIMHQKSCFYISLTSKNWQESQKQCETLSSKLATFSEIYPQSHSYYFLNSLLPNGGSGNSYWTGLSSNKDWKLTDDTQRTRTYAQSSKCNKVHKTWSWWTLESESCRSSLPYICEMTAFRFPD

SEQ ID NO: 801737 - protein, 359 aa, Homo sapiens
MAEAITYADLRFVKAPLKKSISSRLGQDPGADDDGEITYENVQVPAVLGVPSSLASSVLGDKAAVKSEQPTASWRAVTSPAVGRILPCRTTCLRYLLLGLLLTCLLLGVTAICLGVRYLQVSQQLQQTNRVLEVTNSSLRQQLRLKITQLGQSAEDLQGSRRELAQSQEALQVEQRAHQAAEGQLQACQADRQKTKETLQSEEQQRRALEQKLSNMENRLKPFFTCGSADTCCPSGWIMHQKSCFYISLTSKNWQESQKQCETLSSKLATFSEIYPQSHSYYFLNSLLPNGGSGNSYWTGLSSNKDWKLTDDTQRTRTYAQSSKCNKVHKTWSWWTLESESCRSSLPYICEMTAFRFPD

SEQ ID NO: 801738 - protein, 359 aa, Homo sapiens; identical to SEQ ID NO: 801737

SEQ ID NO: 801739 - protein, 104 aa, Homo sapiens
MAEAITYADLRYPGADDDGEITYENVQVPAVLGVPSSLASSVLGDKAAVKSEQPTASWRAVTSPAVGRILPCECACAGQPRGQVLAPVPAADGAGPRGVQLLPG

SEQ ID NO: 801740 - protein, 343 aa, Homo sapiens
MAEAITYADLRYPGADDDGEITYENVQVPAVLGVPSSLASSVLGDKAAVKSEQPTASWRAVTSPAVGRILPCRTTCLRYLLLGLLLTCLLLGVTAICLGVRYLQVSQQLQQTNRVLEVTNSSLRQQLRLKITQLGQSAEDLQGSRRELAQSQEALQVEQRAHQAAEGQLQACQADRQKTKETLQSEEQQRRALEQKLSNMENRLKPFFTCGSADTCCPSGWIMHQKSCFYISLTSKNWQESQKQCETLSSKLATFSEIYPQSHSYYFLNSLLPNGGSGNSYWTGLSSNKDWKLTDDTQRTRTYAQSSKCNKVHKTWSWWTLESESCRSSLPYICEMTAFRFPD

SEQ ID NO: 801741 - protein, 314 aa, Homo sapiens
EDVMTEESGAELLRHGEHHYADLERQSDSTASESVTSQLSAFRRTTCLRYLLLGLLLTCLLLGVTAICLGVRYLQVSQQLQQTNRVLEVTNSSLRQQLRLKITQLGQSAEDLQGSRRELAQSQEALQVEQRAHQAAEGQLQACQADRQKTKETLQSEEQQRRALEQKLSNMENRLKPFFTCGSADTCCPSGWIMHQKSCFYISLTSKNWQESQKQCETLSSKLATFSEIYPQSHSYYFLNSLLPNGGSGNSYWTGLSSNKDWKLTDDTQRTRTYAQSSKCNKVHKTWSWWTLESESCRSSLPYICEMTAFRFPD

SEQ ID NO: 801742 - protein, 359 aa, Homo sapiens; identical to SEQ ID NO: 801737

SEQ ID NO: 801743 - protein, 190 aa, Homo sapiens [sequence omitted]

SEQ ID NO: 801744 - protein, 495 aa, Homo sapiens
TQQDGKGSAWGPAPLGASRGVGKNEELRLYHHLFNNYDPGSRPVREPEDTVTISLKVTLTNLISLNEKEETLTTSVWIGIDWQDYRLNYSKDDFGGIETLRVPSELVWLPEIVLENNIDGQFGVAYDANVLVYEGGSVTWLPPAIYRSVCAVEVTYFPFDWQNCSLIFRSQTYNAEEVEFTFAVDNDGKTINKIDIDTEAYTENGEWAIDFCPGVIRRHHGGATDGPGETDVIYSLIIRRKPLFYVINIIVPCVLISGLVLLAYFLPAQAGGQKCTVSINVLLAQTVFLFLIAQKIPETSLSVPLLGRFLIFVMVVATLIVMNCVIVLNVSQRTPTTHAMSPRLRHVLLELLPRLLGSPPPPEAPRAASPPRRASSVGLLLRAEELILKKPRSELVFEGQRHRQGTWTAAFCQSLGAAAPEVRCCVDAVNFVAESTRDQEATGEEVSDWVRMGNALDNICFWAALVLFSVGSSLIFLGAYFNRVPDLPYAPCIQP

SEQ ID NO: 801745 - protein, 413 aa, Homo sapiens
MDYRLNYSKDDFGGIETLRVPSELVWLPEIVLENNIDGQFGVAYDANVLVYEGGSVTWLPPAIYRSVCAVEVTYFPFDWQNCSLIFRSQTYNAEEVEFTFAVDNDGKTINKIDIDTEAYTENGEWAIDFCPGVIRRHHGGATDGPGETDVIYSLIIRRKPLFYVINIIVPCVLISGLVLLAYFLPAQAGGQKCTVSINVLLAQTVFLFLIAQKIPETSLSVPLLGRFLIFVMVVATLIVMNCVIVLNVSQRTPTTHAMSPRLRHVLLELLPRLLGSPPPPEAPRAASPPRRASSVGLLLRAEELILKKPRSELVFEGQRHRQGTWTAAFCQSLGAAAPEVRCCVDAVNFVAESTRDQEATGEEVSDWVRMGNALDNICFWAALVLFSVGSSLIFLGAYFNRVPDLPYAPCIQP

SEQ ID NO: 801746 - protein, 117 aa, Homo sapiens
VWLPEIVLENKCEPGQTPGWREAGLGCGLDLVGEGGTLRGCRPVQKARFPRAHSIDGQFGVAYDANVLVYEGGSVTWLPPAIYRSVCAVEVTYFPFDWQNCSLIFRWEELLRGPDDY

SEQ ID NO: 801747 - protein, 424 aa, Homo sapiens
MLARKSIIPEEYVLARIAAENLRKPRIRDRLPKARFIAKSGACNLAHKNIREQGRFLQDIFTTLVDLKWRHTLVIFTMSFLCSWLLFAIMWWLVAFAHGDIYAYMEKSGMEKSGLESTVCVTNVRSFTSAFLFSIEVQVTIGFGGRMMTEECPLAITVLILQNIVGLIINAVMLGCIFMKTAQAHRRAETLIFSRHAVIAVRNGKLCFMFRVGDLRKSMIISASVRIQVVKKTTTPEGEVVPIHQLDIPVDNPIESNNIFLVAPLIICHVIDKRSPLYDISATDLANQDLEVIVILEGVVETTGITTQARTSYIAEEIQWGHRFVSIVTEEEGVYSVDYSKFGNTVKVAAPRCSARELDEKPSILIQTLQKSELSHQNSLRKRNSMRRNNSMRRNNSIRRNNSSLMVPKVQFMTPEGNQNTSES

SEQ ID NO: 801748 - protein, 311 aa, Homo sapiens
MLARKSIIPEEYVLARIAAENLRKPRIRDRLPKARFIAKSGACNLAHKNIREQGRFLQDIFTTLVDLKWRHTLVIFTMSFLCSWLLFAIMWWLVAFAHGDIYAYMEKSGMEKSGLESTVCVTNVRSFTSAFLFSIEVQVTIGFGGRMMTEECPLAITVLILQNIVGLIINAVMLGCIFMKTAQAHRRAETLIFSRHAVIAVRNGKLCFMFRVGDLRKSMIISASVRIQVVKKTTTPEGEVVPIHQLDIPVDNPIESNNIFLVAPLIICHVIDKRSPLYDISATDLANQDLEVVKKTTTPEGEVFHHQLTFL

SEQ ID NO: 801749 - protein, 102 aa, Homo sapiens
MAVSIVTEEEGVYSVDYSKFGNTVKVAAPRCSARELDEKPSILIQTLQKSELSHQNSLRKRNSMRRNNSMRRNNSIRRNNSSLMVPKVQFMTPEGNQNTSES

SEQ ID NO: 801750 - protein, 424 aa, Homo sapiens; identical to SEQ ID NO: 801747

SEQ ID NO: 801751 - protein, 112 aa, Homo sapiens
LARIAAENLRKPRIRDRLPKARFIAKSGACNLAHKNIREQGRFLQDIFTTLVDLKWRHTLVIFTMSFLCSWLLFAIMWWLVAFAHGDIYAYMEKSGMEKSGLESTVCVTNVR

SEQ ID NO: 801752 - protein, 115 aa, Homo sapiens
AASPPRAGPRPAHCAAASAVSPPAPHAATGSPAPDAAPAPAASASLILQPPGGSTMPRSPVQPAQVLLDLPPEHPELVPFLHRHSHPLIPSTSSHLNSSSGFLTTHWRVIPSSTH

SEQ ID NO: 801753 - protein, 91 aa, Homo sapiens
CCFSSSSWATACSLRCSFCCVPASSSRSHWFSCTRRRTCARSFCFSDSTAPRWLDNAKITCATSPASAATASRLLLPASGLALAHRTLLDG

SEQ ID NO: 801754 - protein, 118 aa, Homo sapiens
MFPTLYNGSNQPYSCVPALRRGPSPQPWPVLTGEGYCTCPNHTDEKAETQGQQPGSQRSARHTPTLQHQWRWPPLCAEMAATRAQVKSIRALPPTGAFPGLWFLSPPAAPTPSRPLPV

SEQ ID NO: 801755 - protein, 120 aa, Homo sapiens
MRKLRLRASNPGPSGAPGTRRHFSTSGGGHHCARRWLRRVRRSRSQTPSCQNLDPNPPIARFLLPLERISEVPRRACLHGRDASSGNLCTEITQGICHMKMKAEFYKPRDAKDCQQTTRS

SEQ ID NO: 801756 - protein, 120 aa, Homo sapiens; identical to SEQ ID NO: 801755

SEQ ID NO: 801757 - protein, 94 aa, Homo sapiens
MRKLRLRASNPGPSGAPGTRRHFSTSGGGHHCARRWLRRVRRSRSQTPSCQNLDPNPPIARFLLPLERISEVPRRACLHGRDASSVWPPPERSD

SEQ ID NO: 801758 - protein, 220 aa, Homo sapiens
MASQRHLSSEPLSRKKLYLSILISLQISLIITFTATELIIFYIFFETTLIPTLAIITLMRQPARTPERRHILPILHPSRLPSPTHRTNLHSQHPRLTKHSTTHSHCPRTIKLQKKKKKKTRTSSPRAEFGTSGTRLKAETTSRKLQGKEKAWNLILHFREQGWWSLWPFSLNLSEISESFNPKTTVIPQLSTEDWFQDSHGSQNPRMLRIPYIKWHGICI

SEQ ID NO: 801759 - protein, 241 aa, Homo sapiens
GVEKKKKKKKKKKKKNKKVNGLPPEIAAVPELAKYWAQRYRLFSRFDDGIKLDREGWFSVTPEKIAEHIAGRVSQSFKCDVVVDAFCGVGGNTIQFALTGMRVIAIDIDPVKIALARNNAEVYGIADKIEFICGDFLLLASFLKADVVFLSPPWGGPDYATAETFDIRTMMSPDGFEIFRLSKKITNNIVYFLPRNADIDQVASLAGPGGQVEIEQNFLNNKLKTITAYFGDLIRRPASET

SEQ ID NO: 801760 - protein, 493 aa, Homo sapiens
MIFIGFANSRKVVKPRGKSYCNISASLDSQKSSGANTSKDRPHASGTDGDESEEDPPEHKPSKLKRSHELDIDENPASDFDDSGSLLGFKYGSGQKYGGIPNFSHRQVRYLEKNVKLKSKYLDMRRQIKMKNKHIFFTKESEKPFFKKSKILSKVEKFLTWVNKPMDEEASQESSSHDNVHDASTSSDSEEQDMSVKKGDDLLETNNPEPEKCQSVSSAGELETENYERDSLLATVPDEQDCVTQEVPDSRQAETEAEVKKKKNKKKNKKVNGLPPEIAAVPELAKYWAQRYRLFSRFDDGIKLDREGWFSVTPEKIAEHIAGRVSQSFKCDVVVDAFCGVGGNTIQFALTGMRVIAIDIDPVKIALARNNAEVYGIADKIEFICGDFLLLASFLKADVVFLSPPWGGPDYATAETFDIRTMMSPDGFEIFRLSKKITNNIVYFLPRNADIDQVASLAGPGGQVEIEQNFLNNKLKTITAYFGDLIRRPASET

SEQ ID NO: 801761 - protein, 724 aa, Homo sapiens
MCCEKWSRVAEMFLFTEEREDCKILCLCSRAFVEDRKLYNLGLKGYYIRDSGNNSGDQATEEEEGGYSCGTAESHDSKGIGLDESELDSEAELMRSMGLPLQFGRITAHKDFEVSMNTRNKVKIKKKKHQKKYLDEIVQESWRKEYEEDDILASDDPSSIEQYENTRTYELQSKKDTETENPPVENTLSPKLEITEKWEKYWNEYGGGLLWQSWQEKHPGQALSSEPWNFPDTKEEWEQHYSQLYWYYLEQFQYWEAQGWTFDASQSCDTDTYTSKTEADDKNDEKCMKVDLVSFPSSPIMVDNDSSGTSDKDHSEILDGISNIKLNSEEVTQSQLDSCTSHDGHQQLSEVSSKRECPASGQSEPRNGGTNEESNSSGNTNTDPPAEDSQKSSGANTSKDRPHASGTDGDESEEDPPEHKPSKLKRSHELDIDENPASDFDDSGSLLGFKYGSGQKYGGIPNFSHRQVRYLEKNVKLKSKYLDMRRQIKMKNKHIFFTKESEKPFFKKSKILSKVEKFLTWVNKPMDEEASQESSSHDNVHDASTSSDSEEQDMSVKKGDDLLETNNPEPEKCQSVSSAGELETENYERDSLLATVPDEQDCVTQEVPDSRQAETEAEVKKKKNKKKNKKVNGLPPEIAAVPELAKYWAQRYRLFSRFDDGIKLDREGWFSVTPEKIAEHIAGRVSQSFKCDVVVDAFCGVGGNTIQFALTGMREMLILTRWHP

SEQ ID NO: 801762 - protein, 853 aa, Homo sapiens [sequence omitted]

SEQ ID NO: 801763 - protein, 806 aa, Homo sapiens
IRGRVDYGRDQATEEEEGGYSCGTAESHDSKGIGLDESELDSEAELMRSMGLPLQFGRITAHKDFEVSMNTRNKVKIKKKKHQKKYLDEIVQESWRKEYEEDDILASDDPSSIEQYENTRTYELQSKKDTETENPPVENTLSPKLEITEKWEKYWNEYGGGLLWQSWQEKHPGQALSSEPWNFPDTKEEWEQHYSQLYWYYLEQFQYWEAQGWTFDASQSCDTDTYTSKTEADDKNDEKCMKVDLVSFPSSPIMVDNDSSGTSDKDHSEILDGISNIKLNSEEVTQSQLDSCTSHDGHQQLSEVSSKRECPASGQSEPRNGGTNEESNSSGNTNTDPPAEDSQKSSGANTSKDRPHASGTDGDESEEDPPEHKPSKLKRSHELDIDENPASDFDDSGSLLGFKYGSGQKYGGIPNFSHRQVRYLEKNVKLKSKYLDMRRQIKMKNKHIFFTKESEKPFFKKSKILSKVEKFLTWVNKPMDEEASQESSSHDNVHDASTSSDSEEQDMSVKKGDDLLETNNPEPEKCQSVSSAGELETENYERDSLLATVPDEQDCVTQEVPDSRQAETEAEVKKKKNKKKNKKVNGLPPEIAAVPELAKYWAQRYRLFSRFDDGIKLDREGWFSVTPEKIAEHIAGRVSQSFKCDVVVDAFCGVGGNTIQFALTGMRVIAIDIDPVKIALARNNAEVYGIADKIEFICGDFLLLASFLKADVVFLSPPWGGPDYATAETFDIRTMMSPDGFEIFRLSKKITNNIVYFLPRNADIDQVASLAGPGGQVEIEQNFLNNKLKTITAYFGDLIRRPASET

SEQ ID NO: 801764 - protein, 73 aa, Homo sapiens
LSPHPGLAGEACFKSPVTERRPGRRDPGCVRQSCLRSGKMCCEKWSRVAEMFLFTEEREDCKILCLCSRAFVE

SEQ ID NO: 801765 - protein, 151 aa, Homo sapiens
AAAALSRARVWGRLYPQPKLQEAAPLPRRGWDGGGHVGGGGDARGPRLEGESLPHPRLAPAAPSASPALAHPLVAHPARLDSSRNPGTGIYFGGSAAWRPGLSRVSQDRSPNSSRPLSLSGIPADVSPPAKTREEKREPALWSREKVWGVG

SEQ ID NO: 801766 - protein, 216 aa, Homo sapiens
AAAALSRARVWGRLYPQPKLQEAAPLPRRGWDGGGHVGGGGDARGPRLEGESLPHPRLAPAAPSASPALAHPLVAHPARLDSSRNPGTGIYFGGSAAWRPGLSRVSQDRSPNSSRPLSLSGIPADVSPPAKTREEKREPALWSREKEEGATALQDHGWEKEWRGFRTFSVRLHVPVFISGSQALGSWARITCCPPLWSRGCFCKESSGRESMACLT

SEQ ID NO: 801767 - protein, 272 aa, Homo sapiens
AAAALSRARVWGRLYPQPKLQEAAPLPRRGWDGGGHVGGGGDARGPRLEGESLPHPRLAPAAPSASPALAHPLVAHPARLDSSRNPGTGIYFGGSAAWRPGLSRVSQDRSPNSSRPLSLSGLEGSASCSPRRGEEGGGWELQRPLDAAASKGLSWVVGEGAPGAEPRSSGFLILSLGIPADVSPPAKTREEKREPALWSREKEEGATALQDHGWEKEWRGFRTFSVRLHVPVFISGSQALGSWARITCCPPLWSRGCFCKESSGRESMACLT

SEQ ID NO: 801768 - protein, 245 aa, Homo sapiens
  misc_feature (4)..(4): Xaa can be any naturally occurring amino acid
YTGXSTGSVAFVGLAKLRFLGIARFSSLLTLRMAMDSSLQARLFPGLAIKIQRSNGLIHSANVRTVNLEKSCVSVEWAEGGATKGKEIDFDDVAAINPELLQLLPLHPKDNLPLQENVTIQKQKRRSVNSKIPAPKESLRSRSTRMSTVSELRITAQENDMEVELPAAANSRKQFSVPPAPTRPSCPAVAEIPLRMVSEEMEEQVHSIRGSSSANPVNSARRKSCLVNGGGTMRQWEGRARNRID

SEQ ID NO: 801769 - protein, 723 aa, Homo sapiens [sequence omitted]

SEQ ID NO: 801770 - protein, 712 aa, Homo sapiens [sequence omitted]

SEQ ID NO: 801771 - protein, 639 aa, Homo sapiens
MIDFDDVAAINPELLQLLPLHPKDNLPLQENVTIQKQKRRSVNSKIPAPKESLRSRSTRMSTVSELRITAQENDMEVELPAAANSRKQFSVPPAPTRPSCPAVAEIPLRMVSEEMEEQVHSIRGSSSANPVNSVRRKSCLVKEVEKMKNKREEKKAQNSEMRMKRAQIEEHRICVCVRKRPLNKQELAKKEIDVISIPSKCLLLVHEPKLKVDLTKYLENQAFCFDFAFDETASNEVVYRFTARPLVQTIFEGGKATCFAYGQTGSGKTHTMGGDLSGKAQNASKGIYAMASRDVFLLKNQPCYRKLGLEVYVTFFEIYNGKLFDLLNKKAKLRVLEDGKQQVQVVGLQEHLVNSADDVIKMIDMGSACRTSGQTFANSNSSRSHACFQIILRAKGRMHGKFSLVDLAGNERGADTSSADRQTRMEGAEINKSLLALKECIRALGQNKAHTPFRESKLTQVLRDSFIGENSRTCMIATISPGISSCEYTLNTLRYADRVKELSPHSGPSGEQLIQMETEEMEACSNGALIPGNLSKEEEELSSQMSSFNEAMTQIRELEEKAMEELKEIIQQGPDWLELSEMTEQPDYDLETFVNKAESALAQQAKHFSALRDVIKALRLAMQLEEQASRQISSKKRPQ

SEQ ID NO: 801772 - protein, 461 aa, Homo sapiens
RTRGSTHELAKKEIDVISIPSKCLLLVHEPKLKVDLTKYLENQAFCFDFAFDETASNEVVYRFTARPLVQTIFEGGKATCFAYGQTGSGKTHTMGGDLSGKAQNASKGIYAMASRDVFLLKNQPCYRKLGLEVYVTFFEIYNGKLFDLLNKKAKLRVLEDGKQQVQVVGLQEHLVNSADDVIKMIDMGSACRTSGQTFANSNSSRSHACFQIILRAKGRMHGKFSLVDLAGNERGADTSSADRQTRMEGAEINKSLLALKECIRALGQNKAHTPFRESKLTQVLRDSFIGENSRTCMIATISPGISSCEYTLNTLRYADRVKELSPHSGPSGEQLIQMETEEMEACSNGALIPGNLSKEEEELSSQMSSFNEAMTQIRELEEKAMEELKEIIQQGPDWLELSEMTEQPDYDLETFVNKAESALAQQAKHFSALRDVIKALRLAMQLEEQASRQISSKKRPQ

SEQ ID NO: 801773 - protein, 473 aa, Homo sapiens
VGDTSGYYQRMLVVLLQANRDPDAGIDEAQVEQDAQAVIYEPKLKVDLTKYLENQAFCFDFAFDETASNEVVYRFTARPLVQTIFEGGKATCFAYGQTGSGKTHTMGGDLSGKAQNASKGIYAMASRDVFLLKNQPCYRKLGLEVYVTFFEIYNGKLFDLLNKKAKLRVLEDGKQQVQVVGLQEHLVNSADDVIKMIDMGSACRTSGQTFANSNSSRSHACFQIILRAKGRMHGKFSLVDLAGNERGADTSSADRQTRMEGAEINKSLLALKECIRALGQNKAHTPFRESKLTQVLRDSFIGENSRTCMIATISPGISSCEYTLNTLRYADRVKELSPHSGPSGEQLIQMETEEMEACSNGALIPGNLSKEEEELSSQMSSFNEAMTQIRELEEKAMEELKEIIQQGPDWLELSEMTEQPDYDLETFVNKAESALAQQAKHFSALRDVIKALRLAMQLEEQASRQISSKKRPQ

SEQ ID NO: 801774 - protein, 658 aa, Homo sapiens
MDSSLQARLFPGLAIKIQRSNGLIHSANVRTVNLEKSCVSVEWAEGGATKGKEIDFDDVAAINPELLQLLPLHPKDNLPLQENVTIQKQKRRSVNSKIPAPKESLRSRSTRMSTVSELRITAQENDMEVELPAAANSRKQFSVPPAPTRPSCPAVAEIPLRMVSEEMEEQVHSIRGSSSANPVNSVRRKSCLVKEVEKMKNKREEKKAQNSEMRMKRAQEYDSSFPNWEFARMIKEFRATLECHPLTMTDPIEEHRICVCVRKRPLNKQELAKKEIDVISIPSKCLLLVHEPKLKVDLTKYLENQAFCFDFAFDETASNEVVYRFTARPLVQTIFEGGKATCFAYGQTGSGKTHTMGGDLSGKAQNASKGIYAMASRDVFLLKNQPCYRKLGLEVYVTFFEIYNGKLFDLLNKKAKLRVLEDGKQQVQVVGLQEHLVNSADDVIKMIDMGSACRTSGQTFANSNSSRSHACFQIILRAKGRMHGKFSLVDLAGNERGADTSSADRQTRMEGAEINKSLLALKECIRALGQNKAHTPFRESKLTQVLRDSFIGENSRTCMIATISPGISSCEYTLNTLRYADRVKELSPHSGPSGEQLIQMETEEMEACSNGALIPGNLSKEEEELSSQMSSFNEAMTQIRELEEKAMEELKEIIQTGC

SEQ ID NO: 801775 - protein, 152 aa, Homo sapiens
QNKAHTPFRESKLTQVLRDSFIGENSRTCMVSRVTLKVMVQEETELLSTETLSPVPGLEAQHCWLPGFPGCTVTGLPDPALMHETPCGLTKRGGKDLFPLRCVGAALGLGEVIPALPDEKGVPEFGRWAFGSAGEGSPCLFHGLPQVHWLPA

SEQ ID NO: 801776 - protein, 244 aa, Homo sapiens
MDSSLQARLFPGLAIKIQRSNGLIHSANVRTVNLEKSCVSVEWAEGGATKGKEIDFDDVAAINPELLQLLPLHPKDNLPLQENVTIQKQKRRSVNSKIPAPKESLRSRSTRMSTVSELRITAQENDMEVELPAAANSRKQFSVPPAPTRPSCPAVAEIPLRMVSEEMEEQVHSIRGSSSANPVNSARRKSCLVNGGGPLRTAREKMPEPEWIERPRVDGVPRIALLDSAWVPLRLGPFCYPYMP

SEQ ID NO: 801777 - protein, 671 aa, Homo sapiens
MIDFDDVAAINPELLQLLPLHPKDNLPLQENVTIQKQKRRSVNSKIPAPKESLRSRSTRMSTVSELRITAQENDMEVELPAAANSRKQFSVPPAPTRPSCPAVAEIPLRMVSEEMEEQVHSIRGSSSANPVNSVRRKSCLVKEVEKMKNKREEKKAQNSEMRMKRAQEYDSSFPNWEFARMIKEFRATLECHPLTMTDPIEEHRICVCVRKRPLNKQELAKKEIDVISIPSKCLLLVHEPKLKVDLTKYLENQAFCFDFAFDETASNEVVYRFTARPLVQTIFEGGKATCFAYGQTGSGKTHTMGGDLSGKAQNASKGIYAMASRDVFLLKNQPCYRKLGLEVYVTFFEIYNGKLFDLLNKKAKLRVLEDGKQQVQVVGLQEHLVNSADDVIKMIDMGSACRTSGQTFANSNSSRSHACFQIILRAKGRMHGKFSLVDLAGNERGADTSSADRQTRMEGAEINKSLLALKECIRALGQNKAHTPFRESKLTQVLRDSFIGENSRTCMIATISPGISSCEYTLNTLRYADRVKELSPHSGPSGEQLIQMETEEMEACSNGALIPGNLSKEEEELSSQMSSFNEAMTQIRELEEKAMEELKEIIQQGPDWLELSEMTEQPDYDLETFVNKAESALAQQAKHFSALRDVIKALRLAMQLEEQASRQISSKKRPQ

SEQ ID NO: 801778 - protein, 682 aa, Homo sapiens
MDSSLQARLFPGLAIKIQRSNGLIHSANVRTVNLEKSCVSVEWAEGGATKGKEIDFDDVAAINPELLQLLPLHPKDNLPLQENVTIQKQKRRSVNSKIPAPKESLRSRSTRMSTVSELRITAQENDMEVELPAAANSRKQFSVPLRRKSCLVKEVEKMKNKREEKKAQNSEMRMKRAQEYDSSFPNWEFARMIKEFRATLECHPLTMTDPIEEHRICVCVRKRPLNKQELAKKEIDVISIPSKCLLLVHEPKLKVDLTKYLENQAFCFDFAFDETASNEVVYRFTARPLVQTIFEGGKATCFAYGQTGSGKTHTMGGDLSGKAQNASKGIYAMASRDVFLLKNQPCYRKLGLEVYVTFFEIYNGKLFDLLNKKAKLRVLEDGKQQVQVVGLQEHLVNSADDVIKMIDMGSACRTSGQTFANSNSSRSHACFQIILRAKGRMHGKFSLVDLAGNERGADTSSADRQTRMEGAEINKSLLALKECIRALGQNKAHTPFRESKLTQVLRDSFIGENSRTCMIATISPGISSCEYTLNTLRYADRVKELSPHSGPSGEQLIQMETEEMEACSNGALIPGNLSKEEEELSSQMSSFNEAMTQIRELEEKAMEELKEIIQQGPDWLELSEMTEQPDYDLETFVNKAESALAQQAKHFSALRDVIKALRLAMQLEEQASRQISSKKRPQ

SEQ ID NO: 801779 - protein, 536 aa, Homo sapiens
MGTKSSAPFLCSGVSNGGCRGPSVRSWPLTGPDMGLEGVGVLDKLAFEIALTLCCWLPPLIRLQIEEHRICVCVRKRPLNKQELAKKEIDVISIPSKCLLLVHEPKLKVDLTKYLENQAFCFDFAFDETASNEVVYRFTARPLVQTIFEGGKATCFAYGQTGSGKTHTMGGDLSGKAQNASKGIYAMASRDVFLLKNQPCYRKLGLEVYVTFFEIYNGKLFDLLNKKAKLRVLEDGKQQVQVVGLQEHLVNSADDVIKMIDMGSACRTSGQTFANSNSSRSHACFQIILRAKGRMHGKFSLVDLAGNERGADTSSADRQTRMEGAEINKSLLALKECIRALGQNKAHTPFRESKLTQVLRDSFIGENSRTCMIATISPGISSCEYTLNTLRYADRVKELSPHSGPSGEQLIQMETEEMEACSNGALIPGNLSKEEEELSSQMSSFNEAMTQIRELEEKAMEELKEIIQQGPDWLELSEMTEQPDYDLETFVNKAESALAQQAKHFSALRDVIKALRLAMQLEEQASRQISSKKRPQ

SEQ ID NO: 801780 - protein, 664 aa, Homo sapiens
MAMDSSLQARLFPGLAIKIQRSNGLIHSANVRTVNLEKSCVSVEWAEGGATKGKEIDFDDVAAINPELLQLLPLHPKDNLPLQENVTIQKQKRRSVNSKIPAPKESLRSRSTRMSTVSELRITAQENDMEVELPAAANSRKQFSVPPAPTRPSCPAVAEIPLRMVSEEMEEQVHSIRGSSSANPVNSVRRKSCLVKEVEKMKNKREEKKAQNSEMRMKRAQEYDSSFPNWEFARMIKEFRATLECHPLTMTDPIEEHRICVCVRKRPLNKQELAKKEIDVISIPSKCLLLVHEPKLKVDLTKYLENQAFCFDFAFDETASNEVVYRFTARPLVQTIFEGGKATCFAYGQTGSGKTHTMGGDLSGKAQNASKGIYAMASRDVFLLKNQPCYRKLGLEVYVTFFEIYNGKLFDLLNKKAKLRVLEDGKQQVQVVGLQEHLVNSADDVIKMIDMGSACRTSGQTFANSNSSRSHACFQIILRAKGRMHGKFSLVDLAGNERGADTSSADRQTRMEGAEINKSLLALKECIRALGQNKAHTPFRESKLTQVLRDSFIGENSRTCMIATISPGISSCEYTLNTLRYADRVKELSPHSGPSGEQLIQMETEEMEACSNGALIPGNGSWGGGQSDMGHSFSVPQLSPSREEGALSYPFVLPFFPSRGMFSA

SEQ ID NO: 801781 - protein, 113 aa, Homo sapiens
  misc_feature (2)..(3): Xaa can be any naturally occurring amino acid
  misc_feature (5)..(5): Xaa can be any naturally occurring amino acid
  misc_feature (18)..(18): Xaa can be any naturally occurring amino acid
MXXHXHVHTHTEAYVTHXMSSFNEAMTQIRELEEKAMEELKEIIQQGPDWLELSEMTEQPDYDLETFVNKAESALAQQAKHFSALRDVIKALRLAMQLEEQASRQISSKKRPQ

SEQ ID NO: 801782 - protein, 113 aa, Homo sapiens
MRPSKTEVWPAEAAPGSHNCLSFWPSQLSKEEEELSSQMSSFNEAMTQIRELEEKAMEELKEIIQRQLALDRELDAARPSVCSTPFPEHDLGLVPTGIHIARSSPLHQHSLIL

SEQ ID NO: 801783 - protein, 209 aa, Homo sapiens
MKGTPSSLDTLMWIYHFHSSTEVALQPPLLSSLELSVAAAHEYLEQRFRELKSLEPPEPKMQGMLPAPKPTLGLVLREATASLVSFGTTLLEVGYWGAWIRGDRVAGTRTSASPLTPVPPMQISALWLQQEARRLDGSAGPAPDGRDPGAALSRVAQAAGQGVRQAGAAVGASARLLVQGAWLCLCGRGLQGSASFLRQSQQQLGLGIP

SEQ ID NO: 801784 - protein, 80 aa, Homo sapiens
RKSLRHGRGGRRDRAPNVASGSSAPRTQELPEARADPQTTPSSAPRGPASSCNLKVTNSPHAKVPIGRRAVGVLLSDGFV

SEQ ID NO: 801785 - protein, 80 aa, Homo sapiens; identical to SEQ ID NO: 801784

SEQ ID NO: 801786 - protein, 186 aa, Homo sapiens
MKHMLAASAGEVVACLIRVPSEVVKQRAQVSASTRTFQIFSNILYEEGIQGLYRGYKSTVLREIPFSLVQFPLWESLKALWSWRQDHVVDSWQSAVCGAFAGGFAAAVTTPLDVAKTRITLAKAGSSTADGNVLSVLHGVWRSQGLAGLFAGVFPRMAAISLGGFIFLGAYDRTHSLLLEVGRKSP

SEQ ID NO: 801787 - protein, 101 aa, Homo sapiens
LDLGHGSFARESSSVYLHTTLLQETEVRDLPRLSSTTLPEAPPSSLALPKAQVSRVARAVVVVLRHVVPEVKTDPPQTWRRPAREDVIRFCSGLDCSLDEV

SEQ ID NO: 801788 - protein, 171 aa, Homo sapiens
MKHMLAASAGEVVACLIRVPSEVVKQRAQVSASTRTFQIFSNILYEEGIQGLYRGYKSTVLREALWSWRQDHVVDSWQSAVCGAFAGGFAAAVTTPLDVAKTRITLAKAGSSTADGNVLSVLHGVWRSQGLAGLFAGVFPRMAAISLGGFIFLGAYDRTHSLLLEVGRKSP

SEQ ID NO: 801789 - protein, 101 aa, Homo sapiens; identical to SEQ ID NO: 801787

SEQ ID NO: 801790 - protein, 122 aa, Homo sapiens
MGVLKSPLVLEAGSCGGFLAVSSLWSFCRWICRCSHHPSRRGKDKNYAGKDYLQVSSLEWQPSVWEVSSFWGLMTERTACCWKLAERVLEAETSLTSTSVKRGACSANPLPLSSCLNYRPQC

SEQ ID NO: 801791 - protein, 298 aa, Homo sapiens
MDRPGFVAALVAGGVAGVSVDLILFPLDTIKTRLQSPQGFSKAGGFHGIYAGVPSAAIGSFPNAAAFFITYEYVKWFLHADSSSYLTPMKHMLAASAGEVVACLIRVPSEVVKQRAQVSASTRTFQIFSNILYEEGIQGLYRGYKSTVLREIPFSLVQFPLWESLKALWSWRQDHVVDSWQSAVCGAFAGGFAAAVTTPLDVAKTRITLAKAGSSTADGNVLSVLHGVWRSQGLAGDHIPGIFLQEQSSGLPLQRVGRQLPGLRASQLAVPPPHPDAELDHLCDCSFCVPLAVLISAI

SEQ ID NO: 801792 - protein, 186 aa, Homo sapiens; identical to SEQ ID NO: 801786

SEQ ID NO: 801793 - protein, 274 aa, Homo sapiens
MDRPGFVAALVAGGVAGVSVDLILFPLDTIKTRLQSPQGFSKAGGFHGIYAGVPSAAIGSFPNAAAFFITYEYVKWFLHADSSSYLTPMKHMLAASAGEVVACLIRVPSEVVKQRAQVSASTRTFQIFSNILYEEGIQGLYRGYKSTVLREIPFSLVQFPLWESLKALWSWRQDHVVDSWQSAVCGAFAGGFAAAVTTPLDVAKTRITLAKAGSSTADGNVLSVLHGVWRSQGLAGLFAGVFPRMAAISLGGFIFLGAYDRTHSLLLEVGRKSP

SEQ ID NO: 801794 - protein, 259 aa, Homo sapiens
MDRPGFVAALVAGGVAGVSVDLILFPLDTIKTRLQSPQGFSKAGGFHGIYAGVPSAAIGSFPNAAAFFITYEYVKWFLHADSSSYLTPMKHMLAASAGEVVACLIRVPSEVVKQRAQVSASTRTFQIFSNILYEEGIQGLYRGYKSTVLREALWSWRQDHVVDSWQSAVCGAFAGGFAAAVTTPLDVAKTRITLAKAGSSTADGNVLSVLHGVWRSQGLAGLFAGVFPRMAAISLGGFIFLGAYDRTHSLLLEVGRKSP

SEQ ID NO: 801795 - protein, 176 aa, Homo sapiens
MDRPGFVAALVAGGVAGVSVDLILFPLDTIKTRLQSPQGFSKAGGFHGIYAGVPSAAIGSFPNAAAFFITYEYVKWFLHADSSSYLTPMKHMLAASAGEVVACLIRVPSEVVKQRAQVSASTRTFQIFSNILYEEGIQGLYRGYKSTVLREIPFSLVQFPLWESLKVDLPLQSPPL

SEQ ID NO: 801796 - protein, 186 aa, Homo sapiens; identical to SEQ ID NO: 801786

SEQ ID NO: 801797 - protein, 186 aa, Homo sapiens; identical to SEQ ID NO: 801786

SEQ ID NO: 801798 - protein, 406 aa, Homo sapiens
MVPPPPSRGGAARGQLGRSLGPLLLLLALGHTWTYREEPEDGDREICSESKIATTKYPCLKSSGELTTCYRKKCCKGYKFVLGQCIPEDYDVCAEAPCEQQCTDNFGRVLCTCYPGYRYDRERHRKREKPYCLDIDECASSNGTLCAHICINTLGSYRCECREGYIREDDGKTCTRGDKYPNDTGHEKSENMVKAGTCCATCKEFYQMKQTVLQLKQKIALLPNNAADLGKYITGDKVLASNTYLPGPPGLPGGQGPPGSPGPKGSPGFPGMPGPPGQPGPRGSMGPMGPSPDLSHIKQGRRGPVGPPGAPGRDGSKGERGAPGPRGSPGPPGSFDFLLLMLADIRNDITELQEKVFGHRTHSSAEEFPLPQEFPSYPEAMDLGSGDDHPRRTETRDLRAPRDFYP

SEQ ID NO: 801799 - protein, 169 aa, Homo sapiens
MANPGLGLLLALGLPFLLARWGRAWGQIQTTSANENSTVLPSSTSSSSDGNLRPEAITAIIVVFSLLAALLLAVGLALLVRKLREKRQTEGTYRPSSEEQLSVLPCSRGPGPSGLQGDGAGLPAHLGPLSCICLPSLLCDLGERQCPLWAVRSTQCLIAGKKVLQRLCP

SEQ ID NO: 801800 - protein, 153 aa, Homo sapiens
NSARATPNLKLPPGEREKPLPRRCQPATQPMANPGLGLLLALGLPFLLARWGRAWGQIQTTSANENSTVLPSSTSSSSDGNLRPEAITAIIVVFSLLAALLLAVGLALLVRKLREKRQTEGTYRPSSEEQPPTLPRTAGCWLVHRSCHRDTSL

SEQ ID NO: 801801 - protein, 107 aa, Homo sapiens
TLDDRLIVALDRPEAITAIIVVFSLLAALLLAVGLALLVRKLREKRQTEGTYRPSSEEQPACHRPPTSSCRRKSGSSERWGLLQPPTLPRTAGCWLVHRSCHRDTSL

SEQ ID NO: 801802 - protein, 248 aa, Homo sapiens
MESGKTASPKSMPKDAQMMAQILKDMGITEYEPRVINQMLEFAFRYVTTILDDAKIYSSHAKKATVDADDVRLAIQCRADQSFTSPPPRDFLLDIARQRNQTPLPLIKPYSGPRLPPDRYCLTAPNYRLKSLQKKASTSAGRITVPRLSVGSVTSRPSTPTLGTPTPQTMSVSTKVGTPMSLTGQRFTVQMPTSQSPAVKASIPATSAVQNVLINPSLIGSKNILFFSYLCLQKAGFQVENRVFVGKN

SEQ ID NO: 801803 - protein, 264 aa, Homo sapiens
MESGKTASPKSMPKDAQMMAQILKDMGITEYEPRVINQMLEFAFRYVTTILDDAKIYSSHAKKATVDADDVRLAIQCRADQSFTSPPPRDFLLDIARQRNQTPLPLIKPYSGPRLPPDRYCLTAPNYRLKSLQKKASTSAGRITVPRLSVGSVTSRPSTPTLGTPTPQTMSVSTKVGTPMSLTGQRFTVQMPTSQSPAVKASIPATSAVQNVLINPSLIGSKNILITTNMMSSQNTANESSNALKRKREDDDDDDDDDDDYDNL

SEQ ID NO: 801804 - protein, 264 aa, Homo sapiens; identical to SEQ ID NO: 801803

SEQ ID NO: 801805 - protein, 264 aa, Homo sapiens; identical to SEQ ID NO: 801803

SEQ ID NO: 801806 - protein, 264 aa, Homo sapiens; identical to SEQ ID NO: 801803

SEQ ID NO: 801807 - protein, 264 aa, Homo sapiens; identical to SEQ ID NO: 801803

SEQ ID NO: 801808 - protein, 264 aa, Homo sapiens; identical to SEQ ID NO: 801803

SEQ ID NO: 801809 - protein, 248 aa, Homo sapiens; identical to SEQ ID NO: 801802

SEQ ID NO: 801810 - protein, 246 aa, Homo sapiens
MESGKTASPKSMPKDAQMMAQILKDMGITEYEPRVINQMLEFAFRYVTTILDDAKIYSSHAKKATVDADDVRLAIQCRADQSFTSPPPRDFLLDIARQRNQTPLPLIKPYSGPRLPPDRYCLTAPNYRLKSLQTVTSRPSTPTLGTPTPQTMSVSTKVGTPMSLTGQRFTVQMPTSQSPAVKASIPATSAVQNVLINPSLIGSKNILITTNMMSSQNTANESSNALKRKREDDDDDDDDDDDYDNL

SEQ ID NO: 801811 - protein, 252 aa, Homo sapiens
MESGKTASPKSMPKDAQMMAQILKDMGITEYEPRVINQMLEFAFRYVTTILDDAKIYSSHAKKATVDADDVRLAIQCRADQSFTSPPPRDFLLDIARQRNQTPLPLIKPYSGPRLPPDRYCLTAPNYRLKSLQKKASTSAGRITVPRLSVGSVTSRPSTPTLGTPTPQTMSVSTKVGTPMSLTGQRFTVQMPTSQSPAVKASIPATSAVQNVLINPSLIGSKNILIVVCSKYGLELHGGERGSNWHWRRENW

SEQ ID NO: 801812 - protein, 198 aa, Homo sapiens
IRGRVRPREDDKGHVSEAPEAVAAGTMLLPNILLTGTPGVGKTTLGKELASKSGLKYINVGDLAREEQLYDGYDEEYDCPILDEDRVVDELDNQMREGGVIVDYHGCDFFPERWFHIVFVLRTDTNVLYERLETRGYNEKKLTDNIQCEIFQVLYEEATASYKEEIVHQLPSNKPEELENNVDQILKWIEQWIKDHNS

SEQ ID NO: 801813 - protein, 94 aa, Homo sapiens
MCHRKPGTPGVGKTTLGKELASKSGLKYINVGDLAREEQLYDGYDEEYDCPILDEDRVVDELDEPDGSKMAIFVTISGFLYIDLLLVITDGSKS

SEQ ID NO: 801814 - protein, 183 aa, Homo sapiens
MPTLQLFAAGTMLLPNILLTGTPGVGKTTLGKELASKSGLKYINVGDLAREEQLYDGYDEEYDCPILDEDRVVDELDNQMREGGVIVDYHGCDFFPERWFHIVFVLRTDTNVLYERLETRGYNEKKLTDNIQCEIFQVLYEEATASYKEEIVHQLPSNKPEELENNVDQILKWIEQWIKDHNS

SEQ ID NO: 801815 - protein, 264 aa, Homo sapiens; identical to SEQ ID NO: 801803

SEQ ID NO: 801816 - protein, 264 aa, Homo sapiens; identical to SEQ ID NO: 801803

SEQ ID NO: 801817 - protein, 264 aa, Homo sapiens; identical to SEQ ID NO: 801803

SEQ ID NO: 801818 - protein, 319 aa, Homo sapiens
  misc_feature (55)..(55): Xaa can be any naturally occurring amino acid
GNTLGKECVKIRRIINVGDLAQRSLIIGYQESKALQGGHNDCRGGVSAGCVVGGXGGGGGGGGGGGGGGGEGGWAQILKDMGITEYEPRVINQMLEFAFRYVTTILDDAKIYSSHAKKATVDADDVRLAIQCRADQSFTSPPPRDFLLDIARQRNQTPLPLIKPYSGPRLPPDRYCLTAPNYRLKSLQKKASTSAGRITVPRLSVGSVTSRPSTPTLGTPTPQTMSVSTKVGTPMSLTGQRFTVQMPTSQSPAVKASIPATSAVQNVLINPSLIGSKNILITTNMMSSQNTANESSNALKRKREDDDDDDDDDDDYDNL

SEQ ID NO: 801819 - protein, 252 aa, Homo sapiens; identical to SEQ ID NO: 801811

SEQ ID NO: 801820 - protein, 246 aa, Homo sapiens; identical to SEQ ID NO: 801810

SEQ ID NO: 801821 - protein, 158 aa, Homo sapiens
IRGRVRPREDDKGHVSEAPEAVAAGTMLLPNILLTGTPGVGKTTLGKELASKSGLKYINVGDLAREEQLYDGYDEEYDCPILDEDRVVDELDNQMREGGVIVDYHGCDFFPERWFHIVFVLRTDTNVLYERLETRGYNEKKLTDNIQCGDSACAGYRA

SEQ ID NO: 801822 - protein, 152 aa, Homo sapiens
GEVGRAPLDVPGTRTRPRWARAVMVQALHTEPQNMLNKPPKLRGTDLPWGLVIFKMRKRRHSGALIRPREALWVSRRARNRPQLPSLANAQNHYIILPRDPTKRYPHPVAAGAEGLEIGEEAPHTPAPKAMRETEAQEGARSVKRKVGRAGQ

SEQ ID NO: 801823 - protein, 152 aa, Homo sapiens; identical to SEQ ID NO: 801822

SEQ ID NO: 801824 - protein, 112 aa, Homo sapiens
MASLRVERAGGPRLPRTRVGRPAALRLLLLLGAVLNPHEALAQPLPTTGTPGSEGLIAPCEIAWSTLQSCLTWASPIPWQRGSSLRLTRSTLPTAPWCSPPSLTPQRMYSWP

SEQ ID NO: 801825 - protein, 142 aa, Homo sapiens
MSSGVEKLVALGLGSLSLLLHRGTVKNYETAVQFCWNHYKDQMDPIEKDWCDWAMISRPYSTLRDCLEHFAELFDLGFPNPLAERIIFETHQIHFANCSLVQPTFSDPPEDVLLAMIIAPICLIPFLITLVVWRSKDSEAQA

SEQ ID NO: 801826 - protein, 157 aa, Homo sapiens
MASLRVERAGGPRLPRTRVGRPAALRLLLLLGAVLNPHEALAQPLPTTGTPGSEGGTVKNYETAVQFCWNHYKDQMDPIDCLEHFAELFDLGFPNPLAERIIFETHQIHFANCSLVQPTFSDPPEDVLLAMIIAPICLIPFLITLVVWRSKDSEAQA

SEQ ID NO: 801827 - protein, 175 aa, Homo sapiens
MASLRVERAGGPRLPRTRVGRPAALRLLLLLGAVLNPHEALAQPLPTTGTPGSEGGTVKNYETAVQFCWNHYKDQMDPIEKDWCDWAMISRPYSTLRDCLEHFAELFDLGFPNPLAERIIFETHQIHFANCSLVQPTFSDPPEDVLLAMIIAPICLIPFLITLVVWRSKDSEAQA

SEQ ID NO: 801828 - protein, 293 aa, Homo sapiens
GGRRERPRRGEGRGERGWMAEAGTGPGVRVRTDVPSSTGPRTVPDPTSGRAQHELLPTQGKLGCWPRPLEEGLGGRKLARDEGALGLGVSDKELVPAPPSPALRRPWGLDYSSFSSKVAYFRRVSVPQPPSQAPLPGSPLCYPPLPFLPTAVLNPHEALAQPLPTTGTPGSEGGTVKNYETAVQFCWNHYKDQMDPIEKDWCDWAMISRPYSTLRDCLEHFAELFDLGFPNPLAERIIFETHQIHFANCSLVQPTFSDPPEDVLLAMIIAPICLIPFLITLVVWRSKDSEAQA

SEQ ID NO: 801829 - protein, 112 aa, Homo sapiens; identical to SEQ ID NO: 801824

SEQ ID NO: 801830 - protein, 69 aa, Homo sapiens
VKENQKQPGVGPRHRPGPMPSVLATIPSRLLTVDQHGIASPWSAAEAQKGKGICLKLLSQTEPGFHHVG

SEQ ID NO: 801831 - protein, 373 aa, Homo sapiens
MAETREEETVSAEASGFSDLSDSEFLEFLDLEDAQESKALVNMPGPSSESLGKDDKPISLQNWKRGLDILSPMERFHLKYLYVTDLATQNWCELQTAYGKELPGFLAPEKAAVLDTGASIHLARELELHDLVTVPVTTKEDAWAIKFLNILLLIPTLQSEGHIREFPVFGEGEGVLLVGVIDELHYTAKGELELAELKTRRRPMLPLEAQKKKDCFQVSLYKYIFDAMVQGKVTPASLIHHTKLCLEKPLGPSVLRHAQQGGFSVKSLGDLMELVFLSLTLSDLPVIDILKIEYIHQETATVLGTEIVAFKEKEVRAKVQHYMAYWMGHREPQGVDVEEAWKCRTCTYADICEWRKGSGVLSSTLAPQVKKAK

SEQ ID NO: 801832 - protein, 175 aa, Homo sapiens
GLWAAFLRVAGRLCSPLRQRALPGFLSLLAGSVREQLRGRGETRWSPRFGGVSEVRGRPENGLGGCVSELRVLSLRSPRLPPLVGAAPGKRLVSSPLTGRVPVLDLRPRNTVLLAGTPSRGGRLPVLIPGSARTVGSAQYTLGHAWHSLGDSALGPEERSSLKANARGAHKSGPH

SEQ ID NO: 801833 - protein, 355 aa, Homo sapiens
MAETREEETVSAEASGFSDLSDSEFLEFLDLEDAQESKALVNMPGPSSESLGKDDKPISLQNWKRGLDILSPMERFHLKYLYVTDLATQNWCELQTAYGKELPGFLAPEKAAVLDTGASIHLARELELHDLVTVPVTTKEDAWAIKFLNILLLIPTLQSEGHIREFPVFGEGEGVLLVGVIDELHYTAKGELELAELKTRRRPMLPLEAQKKKDCFQVSLYKYIFDAMVQGKVTPASLIHHTKLCLVKSLGDLMELVFLSLTLSDLPVIDILKIEYIHQETATVLGTEIVAFKEKEVRAKVQHYMAYWMGHREPQGVDVEEAWKCRTCTYADICEWRKGSGVLSSTLAPQVKKAK

SEQ ID NO: 801834 - protein, 419 aa, Homo sapiens
GLWAAFLRVAGRLCSPLRQRALPGFLSLLAGSVREQLRGRGETRWSPRFGGVSEGPSSPIQSCTMAETREEETVSAEASGFSDLSDSEFLEFLDLEDAQESKALVNMPGPSSESLGKDDKPISLQNWKRGLDILSPMERFHLKYLYVTDLATQNWCELQTAYGKELPGFLAPEKAAVLDTGASIHLARELELHDLVTVPVTTKEDAWAIKFLNILLLIPTLQSEGHIREFPVFGEGEGVLLVGVIDELHYTAKGELELAELKTRRRPMLPLEAQKKKDCFQVSLYKYIFDAMVQGKVTPASLIHHTKLCLVKSLGDLMELVFLSLTLSDLPVIDILKIEYIHQETATVLGTEIVAFKEKEVRAKVQHYMAYWMGHREPQGVDVEEAWKCRTCTYADICEWRKGSGVLSSTLAPQVKKAK

SEQ ID NO: 801835 - protein, 355 aa, Homo sapiens; identical to SEQ ID NO: 801833

SEQ ID NO: 801836 - protein, 373 aa, Homo sapiens; identical to SEQ ID NO: 801831

SEQ ID NO: 801837 - protein, 355 aa, Homo sapiens; identical to SEQ ID NO: 801833

SEQ ID NO: 801838 - protein, 355 aa, Homo sapiens; identical to SEQ ID NO: 801833

SEQ ID NO: 801839 - protein, 306 aa, Homo sapiens [sequence omitted]

SEQ ID NO: 801840 - protein, 306 aa, Homo sapiens [sequence omitted]

SEQ ID NO: 801841 - protein, 396 aa, Homo sapiens
MESNLSGLVPAAGLVPALPPAVTLGLTAAYTTLYALLFFSVYAQLWLVLLYGHKRLSYQTVFLALCLLWAALRTTLFSFYFRDTPRANRLGPLPFWLLYCCPVCLQFFTLTLMNLYFAQVVFKAKVKRRPEMSRGLLAVRGAFVGASLLFLLVNVLCAVLSHRRRAQPWALLLVRVLVSDSLFVICALSLAACLCLVARRAPSTSIYLEAKGTSVCQAAAMGGAMVLLYASRACYNLTALALAPQSRLDTFDYDWYNVSDQADLVNDLGNKGYLVFGLILFVWELLPTTLLVGFFRVHRPPQDLSTSHILNGQVFASRSYFFDRAGHCEDEGCSWEHSRGESTSMSGSLGSGSWYGAIGREPGWYGGSQTKTTPLLFSQVPGPGGHHHSLYSTPQT

SEQ ID NO: 801842 - protein, 306 aa, Homo sapiens [sequence omitted]

SEQ ID NO: 801843 - protein, 375 aa, Homo sapiens
GPARGIRGSAGSGPGAGPGGHLGYGRKFSSETEGRESVAAPGRAARPRFGYRRDERGNWRTPIQASLPDMESNLSGLVPAAGLVPALPPAVTLGLTAAYTTLYALLFFSVYAQLWLVLLYGHKRLSYQTVFLALCLLWAALRTTLFSFYFRDTPRANRLGPLPFWLLYCCPVCLQFFTLTLMNLYFAQVVFKAKVKRRPEMSRGLLAVRGAFVGASLLFLLVNVLCAVLSHRRRAQPWALLLVRVLVSDSLFVICALSLAACLCLVARRAPSTSIYLEAKGTSVCQAAAMGGAMVLLYASRACYNLTALALAPQSRLDTFDYDWYNVSDQVGIRMSATSLVAVAPWPQLAWALSHYPFGVTADWHQPLPSHRRTW

SEQ ID NO: 801844 - protein, 243 aa, Homo sapiens
MESNLSGLVPAAGLVPALPPAVTLGLTAAYTTLYALLFFSVYAQLWLVLLYGHKRLSYQTVFLALCLLWAALRTTLFSFYFRDTPRANRLGPLPFWLLYCCPVCLQFFTLTLMNLYFAQVVFKAKVKRRPEMSRGLRAPSTSIYLEAKGTSVCQAAAMGGAMVLLYASRACYNLTALALAPQSRLDTFDYDWYNVSDQVGIRMSATSLVAVAPWPQLAWALSHYPFGVTADWHQPLPSHRRTW

SEQ ID NO: 801845 - protein, 218 aa, Homo sapiens
MGGAMVLLYASRACYNLTALALAPQSRLDTFDYDWYNVSDQVGIRMSATSFSSRGTLAPAGLGPVPLPLWRDCRLAPAPAFPQADLVNDLGNKGYLVFGLILFVWELLPTTLLVGFFRVHRPPQDLSTSHILNGQVFASRSYFFDRAGHCEDEGCSWEHSRGESTSMSGSLGSGSWYGAIGREPGWYGGSQTKTTPLLFSQVPGPGGHHHSLYSTPQT

SEQ ID NO: 801846 - protein, 271 aa, Homo sapiens
MESNLSGLVPAAGLVPALPPAVTLGLTAAYTTLYALLFFSVYAQLWLVLLYGHKRLSYQTVFLALCLLWAALRTTLFSFYFRDTPRANRLGPLPFWLLYCCPVCLQFFTLTLMNLYFAQVVFKAKVKRRPEMSRGLADLVNDLGNKGYLVFGLILFVWELLPTTLLVGFFRVHRPPQDLSTSHILNGQVFASRSYFFDRAGHCEDEGCSWEHSRGESTSMSGSLGSGSWYGAIGREPGWYGGSQTKTTPLLFSQVPGPGGHHHSLYSTPQT

SEQ ID NO: 801847 - protein, 169 aa, Homo sapiens
ISRYLAIHLAPVPADLVNDLGNKGYLVFGLILFVWELLPTTLLVGFFRVHRPPQDLSTSHILNGQVFASRSYFFDRAGHCEDEGCSWEHSRGESTRCQDQAATTTVSTPPHRRDPPPSPTEYPGPSPPHPRPLCQVCLPLLAQDPGGRGYPLLWPAPCCSCHSELVPSP

SEQ ID NO: 801848 - protein, 216 aa, Homo sapiens
MESNLSGLVPAAGLVPALPPAVTLGLTAAYTTLYALLFFSVYAQLWLVLLYGHKRLSYQTVFLALCLLWAALRTTLFSFYFRDTPRANRLGPLPFWLLYCCPVCLQFFTLTLMNLYFAQVVFKAKVKRRPEMSRGLLAVRGAFVGASLLFLLVNVLCAVLSHRRRAQPWALLLVRVLVSDSLFVICALSLAACLCLVARRAPSTSIYLEAKVGLQH

SEQ ID NO: 801849 - protein, 216 aa, Homo sapiens; identical to SEQ ID NO: 801848

SEQ ID NO: 801850 - protein, 216 aa, Homo sapiens; identical to SEQ ID NO: 801848

SEQ ID NO: 801851 - protein, 302 aa, Homo sapiens
MESNLSGLVPAAGLVPALPPAVTLGLTAAYTTLYALLFFSVYAQLWLVLLYGHKRLSYQTVFLALCLLWAALRTTLFSFYFRDTPRANRLGPLPFWLLYCCPVCLQFFTLTLMNLYFAQVVFKAKVKRRPEMSRGLLAVRGAFVGASLLFLLVNVLCAVLSHRRRAQPWALLLVRVLVSDSLFVICALSLAACLCLVARRAPSTSIYLEAKGTSVCQAAAMGGAMVLLYASRACYNLTALALAPQSRLDTFDYDWYNVSDQRTWWMTGEQGYQDGKSSTEEQWQHQNVGTTGERPKTEQKTK

SEQ ID NO: 801852 - protein, 194 aa, Homo sapiens
MNLYFAQVVFKAKVKRRPEMSRGLLAVRGAFVGASLLFLLVNVLCAVLSHRRRAQPWALLLVRVLVSDSLFVICALSLAACLCLVARRAPSTSIYLEAKGTSVCQAAAMGGAMVLLYASRACYNLTALALAPQSRLDTFDYDWYNVSDQVGIRMSATSLVAVAPWPQLAWALSHYPFGVTADWHQPLPSHRRTW

SEQ ID NO: 801853 - protein, 256 aa, Homo sapiens
MESNLSGLVPAAGLVPALPPAVTLGLTAAYTTLYALLFFSVYAQLWLVLLYGHKRLSYQTVFLALCLLWAALRTTLFSFYFRDTPRANRLGPLPFWLLYCCPVCLQFFTLTLMNLYFAQVVFKAKVKRRPEMSRGFGSQGVEEAGSLLSLRVLCCYLCQAVGTSVCQAAAMGGAMVLLYASRACYNLTALALAPQSRLDTFDYDWYNVSDQVGIRMSATSLVAVAPWPQLAWALSHYPFGVTADWHQPLPSHRRTW

SEQ ID NO: 801854 - protein, 271 aa, Homo sapiens; identical to SEQ ID NO: 801846

SEQ ID NO: 801855 - protein, 148 aa, Homo sapiens
ISRYLAIHLAPVPADLVNDLGNKGYLVFGLILFVWELLPTTLLVGFFRVHRPPQDLSTSHILNGQVFASRSYFFDRAGHCEDEGCSWEHSRGESTSMSGSLGSGSWYGAIGREPGWYGGSQTKTTPLLFSQVPGPGGHHHSLYSTPQT

SEQ ID NO: 801856 - protein, 108 aa, Homo sapiens
RQGLTASPRLECNGAMTDHCSPNLLGSSDPPTSASRVDGTTGSHHHSHLIFLFYFCRDGVYVAEAGLELLDSRDPPASISRSVGITGVSHHAIFLFFETGSGSVTKAG

SEQ ID NO: 801857 - protein, 119 aa, Homo sapiens
GSSLPPPPAAAAARASQQSRLRSHGPRRPPATPPPRMVAGTSLPYQPSLPGAQLLGPCVTLAFYRDNRETHSNSHGGIGEMAPTAALGGGASERTHAQSACQGGGWRGRANGGGGAQQP

SEQ ID NO: 801858 - protein, 95 aa, Homo sapiens
GSSLPPPPAAAAARASQQSRLRSHGPRRPPATPPPRMVAGTSLPYQPSLPGAQLLGPCVTLAFYRDNRETHSNSHGGIGEMAPTAALGGGASERC

SEQ ID NO: 801859 - protein, 95 aa, Homo sapiens; identical to SEQ ID NO: 801858

SEQ ID NO: 801860 - protein, 113 aa, Homo sapiens
KQTSGGNADWPEAHLLLCCPVPNRPWTCTSLWPEGWGPLIPTRRNLKPRIQAKNNDSQVPMKSWMDVELGNVLADSRGRCEPQQSSRAGTSRERRCVFESESHAVGHLLLSTG

SEQ ID NO: 801861 - protein, 328 aa, Homo sapiens
MKTCWKIPVFFFVCSFLEPWASAAVKRRPRFPVNSNSNGGNELCPKIRIGQDDLPGFDLISQFQVDKAASRRAIQRVVGSATLQVAYKLGNNVDFRIPTRNLYPSGLPEEYSFLTTFRMTGSTLKKNWNIWQIQDSSGKEQVGIKINGQTQSVVFSYKGLDGSLQTAAFSNLSSLFDSQWHKIMIGVERSSATLFVDCNRIESLPIKPRGPIDIDGFAVLGKLADNPQVSVPFELQWMLIHCDPLRPRRETCHELPARITPSQTTDERGPPGEQGPPGPPGPPGVPGIDGIDGDRGPKGPPGPPGPAGEPGKPGAPGKPGTPGADTSP

SEQ ID NO: 801862 - protein, 921 aa, Homo sapiens
MKTCWKIPVFFFVCSFLEPWASAAVKRRPRFPVNSNSNGGNELCPKIRIGQDDLPGFDLISQFQVDKAASRRAIQRVVGSATLQVAYKLGNNVDFRIPTRNLYPSGLPEEYSFLTTFRMTGSTLKKNWNIWQIQDSSGKEQVGIKINGQTQSVVFSYKGLDGSLQTAAFSNLSSLFDSQWHKIMIGVERSSATLFVDCNRIESLPIKPRGPIDIDGFAVLGKLADNPQVSVPFELQWMLIHCDPLRPRRETCHELPARITPSQTTDERGPPGEQGPPGPPGPPGVPGIDGIDGDRGPKGPPGPPGPAGEPGKPGAPGKPGTPGADGLTGPDGSPGSIGSKGQKGEPGVPGSRGFPGRGIPGPPGPPGTAGLPGELGRVGPVGDPGRRGPPGPPGPPGPRGTIGFHDGDPLCPNACPPGRSGYPGLPGMRGHKGAKGEIGEPGRQGHKGEEGDQGELGEVGAQGPPGAQGLRGITGIVGDKGEKGARGLDGEPGPQGLPGAPGDQGQRGPPGEAGPKGDRGAEGARGIPGLPGPKGDTGLPGVDGRDGIPGMPGTKGEPGKPGPPGDAGLQGLPGVPGIPGAKGVAGEKGSTGAPGKPGQMGNSGKPGQQGPPGEVGPRGPQGLPGSRGELGPVGSPGLPGKLGSLGSPGLPGLPGPPGLPGMKGDRGVVGEPGPKGEQGASGEEGEAGERGELGDIGLPGPKGSAGNPGEPGLRGPEGSRGLPGVEGPRGPPGPRGVQGEQGATGLPGVQGPPGRAPTDQHIKQVCMRVIQEHFAEMAASLKRPDSGATGLPGRPGPPGPPGPPGENGFPGQMGIRGLPGIKGPPGALGLRGPKGDLGEKGERGPPGRGPNGLPGAIGLPGDPGPASYGRNGRDGERGPPGVAGIPGVPGPPGPPGLPGFCEPASCTMQAGQRAFNKGPDP

SEQ ID NO: 801863 - protein, 678 aa, Homo sapiens
MAWTARDRGALGLLLLGLCLCAAQRGPPGEQGPPGPPGPPGVPGIDGIDGDRGPKGPPGPPGPAGEPGKPGAPGKPGTPGADGLTGPDGSPGSIGSKGQKGEPGVPGSRGFPGRGIPGPPGPPGTAGLPGELGRVGPVGDPGRRGPPGPPGPPGPRGTIGFHDGDPLCPNACPPGRSGYPGLPGMRGHKGAKGEIGEPGRQGHKGEEGDQGELGEVGAQGPPGAQGLRGITGIVGDKGEKGARGLDGEPGPQGLPGAPGDQGQRGPPGEAGPKGDRGAEGARGIPGLPGPKGDTGLPGVDGRDGIPGMPGTKGEPGKPGPPGDAGLQGLPGVPGIPGAKGVAGEKGSTGAPGKPGQMGNSGKPGQQGPPGEVGPRGPQGLPGSRGELGPVGSPGLPGKLGSLGSPGLPGLPGPPGLPGMKGDRGVVGEPGPKGEQGASGEEGEAGERGELGDIGLPGPKGSAGNPGEPGLRGPEGSRGLPGVEGPRGPPGPRGVQGEQGATGLPGVQGPPGRAPTDQHIKQVCMRVIQEHFAEMAASLKRPDSGATGLPGRPGPPGPPGPPGENGFPGQMGIRGLPGIKGPPGALGLRGPKGDLGEKGERGPPGRGPNGLPGAIGLPGDPGPASYGRNGRDGERGPPGVAGIPGVPGPPGPPGLPGFCEPASCTMQAGQRAFNKGPDP

SEQ ID NO: 801864 - protein, 552 aa, Homo sapiens
PGPQDPEGPGGPLLPGHQQVLHGPLAPQDPEEQWLSQWISMCPNACPPGRSGYPGLPGMRGHKGAKGEIGEPGRQGHKGEEGDQGELGEVGAQGPPGAQGLRGITGIVGDKGEKGARGLDGEPGPQGLPGAPGDQGQRGPPGEAGPKGDRGAEGARGIPGLPGPKGDTGLPGVDGRDGIPGMPGTKGEPGKPGPPGDAGLQGLPGVPGIPGAKGVAGEKGSTGAPGKPGQMGNSGKPGQQGPPGEVGPRGPQGLPGSRGELGPVGSPGLPGKLGSLGSPGLPGLPGPPGLPGMKGDRGVVGEPGPKGEQGASGEEGEAGERGELGDIGLPGPKGSAGNPGEPGLRGPEGSRGLPGVEGPRGPPGPRGVQGEQGATGLPGVQGPPGRAPTDQHIKQVCMRVIQEHFAEMAASLKRPDSGATGLPGRPGPPGPPGPPGENGFPGQMGIRGLPGIKGPPGALGLRGPKGDLGEKGERGPPGRGPNGLPGAIGLPGDPGPASYGRNGRDGERGPPGVAGIPGVPGPPGPPGLPGFCEPASCTMQAGQRAFNKGPDP

SEQ ID NO: 801865 - protein, 921 aa, Homo sapiens; identical to SEQ ID NO: 801862

SEQ ID NO: 801866 - protein, 477 aa, Homo sapiens
MRFLKIFASTKIIHFSFSHFQGAQGLRGITGIVGDKGEKGARGLDGEPGPQGLPGAPGDQGQRGPPGEAGPKGDRGAEGARGIPGLPGPKGDTGLPGVDGRDGIPGMPGTKGEPGKPGPPGDAGLQGLPGVPGIPGAKGVAGEKGSTGAPGKPGQMGNSGKPGQQGPPGEVGPRGPQGLPGSRGELGPVGSPGLPGKLGSLGSPGLPGLPGPPGLPGMKGDRGVVGEPGPKGEQGASGEEGEAGERGELGDIGLPGPKGSAGNPGEPGLRGPEGSRGLPGVEGPRGPPGPRGVQGEQGATGLPGVQGPPGRAPTDQHIKQVCMRVIQEHFAEMAASLKRPDSGATGLPGRPGPPGPPGPPGENGFPGQMGIRGLPGIKGPPGALGLRGPKGDLGEKGERGPPGRGPNGLPGAIGLPGDPGPASYGRNGRDGERGPPGVAGIPGVPGPPGPPGLPGFCEPASCTMQAGQRAFNKGPDP

SEQ ID NO: 801867 - protein, 371 aa, Homo sapiens
MPGTKGEPGKPGPPGDAGLQGLPGVPGIPGAKGVAGEKGSTGAPGKPGQMGNSGKPGQQGPPGEVGPRGPQGLPGSRGELGPVGSPGLPGKLGSLGSPGLPGLPGPPGLPGMKGDRGVVGEPGPKGEQGASGEEGEAGERGELGDIGLPGPKGSAGNPGEPGLRGPEGSRGLPGVEGPRGPPGPRGVQGEQGATGLPGVQGPPGRAPTDQHIKQVCMRVIQEHFAEMAASLKRPDSGATGLPGRPGPPGPPGPPGENGFPGQMGIRGLPGIKGPPGALGLRGPKGDLGEKGERGPPGRGPNGLPGAIGLPGDPGPASYGRNGRDGERGPPGVAGIPGVPGPPGPPGLPGFCEPASCTMQAGQRAFNKGPDP

SEQ ID NO: 801868 - protein, 241 aa, Homo sapiens
RAGGRALGWRLQQQRETRGNPGNPGLGVAATMTGSNMSDALANAVCQRCQARFSPAERIVNSNGELYHEHCFVCAQCFRPFPEGLFYEFEGRKYCEHDFQMLFAPCCGSCGEFIIGRVIKHFVCAKCEKPFLGHRHYEKKGLAYCETHYNQLFGDVCYNCSHVIEGDVVSALNKAWCVSCFSCSTCNSKLTLKNKFVEFDMKPVCKRCYEKFPLELKKRLKKLSELTSRKAQPKATDLNSA

SEQ ID NO: 801869 - protein, 554 aa, Homo sapiens
IGSALVWVPHGDVCGRGSQRREQSRMWACVAPVLGFLTVGRDPKGARSSLSSSADSALLSVSTGTGFPPGRWQPETSWVSCRHCGPHLSAVWGLPRPVPSQRDPTPASLSFQELPPRREQYPFYLELTLLPFGDPSAERELATSAGEAPTRPSRLGVWPQAAAPPLRGGPIAPAPGGPRPRPQGGCPAPWRPGWVRWPRRGCTGGASTGRARRQPRSNMSDALANAVCQRCQARFSPAERIVNSNGELYHEHCFVCAQCFRPFPEGLFYEFEGRKYCEHDFQMLFAPCCGSCGEFIIGRVIKAMNNNWHPGCFRCELCDVELADLGFVKNAGRHLCRPCHNREKAKGLGKYICQRCHLVIDEQPLMFRSDAYHPDHFNCTHCGKELTAEARELKGELYCLPCHDKMGVPICGACRRPIEGRVVNALGKQWHVEHFVCAKCEKPFLGHRHYEKKGLAYCETHYNQLFGDVCYNCSHVIEGDVVSALNKAWCVSCFSCSTCNSKLTLKNKFVEFDMKPVCKRCYEKFPLELKKRLKKLSELTSRKAQPKATDLNSA

SEQ ID NO: 801870 - protein, 189 aa, Homo sapiens
MFRSDAYHPDHFNCTHCGKELTAEARELKGELYCLPCHDKMGVPICGACRRPIEGRVVNALGKQWHVEHFVCAKCEKPFLGHRHYEKKGLAYCETHYNQLFGDVCYNCSHVIEGDVVSALNKAWCVSCFSCSTCNSKLTLKNKFVEFDMKPVCKRCYEKFPLELKKRLKKLSELTSRKAQPKATDLNSA

SEQ ID NO: 801871 - protein, 257 aa, Homo sapiens
MEHSAVQDGVQTPSSSRNRLYVFGPFFIWQNPEGRGHLCRPCHNREKAKGLGKYICQRCHLVIDEQPLMFRSDAYHPDHFNCTHCGKELTAEARELKGELYCLPCHDKMGVPICGACRRPIEGRVVNALGKQWHVEHFVCAKCEKPFLGHRHYEKKGLAYCETHYNQLFGDVCYNCSHVIEGDVVSALNKAWCVSCFSCSTCNSKLTLKNKFVEFDMKPVCKRCYEKFPLELKKRLKKLSELTSRKAQPKATDLNSA

SEQ ID NO: 801872 - protein, 188 aa, Homo sapiens
PCRRAGVAPGGCTLSSRKELTAEARELKGELYCLPCHDKMGVPICGACRRPIEGRVVNALGKQWHVEHFVCAKCEKPFLGHRHYEKKGLAYCETHYNQLFGDVCYNCSHVIEGDVVSALNKAWCVSCFSCSTCNSKLTLKNKFVEFDMKPVCKRCYEKFPLELKKRLKKLSELTSRKAQPKATDLNSA

SEQ ID NO: 801873 - protein, 245 aa, Homo sapiens
MRAHHAAAPGWHLTPGAEAAEGEARLGGDGDSQGYHQCLRGGVGSADPRHSQRCQSPLPSVNPERPAPAQTLLSVPFCHCCLLGPLWSPGVTGSWGHCCPRVTTVPRGHRSSPDATRPALCPCSHFVCAKCEKPFLGHRHYEKKGLAYCETHYNQLFGDVCYNCSHVIEGDVVSALNKAWCVSCFSCSTCNSKLTLKNKFVEFDMKPVCKRCYEKFPLELKKRLKKLSELTSRKAQPKATDLNSA

SEQ ID NO: 801874 - protein, 381 aa, Homo sapiens
RAGGRALGWRLQQQRETRGNPGNPGLGVAATMTGSNMSDALANAVCQRCQARFSPAERIVNSNGELYHEHCFVCAQCFRPFPEGLFYEFEGRKYCEHDFQMLFAPCCGSCGEFIIGRVIKAMNNNWHPGCFRCELCDVELADLGFVKNAGRHLCRPCHNREKAKGLGKYICQRCHLVIDEQPLMFRSDAYHPDHFNCTHCGKELTAEARELKGELYCLPCHDKMGVPICGACRRPIEGRVVNALGKQWHVEHFVCAKCEKPFLGHRHYEKKGLAYCETHYNQLSDSLLGPQLFGDVCYNCSHVIEGDVVSALNKAWCVSCFSCSTCNSKLTLKNKFVEFDMKPVCKRCYEKFPLELKKRLKKLSELTSRKAQPKATDLNSA

SEQ ID NO: 801875 - protein, 372 aa, Homo sapiens
RAGGRALGWRLQQQRETRGNPGNPGLGVAATMTGSNMSDALANAVCQRCQARFSPAERIVNSNGELYHEHCFVCAQCFRPFPEGLFYEFEGRKYCEHDFQMLFAPCCGSCGEFIIGRVIKAMNNNWHPGCFRCELCDVELADLGFVKNAGRHLCRPCHNREKAKGLGKYICQRCHLVIDEQPLMFRSDAYHPDHFNCTHCGKELTAEARELKGELYCLPCHDKMGVPICGACRRPIEGRVVNALGKQWHVEHFVCAKCEKPFLGHRHYEKKGLAYCETHYNQLFGDVCYNCSHVIEGDVVSALNKAWCVSCFSCSTCNSKLTLKNKFVEFDMKPVCKRCYEKFPLELKKRLKKLSELTSRKAQPKATDLNSA

SEQ ID NO: 801876 - protein, 372 aa, Homo sapiens; identical to SEQ ID NO: 801875

SEQ ID NO: 801877 - protein, 372 aa, Homo sapiens; identical to SEQ ID NO: 801875

SEQ ID NO: 801878 - protein, 68 aa, Homo sapiens
AGPWEAGPGRCLRGAVLEGQAGCMMALGWGVTACSYSDSLLGPQLFGDVCYNCSHVIEGDGTSLWSST

SEQ ID NO: 801879 - protein, 385 aa, Homo sapiens
AGHSWRLLSLARGCAKRARQLLFPSEKLLAALREGSTRGGGAASQPQSNMSDALANAVCQRCQARFSPAERIVNSNGELYHEHCFVCAQCFRPFPEGLFYEFEGRKYCEHDFQMLFAPCCGSCGEFIIGRVIKAMNNNWHPGCFRCELCDVELADLGFVKNAGRHLCRPCHNREKAKGLGKYICQRCHLVIDEQPLMFRSDAYHPDHFNCTHCGKELTAEARELKGELYCLPCHDKMGVPICGACRRPIEGRVVNALGKQWHVEHFVCAKCEKPFLGHRHYEKKGLAYCETHYNQLFGDVCYNCSHVIEGDVVSALNKAWCVSCFSCSTCNSKLTLKNKFVEFDMKPVCKRCYEKFPLELKKRLKKLSELTSRKAQPKATDLNSA

SEQ ID NO: 801880 - protein, 273 aa, Homo sapiens
VTGQSAFPYPGLSPFEAPSCSVKLQGSGLSSPGGGQAVGSGGSAPNAPASRRHLCRPCHNREKAKGLGKYICQRCHLVIDEQPLMFRSDAYHPDHFNCTHCGKELTAEARELKGELYCLPCHDKMGVPICGACRRPIEGRVVNALGKQWHVEHFVCAKCEKPFLGHRHYEKKGLAYCETHYNQLFGDVCYNCSHVIEGDVVSALNKAWCVSCFSCSTCNSKLTLKNKFVEFDMKPVCKRCYEKFPLELKKRLKKLSELTSRKAQPKATDLNSA

SEQ ID NO: 801881 - protein, 574 aa, Homo sapiens
IGSALVWVPHGDVCGRGSQRREQSRMWACVAPVLGFLTVGRDPKGARSSLSSSADSALLSVSTGTGFPPGRWQPETSWVSCRHCGPHLSAVWGLPRPVPSQRDPTPASLSFQELPPRREQYPFYLELTLLPFGDPSAERELATSAGEAPTRPSRLGVWPQAAAPPLRGGPIAPAPGGPRPRPQGGCPAPWRPGWVRWPRRGCTGGASTGRARRQPRSNMSDALANAVCQRCQARFSPAERIVNSNGELYHEHCFVCAQCFRPFPEGLFYEFEGRKYCEHDFQMLFAPCCGSCGEFIIGRVIKAMNNNWHPGCFRCELCDVELADLGFVKNAGRHLCRPCHNREKAKGLGKYICQRCHLVIDEQPLMFRSDAYHPDHFNCTHCGKELTAEARELKGELYCLPCHDKMGVPICGACRRPIEGRVVNALGKQWHVEVSQAGGHVASGWGVPQLRVMHFVCAKCEKPFLGHRHYEKKGLAYCETHYNQLFGDVCYNCSHVIEGDVVSALNKAWCVSCFSCSTCNSKLTLKNKFVEFDMKPVCKRCYEKFPLELKKRLKKLSELTSRKAQPKATDLNSA

SEQ ID NO: 801882 - protein, 134 aa, Homo sapiens
AGPWEAGPGRCLRGAVLEGQAGCMMALGWGVTACSYSDSLLGPQLFGDVCYNCSHVIEGDVVSALNKAWCVSCFSCSTCNSKLTLKNKFVEFDMKPVCKRCYEKFPLELKKRLKKLSELTSRKAQPKATDLNSA

SEQ ID NO: 801883 - protein, 372 aa, Homo sapiens; identical to SEQ ID NO: 801875

SEQ ID NO: 801884 - protein, 134 aa, Homo sapiens; identical to SEQ ID NO: 801882

SEQ ID NO: 801885 - protein, 842 aa, Homo sapiens
MAVRPGLWPALLGIVLAAWLRGSGAQQSATVANPVPGANPDLLPHFLVEPEDVYIVKNKPVLLVCKAVPATQIFFKCNGEWVRQVDHVIERSTDGSSGLPTMEVRINVSRQQVEKVFGLEEYWCQCVAWSSSGTTKSQKAYIRIAYLRKNFEQEPLAKEVSLEQGIVLPCRPPEGIPPAEVEWLRNEDLVDPSLDPNVYITREHSLVVRQARLADTANYTCVAKNIVARRRSASAAVIVYVDGSWSPWSKWSACGLDCTHWRSRECSDPAPRNGGEECQGTDLDTRNCTSDLCVHTASGPEDVALYVGLIAVAVCLVLLLLVLILVYCRKKEGLDSDVADSSILTSGFQPVSIKPSKADNPHLLTIQPDLSTTTTTYQGSLCPRQDGPSPKFQLTNGHLLSPLGGGRHTLHHSSPTSEAEEFVSRLSTQNYFRSLPRGTSNMTYGTFNFLGGRLMIPNTGISLLIPPDAIPRGKIYEIYLTLHKPEDVRLPLAGCQTLLSPIVSCGPPGVLLTRPVILAMDHCGEPSPDSWSLRLKKQSCEGSWEDVLHLGEEAPSHLYYCQLEASACYVFTEQLGRFALVGEALSVAAAKRLKLLLFAPVACTSLEYNIRVYCLHDTHDALKEVVQLEKQLGGQLIQEPRVLHFKDSYHNLRLSIHDVPSSLWKSKLLVSYQEIPFYHIWNGTQRYLHCTFTLERVSPSTSDLACKLWVWQVEGDGQSFSINFNITKDTRFAELLALESEAGVPALVGPSAFKIPFLIRQKIISSLDPPCRRGADWRTLAQKLHLDSHLSFFASKPSPTAMILNLWEARHFPNGNLSQLAAAVAGLGQPDAGLFTVSEAEC

SEQ ID NO: 801886 - protein, 957 aa, Homo sapiens
PAGTARIRDVQQAGAQQSATVANPVPGANPDLLPHFLVEPEDVYIVKNKPVLLVCKAVPATQIFFKCNGEWVRQVDHVIERSTDGSSEGDREGWRPMKPNRTLGTNTSQDQSLSRPQRRCQRPPCPAAGPTLSCWEGLQENRRVLFCPELRLQPPMAGTSERSLISSISQPKAIECFEVKKKAFLTHGRYHGSGATPPKTKDPKPETFCGQTGLPTMEVRINVSRQQVEKVFGLEEYWCQCVAWSSSGTTKSQKAYIRIAYLRKNFEQEPLAKEVSLEQGIVLPCRPPEGIPPAEVEWLRNEDLVDPSLDPNVYITREHSLVVRQARLADTANYTCVAKNIVARRRSASAAVIVYVDGSWSPWSKWSACGLDCTHWRSRECSDPAPRNGGEECQGTDLDTRNCTSDLCVHTASGPEDVALYVGLIAVAVCLVLLLLVLILVYCRKKEGLDSDVADSSILTSGFQPVSIKPSKADNPHLLTIQPDLSTTTTTYQGSLCPRQDGPSPKFQLTNGHLLSPLGGGRHTLHHSSPTSEAEEFVSRLSTQNYFRSLPRGTSNMTYGTFNFLGGRLMIPNTGISLLIPPDAIPRGKIYEIYLTLHKPEDVRLPLAGCQTLLSPIVSCGPPGVLLTRPVILAMDHCGEPSPDSWSLRLKKQSCEGSWEDVLHLGEEAPSHLYYCQLEASACYVFTEQLGRFALVGEALSVAAAKRLKLLLFAPVACTSLEYNIRVYCLHDTHDALKEVVQLEKQLGGQLIQEPRVLHFKDSYHNLRLSIHDVPSSLWKSKLLVSYQEIPFYHIWNGTQRYLHCTFTLERVSPSTSDLACKLWVWQVEGDGQSFSINFNITKDTRFAELLALESEAGVPALVGPSAFKIPFLIRQKIISSLDPPCRRGADWRTLAQKLHLDSHLSFFASKPSPTAMILNLWEARHFPNGNLSQLAAAVAGLGQPDAGLFTVSEAEC

SEQ ID NO: 801887 - protein, 842 aa, Homo sapiens; identical to SEQ ID NO: 801885

SEQ ID NO: 801888 - protein, 888 aa, Homo sapiens
PAGTARIRDVQQAGAQQSATVANPVPGANPDLLPHFLVEPEDVYIVKNKPVLLVCKAVPATQIFFKCNGEWVRQVDHVIERSTDGSSGLPTMEVRINVSRQQVEKVFGLEEYWCQCVAWSSSGTTKSQKAYIRIAYLRKNFEQEPLAKEVSLEQGIVLPCRPPEGIPPAEVEWLRNEDLVDPSLDPNVYITREHSLVVRQARLADTANYTCVAKNIVARRRSASAAVIVYVNGGWSTWTEWSVCSASCGRGWQKRSRSCTNPAPLNGGAFCEGQNVQKTACATLCPVDGSWSPWSKWSACGLDCTHWRSRECSDPAPRNGGEECQGTDLDTRNCTSDLCVHTASGPEDVALYVGLIAVAVCLVLLLLVLILVYCRKKEGLDSDVADSSILTSGFQPVSIKPSKADNPHLLTIQPDLSTTTTTYQGSLCPRQDGPSPKFQLTNGHLLSPLGGGRHTLHHSSPTSEAEEFVSRLSTQNYFRSLPRGTSNMTYGTFNFLGGRLMIPNTGISLLIPPDAIPRGKIYEIYLTLHKPEDVRLPLAGCQTLLSPIVSCGPPGVLLTRPVILAMDHCGEPSPDSWSLRLKKQSCEGSWEDVLHLGEEAPSHLYYCQLEASACYVFTEQLGRFALVGEALSVAAAKRLKLLLFAPVACTSLEYNIRVYCLHDTHDALKEVVQLEKQLGGQLIQEPRVLHFKDSYHNLRLSIHDVPSSLWKSKLLVSYQEIPFYHIWNGTQRYLHCTFTLERVSPSTSDLACKLWVWQVEGDGQSFSINFNITKDTRFAELLALESEAGVPALVGPSAFKIPFLIRQKIISSLDPPCRRGADWRTLAQKLHLDSHLSFFASKPSPTAMILNLWEARHFPNGNLSQLAAAVAGLGQPDAGLFTVSEAEC

SEQ ID NO: 801889 - protein, 713 aa, Homo sapiens
MAVRPGLWPALLGIVLAAWLRGSGAQQSATVANPVPGANPDLLPHFLVEPEDVYIVKNKPVLLVCKAVPATQIFFKCNGEWVRQVDHVIERSTDGSSGLPTMEVRINVSRQQVEKVFGLEEYWCQCVAWSSSGTTKSQKAYIRIAYLRKNFEQEPLAKEVSLEQGIVLPCRPPEGIPPAEVEWLRNEDLVDPSLDPNVYITREHSLVVRQARLADTANYTCVAKNIVARRRSASAAVIVYVDGSWSPWSKWSACGLDCTHWRSRECSDPAPRNGGEECQGTDLDTRNCTSDLCVHTASGPEDVALYVGLIAVAVCLVLLLLVLILVYCRKKEGLDSDVADSSILTSGFQPVSIKPSKADNPHLLTIQPDLSTTTTTYQGSLCPRQDGPSPKFQLTNGHLLSPLGGGRHTLHHSSPTSEAEEFVSRLSTQNYFRSLPRGTSNMTYGTFNFLGGRLMIPNTGISLLIPPDAIPRGKIYEIYLTLHKPEDVRLPLAGCQTLLSPIVSCGPPGVLLTRPVILAMDHCGEPSPDSWSLRLKKQSCEGSWEDVLHLGEEAPSHLYYCQLEASACYVFTEQLGRFALVGEALSVAAAKRLKLLLFAPVACTSLEYNIRVYCLHDTHDALKEVVQLEKQLGGQLIQEPRVLHFKDSYHNLRLSIHDVPSSLWKSKLLVSYQEIPFYHIWNGTQRYLHCTTALPPPEAEEFVSRLSTQNYFR

SEQ ID NO: 801890 - protein, 77 aa, Homo sapiens
QKSVRRHFLFKPARSDVAFEERRRGSIINPHFLLQTADATLTAFSAKPAAGKASSPKRKRQDIENHAFPVGRTDDEP

SEQ ID NO: 801891 - protein, 128 aa, Homo sapiens
MVTEPAVSFLGVGDDGERGKNRPLAGPWLGEVLRSAGTLRALCVYRPIPAPTTPSLRPREGHVSMPYRDLKPESLAKFGKKRSPLRAQEPSYSLELFHSRPSLTRVQLKLNIHTHTLTHKLCEPSESK

SEQ ID NO: 801892 - protein, 213 aa, Homo sapiens
MSPDERRKKTRCLRRPKGRGCQEPWRANSSQPPWCKVPRGEEFWSSAYLERCLNSEPGIVSNSRRSGNRLFRCPGALQTNKQQKQMVTEPAVSFLGVGDDGERGKNRPLAGPWLGEVLRSAGTLRALCVYRPIPAPTTPSLRPREGHVSMPYRDLKPESLAKFGKKRSPLRAQEPSYSLELFHSRPSLTRVQLKLNIHTHTLTHKLCEPSESK

SEQ ID NO: 801893 - protein, 102 aa, Homo sapiens
MMGKEERIVRSPDPGLEKFCAPLGLCGPFASTDLSLPRLPLHSDPAFPSVNQNITNCLRIRPTSSPKPGCDRRKPKPELTFPRTRRASLDSQKPCGKGPKIW

SEQ ID NO: 801894 - protein, 77 aa, Homo sapiens
AARIPGLAETLRKRPQDLVRACQLRPPCRGLSPAFLKELKAFGDKSEGVCFKNQMVSWNLTSERFIPSEALTTPIHS

SEQ ID NO: 801895 - protein, 530 aa, Homo sapiens
MRRLWGAARKPSGAGWEKEWAEAPQEAPGAWSGRLGPGRSGRKGRAVPGWASWPAHLALAARPARHLGGAGQGPRPLHSGTAPFHSRASGERQRRLEPQLQHESRCRSSTPADAWRAEAALPVRAMGAPWGSPTAAAGGRRGWRRGRGLPWTVCVLAAAGLTCTALITYACWGQLPPLPWASPTPSRPVGVLLWWEPFGGRDSAPRPPPDCRLRFNISGCRLLTDRASYGEAQAVLFHHRDLVKGPPDWPPPWGIQAHTAEEVDLRVLDYEEAAAAAEALATSSPRPPGQRWVWMNFESPSHSPGLRSLASNLFNWTLSYRADSDVFVPYGYLYPRSHPGDPPSGLAPPLSRKQGLVAWVVSHWDERQARVRYYHQLSQHVTVDVFGRGGPGQPVPEIGLLHTVARYKFYLAFENSQHLDYITEKLWRNALLAGAVPVVLGPDRANYERFVPRGAFIHVDDFPSASSLASYLLFLDRNPAVYRRYFHWRRSYAVHITSFWDEPWCRVCQAVQRAGDRPKSIRNLASWFER

SEQ ID NO: 801896 - protein, 530 aa, Homo sapiens; identical to SEQ ID NO: 801895

SEQ ID NO: 801897 - protein, 108 aa, Homo sapiens
GKQRSWELAVVPGEELLKHETKAQTLLYEKQCSSNLLRADIDLPRSKTVGGDLSAGSRRGRGRRREARAAGTKAADSRRQRLPGREHNPRPYSSEVPHRLLGIKFTFS

SEQ ID NO: 801898 - protein, 81 aa, Homo sapiens
  misc_feature (1)..(2): Xaa can be any naturally occurring amino acid
  misc_feature (5)..(5): Xaa can be any naturally occurring amino acid
XXGTXGDLHVKSYVEMLEFYGDRDGAQEVLTNYAYDEKFPSNPNAHIYLYNFLKRQKAPRSKLISVLKHLQKISIMYSTLR

SEQ ID NO: 801899 - protein, 450 aa, Homo sapiens
MSDFSEELKGPVTDDEEVETSVLSGAGMHFPWLQTYVETVAIGGKRRKDFAQTTSACLSFIQEALLKHQWQQAAEYMYSYFQTLEDSDSYKRQAAPEIIWKLGSEILFYHPKSNMESFNTFANRMKNIGVMNYLKISLQHALYLLHHGMLKDAKRNLSEAETWRHGENTSSREILINLIQAYKGLLQYYTWSEKKMELSKLDKDDYAYNAVAQDVFNHSWKTSANISALIKIPGVWDPFVKSYVEMLEFYGDRDGAQEVLTNYAYDEKFPSNPNAHIYLYNFLKRQKAPRSKLISVLKILYQIVPSHKLMLEFHTLLRKSEKEEHRKLGLEVLFGVLDFAGCTKNITAWKYLAKYLKNILMGNHLAWVQEEWNSRKNWWPGFHFSYFWAKSDWKEDTALACEKAFVAGLLLGKGCRYFRYILKQDHQILGKKIKRMKRSVKKYSIVNPRL

SEQ ID NO: 801900 - protein, 336 aa, Homo sapiens
MESFNTFANRMKNIGVMNYLKISLQHALYLLHHGMLKDAKRNLSEAETWRHGENTSSREILINLIQAYKGLLQYYTWSEKKMELSKLDKDDYAYNAVAQDVFNHSWKTSANISALIKIPGVWDPFVKSYVEMLEFYGDRDGAQEVLTNYAYDEKFPSNPNAHIYLYNFLKRQKAPRSKLISVLKILYQIVPSHKLMLEFHTLLRKSEKEEHRKLGLEVLFGVLDFAGCTKNITAWKYLAKYLKNILMGNHLAWVQEEWNSRKNWWPGFHFSYFWAKSDWKEDTALACEKAFVAGLLLGKGCRYFRYILKQDHQILGKKIKRMKRSVKKYSIVNPRL

SEQ ID NO: 801901 - protein, 336 aa, Homo sapiens; identical to SEQ ID NO: 801900

SEQ ID NO: 801902 - protein, 299 aa, Homo sapiens [sequence omitted]

SEQ ID NO: 801903 - protein, 95 aa, Homo sapiens
PRPGLLSPSRSRLWGALTPVRRPEVGLRRLLLHSRKIMYQPSRGAARRLGPCLRAYQARPQGPDMVHSFTDPLPFPGLELFCTPSFGGFTADPPP

SEQ ID NO: 801904 - protein, 74 aa, Homo sapiens
QSPSPSVSLPLFPRTYDAYSTFYLNSSGLICRHRLDKLMPSHSPPTPVKKLLVGALVALGLSEPEPDLNLCSKP

SEQ ID NO: 801905 - protein, 352 aa, Homo sapiens
PRPGLLSPSRSRLWGALTPVRRPEVGLRRLLLHSRKIMYQPSRGAARRLGPCLRAYQARPQDQLYPGTLPFPPLWPHSTTTTSPSSPLFWSPLPPRLPTQRLPQVPPLPLPQIQALSSAWVVLPPGKGEEGPGPELHSGCLDGLRSLFEGPPCPYPGAWIPFQVPGTAHPSPATPSGDPSMEEHLSVMYERLRQELPKLFLQSHDYSLYSLDVEFINEILNIRTKGRTWYILSLTLCRFLAWNYFAHLRLEVLQLTRHPENWTLQARWRLVGLPVHLLFLRFYKRDKDEHYRTYDAYSTFYLNSSGLICRHRLDKLMPSHSPPTPVKKLLVGALVALGLSEPEPDLNLCSKP

SEQ ID NO: 801906 - protein, 352 aa, Homo sapiens; identical to SEQ ID NO: 801905

SEQ ID NO: 801907 - protein, 165 aa, Homo sapiens
MYERLRQELPKLFLQSHDYSLYSLDVEFINEILNIRTKGRTWYILSLTLCRFLAWNYFAHLRLEVLQLTRHPENWTLQARWRLVGLPVHLLFLRFYKRDKDEHYRTYDAYSTFYLNSSGLICRHRLDKLMPSHSPPTPVKKLLVGALVALGLSEPEPDLNLCSKP

SEQ ID NO: 801908 - protein, 319 aa, Homo sapiens
PRPGLLSPSRSRLWGALTPVRRPEVGLRRLLLHSRKIMYQPSRGAARRLGPCLRAYQARPQDQLYPGTLPFPPLWPHSTTTTSPSSPLFWSPLPPRLPTQRLPQVPPLPLPQIQALSSAWVVLPPGKGEEGPGPELHSGCLDGLRSLFEGPPCPYPGAWIPFQVPGTAHPSPATPSGDPSMEEHLSVMYERLRQELPKLFLQSHDYSLYSLDVEFINEILNIRTKGRTWYILSLTLCRFLAWNYFAHLRLEVLQLTRHPENWTLQARWRLVGLPVHLLFLRFYKRDKDEHYRTYDAYSTFYLNSSGLICRHRLDKVSPR

SEQ ID NO: 801909 - protein, 292 aa, Homo sapiens
PRPGLLSPSRSRLWGALTPVRRPEVGLRRLLLHSRKIMYQPSRGAARRLGPCLRAYQARPQDQLYPGTLPFPPLWPHSTTTTSPSSPLFWSPLPPRLPTQRLPQVPPLPLPQIQALSSAWVVLPPGKGEEGPGPELHSGCLDGLRSLFEGPPCPYPGAWIPFQVPGTAHPSPATPSGDPSMEEHLSVMYERLRQELPKLFLQSHDYSLYSLDVEFINEILNIRTKGRTWYILSLTLCRFLAWNYFAHLRLEVLQLTRHPENWTLQARWRLVGLPVHLLFLRFYKRDKDEHYR

SEQ ID NO: 801910 - protein, 104 aa, Homo sapiens
MNAHVVVGPREDDGEWKITGTDNDTEGRKAKKRQATQEKNQEKWKTDKDKKKGGGPRSRTREHLSVMYERLRQELPKLFLQSHDYSLYSLDVEFINEILNIRTK

SEQ ID NO: 801911 - protein, 148 aa, Homo sapiens
LVRPRSKRDEFINEILNIRTKGRTWYILSLTLCRFLAWNYFAHLRLEVLQLTRHPENWTLQARWRLVGLPVHLLFLRFYKRDKDEHYRTYDAYSTFYLNSSGLICRHRLDKLMPSHSPPTPVKKLLVGALVALGLSEPEPDLNLCSKP

SEQ ID NO: 801912 - protein, 429 aa, Homo sapiens
ALQRVDRLGVAGAGGRRCRACRARTSVLPGLRAVRRGQGQAAGRVCVAPDSPRLPVPRGDLKGRGREIRSPAAAPSRSSPAQTRPAGRPQQPARLALGERSWQEGRPVCTRFGPLRPGWQDGHAPSRDGASRTPSGTEDQLYPGTLPFPPLWPHSTTTTSPSSPLFWSPLPPRLPTQRLPQVPPLPLPQIQALSSAWVVLPPGKGEEGPGPELHSGCLDGLRSLFEGPPCPYPGAWIPFQVPGTAHPSPATPSGDPSMEEHLSVMYERLRQELPKLFLQSHDYSLYSLDVEFINEILNIRTKGRTWYILSLTLCRFLAWNYFAHLRLEVLQLTRHPENWTLQARWRLVGLPVHLLFLRFYKRDKDEHYRTYDAYSTFYLNSSGLICRHRLDKLMPSHSPPTPVKKLLVGALVALGLSEPEPDLNLCSKP

SEQ ID NO: 801913 - protein, 172 aa, Homo sapiens
MEEHLSVMYERLRQELPKLFLQSHDYSLYSLDVEFINEILNIRTKGRTWYILSLTLCRFLAWNYFAHLRLEVLQLTRHPENWTLQARWRLVGLPVHLLFLRFYKRDKDEHYRTYDAYSTFYLNSSGLICRHRLDKLMPSHSPPTPVKKLLVGALVALGLSEPEPDLNLCSKP

SEQ ID NO: 801914 - protein, 319 aa, Homo sapiens; identical to SEQ ID NO: 801908

SEQ ID NO: 801915 - protein, 95 aa, Homo sapiens; identical to SEQ ID NO: 801903

SEQ ID NO: 801916 - protein, 996 aa, Homo sapiens
MKIPNIGNVMNKFEILGVVGEGAYGVVLKCRHKETHEIVAIKKFKDSEENEEVKETTLRELKMLRTLKQENIVELKEAFRRRGKLYLVFEYVEKNMLELLEEMPNGVPPEKVKSYIYQLIKAIHWCHKNDIVHRDIKPENLLISHNDVLKLCDFGFARNLSEGNNANYTEYVATRWYRSPELLLGAPYGKSVDMWSVGCILGELSDGQPLFPGESEIDQLFTIQKVLGPLPSEQMKLFYSNPRFHGLRFPAVNHPQSLERRYLGILNSVLLDLMKNLLKLDPADRYLTEQCLNHPTFQTQRLLDRSPSRSAKRKPYHVESSTLSNRNQAGKSTALQSHHRSNSKDIQNLSVGLPRADEGLPANESFLNGNLAGASLSPLHTKTYQASSQPGSTSKDLTNNNIPHLLSPKEAKSKTEFDFNIDPKPSEGPGTKYLKSNSRSQQNRHSFMESSQSKAGTLQPNEKQSRHSYIDTIPQSSRSPSYRTKAKSHGALSDSKSVSNLSEARAQIAEPSTSRYFPSSCLDLNSPTSPTPTRHSDTRTLLSPSGRNNRNEGTLDSRRTTTRHSKTMEELKLPEHMDSSHSHSLSAPHESFSYGLGYTSPFSSQQRPHRHSMYVTRDKVRAKGLDGSLSIGQGMAARANSLQLLSPQPGEQLPPEMTVARSSVKETSREGTSSFHTRQKSEGGVYHDPHSDDGTAPKENRHLYNDPVPRRVGSFYRVPSPRPDNSFHENISHSEQLKEKEKQGFFRSMKKKKKKSQTVPNSDSPDLLTLQKSIHSASTPSSRPKEWRPEKISDLQTQSQPLKSLRKLLHLSSASNHPASSDPRFQPLTAQQTKNSFSEIRIHPLSQASGGSSNIRQEPAPKGRPALQLPDGGCDGRRQRHHSGPQDRRFMLRTTEQQGEYFCCGDPKKPHTPCVPNRALHRPISSPAPYPVLQVRGTSMCPTLQVRGTDAFSCPTQQSGFSFFVRHVMREALIHRAQVNQAALLTYHENAALTGK

SEQ ID NO: 801917 - protein, 996 aa, Homo sapiens; identical to SEQ ID NO: 801916

SEQ ID NO: 801918 - protein, 1030 aa, Homo sapiens
MKIPNIGNVMNKFEILGVVGEGAYGVVLKCRHKETHEIVAIKKFKDSEENEEVKETTLRELKMLRTLKQENIVELKEAFRRRGKLYLVFEYVEKNMLELLEEMPNGVPPEKVKSYIYQLIKAIHWCHKNDIVHRDIKPENLLISHNDVLKLCDFGFARNLSEGNNANYTEYVATRWYRSPELLLGAPYGKSVDMWSVGCILGELSDGQPLFPGESEIDQLFTIQKVLGPLPSEQMKLFYSNPRFHGLRFPAVNHPQSLERRYLGILNSVLLDLMKNLLKLDPADRYLTEQCLNHPTFQTQRLLDRSPSRSAKRKPYHVESSTLSNRNQAGKSTALQSHHRSNSKDIQNLSVGLPRADEGLPANESFLNGNLAGASLSPLHTKTYQASSQPGSTSKDLTNNNIPHLLSPKEAKSKTEFDFNIDPKPSEGPGTKYLKSNSRSQQNRHSFMESSQSKAGTLQPNEKQSRHSYIDTIPQSSRSPSYRTKAKSHGALSDSKSVSNLSEARAQIAEPSTSRYFPSSCLDLNSPTSPTPTRHSDTRTLLSPSGRNNRNEGTLDSRRTTTRHSKTMEELKLPEHMDSSHSHSLSAPHESFSYGLGYTSPFSSQQRPHRHSMYVTRDKVRAKGLDGSLSIGQGMAARANSLQLLSPQPGEQLPPEMTVARSSVKETSREGTSSFHTRQKSEGGVYHDPHSDDGTAPKENRHLYNDPVPRRVGSFYRVPSPRPDNSFHENNVSTRVSSLPSESSSGTNHSKRQPAFDPWKSPENISHSEQLKEKEKQGFFRSMKKKKKKSQTVPNSDSPDLLTLQKSIHSASTPSSRPKEWRPEKISDLQTQSQPLKSLRKLLHLSSASNHPASSDPRFQPLTAQQTKNSFSEIRIHPLSQASGGSSNIRQEPAPKGRPALQLPDGGCDGRRQRHHSGPQDRRFMLRTTEQQGEYFCCGDPKKPHTPCVPNRALHRPISSPAPYPVLQVRGTSMCPTLQVRGTDAFSCPTQQSGFSFFVRHVMREALIHRAQVNQAALLTYHENAALTGK

SEQ ID NO: 801919 - protein, 289 aa, Homo sapiens
CDLGVSESGLFGVERRSGKSPENISHSEQLKEKEKQGFFRSMKKKKKKSQTVPNSDSPDLLTLQKSIHSASTPSSRPKEWRPEKISDLQTQSQPLKSLRKLLHLSSASNHPASSDPRFQPLTAQQTKNSFSEIRIHPLSQASGGSSNIRQEPAPKGRPALQLPDGGCDGRRQRHHSGPQDRRFMLRTTEQQGEYFCCGDPKKPHTPCVPNRALHRPISSPAPYPVLQVRGTSMCPTLQVRGTDAFSCPTQQSGFSFFVRHVMREALIHRAQVNQAALLTYHENAALTGK

SEQ ID NO: 801920 - protein, 260 aa, Homo sapiens
AAHTASHNHTLTATNPQSHAHADAPCGTCTHNHTCVQSGRHNHTCIEASLWTPSASHRGGSPAVFDWFFEAACPASLQEDPPILRQFPPDFRDQEAMQMVPKFCFPFDVEREPPSPAVQHFTFALTDLAGNRRFGFCRLRAGTQSCLCILSHLPWFEVFYKLLNTVGDLLAQDQVTEAEELLQNLFQQSLSGPQASVGLELGSGVTVSSGQGIPPPTRGNSKPLTCFRGPRDSGRLAIPSLEKQGTYSETGWEDSDLTRT

SEQ ID NO: 801921 - protein, 233 aa, Homo sapiens [sequence omitted]

SEQ ID NO: 801922 - protein, 812 aa, Homo sapiens
TQEAEPAWGPAYTGPQDPWGEGPAGLALQGPWNPELNPPILRQFPPDFRDQEAMQMVPKFCFPFDVEREPPSPAVQHFTFALTDLAGNRRFGFCRLRAGTQSCLCILSHLPWFEVFYKLLNTVGDLLAQDQVTEAEELLQNLFQQSLSGPQASVGLELGSGVTVSSGQGIPPPTRGNSKPLSCFVAPDSGRLPSIPENRNLTELVVAVTDENIVGLFAALLAERRVLLTASKLSTLTSCVHASCALLYPMRWEHVLIPTLPPHLLDYCCAPMPYLIGVHASLAERVREKALEDVVVLNVDANTLETTFNDVQALPPDVVSLLRLRLRKVALAPGEGVSRLFLKAQALLFGGYRDALVCSPGQPVTFSEEVFLAQKPGAPLQAFHRRAVHLQLFKQFIEARLEKLNKGEGFSDQFEQEITGCGASPGALRSYQLWADNLKKGGGALLHSVKAKTQPAVKNMYRSAKSGLKGVQSLLMYKDGDSVLQRGGSLRAPALPSRSDRLQQRLPITQHFGKFENRPLRPSRRRQLEEGTSEPPGAGTPPLSPEDEGCPWAEEALDSSFLGSGEELDLLSEILDSLSMGAKSAGSLRPSQSLDCCHRGDLDSCFSLPNIPRWQPDDKKLPEPEPQPLSLPSLQNASSLDATSSSKDSRSQLIPSESDQEVTSPSQSSTASADPSIWGDPKPSPLTEPLILHLTPSHKAAEDSTAQENPTPWLSTAPTEPSPPESPQILAPTKPNFDIAWTSQPLDPSSDPSSLEDPRARPPKALLAERAHLQPREEPGALNSPATPTSNCQKSQPSSRPRVADLKKCFEG

SEQ ID NO: 801923 - protein, 309 aa, Homo sapiens
IFSAEAQEKFGKDKSIGSSHRRRQLEEGTSEPPGAGTPPLSPEDEGCPWAEEALDSSFLGSGEELDLLSEILDSLSMGAKSAGSLRPSQSLDCCHRGDLDSCFSLPNIPRWQPDDKKLPEPEPQPLSLPSLQNASSLDATSSSKDSRSQLIPSESDQEVTSPSQSSTASADPSIWGDPKPSPLTEPLILHLTPSHKAAEDSTAQENPTPWLSTAPTEPSPPESPQILAPTKPNFDIAWTSQPLDPSSDPSSLEDPRARPPKALLAERAHLQPREEPGALNSPATPTSNCQKSQPSSRPRVADLKKCFEG

SEQ ID NO: 801924 - protein, 284 aa, Homo sapiens
LEDLQRHKEAGTPPLSPEDEGCPWAEEALDSSFLGSGEELDLLSEILDSLSMGAKSAGSLRPSQSLDCCHRGDLDSCFSLPNIPRWQPDDKKLPEPEPQPLSLPSLQNASSLDATSSSKDSRSQLIPSESDQEVTSPSQSSTASADPSIWGDPKPSPLTEPLILHLTPSHKAAEDSTAQENPTPWLSTAPTEPSPPESPQILAPTKPNFDIAWTSQPLDPSSDPSSLEDPRARPPKALLAERAHLQPREEPGALNSPATPTSNCQKSQPSSRPRVADLKKCFEG

SEQ ID NO: 801925 - protein, 87 aa, Homo sapiens
RLLRWTFDKLLFDIAWTSQPLDPSSDPSSLEDPRARPPKALLAERAHLQPREEPGALNSPATPTSNCQKSQPSSRPRVADLKKCFEG

SEQ ID NO: 801926 - protein, 506 aa, Homo sapiens
MESRAEGGSPAVFDWFFEAACPASLQEDPPILRQFPPDFRDQEAMQMVPKFCFPFDVEREPPSPAVQHFTFALTDLAGNRRFGFCRLRAGTQSCLCILSHLPWFEVFYKLLNTVGDLLAQDQVTEAEELLQNLFQQSLSGPQASVGLELGSGVTVSSGQGIPPPTRGNSKPLSCFVAPDSGRLPSIPENRNLTELVVAVTDENIVGLFAALLAERRVLLTASKLSTLTSCVHASCALLYPMRWEHVLIPTLPPHLLDYCCAPMPYLIGVHASLAERVREKALEDVVVLNVDANTLETTFNDVQALPPDVVSLLRLRLRKVALAPGEGVSRLFLKAQALLFGGYRDALVCSPGQPVTFSEEVFLAQKPGAPLQAFHRRAVHLQLFKQFIEARLEKLNKGEGFSDQFEQEITGCGASPGALRSYQLWADNLKKGGGALLHSVKAKTQPAVKNMYRSAKSGLKGVQSLLMYKVRSTGRVQWLTPVIPALWEAEAGGLLEPRSLRPAWAI

SEQ ID NO: 801927 - protein, 103 aa, Homo sapiens
MWHPLHTHPSPASLSPPILQSPEVLSPPPFAEPAPSPQQETPAGRGNFRAPRGGVRQKGNSSVESGRPGLMGRRVPKLQSSLTRAGGLGQISEAAHPHPGHPH

SEQ ID NO: 801928 - protein, 803 aa, Homo sapiens
MESRAEGGSPAVFDWFFEAACPASLQEDPPILRQFPPDFRDQEAMQMVPKFCFPFDVEREPPSPAVQHFTFALTDLAGNRRFGFCRLRAGTQSCLCILSHLPWFEVFYKLLNTVGDLLAQDQVTEAEELLQNLFQQSLSGPQASVGLELGSGVTVSSGQGIPPPTRGNSKPLSCFVAPDSGRLPSIPENRNLTELVVAVTDENIVGLFAALLAERRVLLTASKLSTLTSCVHASCALLYPMRWEHVLIPTLPPHLLDYCCAPMPYLIGVHASLAERVREKALEDVVVLNVDANTLETTFNDVQALPPDVVSLLRLRLRKVALAPGEGVSRLFLKAQALLFGGYRDALVCSPGQPVTFSEEVFLAQKPGAPLQAFHRRAVHLQLFKQFIEARLEKLNKGEGFSDQFEQEITGCGASPGALRSYQLWADNLKKGGGALLHSVKAKTQPAVKNMYRSAKSGLKGVQSLLMYKDGDSVLQRGGSLRAPALPSRSDRLQQRLPITQHFGKFENRPLRPSRRRQLEEGTSEPPGAGTPPLSPEDEGCPWAEEALDSSFLGSGEELDLLSEILDSLSMGAKSAGSLRPSQSLDCCHRGDLDSCFSLPNIPRWQPDDKKLPEPEPQPLSLPSLQNASSLDATSSSKDSRSQLIPSESDQEVTSPSQSSTASADPSIWGDPKPSPLTEPLILHLTPSHKAAEDSTAQENPTPWLSTAPTEPSPPESPQILAPTKPNFDIAWTSQPLDPSSDPSSLEDPRARPPKALLAERAHLQPREEPGALNSPATPTSNCQKSQPSSRPRVADLKKCFEG

SEQ ID NO: 801929 - protein, 108 aa, Homo sapiens
LRVLGALLGSGDILRQLGCPGLSNSPSHSREPPSPAVQHFTFALTDLAGNRRFGFCRLRAGTQSCLCILSHLPWFEVFYKLLNTVGDLLAQDQVRPAPLSLLWESQPP

SEQ ID NO: 801930 - protein, 668 aa, Homo sapiens
MISKGVRVVTHYPAVDGEGEQETGDVGNAAGRDLALEGPGPDSTPRHRSPADLVRPRVLRAPVPHALGARADPHAAPTPAGLLLRAHALPHWSARQSRRGERGSTQDDGDVRVPPSSTSPDALLCQGLPGSERPTPLFLQRVREKALEDVVVLNVDANTLETTFNDVQALPPDVVSLLRLRLRKVALAPGEGVSRLFLKAQALLFGGYRDALVCSPGQPVTFSEEVFLAQKPGAPLQAFHRRAVHLQLFKQFIEARLEKLNKGEGFSDQFEQEITGCGASPGALRSYQLWADNLKKGGGALLHSVKAKTQPAVKNMYRSAKSGLKGVQSLLMYKDGDSVLQRGGSLRAPALPSRSDRLQQRLPITQHFGKFENRPLRPSRRRQLEEGTSEPPGAGTPPLSPEDEGCPWAEEALDSSFLGSGEELDLLSEILDSLSMGAKSAGSLRPSQSLDCCHRGDLDSCFSLPNIPRWQPDDKKLPEPEPQPLSLPSLQNASSLDATSSSKDSRSQLIPSESDQEVTSPSQSSTASADPSIWGDPKPSPLTEPLILHLTPSHKAAEDSTAQENPTPWLSTAPTEPSPPESPQILAPTKPNFDIAWTSQPLDPSSDPSSLEDPRARPPKALLAERAHLQPREEPGALNSPATPTSNCQKSQPSSRPRVADLKKCFEG

SEQ ID NO: 801931 - protein, 355 aa, Homo sapiens
AGITGAHHHPRLIFVFLVETGFHHVGQAGLELLTSGDPLTLASQSAGITVVSHHARPLQNRPLRPSRRRQLEEGTSEPPGAGTPPLSPEDEGCPWAEEALDSSFLGSGEELDLLSEILDSLSMGAKSAGSLRPSQSLDCCHRGDLDSCFSLPNIPRWQPDDKKLPEPEPQPLSLPSLQNASSLDATSSSKDSRSQLIPSESDQEVTSPSQSSTASADPSIWGDPKPSPLTEPLILHLTPSHKAAEDSTAQENPTPWLSTAPTEPSPPESPQILAPTKPNFDIAWTSQPLDPSSDPSSLEDPRARPPKALLAERAHLQPREEPGALNSPATPTSNCQKSQPSSRPRVADLKKCFEG

SEQ ID NO: 801932 - protein, 803 aa, Homo sapiens; identical to SEQ ID NO: 801928

SEQ ID NO: 801933 - protein, 463 aa, Homo sapiens
MESRAEGGSPAVFDWFFEAACPASLQEDPPILRQFPPDFRDQEAMQMVPKFCFPFDVEREPPSPAVQHFTFALTDLAGNRRFGFCRLRAGTQSCLCILSHLPWFEVFYKLLNTVGDLLAQDQVTEAEELLQNLFQQSLSGPQASVGLELGSGVTVSSGQGIPPPTRGNSKPLSCFVAPDSGRLPSIPENRNLTELVVAVTDENIVGLFAALLAERRVLLTASKLSTLTSCVHASCALLYPMRWEHVLIPTLPPHLLDYCCAPMPYLIGVHASLAERVREKALEDVVVLNVDANTLETTFNDVQALPPDVVSLLRLRLRKVALAPGEGVSRLFLKAQALLFGGYRDALVCSPGQPVTFSEEVFLAQKPGAPLQAFHRRAVHLQLFKQFIEARLEKLNKGEGFSDQFEQEITGCGASKGGGALLHSVKAKTQPAVKNMYRSARVVEGGAELLMLRGGTAGKGGPR

SEQ ID NO: 801934 - protein, 87 aa, Homo sapiens
ARDGFYILTAGRLRSAGIQMCLLLFLIYCPPPQFIEARLEKLNKGEGFSDQFEQEITGCGASQVSPESSPWVPHYPPPAPPASASLR

SEQ ID NO: 801935 - protein, 465 aa, Homo sapiens
MNVTSLFSFTSPAVKRLLGWKQGDEEEKWAEKAVDALVKKLKKKKGAMEELEKALSCPGQPSNCVTIPRSLDGRLQVSHRKGLPHVIYCRVWRWPDLQSHHELKPLECCEFPFGSKQKEVCINPYHYKRVESPVLPPVLVPRHSEYNPQHSLLAQFRNLGQNEPHMPLNATFPDSFQQPNSHPFPHSPNSSYPNSPGSSSSTYPHSPTSSDPGSPFQMPADTPPPAYLPPEDPMTQDGSQPMDTNMMAPPLPSEINRGDVQAVAYEEPKHWCSIVYYELNNRVGEAFHASSTSVLVDGFTDPSNNKNRFCLGLLSNVNRNSTIENTRRHIGKGVHLYYVGGEVYAECLSDSSIFVQSRNCNYHHGFHPTTVCKIPSGCSLKIFNNQEFAQLLAQSVNHGFETVYELTKMCTIRMSFVKGWGAEYHRQDVTSTPCWIEIHLHGPLQWLDKVLTQMGSPHNPISSVS

SEQ ID NO: 801936 - protein, 465 aa, Homo sapiens; identical to SEQ ID NO: 801935

SEQ ID NO: 801937 - protein, 368 aa, Homo sapiens
MNVTSLFSFTSPAVKRLLGWKQGDEEEKWAEKAVDALVKKLKKKKGAMEELEKALSCPGQPSNCVTIPRSLDGRLQVSHRKGLPHVIYCRVWRWPDLQSHHELKPLECCEFPFGSKQKEVCINPYHYKRVESPVLPPVLVPRHSEYNPQHSLLAQFRNLGQNEPHMPLNATFPDSFQQPNSHPFPHSPNSSYPNSPGSSSSTYPHSPTSSDPGSPFQMPADTPPPAYLPPEDPMTQDGSQPMDTNMMAPPLPSEINRGDVQAVAYEEPKHWCSIVYYELNNRVGEAFHASSTSVLVDGFTDPSNNKNRFCLGLLSNVNRNSTIENTRRHIGKDWEIKIIITNERQMGIIYLQMSYPEKAITSPTQDSS

SEQ ID NO: 801938 - protein, 465 aa, Homo sapiens; identical to SEQ ID NO: 801935

SEQ ID NO: 801939 - protein, 465 aa, Homo sapiens; identical to SEQ ID NO: 801935

SEQ ID NO: 801940 - protein, 459 aa, Homo sapiens
MNVTSLFSFTSPAVKRLLGWKQGDEEEKWAEKAVDALVKKLKKKKGAMEELEKALSCPGQPSNCVTIPRSLDGRLQVSHRKGLPHVIYCRVWRWPDLQSHHECEFPFGSKQKEVCINPYHYKRVESPVLPPVLVPRHSEYNPQHSLLAQFRNLGQNEPHMPLNATFPDSFQQPNSHPFPHSPNSSYPNSPGSSSSTYPHSPTSSDPGSPFQMPADTPPPAYLPPEDPMTQDGSQPMDTNMMAPPLPSEINRGDVQAVAYEEPKHWCSIVYYELNNRVGEAFHASSTSVLVDGFTDPSNNKNRFCLGLLSNVNRNSTIENTRRHIGKGVHLYYVGGEVYAECLSDSSIFVQSRNCNYHHGFHPTTVCKIPSGCSLKIFNNQEFAQLLAQSVNHGFETVYELTKMCTIRMSFVKGWGAEYHRQDVTSTPCWIEIHLHGPLQWLDKVLTQMGSPHNPISSVS

SEQ ID NO: 801941 - protein, 378 aa, Homo sapiens
MNVTSLFSFTSPAVKRLLGWKQGDEEEKWQKEVCINPYHYKRVESPVLPPVLVPRHSEYNPQHSLLAQFRNLGQNEPHMPLNATFPDSFQQPNSHPFPHSPNSSYPNSPGSSSSTYPHSPTSSDPGSPFQMPADTPPPAYLPPEDPMTQDGSQPMDTNMMAPPLPSEINRGDVQAVAYEEPKHWCSIVYYELNNRVGEAFHASSTSVLVDGFTDPSNNKNRFCLGLLSNVNRNSTIENTRRHIGKGVHLYYVGGEVYAECLSDSSIFVQSRNCNYHHGFHPTTVCKIPSGCSLKIFNNQEFAQLLAQSVNHGFETVYELTKMCTIRMSFVKGWGAEYHRQDVTSTPCWIEIHLHGPLQWLDKVLTQMGSPHNPISSVS

SEQ ID NO: 801942 - protein, 300 aa, Homo sapiens
MPLNATFPDSFQQPNSHPFPHSPNSSYPNSPGSSSSTYPHSPTSSDPGSPFQMPADTPPPAYLPPEDPMTQDGSQPMDTNMMAPPLPSEINRGDVQAVAYEEPKHWCSIVYYELNNRVGEAFHASSTSVLVDGFTDPSNNKNRFCLGLLSNVNRNSTIENTRRHIGKGVHLYYVGGEVYAECLSDSSIFVQSRNCNYHHGFHPTTVCKIPSGCSLKIFNNQEFAQLLAQSVNHGFETVYELTKMCTIRMSFVKGWGAEYHRQDVTSTPCWIEIHLHGPLQWLDKVLTQMGSPHNPISSVS

SEQ ID NO: 801943 - protein, 465 aa, Homo sapiens; identical to SEQ ID NO: 801935

SEQ ID NO: 801944 - protein, 465 aa, Homo sapiens; identical to SEQ ID NO: 801935

SEQ ID NO: 801945 - protein, 465 aa, Homo sapiens; identical to SEQ ID NO: 801935

SEQ ID NO: 801946 - protein, 465 aa, Homo sapiens; identical to SEQ ID NO: 801935

SEQ ID NO: 801947 - protein, 459 aa, Homo sapiens; identical to SEQ ID NO: 801940

SEQ ID NO: 801948 - protein, 236 aa, Homo sapiens
MNVTSLFSFTSPAVKRLLGWKQGDEEEKWAEKAVDALVKKLKKKKGAMEELEKALSCPGQPSNCVTIPRSLDGRLQVSHRKGLPHVIYCRVWRWPDLQSHHELKPLECCEFPFGSKQKEVCINPYHYKRVESPVLPPVLVPRHSEYNPQHSLLAQFRNLGQNEPHMPLNATFPDSFQQPNSHPFPHSPNSSYPNSPGSSSSTYPHSPTSSDPGSPFQMPADTPPPGKGFLGLSWRP

SEQ ID NO: 801949 - protein, 676 aa, Homo sapiens
GGCWEGRRDGGGGTGSRVRVRVKREAARVGAGPEHQAQARRPPARTLVLTDATAMAMMVFPREEKLSQDEIVLGTKAVIQGLETLRGEHRALLAPLVAPEAGEAEPGSQERCILLRRSLEAIELGLGEAQVILALSSHLGAVESEKQKLRAQVRRLVQENQWLREELAGTQQKLQRSEQAVAQLEEEKQHLLFMSQIRKLDEDASPNEEKGDVPKDTLDDLFPNEDEQSPAPSPGGGDVSGQHGGYEIPARLRTLHNLVIQYASQGRYEVAVPLCKQALEDLEKTSGHDHPDVATMLNILALVYRDQNKYKEAAHLLNDALAIREKTLGKDHPAVAATLNNLAVLYGKRGKYKEAEPLCKRALEIREKVLGKFHPDVAKQLSNLALLCQNQGKAEEVEYYYRRALEIYATRLGPDDPNVAKTKNNLASCYLKQGKYQDAETLYKEILTRAHEKEFGSVNGDNKPIWMHAEEREESKDKRRDSAPYGEYGSWYKACKVDSPTVNTTLRSLGALYRRQGKLEAAHTLEDCASRNRKQGLDPASQTKVVELLKDGSGRRGDRRSSRDMAGGAGPRSESDLEDVGPTAEWNGDGSGSLRRSGSFGKLRDALRRSSEMLVKKLQGGTPQEPPNPRMKRASSLNFLNKSVEEPTQPGGTGLSDSRTLSSSSMDLSRRSSLVG

SEQ ID NO: 801950 - protein, 663 aa, Homo sapiens
GLLGRPAGWRRRDRLAGAGPGEAGGSQSRSRARAPGADATAMAMMVFPREEKLSQDEIVLGTKAVIQGLETLRGEHRALLAPLVAPEAGEAEPGSQERCILLRRSLEAIELGLGEAQVILALSSHLGAVESEKQKLRAQVRRLVQENQWLREELAGTQQKLQRSEQAVAQLEEEKQHLLFMSQIRKLDEDASPNEEKGDVPKDTLDDLFPNEDEQSPAPSPGGGDVSGQHGGYEIPARLRTLHNLVIQYASQGRYEVAVPLCKQALEDLEKTSGHDHPDVATMLNILALVYRDQNKYKEAAHLLNDALAIREKTLGKDHPAVAATLNNLAVLYGKRGKYKEAEPLCKRALEIREKVLGKFHPDVAKQLSNLALLCQNQGKAEEVEYYYRRALEIYATRLGPDDPNVAKTKNNLASCYLKQGKYQDAETLYKEILTRAHEKEFGSVNGDNKPIWMHAEEREESKDKRRDSAPYGEYGSWYKACKVDSPTVNTTLRSLGALYRRQGKLEAAHTLEDCASRNRKQGLDPASQTKVVELLKDGSGRRGDRRSSRDMAGGAGPRSESDLEDVGPTAEWNGDGSGSLRRSGSFGKLRDALRRSSEMLVKKLQGGTPQEPPNPRMKRASSLNFLNKSVEEPTQPGGTGLSDSRTLSSSSMDLSRRSSLVG

SEQ ID NO: 801951 - protein, 663 aa, Homo sapiens; identical to SEQ ID NO: 801950

SEQ ID NO: 801952 - protein, 657 aa, Homo sapiens
RRPGTACLPNPGRTAVWPQARRPPARTLVLTDATAMAMMVFPREEKLSQDEIVLGTKAVIQGLETLRGEHRALLAPLVAPEAGEAEPGSQERCILLRRSLEAIELGLGEAQVILALSSHLGAVESEKQKLRAQVRRLVQENQWLREELAGTQQKLQRSEQAVAQLEEEKQHLLFMSQIRKLDEDASPNEEKGDVPKDTLDDLFPNEDEQSPAPSPGGGDVSGQHGGYEIPARLRTLHNLVIQYASQGRYEVAVPLCKQALEDLEKTSGHDHPDVATMLNILALVYRDQNKYKEAAHLLNDALAIREKTLGKDHPAVAATLNNLAVLYGKRGKYKEAEPLCKRALEIREKVLGKFHPDVAKQLSNLALLCQNQGKAEEVEYYYRRALEIYATRLGPDDPNVAKTKNNLASCYLKQGKYQDAETLYKEILTRAHEKEFGSVNGDNKPIWMHAEEREESKDKRRDSAPYGEYGSWYKACKVDSPTVNTTLRSLGALYRRQGKLEAAHTLEDCASRNRKQGLDPASQTKVVELLKDGSGRRGDRRSSRDMAGGAGPRSESDLEDVGPTAEWNGDGSGSLRRSGSFGKLRDALRRSSEMLVKKLQGGTPQEPPNPRMKRASSLNFLNKSVEEPTQPGGTGLSDSRTLSSSSMDLSRRSSLVG

SEQ ID NO: 801953 - protein, 592 aa, Homo sapiens
WYPSGIPGYSQNHAVRRRDRLAGAGPGEAGGSQSRSRARAPGADATAMAMMVFPREEKLSQDEIVLGTKAVIQGLETLRGEHRALLAPLVAPEAGEAEPGSQERCILLRRSLEAIELGLGEAQEEKGDVPKDTLDDLFPNEDEQSPAPSPGGGDVSGQHGGYEIPARLRTLHNLVIQYASQGRYEVAVPLCKQALEDLEKTSGHDHPDVATMLNILALVYRDQNKYKEAAHLLNDALAIREKTLGKDHPAVAATLNNLAVLYGKRGKYKEAEPLCKRALEIREKVLGKFHPDVAKQLSNLALLCQNQGKAEEVEYYYRRALEIYATRLGPDDPNVAKTKNNLASCYLKQGKYQDAETLYKEILTRAHEKEFGSVNGDNKPIWMHAEEREESKDKRRDSAPYGEYGSWYKACKVDSPTVNTTLRSLGALYRRQGKLEAAHTLEDCASRNRKQGLDPASQTKVVELLKDGSGRRGDRRSSRDMAGGAGPRSESDLEDVGPTAEWNGDGSGSLRRSGSFGKLRDALRRSSEMLVKKLQGGTPQEPPNPRMKRASSLNFLNKSVEEPTQPGGTGLSDSRTLSSSSMDLSRRSSLVG

SEQ ID NO: 801954 - protein, 663 aa, Homo sapiens; identical to SEQ ID NO: 801950

SEQ ID NO: 801955 - protein, 663 aa, Homo sapiens; identical to SEQ ID NO: 801950

SEQ ID NO: 801956 - protein, 321 aa, Homo sapiens
ARYHLSTLEIREKVLGKFHPDVAKQLSNLALLCQNQGKAEEVEYYYRRALEIYATRLGPDDPNVAKTKNNLASCYLKQGKYQDAETLYKEILTRAHEKEFGSVNGDNKPIWMHAEEREESKDKRRDSAPYGEYGSWYKACKVDSPTVNTTLRSLGALYRRQGKLEAAHTLEDCASRNRKQGLDPASQTKVVELLKDGSGRRGDRRSSRDMAGGAGPRSESDLEDVGPTAEWNGDGSGSLRRSGSFGKLRDALRRSSEMLVKKLQGGTPQEPPNPRMKRASSLNFLNKSVEEPTQPGGTGLSDSRTLSSSSMDLSRRSSLVG

SEQ ID NO: 801957 - protein, 210 aa, Homo sapiens
MLCLGAKESKDKRRDSAPYGEYGSWYKACKVDSPTVNTTLRSLGALYRRQGKLEAAHTLEDCASRNRKQGLDPASQTKVVELLKDGSGRRGDRRSSRDMAGGAGPRSESDLEDVGPTAEWNGDGSGSLRRSGSFGKLRDALRRSSEMLVKKLQGGTPQEPPNPRMKRASSLNFLNKSVEEPTQPGGTGLSDSRTLSSSSMDLSRRSSLVG

SEQ ID NO: 801958 - protein, 130 aa, Homo sapiens
AYTVVQAGWESAEGNLLPCHLSLSPGGWACPLQLHPLFIPSSRALFPRFGPAGGAGWSLHHRLSGLASPDPRAKNTKHSPALRHPRPPSRLNPAVASVYREISYWPRASLQSTVLPGPPLVPLLVVPPRP

SEQ ID NO: 801959 - protein, 249 aa, Homo sapiens
GGCWEGRRDGGGGTGSRVRVRVKREAARVGAGPEHQAQARRPPARTLVLTDATAMAMMVFPREEKLSQDEIVLGTKAVIQGLETLRGEHRALLAPLVAPEAGEAEPGSQERCILLRRSLEAIELGLGEAQVILALSSHLGAVESEKQKLRAQVRRLVQENQWLREELAGTQQKLQRSEQAVAQLEEEKQHLLFMSQIRKLDEDASPNEEKGDVPKDTLDDLFPLLRVRRLLSIFRCCCRNKDGLNLKKK

SEQ ID NO: 801960 - protein, 115 aa, Homo sapiens
MLKGQPVTRAPTWHTPLTPALRMGLLLVPPVSPTAPVFSVQSQGNLLPCHLSLSPGGWACPLQLHPLFIPSSRALFPRFGPAGGAGWSLHHRLSGLASPDPRAKNTKHSPALRHP

SEQ ID NO: 801961 - protein, 212 aa, Homo sapiens
GTRRVFRDIVRTTLLGGGTGSRVRVRVKREAARVGAGPEHQAQARRPPARTLVLTDATAMAMMVFPREEKLSQDEIVLGTKAVIQGLETLRGEHRALLAPLVAPEAGEAEPGSQERCILLRRSLEAIELGLGEAQVILALSSHLGAVESEKQKLRAQVRRLVQENQWLREELAGTQQKLQRSEQAVAQLEEEKQHLLFMSQIRKLDEDASPN

SEQ ID NO: 801962 - protein, 564 aa, Homo sapiens
LVEAGFKSDEDELGLGEAVILALSSHLGAVESEKQKLRAQVRRLVQENQWLREELAGTQQKLQRSEQAVAQLEEEKQHLLFMSQIRKLDEDASPNEEKGDVPKDTLDDLFPNEDEQSPAPSPGGGDVSGQHGGYEIPARLRTLHNLVIQYASQGRYEVAVPLCKQALEDLEKTSGHDHPDVATMLNILALVYRDQNKYKEAAHLLNDALAIREKTLGKDHPAVAATLNNLAVLYGKRGKYKEAEPLCKRALEIREKVLGKFHPDVAKQLSNLALLCQNQGKAEEVEYYYRRALEIYATRLGPDDPNVAKTKNNLASCYLKQGKYQDAETLYKEILTRAHEKEFGSVNGDNKPIWMHAEEREESKDKRRDSAPYGEYGSWYKACKVDSPTVNTTLRSLGALYRRQGKLEAAHTLEDCASRNRKQGLDPASQTKVVELLKDGSGRRGDRRSSRDMAGGAGPRSESDLEDVGPTAEWNGDGSGSLRRSGSFGKLRDALRRSSEMLVKKLQGGTPQEPPNPRMKRASSLNFLNKSVEEPTQPGGTGLSDSRTLSSSSMDLSRRSSLVG

SEQ ID NO: 801963 - protein, 661 aa, Homo sapiens
GPRSFKAANGPREACFAPSDATEARRPPARTLVLTDATAMAMMVFPREEKLSQDEIVLGTKAVIQGLETLRGEHRALLAPLVAPEAGEAEPGSQERCILLRRSLEAIELGLGEAQVILALSSHLGAVESEKQKLRAQVRRLVQENQWLREELAGTQQKLQRSEQAVAQLEEEKQHLLFMSQIRKLDEDASPNEEKGDVPKDTLDDLFPNEDEQSPAPSPGGGDVSGQHGGYEIPARLRTLHNLVIQYASQGRYEVAVPLCKQALEDLEKTSGHDHPDVATMLNILALVYRDQNKYKEAAHLLNDALAIREKTLGKDHPAVAATLNNLAVLYGKRGKYKEAEPLCKRALEIREKVLGKFHPDVAKQLSNLALLCQNQGKAEEVEYYYRRALEIYATRLGPDDPNVAKTKNNLASCYLKQGKYQDAETLYKEILTRAHEKEFGSVNGDNKPIWMHAEEREESKDKRRDSAPYGEYGSWYKACKVDSPTVNTTLRSLGALYRRQGKLEAAHTLEDCASRNRKQGLDPASQTKVVELLKDGSGRRGDRRSSRDMAGGAGPRSESDLEDVGPTAEWNGDGSGSLRRSGSFGKLRDALRRSSEMLVKKLQGGTPQEPPNPRMKRASSLNFLNKSVEEPTQPGGTGLSDSRTLSSSSMDLSRRSSLVG

SEQ ID NO: 801964 - protein, 210 aa, Homo sapiens
MHAEEREESKDKRRDSAPYGEYGSWYKACKVDSPTVNTTLRSLGALYRRQGKLEAAHTLEDCASRNRKQGLDPASQTKVVELLKDGSGRRGDRRSSRDMAGGAGPRSESDLEDVGPTAEWNGDGSGSLRRSGSFGKLRDALRRSSEMLVKKLQGGTPQEPPNPRMKRASSLNFLNKSVEEPTQPGGTGLSDSRTLSSSSMDLSRRSSLVG

SEQ ID NO: 801965 - protein, 663 aa, Homo sapiens; identical to SEQ ID NO: 801950

SEQ ID NO: 801966 - protein, 663 aa, Homo sapiens; identical to SEQ ID NO: 801950

SEQ ID NO: 801967 - protein, 160 aa, Homo sapiens [sequence omitted]

SEQ ID NO: 801968 - protein, 74 aa, Homo sapiens
QRSEQAVAQLEEEKQHLLFMSQIRKLDEDASPNVSSYHGHCCPARRPGSREGQHGADSAPPQPMDTPAALCLLP

SEQ ID NO: 801969 - protein, 78 aa, Homo sapiens
EKMGILSVDLLITLQILPVFFSNCLFLALYDSVILLKHVVLLLSRSKSTRGEWRRMLTSEGLRCVWKSFLLDAYKQVS

SEQ ID NO: 801970 - protein, 1078 aa, Homo sapiens
LQAQNGAALASGSPYTNGPVQNALLSSQESVSQGYNFQLPGSYPHPITSKDFDPVSGQSNYGGSQGSGQTLNRPPVASNPVTPSLHSGPAPRMPLPASQNPATTPMPSSSFLPEANLPPPLNWQYNYPSTASQTNHCPRASSQPTVSGNTSLTTNHQYVSSGYPSLQNSFIKSGPSVPPLVNPPLPTTFQPGAPHGPPPAGGPPPVRALTPLTSSYRDVPQPLFNSAVNQEGITSNTNNGSMVVHSSYDEIEGGGLLATPQLTNKNPKMSRSVGYSYPSLPPGYQNTTPPGATGVPPSSLNYPSGPQAFTQTPLGANHLTTSMSGLSLQPEGLRVVNLLQERNMLPSTPLKPPVPNLHEDIQKLNCNPELFRCTLTSIPQTQALLNKAKLPLGLLLHPFKDLVQLPVVTSSTIVRCRSCRTYINPFVSFLDQRRWKCNLCYRVNDVPEEFLYNPLTRVYGEPHRRPEVQNATIEFMAPSEYMLRPPQPPVYLFVFDVSHNAVETGYLNSVCQSLLDNLDLLPGNTRTKIGFITFDSTIHFYGLQESLSQPQMLIVSDIEDVFIPMPENLLVNLNESKELVQDLLKTLPQMFTKTLETQSALGPALQAAFKLMSPTGGRMSVFQTQLPTLGVGALKPREEPNHRSSAKDIHMTPSTDFYKKLALDCSGQQVAVDLFLLSGQYSDLASLGCISRYSAGSVYYYPSYHHQHNPVQVQKLQKELQRYLTRKIGFEAVMRIRCTKGLSIHTFHGNFFVRSTDLLSLPNVNPDAGYAVQMSVEESLTDTQLVSFQSALLYTSSKGERRIRVHTLCLPVVSTLNDVFLGADVQAISGLLANMAVDRSMTASLSDARDALVNAVIDSLSAYRSSVLSNQQPGLMVPFSLRLFPLFVLALLKQKSFQTGTNARLDERIFAMCQVKNQPLVYLMLTTHPSLYRVDNLSDEGALNISDRTIPQPPILQLSVEKLSRDGAFLMDAGSVLMLWVGKNCTQNFLSQVLGVQNYASIPQPMTDLPELDTPESARIIAFISWLREQRPFFPILYVIRDESPMKANFLQNMIEDRTESALSYYEFLLHIQQQVNK

SEQ ID NO: 801971 - protein, 1078 aa, Homo sapiens; identical to SEQ ID NO: 801970

SEQ ID NO: 801972 - protein, 1078 aa, Homo sapiens; identical to SEQ ID NO: 801970

SEQ ID NO: 801973 - protein, 1078 aa, Homo sapiens; identical to SEQ ID NO: 801970

SEQ ID NO: 801974 - protein, 1014 aa, Homo sapiens
LQAQNGAALASGSPYTNGPVQNALLSSQESVSQGYNFQLPGSYPHPITSKDFDPVSGQSNYGGSQGSGQTLNRPPVASNPVTPSLHSGPAPRMPLPASQNPATTPMPSSSFLPEANLPPPLNWQYNYPSTASQTNHCPRASSQPTVSGNTSLTTNHQYVSSGYPSLQNSFIKSGPSVPPLVNPPLPTTFQPGAPHGPPPAGGPPPVRALTPLTSSYRDVPQPLFNSAVNQEGITSNTNNGSMVVHSSYDEIEGGGLLATPQLTNKNPKMSRSVGYSYPSLPPGYQNTTPPGATGVPPSSLNYPSGPQAFTQTPLGANHLTTSMSGLSLQPEGLRVVNLLQERNMLPSTPLKPPVPNLHEDIQKLNCNPELFRCTLTSIPQTQALLNKAKLPLGLLLHPFKDLVQLPVVTSSTIVRCRSCRTYINPFVSFLDQRRWKCNLCYRVNDVPEEFLYNPLTRVYGEPHRRPEVQNATIEFMAPSEYMLRPPQPPVYLFVFDVSHNAVETGYLNSVCQSLLDNLDLLPGNTRTKIGFITFDSTIHFYGLQESLSQPQMLIVSDIEDVFIPMPENLLVNLNESKELVQDLLKTLPQMFTKTLETQSALGPALQAAFKLMSPTGGRMSVFQTQLPTLGVGALKPREEPNHRSSAKDIHMTPSTDFYKKLALDCSGQQVAVDLFLLSGQYSDLASLGCISRYSAGSVYYYPSYHHQHNPVQVQKLQKELQRYLTRKIGFEAVMRIRCTKGLSIHTFHGNFFVRSTDLLSLPNVNPDAGYAVQMSVEESLTDTQLVSFQSALLYTSSKGERRIRVHTLCLPVVSTLNDVFLGADVQAISGLLANMAVDRSMTASLSDARDALVNAVIDSLSAYRSSVLSNQQPGLMVPFSLRLFPLFVLALLKQKSFQTGTNARLDERIFAMCQVKNQPLVYLMLTTHPSLYRVDNLSDEGALNISDRTIPQPPILQLSVEKLSRDGAFLMDAGSVLMLWVGKNCTQNFLSQVLGVQNYASIPQPMPFSSKSWE

SEQ ID NO: 801975 - protein, 467 aa, Homo sapiens
LQAQNGAALASGSPYTNGPVQNALLSSQESVSQGYNFQLPGSYPHPITSKDFDPVSGQSNYGGSQGSGQTLNRPPVASNPVTPSLHSGPAPRMPLPASQNPATTPMPSSSFLPEANLPPPLNWQYNYPSTASQTNHCPRASSQPTVSGNTSLTTNHQYVSSGYPSLQNSFIKSGPSVPPLVNPPLPTTFQPGAPHGPPPAGGPPPVRALTPLTSSYRDVPQPLFNSAVNQEGITSNTNNGSMVVHSSYDEIEGGGLLATPQLTNKNPKMSRSVGYSYPSLPPGYQNTTPPGATGVPPSSLNYPSGPQAFTQTPLGANHLTTSMSGLSLQPEGLRVVNLLQERNMLPSTPLKPPVPNLHEDIQKLNCNPELFRCTLTSIPQTQALLNKAKLPLGLLLHPFKDLVRPGLSLSPRLECSSMIIAHCSLELLGSSSPPASASRQTIACGYLQYNCEMPFMQDVHQSFRQLS

SEQ ID NO: 801976 - protein, 152 aa, Homo sapiens
PPGPERSRLGLGVSLHQRSCPKCIAVFTRVSEPRIQFPASRILPSSNTSKDFDPVSGQSNYGGSQGSGQTLNRPPVASNPVTPSLHSGPAPRMPLPASQNPATTPMPSSSFLPEANLPPPLNWQYNYPVHSLHKQTIVLVHHPNQLYLEIQV

SEQ ID NO: 801977 - protein, 1078 aa, Homo sapiens; identical to SEQ ID NO: 801970

SEQ ID NO: 801978 - protein, 748 aa, Homo sapiens
KVRGRVLLGRERNMLPSTPLKPPVPNLHEDIQKLNCNPELFRCTLTSIPQTQALLNKAKLPLGLLLHPFKDLVQLPVVTSSTIVRCRSCRTYINPFVSFLDQRRWKCNLCYRVNDVPEEFLYNPLTRVYGEPHRRPEVQNATIEFMAPSEYMLRPPQPPVYLFVFDVSHNAVETGYLNSVCQSLLDNLDLLPGNTRTKIGFITFDSTIHFYGLQESLSQPQMLIVSDIEDVFIPMPENLLVNLNESKELVQDLLKTLPQMFTKTLETQSALGPALQAAFKLMSPTGGRMSVFQTQLPTLGVGALKPREEPNHRSSAKDIHMTPSTDFYKKLALDCSGQQVAVDLFLLSGQYSDLASLGCISRYSAGSVYYYPSYHHQHNPVQVQKLQKELQRYLTRKIGFEAVMRIRCTKGLSIHTFHGNFFVRSTDLLSLPNVNPDAGYAVQMSVEESLTDTQLVSFQSALLYTSSKGERRIRVHTLCLPVVSTLNDVFLGADVQAISGLLANMAVDRSMTASLSDARDALVNAVIDSLSAYRSSVLSNQQPGLMVPFSLRLFPLFVLALLKQKSFQTGTNARLDERIFAMCQVKNQPLVYLMLTTHPSLYRVDNLSDEGALNISDRTIPQPPILQLSVEKLSRDGAFLMDAGSVLMLWVGKNCTQNFLSQVLGVQNYASIPQPMTDLPELDTPESARIIAFISWLREQRPFFPILYVIRDESPMKANFLQNMIEDRTESALSYYEFLLHIQQQVNK

SEQ ID NO: 801979 - protein, 289 aa, Homo sapiens
MAIGIFFLSNWFLGKLHSSPQWSSDQMELSSSSSPLDKAKGYVANMAVDRSMTASLSDARDALVNAVIDSLSAYRSSVLSNQQPGLMVPFSLRLFPLFVLALLKQKSFQTGTNARLDERIFAMCQVKNQPLVYLMLTTHPSLYRVDNLSDEGALNISDRTIPQPPILQLSVEKLSRDGAFLMDAGSVLMLWVGKNCTQNFLSQVLGVQNYASIPQPMTDLPELDTPESARIIAFISWLREQRPFFPILYVIRDESPMKANFLQNMIEDRTESALSYYEFLLHIQQQVNK

SEQ ID NO: 801980 - protein, 1078 aa, Homo sapiens; identical to SEQ ID NO: 801970

SEQ ID NO: 801981 - protein, 589 aa, Homo sapiens
LQAQNGAALASGSPYTNGPVQNALLSSQESVSQGYNFQLPGSYPHPITSKDFDPVSGQSNYGGSQGSGQTLNRPPVASNPVTPSLHSGPAPRMPLPASQNPATTPMPSSSFLPEANLPPPLNWQYNYPSTASQTNHCPRASSQPTVSGNTSLTTNHQYVSSGYPSLQNSFIKSGPSVPPLVNPPLPTTFQPGAPHGPPPAGGPPPVRALTPLTSSYRDVPQPLFNSAVNQEGITSNTNNGSMVVHSSYDEIEGGGLLATPQLTNKNPKMSRSVGYSYPSLPPGYQNTTPPGATGVPPSSLNYPSGPQAFTQTPLGANHLTTSMSGLSLQPEGLRVVNLLQERNMLPSTPLKPPVPNLHEDIQKLNCNPELFRCTLTSIPQTQALLNKAKLPLGLLLHPFKDLVQLPVVTSSTIVRCRSCRTYINPFVSFLDQRRWKCNLCYRVNDVPEEFLYNPLTRVYGEPHRRPEVQNATIEFMAPSEYMLRPPQPPVYLFVFDVSHNAVETGYLNSVCQSLLDNLDLLPGNTRTKIGFITFDSTIHFYGLQESLSQPQMLIVSDIEDVFIPMPENLLVNLNESKEVRHIFLPDMFN

SEQ ID NO: 801982 - protein, 504 aa, Homo sapiens
MSQPRTPEQALDTPGDCPPGRRDEDAGEGIQCSQRMLSFSDALLSIIATVMILPVTHTEISPEQQFDRSVQRLLATRIAVYLMTFLIVTVAWAAHTRLFQVVGKTDDTLALLNLACMMTITFLPYTFSLMVTFPDVPLGIFLFCVCVIAIGVVQALIVGYAFHFPHLLSPQIQRSAHRALYRRHVLGIVLQGPALCFAAAIFSLFFVPLSYLLMVTVILLPYVSKVTGWCRDRLLGHREPSAHPVEVFSFDLHEPLSKERVEAFSDGVYAIVATLLILDICEDNVPDPKDVKERFSGSLVAALSATGPRFLAYFGSFATVGLLWFAHHSLFLHVRKATRAMGLLNTLSLAFVGGLPLAYQQTSAFARQPRDELERVRVSCTIIFLASIFQLAMWTTALLHQAETLQPSVWFGGREHVLMFAKLALYPCASLLAFASTCLLSRFSVGIFHLMQIAVPCAFLLLRLLVGLALATLRVLRGLARPEHPPPAPTGQDDPQSQLLPAPC

SEQ ID NO: 801983 - protein, 422 aa, Homo sapiens
MTFLIVTVAWAAHTRLFQVVGKTDDTLALLNLACMMTITFLPYTFSLMVTFPDVPLGIFLFCVCVIAIGVVQALIVGYAFHFPHLLSPQIQRSAHRALYRRHVLGIVLQGPALCFAAAIFSLFFVPLSYLLMVTVILLPYVSKVTGWCRDRLLGHREPSAHPVEVFSFDLHEPLSKERVEAFSDGVYAIVATLLILDICEDNVPDPKDVKERFSGSLVAALSATGPRFLAYFGSFATVGLLWFAHHSLFLHVRKATRAMGLLNTLSLAFVGGLPLAYQQTSAFARQPRDELERVRVSCTIIFLASIFQLAMWTTALLHQAETLQPSVWFGGREHVLMFAKLALYPCASLLAFASTCLLSRFSVGIFHLMQIAVPCAFLLLRLLVGLALATLRVLRGLARPEHPPPAPTGQDDPQSQLLPAPC

SEQ ID NO: 801984 - protein, 422 aa, Homo sapiens; identical to SEQ ID NO: 801983

SEQ ID NO: 801985 - protein, 422 aa, Homo sapiens; identical to SEQ ID NO: 801983

SEQ ID NO: 801986 - protein, 504 aa, Homo sapiens; identical to SEQ ID NO: 801982

SEQ ID NO: 801987 - protein, 491 aa, Homo sapiens
MSQPRTPEQALDTPGDCPPGRRDEDAGEGIQCSQRMLSFSDALLSIIATVMQFDRSVQRLLATRIAVYLMTFLIVTVAWAAHTRLFQVVGKTDDTLALLNLACMMTITFLPYTFSLMVTFPDVPLGIFLFCVCVIAIGVVQALIVGYAFHFPHLLSPQIQRSAHRALYRRHVLGIVLQGPALCFAAAIFSLFFVPLSYLLMVTVILLPYVSKVTGWCRDRLLGHREPSAHPVEVFSFDLHEPLSKERVEAFSDGVYAIVATLLILDICEDNVPDPKDVKERFSGSLVAALSATGPRFLAYFGSFATVGLLWFAHHSLFLHVRKATRAMGLLNTLSLAFVGGLPLAYQQTSAFARQPRDELERVRVSCTIIFLASIFQLAMWTTALLHQAETLQPSVWFGGREHVLMFAKLALYPCASLLAFASTCLLSRFSVGIFHLMQIAVPCAFLLLRLLVGLALATLRVLRGLARPEHPPPAPTGQDDPQSQLLPAPC

SEQ ID NO: 801988 - protein, 375 aa, Homo sapiens [sequence omitted]

SEQ ID NO: 801989 - protein, 481 aa, Homo sapiens
AGTAGSMGSPGRADSSGGARNSRRGDSRPAVRQKCTEASGNTDCRLPDDLSHRDSGLGSTHKVVPSCWENRRHTCPAQPGRIMAVMPSLPPACMMTITFLPYTFSLMVTFPDVPLGIFLFCVCVIAIGVVQALIVGYAFHFPHLLSPQIQRSAHRALYRRHVLGIVLQGPALCFAAAIFSLFFVPLSYLLMVTVILLPYVSKVTGWCRDRLLGHREPSAHPVEVFSFDLHEPLSKERVEAFSDGVYAIVATLLILDICEDNVPDPKDVKERFSGSLVAALSATGPRFLAYFGSFATVGLLWFAHHSLFLHVRKATRAMGLLNTLSLAFVGGLPLAYQQTSAFARQPRDELERVRVSCTIIFLASIFQLAMWTTALLHQAETLQPSVWFGGREHVLMFAKLALYPCASLLAFASTCLLSRFSVGIFHLMQIAVPCAFLLLRLLVGLALATLRVLRGLARPEHPPPAPTGQDDPQSQLLPAPC

SEQ ID NO: 801990 - protein, 461 aa, Homo sapiens
MSQPRTPEQALDTPGDCPPGRRDEDAGEGIQCSQRMLSFSDALLSIIATVMILPVTHTEISPEQQFDRSVQRLLATRIAVYLMTFLIVTVAWAAHTRLFQVVGKTDDTLALLNLACMMTITFLPYTFSLMVTFPDVPLGIFLFCVCVIAIGVVQALIVGYAFHFPHLLSPQIQRSAHRALYRRHVLGIVLQGPALCFAAAIFSLFFVPLSYLLMVTVILLPYVSKVTGWCRDRLLGHREPSAHPVEVFSFDLHEPLSKERVEAFSDGVYAIVATLLILDICEDNVPDPKDVKERFSGSLVAALSATGPRFLAYFGSFATVGLLWFAHHSLFLHVRKATRAMGLLNTLSLAFVGGLPLAYQQTSAFARQPRDELERVRVSCTIIFLASIFQLAMWTTALLHQAETLQPSVWFGGREHVLMFAKLALYPCASLLAFASTCLLSRFSVGIFHLMQIAVPCAFLL

SEQ ID NO: 801991 - protein, 312 aa, Homo sapiens
MSQPRTPEQALDTPGDCPPGRRDEDAGEGIQCSQRMLSFSDALLSIIATVMILPVTHTEISPEQQFDRSVQRLLATRIAVYLMTFLIVTVAWAAHTRLFQVVGKTDDTLALLNLACMMTITFLPYTFSLMVTFPDVPLGIFLFCVCVIAIGVVQALIVGYAFHFPHLLSPQIQRSAHRALYRRHVLGIVLQGPALCFAAAIFSLFFVPLSYLLMVTVILLPYVSKVTGWCRDRLLGHREPSAHPVEVFSFDLHEPLSKERVEAFSDGVYAIVATLLILDICEDNVPDPKDVKERFSGSRDLADIGEEMRVRP

SEQ ID NO: 801992 - protein, 237 aa, Homo sapiens [sequence omitted]

SEQ ID NO: 801993 - protein, 104 aa, Homo sapiens
QGKPSHGQAAVVLAWPGFIFIVKYHALISVLKLFSTFCGERSFTGTGNVLYGICLSTLSNLKTRCQAHLPEGQPTPSPFEAYTELVGSGVPSQALPSPRLLTQR

SEQ ID NO: 801994 - protein, 236 aa, Homo sapiens
LRLVETPWCSAEGEDNVPDPKDVKERFSGSLVAALSATGPRFLAYFGSFATVGLLWFAHHSLFLHVRKATRAMGLLNTLSLAFVGGLPLAYQQTSAFARQPRDELERVRVSCTIIFLASIFQLAMWTTALLHQAETLQPSVWFGGREHVLMFAKLALYPCASLLAFASTCLLSRFSVGIFHLMQIAVPCAFLLLRLLVGLALATLRVLRGLARPEHPPPAPTGQDDPQSQLLPAPC

SEQ ID NO: 801995 - protein, 422 aa, Homo sapiens; identical to SEQ ID NO: 801983

SEQ ID NO: 801996 - protein, 485 aa, Homo sapiens
RRGGLTETARARRRRACDELPAVKLPAGLTQAEARGTVAEAIPAQQFDRSVQRLLATRIAVYLMTFLIVTVAWAAHTRLFQVVGKTDDTLALLNLACMMTITFLPYTFSLMVTFPDVPLGIFLFCVCVIAIGVVQALIVGYAFHFPHLLSPQIQRSAHRALYRRHVLGIVLQGPALCFAAAIFSLFFVPLSYLLMVTVILLPYVSKVTGWCRDRLLGHREPSAHPVEVFSFDLHEPLSKERVEAFSDGVYAIVATLLILDICEDNVPDPKDVKERFSGSLVAALSATGPRFLAYFGSFATVGLLWFAHHSLFLHVRKATRAMGLLNTLSLAFVGGLPLAYQQTSAFARQPRDELERVRVSCTIIFLASIFQLAMWTTALLHQAETLQPSVWFGGREHVLMFAKLALYPCASLLAFASTCLLSRFSVGIFHLMQIAVPCAFLLLRLLVGLALATLRVLRGLARPEHPPPAPTGQDDPQSQLLPAPC

SEQ ID NO: 801997 - protein, 504 aa, Homo sapiens; identical to SEQ ID NO: 801982

SEQ ID NO: 801998 - protein, 422 aa, Homo sapiens; identical to SEQ ID NO: 801983

SEQ ID NO: 801999 - protein, 483 aa, Homo sapiens
RLVRPEVWDLPAGLTQAEARGTVAEAIPAQILPVTHTEISPEQQFDRSVQRLLATRIAVYLMTFLIVTVAWAAHTRLFQVVGKTDDTLALLNLACMMTITFLPYTFSLMVTFPDVPLGIFLFCVCVIAIGVVQALIVGYAFHFPHLLSPQIQRSAHRALYRRHVLGIVLQGPALCFAAAIFSLFFVPLSYLLMVTVILLPYVSKVTGWCRDRLLGHREPSAHPVEVFSFDLHEPLSKERVEAFSDGVYAIVATLLILDICEDNVPDPKDVKERFSGSLVAALSATGPRFLAYFGSFATVGLLWFAHHSLFLHVRKATRAMGLLNTLSLAFVGGLPLAYQQTSAFARQPRDELERVRVSCTIIFLASIFQLAMWTTALLHQAETLQPSVWFGGREHVLMFAKLALYPCASLLAFASTCLLSRFSVGIFHLMQIAVPCAFLLLRLLVGLALATLRVLRGLARPEHPPPAPTGQDDPQSQLLPAPC

SEQ ID NO: 802000 - protein, 406 aa, Homo sapiens
DGNPCCQKPLYTSVERACMMTITFLPYTFSLMVTFPDVPLGIFLFCVCVIAIGVVQALIVGYAFHFPHLLSPQIQRSAHRALYRRHVLGIVLQGPALCFAAAIFSLFFVPLSYLLMVTVILLPYVSKVTGWCRDRLLGHREPSAHPVEVFSFDLHEPLSKERVEAFSDGVYAIVATLLILDICEDNVPDPKDVKERFSGSLVAALSATGPRFLAYFGSFATVGLLWFAHHSLFLHVRKATRAMGLLNTLSLAFVGGLPLAYQQTSAFARQPRDELERVRVSCTIIFLASIFQLAMWTTALLHQAETLQPSVWFGGREHVLMFAKLALYPCASLLAFASTCLLSRFSVGIFHLMQIAVPCAFLLLRLLVGLALATLRVLRGLARPEHPPPAPTGQDDPQSQLLPAPC

SEQ ID NO: 802001 - protein, 231 aa, Homo sapiens [sequence omitted]

SEQ ID NO: 802002 - protein, 130 aa, Homo sapiens
MTFLIVTVAWAAHTRLFQVVGKTDDTLALLNLACMMTITFLPYTVSNTRPLTPEALLGTTGFDLSSKADQLDGPGPRPHGCREERRFWGEPAVGLLGASFRLAGRGGSGPDEGVTGAPSSHPALSPQPPA

SEQ ID NO: 802003 - protein, 306 aa, Homo sapiens
MPEGPELHLASQFVNEACRALVFGGCVEKSSVSRNPEVPFESSAYRISASARGKELRLILSPLPGAQPQQEPLALVFRFGMSGSFQLVPREELPRHAHLRFYTAPPGPRLALCFVDIRRFGRWDLGGKWQPGRGPCVLQEYQQFRENVLRNLADKAFDRPICEALLDQRFFNGIGNYLRAEILYRLKIPPFEKARSVLEALQQHRPSPELTLSQKIRTKLQNPDLLELCHSVPKEVVQLGGRGYGSESGEEDFAAFRAWLRCYGMPGMSSLQDRHGRTIWFQGDPGPLAPKAQVPQKEIQGHTAES

SEQ ID NO: 802004 - protein, 123 aa, Homo sapiens
MEGGDGSYAPRPCSSRENVLRNLADKAFDRPICEALLDQRFFNGIGNYLRAEILYRLKIPPFEKARSVLEALQQHRPSPELTLSQKIRTKLQNPDLLELCHSVPKEVVQLGEAKDGSNLCFSK

SEQ ID NO: 802005 - protein, 338 aa, Homo sapiens
MPEGPELHLASQFVNEACRALVFGGCVEKSSVSRNPEVPFESSAYRISASARGKELRLILSPLPGAQPQQEPLALVFRFGMSGSFQLVPREELPRHAHLRFYTAPPGPRLALCFVDIRRFGRWDLGGKWQPGRGPCVLQEYQQFRENVLRNLADKAFDRPICEALLDQRFFNGIGNYLRAEILYRLKIPPFEKARSVLEALQQHRPSPELTLSQKIRTKLQNPDLLELCHSVPKEVVQLGGRGYGSESGEEDFAAFRAWLRCYGMPGMSSLQDRHGRTIWFQVGPYCSHRQRPQEADGWKRGVTITGVVMLRVCLDPPRTTLFLRVTPLPSHASQGCS

SEQ ID NO: 802006 - protein, 390 aa, Homo sapiens
MPEGPELHLASQFVNEACRALVFGGCVEKSSVSRNPEVPFESSAYRISASARGKELRLILSPLPGAQPQQEPLALVFRFGMSGSFQLVPREELPRHAHLRFYTAPPGPRLALCFVDIRRFGRWDLGGKWQPGRGPCVLQEYQQFRVSLCCLGWSTVAPSQLIAALTSRAQRNRFSEPLSPSHGGWGWVLRTQTVFLQENVLRNLADKAFDRPICEALLDQRFFNGIGNYLRAEILYRLKIPPFEKARSVLEALQQHRPSPELTLSQKIRTKLQNPDLLELCHSVPKEVVQLGGRGYGSESGEEDFAAFRAWLRCYGMPGMSSLQDRHGRTIWFQVGPYCSHRQRPQEADGWKRGVTITGVVMLRVCLDPPRTTLFLRVTPLPSHASQGCS

SEQ ID NO: 802007 - protein, 338 aa, Homo sapiens; identical to SEQ ID NO: 802005

SEQ ID NO: 802008 - protein, 338 aa, Homo sapiens; identical to SEQ ID NO: 802005

SEQ ID NO: 802009 - protein, 338 aa, Homo sapiens; identical to SEQ ID NO: 802005

SEQ ID NO: 802010 - protein, 355 aa, Homo sapiens
MGRTGPRAPLLPKTRIWSLTFSRKTSPAHLRLRFRTARGQRQVAKQGGRRTLPPSLRMPEGPELHLASQFVNEACRALVFGGCVEKSSVSRNPEVPFESSAYRISASARGKELRLILSPLPGAQPQQEPLALVFRFGMSGSFQLVPREELPRHAHLRFYTAPPGPRLALCFVDIRRFGRWDLGGKWQPGRGPCVLQEYQQFRLKIPPFEKARSVLEALQQHRPSPELTLSQKIRTKLQNPDLLELCHSVPKEVVQLGGRGYGSESGEEDFAAFRAWLRCYGMPGMSSLQDRHGRTIWFQVGPYCSHRQRPQEADGWKRGVTITGVVMLRVCLDPPRTTLFLRVTPLPSHASQGCS

SEQ ID NO: 802011 - protein, 338 aa, Homo sapiens; identical to SEQ ID NO: 802005

SEQ ID NO: 802012 - protein, 338 aa, Homo sapiens; identical to SEQ ID NO: 802005

SEQ ID NO: 802013 - protein, 338 aa, Homo sapiens; identical to SEQ ID NO: 802005

SEQ ID NO: 802014 - protein, 123 aa, Homo sapiens; identical to SEQ ID NO: 802004

SEQ ID NO: 802015 - protein, 306 aa, Homo sapiens; identical to SEQ ID NO: 802003

SEQ ID NO: 802016 - protein, 338 aa, Homo sapiens; identical to SEQ ID NO: 802005

SEQ ID NO: 802017 - protein, 424 aa, Homo sapiens
MPEGPELHLASQFVNEACRALVFGGCVEKSSVSRNPEVPFESSAYRISASARGKELRLILSPLPGAQPQQEPLALVFRFGMSGSFQLVPREELPRHAHLRFYTAPPGPRLALCFVDIRRFGRWDLGGKWQPGRGPCVLQEYQQFRENVLRNLADKAFDRPICEALLDQRFFNGIGNYLRAEILYRLKIPPFEKARSVLEALQQHRPSPELTLSQKIRTKLQNPDLLELCHSVPKEVVQLGGRGYGSESGEEDFAAFRAWLRCYGMPGMSSLQDRHGRTIWFQAKRAERTSRLQGLQHPSPPYPPATLGVTPGQDRTLQLQHQCPAGRKSRKKKSKATQLSPEDRVEDALPPSKAPSRTRRAKRDLPKRTATQRPEGTSLQQDPEAPTVPKKGRRKGRQAASGHCRPRKVKADIPSLEPEGTSAS

SEQ ID NO: 802018 - protein, 209 aa, Homo sapiens
MPEGPELHLASQFVNEACRALVFGGCVEKSSVSRNPEVPFESSAYRISASARGKELRLILSPLPGAQPQQEPLALVFRFGMSGSFQLVPREELPRHAHLRFYTAPPGPRLALCFVDIRRFGRWDLGGKWQPGRGPCVLQEYQQFRLKIPPFEKARSVLEALQQHRPSPELTLSQKIRTKLQNPDLLELCHSVPKEVVQLGGSWTVGTQR

SEQ ID NO: 802019 - protein, 338 aa, Homo sapiens; identical to SEQ ID NO: 802005

SEQ ID NO: 802020 - protein, 338 aa, Homo sapiens; identical to SEQ ID NO: 802005

SEQ ID NO: 802021 - protein, 200 aa, Homo sapiens
MPEGPELHLASQFVNEACRALVFGGCVEKSSVSRNPEVPENVLRNLADKAFDRPICEALLDQRFFNGIGNYLRAEILYRLKIPPFEKARSVLEALQQHRPSPELTLSQKIRTKLQNPDLLELCHSVPKEVVQLGGRGYGSESGEEDFAAFRAWLRCYGMPGMSSLQDRHGRTIWFQGDPGPLAPKAQVPQKEIQGHTAES

SEQ ID NO: 802022 - protein, 252 aa, Homo sapiens
MPEGPELHLASQFVNEACRALVFGGCVEKSSVSRNPEVPFESSAYRISASARGKELRLILSPLPGAQPQQEPLALVFRFGMSGSFQLVPREELPRHAHLRFYTAPPGPRLALCFVDIRRFGRWDLGGKWQPGRGPCVLQEYQQFRENVLRNLADKAFDRPICEALLDQRFFNGIGNYLRAEILYRLKIPPFEKARSVLEALQQHRPSPELTLSQKIRTKLQNPDLLELCHSVPKEVVQLGEAKDGSNLCFSK

SEQ ID NO: 802023 - protein, 123 aa, Homo sapiens; identical to SEQ ID NO: 802004

SEQ ID NO: 802024 - protein, 86 aa, Homo sapiens
SCSFKGVMERRGGDKERMDDERRPTKDNGHLLSMEEMRTGRLRIKRRKPQGEELMSAAAPTLGTFANLGYRREAENPGYAQSQNCC

SEQ ID NO: 802025 - protein, 129 aa, Homo sapiens
MRTHQFSTSPGRCVGKGGRPGWLGLGRGEPSPARAPGPGPLSTGPAARAWLPGSTSCERGPWPGAQQPPRGTRQPAERTRGDKLEDRGPAQLHLGQSQPSGRVYAPPVAGYPAQQLQLHCPPKTLGLAG

SEQ ID NO: 802026 - protein, 647 aa, Homo sapiens
SIRGTLSPKDALTDLTGDAERLPVEGHHGTWLGHKGMVLSAEYIKKKLEQEMVLSQAFGRDLGRGTKHYGLIVVGHSLGAGTAAILSFLLRPQYPTLKCFAYSPPGGLLSEDAMEYSKEFVTAVVLGKDLVPRIGLSQLEGFRRQLLDVLQRSTKPKWRIIVGATKCIPKSELPEEVEVTTLASTRLWTHPSDLTIALSASTPLYPPGRIIHVVHNHPAEQCCCCEQEEPTYFAIWGDNKAFNEVIISPAMLHEHLPYVVMEGLNKVLENYNKGKTALLSAAKVMVSPTEVDLTPELIFQQQPLPTGPPMPTGLALELPTADHRNSSVRSKSQSEMSLEGFSEGRLLSPVVAAAARQDPVELLLLSTQERLAAELQARRAPLATMESLSDTESLYSFDSRRSSGFRSIRGSPSLHAVLERDEGHLFYIDPAIPEENPSLSSRTELLAADSLSKHSQDTQPLEAALGSGGVTPERPPSAAANDEEEEVGGGGGGPASRGELALHNGRLGDSPSPQVLEFAEFIDSLFNLDSKSSSFQDLYCMVVPESPTSDYAEGPKSPSQQEILLRAQFEPNLVPKPPRLFAGSADPSSGISLSPSFPLSSSGELMDLTPTGLSSQECLAADKIRTSTPTGHGASPAKQDELVISAR

SEQ ID NO: 802027 - protein, 97 aa, Homo sapiens
TPKTVLLGLSGAPHLSNPGTAYHANQEEGSQGGVGEDGKGLDIHGRVEGDNTACIANPGEKDGLPRKWCQNNSLFIWKKMKMIPYVIPHIKNPFQMD

SEQ ID NO: 802028 - protein, 156 aa, Homo sapiens
MSTQRQNGQAHSQADATDVTLVILVESSDHGCRFCRAKSDELCTHRGSAGSGCARLFWKASCCNCRRMRFACCLSASRSSAVCRLHREQAVTCQEHRPSSRVCPTPGAFPGDKLNERCSPLQSPNPVWAPITRSLLLRVLTPTKTGNPKADGAKVS

SEQ ID NO: 802029 - protein, 112 aa, Homo sapiens
MHARGPHGQLSPALPLASSVLMLLMSTLWLVGAGPGLVLAPELLLDPWQGEGQPRGPWRKQETCCRAWAHLAGAAQGLQGQTGMGPSVPGKHGLRQEHAQHIHSQEGRQRTP

SEQ ID NO: 802030 - protein, 250 aa, Homo sapiens
MIKCWLWEDWLLGRGGGLSRWPWCSVTFNLAHLGQPWMLGPLTWHISPFSLPVHRLLTHALGHTALPGLLLSLLLLPTVGWQQECHLGTLRFLHASALLALASGLLAVLLAGLGLSSAAGSCGYMPVHLAMLAGEGHRPRRPRGALPPWLSPWLLLALTPLLSSEPPFLQLLCGLLAGLACILCLSPGPVGMCGFCGWVPGKEVAQRGEGPSNTKEPCTHIPGASLSLPLGHALGWDLGSYGLVEVPITM

SEQ ID NO: 802031 - protein, 338 aa, Homo sapiens
MVHRLLTHALGHTALPGLLLSLLLLPTVGWQQECHLGTLRFLHASALLALASGLLAVLLAGLGLSSAAGSCGYMPVHLAMLAGEGHRPRRPRGALPPWLSPWLLLALTPLLSSEPPFLQLLCGLLAGLAYAAGAFRWLEPSERRLQVLQEGVLCRTLAGCWPLRLLATPGSLAELPVTHPAGVRPPIPGPPYVASPDLWSHWEDSALPPPSLRPVQPTWEGSSEAGLDWAGASFSPGTPMWAALDEQMLQEGIQASLLDGPAQEPQSAPWLSKSSVSSLRLQQLERMGFPTEQAVVALAATGRVEGAVSLLVGGQVGTETLVTHGKGGPAHSEGPGPP

SEQ ID NO: 802032 - protein, 389 aa, Homo sapiens
MIKCWLWEDWLLGRGGGLSRWPWCSVTFNLAHLGQPWMLGPLTWHISPFSLPVHRLLTHALGHTALPGLLLSLLLLPTVGWQQECHLGTLRFLHASALLALASGLLAVLLAGLGLSSAAGSCGYMPVHLAMLAGEGHRPRRPRGALPPWLSPWLLLALTPLLSSEPPFLQLLCGLLAGLAYAAGAFRWLEPSERRLQVLQEGVLCRTLAGCWPLRLLATPGSLAELPVTHPAGVRPPIPGPPYVASPDLWSHWEDSALPPPSLRPVQPTWEGSSEAGLDWAGASFSPGTPMWAALDEQMLQEGIQASLLDGPAQEPQSAPWLSKSSVSSLRLQQLERMGFPTEQAVVALAATGRVEGAVSLLVGGQVGTETLVTHGKGGPAHSEGPGPP

SEQ ID NO: 802033 - protein, 419 aa, Homo sapiens
MLGAEERASLHPLIHIIFQFQLKGDKTRSLYSQQESDKLIFKNMISNLIFMTQHLHPKVNRPIFQPWMLGPLTWHISPFSLPVHRLLTHALGHTALPGLLLSLLLLPTVGWQQECHLGTLRFLHASALLALASGLLAVLLAGLGLSSAAGSCGYMPVHLAMLAGEGHRPRRPRGALPPWLSPWLLLALTPLLSSEPPFLQLLCGLLAGLAYAAGAFRWLEPSERRLQVLQEGVLCRTLAGCWPLRLLATPGSLAELPVTHPAGVRPPIPGPPYVASPDLWSHWEDSALPPPSLRPVQPTWEGSSEAGLDWAGASFSPGTPMWAALDEQMLQEGIQASLLDGPAQEPQSAPWLSKSSVSSLRLQQLERMGFPTEQAVVALAATGRVEGAVSLLVGGQVGTETLVTHGKGGPAHSEGPGPP

SEQ ID NO: 802034 - protein, 273 aa, Homo sapiens
MHARGPHGQLSPALPLASSVLMLLMSTLWLVGAGPGLVLAPELLLDPWQVHRLLTHALGHTALPGLLLSLLLLPTVGWQQECHLGTLRFLHASALLALASGLLAVLLAGLGLSSAAGSCGYMPVHLAMLAGEGHRPRRPRGALPPWLSPWLLLALTPLLSSEPPFLQLLCGLLAGLAYAAGAFRWLEPSERRLQVLQEGVLCRTLAGCWPLRLLATPGSLAELPVTHPAGVRPPIPGPPYVASPDLWSHWEDSALPPPSLRPVPAHSEGPGPP

SEQ ID NO: 802035 - protein, 247 aa, Homo sapiens
MHARGPHGQLSPALPLASSVLMLLMSTLWLVGAGPGLVLAPELLLDPWQVHRLLTHALGHTALPGLLLSLLLLPTVGWQQECHLGTLRFLHASALLALASGLLAVLLAGLGLSSAAGSCGYMPVHLAMLAGEGHRPRRPRGALPPWLSPWLLLALTPLLSSEPPFLQLLCGLLAGLACILCLSPGPVGMCGFCGWVPGKEVAQRGEGPSNTKEPCTHIPGASLSLPLGHALGWDLGSYGLVEVPITM

SEQ ID NO: 802036 - protein, 386 aa, Homo sapiens
MHARGPHGQLSPALPLASSVLMLLMSTLWLVGAGPGLVLAPELLLDPWQVHRLLTHALGHTALPGLLLSLLLLPTVGWQQECHLGTLRFLHASALLALASGLLAVLLAGLGLSSAAGSCGYMPVHLAMLAGEGHRPRRPRGALPPWLSPWLLLALTPLLSSEPPFLQLLCGLLAGLAYAAGAFRWLEPSERRLQVLQEGVLCRTLAGCWPLRLLATPGSLAELPVTHPAGVRPPIPGPPYVASPDLWSHWEDSALPPPSLRPVQPTWEGSSEAGLDWAGASFSPGTPMWAALDEQMLQEGIQASLLDGPAQEPQSAPWLSKSSVSSLRLQQLERMGFPTEQAVVALAATGRVEGAVSLLVGGQVGTETLVTHGKGGPAHSEGPGPP

SEQ ID NO: 802037 - protein, 386 aa, Homo sapiens; identical to SEQ ID NO: 802036

SEQ ID NO: 802038 - protein, 338 aa, Homo sapiens; identical to SEQ ID NO: 802031

SEQ ID NO: 802039 - protein, 318 aa, Homo sapiens
MHARGPHGQLSPALPLASSVLMLLMSTLWLVGAGPGLVLAPELLLDPWQVHRLLTHALGHTALPGLLLSLLLLPTVGWQQECHLGTLRFLHASALLALASGLLAVLLAGLGLSSAAGSCGYMPVHLAMLAGEGHRPRRPRGALPPWLSPWLLLALTPLLSSEPPFLQLLCGLLAGLAYAAGAFRWLEPSERRLQVLQEGVLCRTLAGCWPLRLLATPGSLAELPVTHPAGVRPPIPGPPYVASPDLWSHWEDSALPPPSLRPVRTPERTMAVQVLCLLSAAAAAGAHGLPYGAGGGGTGSHRPCGGCRVTVGWRTSGH

SEQ ID NO: 802040 - protein, 334 aa, Homo sapiens
MHARGPHGQLSPALPLASSVLMLLMSTLWLVGAGPGLVLAPELLLDPWQVHRLLTHALGHTALPGLLLSLLLLPTVGWQQECHLGTLRFLHASALLALASGLLAVLLAGLGLSSAAGSCGYMPVHLAMLAGEGHRPRRPRGALPPWLSPWLLLALTPLLSSEPPFLQLLCGLLAGLAYAAGAFRWLEPSERRLQVLQEGVLCRTLAGCWPLRLLATPGSLAELPVTHPAGVRPPIPGPPYVASPDLWSHWEDSALPPPSLRPVQPTWEGSSEAGLDWAGASFSPGTPMWAALDEQMLQEGIQASLLDGPAQEPQSAPWLSKSSVSSLRPSSYSV

SEQ ID NO: 802041 - protein, 150 aa, Homo sapiens
MSSGGRFNFDDGGSYCGGWEDGKAHGHGVCTGPKGQGEYTGSWSHGFEVLGVYTWPSGNTYQGTWAQGKRHGIGLESKGKWVYKGEWTHGFKGRYGVRECAGNGAKYEGTWSNGLQDGYGTETYSDGGGWTRTSAVEAGCWREEGGPSAQ

SEQ ID NO: 802042 - protein, 748 aa, Homo sapiens
MSSGGRFNFDDGGSYCGGWEDGKAHGHGVCTGPKGQGEYTGSWSHGFEVLGVYTWPSGNTYQGTWAQGKRHGIGLESKGKWVYKGEWTHGFKGRYGVRECAGNGAKYEGTWSNGLQDGYGTETYSDGGTYQGQWVGGMRQGYGVRQSVPYGMAAVIRSPLRTSINSLRSEHTNGTALHPDASPAVAGSPAVSRGGFVLVAHSDSEILKSKKKGLFRRSLLSGLKLRKSESKSSLASQRSKQSSFRSEAGMSTVSSTASDIHSTISLGEAEAELAVIEDDIDATTTETYVGEWKNDKRSGFGVSQRSDGLKYEGEWASNRRHGYGCMTFPDGTKEEGKYKQNILVGGKRKNLIPLRASKIREKVDRAVEAAERAATIAKQKAEIAASRTSHSRAKAEAALTAAQKAQEEARIARITAKEFSPSFQHRENGLEYQRPKRQTSCDDIEVLSTGTPLQQESPELYRKGTTPSDLTPDDSPLQSFPTSPAATPPPAPAARNKVAHFSRQVSVDEERGGDIQMLLEGRAGDCARSSWGEEQAGGSRGVRSGALRGGLLVDDFRTRGSGRKQPGNPKPRERRTESPPVFTWTSHHRASNHSPGGSRLLELQEEKLSNYRMEMKPLLRMETHPQKRRYSKGGACRGLGDDHRPEDRGFGVQRLRSKAQNKENFRPASSAEPAVQKLASLRLGGAEPRLLRWDLTFSPPQKSLPVALESDEENGDELKSSTGSAPILVVMVILLNIGVAILFINFFI

SEQ ID NO: 802043 - protein, 150 aa, Homo sapiens; identical to SEQ ID NO: 802041

SEQ ID NO: 802044 - protein, 187 aa, Homo sapiens
MSSGGRFNFDDGGSYCGGWEDGKAHGHGVCTGPKGQGEYTGSWSHGFEVLGVYTWPSGNTYQGTWAQGKRHGIGLESKGKWVYKGEWTHGFKGRYGVRECAGNGAKYEGTWSNGLQDGYGTETYSDGDATAFGAEPGPEARELPAAAAAAAAAAAAAAVRWFLCREPWPALQLPACLDSPISTPQCT

SEQ ID NO: 802045 - protein, 37 aa, Homo sapiens
MGSIKQPRVQPRNRRLGPPRGWPPEPEKVGPLGSVPP

SEQ ID NO: 802046 - protein, 748 aa, Homo sapiens; identical to SEQ ID NO: 802042

SEQ ID NO: 802047 - protein, 748 aa, Homo sapiens; identical to SEQ ID NO: 802042

SEQ ID NO: 802048 - protein, 335 aa, Homo sapiens
SLPGSPAPSQRCFKPYPLITPCYIKTTTRQLSSPNHSPSQSPNQSPRIKRRPEPSLSRGSRTALASVAAPAKKHRADGGLAAGLSRSADWTEELGARTPRVGGSAHLLERGVASDSGGGVSPALAAKASGAPAAADGFQNVFTGRTLLEKLFSQQENGPPEEAEKFCSRIIAMGLLLPFSDCFREPCNQNAQTNAASFDQDQLYTWAAVSQPTHSLDYSEGQFPRRVPSMGPPSKPPDEEHRLEDAETESQSAVSETPQKRSDAVQKEVVDMKSEGQATVIQQLEQTIEDLRTKIAELERQYPALDTEVASGHQGLENGVTASGDVCLEALRLEE

SEQ ID NO: 802049 - protein, 99 aa, Homo sapiens
VQQVEEARGFLADEMDAADIVCVADVVPRDPLALIFLLQGWRGVEIDRRYAVQASLDLLASSDPPASVSRVAEITGGNVDMAWHSEIPGKTFSYLSSFS

SEQ ID NO: 802050 - protein, 131 aa, Homo sapiens
VQQVEEARGFLADEMDAADIVCVADVVPRDPLALIFLLQGWRGVEIDRRYAVQASLDLLASSDPPASVSRVAEITVEMRFCHVSQSDLELLTSGHPPTLASQSTGITGGNVDMAWHSEIPGKTFSYLSSFS

SEQ ID NO: 802051 - protein, 419 aa, Homo sapiens
MGEKKPEPLDFVKDFQEYLTQQTHHVNMISGSVSGDKEAEALQGAGTDGDQNGLDHPSVEVSLDENSGMLVDGFERTFDGKLKCRYCNYASKGTARLIEHIRIHTGEKPHRCHLCPFASAYERHLEAHMRSHTGEKPYKCELCSFRCSDRSNLSHHRRRKHKMVPIKGTRSSLSSKKMWGVLQKKTSNLGYSRRALINLSPPSMVVQKPDYLNDFTHEIPNIQTDSYESMAKTTPTGGLPRDPQELMVDNPLNQLSTLAGQLSSLPPENQNPASPDVVPCPDEKPFMIQQPSTQAVVSAVSASIPQSSSPTSPEPRPSHSQRNYSPVAGPSSEPSAHTSTPSIGNSQPSTPAPALPVQDPQLLHHCQHCDMYFADNILYTIHMGCHGYENPFQCNICGCKCKNKYDFACHFARGQHNQH

SEQ ID NO: 802052 - protein, 419 aa, Homo sapiens; identical to SEQ ID NO: 802051

SEQ ID NO: 802053 - protein, 419 aa, Homo sapiens; identical to SEQ ID NO: 802051

SEQ ID NO: 802054 - protein, 488 aa, Homo sapiens
MTLSGGGSASDMSGQTVLTAEDVDIDVVGEGDDGLEEKDSDAGCDSPAGPPELRLDEADEVPPAAPHHGQPQPPHQQPLTLPKEAAGAGAGPGGDVGAPEADGCKGGVGGEEGGASGGGPGAGSGSAGGLAPSKPKNSLVKPPYSYIALITMAILQSPQKKLTLSGICEFISNRFPYYREKFPAWQNSIRHNLSLNDCFVKIPREPGNPGKGNYWTLDPQSEDMFDNGSFLRRRKRFKRHQQEHLREQTALMMQSFGAYSLAAAAGAAGPYGRPYGLHPAAAAGAYSHPAAAAAAAAAAALQYPYALPPVAPVLPPAVPLLPSGELGRKAAAFGSQLGPGLQLQLNSLGAAAAAAGTAGAAGTTASLIKSEPSARPSFSIENIIGGGPAAPGGSAVGAGVAGGTGGSGGGSTAQSFLRPPGTVQSAALMATPLKPNGRRNRDAPMAGTQGPAAASSNKCTSRLRALSQARSRSRCPILDSASPQFPFP

SEQ ID NO: 802055 - protein, 478 aa, Homo sapiens
MTLSGGGSASDMSGQTVLTAEDVDIDVVGEGDDGLEEKDSDAGCDSPAGPPELRLDEADEVPPAAPHHGQPQPPHQQPLTLPKEAAGAGAGPGGDVGAPEADGCKGGVGGEEGGASGGGPGAGSGSAGGLAPSKPKNSLVKPPYSYIALITMAILQSPQKKLTLSGICEFISNRFPYYREKFPAWQNSIRHNLSLNDCFVKIPREPGNPGKGNYWTLDPQSEDMFDNGSFLRRRKRFKRHQQEHLREQTALMMQSFGAYSLAAAAGAAGPYGRPYGLHPAAAAGAYSHPAAAAAAAAAAALQYPYALPPVAPVLPPAVPLLPSGELGRKAAAFGSQLGPGLQLQLNSLGAAAAAAGTAGAAGTTASLIKSEPSARPSFSIENIIGGGPAAPGGSAVGAGVAGGTGGSGGGSTAQSFLRPPGTVQSAALMATHQPLSLSRTTATIAPILSVPLSGQFLQPAASAAAAAAAAAQAKWPAQ

SEQ ID NO: 802056 - protein, 109 aa, Homo sapiens
  misc_feature (77)..(77): Xaa can be any naturally occurring amino acid
MALKFYWVRDLLSSRHSSIEYSSNYSREIGDYSNSIYSIVILTRYRLLLLLLLKFQQKKITAASKNAPAQKVPAQKXTGQKAAPAPKAQKGQKAPAQKAPAPKASGKKA

SEQ ID NO: 802057 - protein, 1228 aa, Homo sapiens
AGQLQRSRGAGGGAQAVRLGSAECEAWRAAARSDGPGAATPRGRPAARRAGDLPLHAPCALQLAGGTMKKFSRMPKSEGGSGGGAAGGGAGGAGAGAGCGSGGSSVGVRVFAVGRHQVTLEESLAEGGFSTVFLVRTHGGIRCALKRMYVNNMPDLNVCKREITIMKELSGHKNIVGYLDCAVNSISDNVWEVLILMEYCRAGQVVNQMNKKLQTGFTEPEVLQIFCDTCEAVARLHQCKTPIIHRDLKVENILLNDGGNYVLCDFGSATNKFLNPQKDGVNVVEEEIKKYTTLSYRAPEMINLYGGKPITTKADIWALGCLLYKLCFFTLPFGESQVAICDGNFTIPDNSRYSRNIHCLIRFMLEPDPEHRPDIFQVSYFAFKFAKKDCPVSNINNSSIPSALPEPMTASEAAARKSQIKARITDTIGPTETSIAPRQRPKANSATTATPSVLTIQSSATPVKVLAPGEFGNHRPKGALRPGNGPEILLGQGPPQQPPQQHRVLQQLQQGDWRLQQLHLQHRHPHQQQQQQQQQQQQQQQQQQQQQQQQQQQHHHHHHHHLLQDAYMQQYQHATQQQQMLQQQFLMHSVYQPQPSASQYPTMMPQYQQAFFQQQMLAQHQPSQQQASPEYLTSPQEFSPALVSYTSSLPAQVGTIMDSSYSANRSVADKEAIANFTNQKNISNPPDMSGWNPFGEDNFSKLTEEELLDREFDLLRSNRLEERASSDKNVDSLSAPHNHPPEDPFGSVPFISHSGSPEKKAEHSSINQENGTANPIKNGKTSPASKDQRTGKKTSVQGQVQKGNDESESDFESDPPSPKSSEEEEQDDEEVLQGEQGDFNDDDTEPENLGHRPLLMDSEDEEEEEKHSSDSDYEQAKAKYSDMSSVYRDRSGSGPTQDLNTILLTSAQLSSDVAVETPKQEFDVFGAVPFFAVRAQQPQQEKNEKNLPQHRFPAAGLEQEEFDVFTKAPFSKKVNVQECHAVGPEAHTIPGYPKSVDVFGSTPFQPFLTSTSKSESNEDLFGLVPFDEITGSQQQKVKQRSLQKLSSRQRRTKQDMSKSNGKRHHGTPTSTKKTLKPTYRTPERARRHKKVGRRDSQSSNEFLTISDSKENISVALTDGKDRGNVLQPEESLLDPFGAKPFHSPDLSWHPPHQGLSDIRADHNTVLPGRPRQNSLHGSFHSADVLKMDDFGAVPFTELVVQSITPHQSQQSQPVELDPFGAAPFPSKQ

SEQ ID NO: 802058 - protein, 745 aa, Homo sapiens
MALKFYWVRDLLSSRHSSIEYSSNYSREIGDYSNSIYSIVILTSQQQQQQQQQQQQQQQQQQQQQQQQQQHHHHHHHHLLQDAYMQQYQHATQQQQMLQQQFLMHSVYQPQPSASQYPTMMPQYQQAFFQQQMLAQHQPSQQQASPEYLTSPQEFSPALVSYTSSLPAQVGTIMDSSYSANRSVADKEAIANFTNQKNISNPPDMSGWNPFGEDNFSKLTEEELLDREFDLLRSNRLEERASSDKNVDSLSAPHNHPPEDPFGSVPFISHSGSPEKKAEHSSINQENGTANPIKNGKTSPASKDQRTGKKTSVQGQVQKGNDESESDFESDPPSPKSSEEEEQDDEEVLQGEQGDFNDDDTEPENLGHRPLLMDSEDEEEEEKHSSDSDYEQAKAKYSDMSSVYRDRSGSGPTQDLNTILLTSAQLSSDVAVETPKQEFDVFGAVPFFAVRAQQPQQEKNEKNLPQHRFPAAGLEQEEFDVFTKAPFSKKVNVQECHAVGPEAHTIPGYPKSVDVFGSTPFQPFLTSTSKSESNEDLFGLVPFDEITGSQQQKVKQRSLQKLSSRQRRTKQDMSKSNGKRHHGTPTSTKKTLKPTYRTPERARRHKKVGRRDSQSSNEFLTISDSKENISVALTDGKDRGNVLQPEESLLDPFGAKPFHSPDLSWHPPHQGLSDIRADHNTVLPGRPRQNSLHGSFHSADVLKMDDFGAVPFTELVVQSITPHQSQQSQPVELDPFGAAPFPSKQ

SEQ ID NO: 802059 - protein, 625 aa, Homo sapiens [sequence omitted]

SEQ ID NO: 802060 - protein, 759 aa, Homo sapiens
AGQLQRSRGAGGGAQAVRLGSAECEAWRAAARSDGPGAATPRGRPAARRAGDLPLHAPCALQLAGGTMKKFSRMPKSEGGSGGGAAGGGAGGAGAGAGCGSGGSSVGVRVFAVGRHQVTLEESLAEGGFSTVFLVRTHGGIRCALKRMYVNNMPDLNVCKREITIMKELSGHKNIVGYLDCAVNSISDNVWEVLILMEYCRAGQVVNQMNKKLQTGFTEPEVLQIFCDTCEAVARLHQCKTPIIHRDLKVENILLNDGGNYVLCDFGSATNKFLNPQKDGVNVVEEEIKKYTTLSYRAPEMINLYGGKPITTKADIWALGCLLYKLCFFTLPFGESQVAICDGNFTIPDNSRYSRNIHCLIRFMLEPDPEHRPDIFQVSYFAFKFAKKDCPVSNINNSSIPSALPEPMTASEAAARKSQIKARITDTIGPTETSIAPRQRPKANSATTATPSVLTIQSSATPVKVLAPGEFGNHRPKGALRPGNGPEILLGQGPPQQPPQQHRVLQQLQQGDWRLQQLHLQHRHPHQQQQQQQQQQQQQQQQQQQQQQQQQQQHHHHHHHHLLQDAYMQQYQHATQQQQMLQQQFLMHSVYQPQPSASQYPTMMPQYQQAFFQQQMLAQHQPSQQQASPEYLTSPQEFSPALVSYTSSLPAQVGTIMDSSYSANRSVADKEAIANFTNQKNISNPPDMSGWNPFGEDNFSKLTEEELLDREFDLLRSNRLEERASSDKNVDSLSAPHNHPPEDPFGSVPFISHSGKLHM

SEQ ID NO: 802061 - protein, 726 aa, Homo sapiens
AGQLQRSRGAGGGAQAVRLGSAECEAWRAAARSDGPGAATPRGRPAARRAGDLPLHAPCALQLAGGTMKKFSRMPKSEGGSGGGAAGGGAGGAGAGAGCGSGGSSVGVRVFAVGRHQVTLEESLAEGGFSTVFLVRTHGGIRCALKRMYVNNMPDLNVCKREITIMKELSGHKNIVGYLDCAVNSISDNVWEVLILMEYCRAGQVVNQMNKKLQTGFTEPEVLQIFCDTCEAVARLHQCKTPIIHRDLKVENILLNDGGNYVLCDFGSATNKFLNPQKDGVNVVEEEIKKYTTLSYRAPEMINLYGGKPITTKADIWALGCLLYKLCFFTLPFGESQVAICDGNFTIPDNSRYSRNIHCLIRFMLEPDPEHRPDIFQVSYFAFKFAKKDCPVSNINKCCKQLLRHGALLTENSSIPSALPEPMTASEAAARKSQIKARITDTIGPTETSIAPRQRPKANSATTATPSVLTIQSSATPVKVLAPGEFGNHRPKGALRPGNGPEILLGQGPPQQPPQQHRVLQQLQQGDWRLQQLHLQHRHPHQQQQQQQQQHHHHHHHHLLQDAYMQQYQHATQQQQMLQQQFLMHSVYQPQPSASQYPTMMPQYQQAFFQQQMLAQHQPSQQQASPEYLTSPQEFSPALVSYTSSLPAQVGTIMDSSYSANRSVADKEAIANFTNQKNISNPPDMSGWNPFGEDNFSKLTEEELLDREFDLLRSSKGHLKAYFASQ

SEQ ID NO: 802062 - protein, 1228 aa, Homo sapiens; identical to SEQ ID NO: 802057

SEQ ID NO: 802063 - protein, 865 aa, Homo sapiens
MLEPDPEHRPDIFQVSYFAFKFAKKDCPVSNINNSSIPSALPEPMTASEAAARKSQIKARITDTIGPTETSIAPRQRPKANSATTATPSVLTIQSSATPVKVLAPGEFGNHRPKGALRPGNGPEILLGQGPPQQPPQQHRVLQQLQQGDWRLQQLHLQHRHPHQQQQQQQQQQQQQQQQQQQQQQQQQQQHHHHHHHHLLQDAYMQQYQHATQQQQMLQQQFLMHSVYQPQPSASQYPTMMPQYQQAFFQQQMLAQHQPSQQQASPEYLTSPQEFSPALVSYTSSLPAQVGTIMDSSYSANRSVADKEAIANFTNQKNISNPPDMSGWNPFGEDNFSKLTEEELLDREFDLLRSNRLEERASSDKNVDSLSAPHNHPPEDPFGSVPFISHSGSPEKKAEHSSINQENGTANPIKNGKTSPASKDQRTGKKTSVQGQVQKGNDESESDFESDPPSPKSSEEEEQDDEEVLQGEQGDFNDDDTEPENLGHRPLLMDSEDEEEEEKHSSDSDYEQAKAKYSDMSSVYRDRSGSGPTQDLNTILLTSAQLSSDVAVETPKQEFDVFGAVPFFAVRAQQPQQEKNEKNLPQHRFPAAGLEQEEFDVFTKAPFSKKVNVQECHAVGPEAHTIPGYPKSVDVFGSTPFQPFLTSTSKSESNEDLFGLVPFDEITGSQQQKVKQRSLQKLSSRQRRTKQDMSKSNGKRHHGTPTSTKKTLKPTYRTPERARRHKKVGRRDSQSSNEFLTISDSKENISVALTDGKDRGNVLQPEESLLDPFGAKPFHSPDLSWHPPHQGLSDIRADHNTVLPGRPRQNSLHGSFHSADVLKMDDFGAVPFTELVVQSITPHQSQQSQPVELDPFGAAPFPSKQ

SEQ ID NO: 802064 - protein, 759 aa, Homo sapiens; identical to SEQ ID NO: 802060

SEQ ID NO: 802065 - protein, 233 aa, Homo sapiens
SGRRDSCLPGVVAPRACLHPRGQVPRLGSVGKMATPGMSWQQHYYGGSAAKFAPSPATAQLAGHSMDYSQEMHLKMSKKIAQLTKVIYALNTKNDEHESAIQALKDAHEEEIQQILAETREKILQYKSKVTEELDLRRKIQVLESSLEDHIKMKQQALTEFEAYKHRVEDMQLCAEAQHVQRIVTMSREVEEIRRKFEEKLRSFGQLQVQFEKDKRLALEDLQAAHRREIQEL

SEQ ID NO: 802066 - protein, 147 aa, Homo sapiens
RPPRLLPPGRRCSTGLPPPAGTGAPAGVCWEDGDPGHELAAALLRRLGGQIRALAGHRTAGWAQHGLQPGDAPENEQENRPAHQGKGGSDGAGGDPVRAAPDSPVSPGGSAPCARSEGNSTPPPKQQPETPPKPCKLWWNAGNMNLS

SEQ ID NO: 802067 - protein, 193 aa, Homo sapiens
SRTCYPLQHEEDKKSAMSQLLQLKDREKNAARDSWQKKVEDLLNQVIYALNTKNDEHESAIQALKDAHEEEIQQILAETREKILQYKSKVTEELDLRRKIQVLESSLEDHIKMKQQALTEFEAYKHRVEDMQLCAEAQHVQRIVTMSREVEEIRRKFEEKLRSFGQLQVQFEKDKRLALEDLQAAHRREIQEL

SEQ ID NO: 802068 - protein, 629 aa, Homo sapiens
AEQTRPGGELGAAGSSCLPQDSSCREPQGLWAARSWGHSPESVAMVCREQLSKNQVKWVFAGITCVSVVVIAAIVLAITLRRPGCELEACSPDADMLDYLLSLGQISRRDALEVTWYHAANSKKAMTAALNSNITVLEADVNVEGLGTANETGVPIMAHPPTIYSDNTLEQWLDAVLGSSQKGIKLDFKNIKAVGPSLDLLRQLTEEGKVRRPIWINADILKGPNMLISTEVNATQFLALVQEKYPKATLSPGWTTFYMSTSPNRTYTQAMVEKMHELVGGVPQRVTFPVRSSMVRAAWPHFSWLLSQSERYSLTLWQAASDPMSVEDLLYVRDNTAVHQVYYDIFEPLLSQFKQLALNATRKPMYYTGGSLIPLLQLPGDDGLNVEWLVPDVQGSGKTATMTLPDTEGMILLNTGLEGTVAENPVPIVHTPSGNILTLESCLQQLATHPGHWGIHLQIAEPAALRPSLALLARLSSLGLLHWPVWVGAKISHGSFSVPGHVAGRELLTAVAEVFPHVTVAPGWPEEVLGSGYREQLLTDMLELCQGLWQPVSFQMQAMLLGHSTAGAIGRLLASSPRATVTVEHNPAGGDYASVRTALLAARAVDRTRVYYRLPQGYHKDLLAHVGRN

SEQ ID NO: 802069 - protein, 186 aa, Homo sapiens
NVRLVRPEFMDSREPWRRVGGRMESGDEAAIERHRVHLRSATLRDAVPATLHLLPCEVAVDGPAPVGRFFTPAIRQGPEGLEVSFRGRCLRGEEVAVPPGLVGYVMVTEEKKVSMGKPDPLRDSGTDDQEEEPLERDFDRFIGATANFSRFTLWGLETIPGPDAKVRGALTWPSLAAAIHAQVPED

SEQ ID NO: 802070 - protein, 183 aa, Homo sapiens
RFPRQLQCPREPWRRVGGRMESGDEAAIERHRVHLRSATLRDAVPATLHLLPCEVAVDGPAPVGRFFTPAIRQGPEGLEVSFRGRCLRGEEVAVPPGLVGYVMVTEEKKVSMGKPDPLRDSGTDDQEEEPLERDFDRFIGATANFSRFTLWGLETIPGPDAKVRGALTWPSLAAAIHAQVPED

SEQ ID NO: 802071 - protein, 266 aa, Homo sapiens
RFPRQLQCPREPWRRVGGRMESGDEAAIERHRVHLRSATLRDAVPATLHLLPCEVAVDGPAPVGRFFTPAIRQGPEGLEVSFRGRCLRGEEVAVPPGLVGYVMVTEEKKVSMGKPDPLRDSGTDDQEEEPLERDFDRFIGATANFSRFTLWGLETIPGPDAKVRGALTWPSLAAAVSRRGVPSCPRVDGLGSTIAQTEPGGFYWVVCGKRSSLTTLPSMSRSGYSEQLGPSSGMGASLPPCLTSPTVEATPVADSRTGARGLRTRA

SEQ ID NO: 802072 - protein, 268 aa, Homo sapiens
KQAGTAWGLRSREPWRRVGGRMESGDEAAIERHRVHLRSATLRDAVPATLHLLPCEVAVDGPAPVGRFFTPAIRQGPEGLEVSFRGRCLRGEEVAVPPGLVGYVMVTEEKKVSMGKPDPLRDSGTDDQEEEPLERDFDRFIGATANFSRFTLWGLETIPGPDAKVRGALTWPSLAAAVSRRGVPSCPRVDGLGSTIAQTEPGGFYWVVCGKRSSLTTLPSMSRSGYSEQLGPSSGMGASLPPCLTSPTVEATPVADSRTGARGLRTRA

SEQ ID NO: 802073 - protein, 184 aa, Homo sapiens
DAWATHASGPREPWRRVGGRMESGDEAAIERHRVHLRSATLRDAVPATLHLLPCEVAVDGPAPVGRFFTPAIRQGPEGLEVSFRGRCLRGEEVAVPPGLVGYVMVTEEKKVSMGKPDPLRDSGTDDQEEEPLERDFDRFIGATANFSRFTLWGLETIPGPDAKVRGALTWPSLAAAIHAQVPED

SEQ ID NO: 802074 - protein, 183 aa, Homo sapiens; identical to SEQ ID NO: 802070

SEQ ID NO: 802075 - protein, 186 aa, Homo sapiens; identical to SEQ ID NO: 802069

SEQ ID NO: 802076 - protein, 239 aa, Homo sapiens
RFPRQLQCPREPWRRVGGRMESGDEAAIERHRVHLRSATLRDAVPATLHLLPCEVAVDGPAPVGRFFTPAIRQGPEGEPAAGLRLPAAPAPACALLIAWAPGDRGPSGGGGRAAPGSTQRGSCLRPFAPPAPGLEVSFRGRCLRGEEVAVPPGLVGYVMVTEEKKVSMGKPDPLRDSGTDDQEEEPLERDFDRFIGATANFSRFTLWGLETIPGPDAKVRGALTWPSLAAAIHAQVPED

SEQ ID NO: 802077 - protein, 183 aa, Homo sapiens; identical to SEQ ID NO: 802070

SEQ ID NO: 802078 - protein, 183 aa, Homo sapiens; identical to SEQ ID NO: 802070

SEQ ID NO: 802079 - protein, 239 aa, Homo sapiens; identical to SEQ ID NO: 802076

SEQ ID NO: 802080 - protein, 271 aa, Homo sapiens
RFPRQLQCPREPWRRVGGRMESGDEAAIERHRVHLRSATLRDAVPATLHLLPCEVAVDGPAPVGRFFTPAIRQGPEGEPAAGLRLPAAPAPACALLIAWAPGDRGPSGGGGRAAPGSTQRGSCLRPFAPPAPGLEVSFRGRCLRGEEVAVPPGLVGYVMVTEEKKVSMGKPDPLRDSGTDDQEEEPLERDFDRFIGATANFSRFTLWGLETIPGPDAKVRGALTWPSLAAANDLCLSQRPPLCIHAYSSEHHCKKSPQPLCHPPRLKGNPL

SEQ ID NO: 802081 - protein, 960 aa, Homo sapiens
MATEPRGGAGPSEPEHPATNPPGAAPPACADSDPGASEPGLLARRGSGSALGGPLDPQFVGPSDTSLGAAPGHRVLPCGPSPQHHRALRFSYHLEGSQPRPGLHQGNRILVKSLSLDPGQSLEPHPEGPQRLRSDPGPPTETPSQRPSPLKRAPGPKPQVPPKPSYLQMPRMPPPLEPIPPPPSRPLPADPRVAKGLAPRAEASPSSAAVSSLIEKFEREPVIVASDRPVPGPSPGPPEPVMLPQPTSQPPVPQLPEGEASRCLFLLAPGPRDGEKVPNRDSGIDSISSPSNSEETCFVSDDGPPSHSLCPGPPALASVPVALADPHRPGSQEVDSDLEEEDDEEEEEEKDREIPVPLMERQESVELTVQQKVFHIANELLQTEKAYVSRLHLLDQVFCARLLEEARNRSSFPADVVHGIFSNICSIYCFHQQFLLPELEKRMEEWDRYPRIGDILQKLAPFLKMYGEYVKNFDRAVELVNTWTERSTQFKVIIHEVQKEEACGNLTLQHHMLEPVQRIPRYELLLKDYLLKLPHGSPDSKDAQKSLELIATAAEHSNAAIRKMERMHKLLKVYELLGGEEDIVSPTKELIKEGHILKLSAKNGTTQDRYLILFNDRLLYCVPRLRLLGQKFSVRARIDVDGMELKESSNLNLPRTFLVSGKQRSLELQARTEEEKKDWVQAINSTLLKHEQTLETFKLLNSTNREDEDTPPNSPNVDLGKRAPTPIREKEVTMCMRCQEPFNSITKRRHHCKACGHVVCGKCSEFRARLVYDNNRSNRVCTDCYVALHGVPGSSPACSQHTPQRRRSILEKQASVAAENSVICSFLHYMEKGGKGWHKAWFVVPENEPLVLYIYGAPQDVKAQRSLPLIGFEVGPPEAGERPDRRHVFKITQSHLSWYFSPETEELQRRWMAVLGRAGRGDTFCPGPTLSEDREMEEAPVAALGATAEPPESPQTRDKT

SEQ ID NO: 802082 - protein, 75 aa, Homo sapiens
  misc_feature (11)..(11): Xaa can be any naturally occurring amino acid
  misc_feature (62)..(62): Xaa can be any naturally occurring amino acid
EPAEQKELSQXQAEDGSTANGRRMGPGPAIALGLTKVSRLHNSWLSRQNQTMSIPDGVCTAXFLPHPHTPLKPQC

SEQ ID NO: 802083 - protein, 611 aa, Homo sapiens
ASCNPEAMPFGEKEPVELTVQQKVFHIANELLQTEKAYVSRLHLLDQVFCARLLEEARNRSSFPADVVHGIFSNICSIYCFHQQFLLPELEKRMEEWDRYPRIGDILQKLAPFLKMYGEYVKNFDRAVELVNTWTERSTQFKVIIHEVQKEEACGNLTLQHHMLEPVQRIPRYELLLKDYLLKLPHGSPDSKDAQKSLELIATAAEHSNAAIRKMERMHKLLKVYELLGGEEDIVSPTKELIKEGHILKLSAKNGTTQDRYLILFNDRLLYCVPRLRLLGQKFSVRARIDVDGMELKESSNLNLPRTFLVSGKQRSLELQARTEEEKKDWVQAINSTLLKHEQTLETFKLLNSTNREDEDTPPNSPNVDLGKRAPTPIREKEVTMCMRCQEPFNSITKRRHHCKACGHVVCGKCSEFRARLVYDNNRSNRVCTDCYVALHGVPGSSPACSQHTPQRRRSILEKQASVAAENSVICSFLHYMEKGGKGWHKAWFVVPENEPLVLYIYGAPQDVKAQRSLPLIGFEVGPPEAGERPDRRHVFKITQSHLSWYFSPETEELQRRWMAVLGRAGRGDTFCPGPTLSEDREMEEAPVAALGATAEPPESPQTRDKT

SEQ ID NO: 802084 - protein, 960 aa, Homo sapiens; identical to SEQ ID NO: 802081

SEQ ID NO: 802085 - protein, 960 aa, Homo sapiens; identical to SEQ ID NO: 802081

SEQ ID NO: 802086 - protein, 888 aa, Homo sapiens
MATEPRGGAGPSEPEHPATNPPGAAPPACADSDPGASEPGLLARRGSGSALGGPLDPQFVGPSDTSLGAAPGHRVLPCGPSPQHHRALRFSYHLEGSQPRPGLHQGNRILVKSLSLDPGQSLEPHPEGPQRLRSDPGPPTETPSQRPSPLKRAPGPKPQVPPKPSYLQMPRMPPPLEPIPPPPSRPLPADPRVAKGLAPRAEASPSSAAVSSLIEKFEREPVIVASDRPVPGPSPGPPEPVMLPQPTSQPPVPQLPEGEASRCLFLLAPGPRDGEKVPNRDSGIDSISSPSNSEETCFVSDDGPPSHSLCPGPPALASVPVALADPHRPGSQEVDSDLEEEDDEEEEEEKDREIPVPLMERQESVELTVQQKVFHIANELLQTEKAYVSRLHLLDQVFCARLLEEARNRSSFPADVVHGIFSNICSIYCFHQQFLLPELEKRMEEWDRYPRIGDILQKLAPFLKMYGEYVKNFDRAVELVNTWTERSTQFKVIIHEVQKEEACGNLTLQHHMLEPVQRIPRYELLLKDYLLKLPHGSPDSKDAQKSLELIATAAEHSNAAIRKMERMHKLLKVYELLGGEEDIVSPTKELIKEGHILKLSAKNGTTQDRYLILFNDRLLYCVPRLRLLGQKFSVRARIDVDGMELKESSNLNLPRTFLVSGKQRSLELQARTEEEKKDWVQAINSTLLKHEQTLETFKLLNSTNREDEDTPPNSPNVDLGKRAPTPIREKEVTMCMRCQEPFNSITKRRHHCKACGHVVCGKCSEFRARLVYDNNRSNRVCTDCYVALHGVPGSSPACSQHTPQRRRSILEKQASVAAENSVICSFLHYMEKGGKGWHKAWFVVPENEPLVLYIYGAPQVCILLLRVLSATWQSQIQSLTSPWPWKIR

SEQ ID NO: 802087 - protein, 414 aa, Homo sapiens
MATEPRGGAGPSEPEHPATNPPGAAPPACADSDPGASEPGLLARRGSGSALGGPLDPQFVGPSDTSLGAAPGHRVLPCGPSPQHHRALRFSYHLEGSQPRPGLHQGNRILVKSLSLDPGQSLEPHPEGPQRLRSDPGPPTETPSQRPSPLKRAPGPKPQVPPKPSYLQMPRMPPPLEPIPPPPSRPLPADPRVAKGLAPRAEASPSSAAVSSLIEKFEREPVIVASDRPVPGPSPGPPEPVMLPQPTSQPPVPQLPEGEASRCLFLLAPGPRDGEKVPNRDSGIDSISSPSNSEETCFVSDDGPPSHSLCPGPPALASVPVALADPHRPGSQEVDSDLEEEDDEEEEEEKDREIPWLTASTRPQGYPVFYRPDPWQGQRAGQGNRGEDNGYSVFCVFLCVFFFLRKIQFISGLQ

SEQ ID NO: 802088 - protein, 99 aa, Homo sapiens
KVVKLEGADLGRRGLQGCGGASAARSEPLCFCLSQKEEACGNLTLQHHMLEPVQRIPRYELLLKDYLLKLPHGSPDSKDAQSECVHPGPFLLLHTNSSR

SEQ ID NO: 802089 - protein, 763 aa, Homo sapiens
VVTGIVVLQKSGNRPEDLRAAQLPGRLELLLNNFCSAMSPAPDAAPAPASISLFDLSADAPVFQGLSLVSHAPGEALARAPRTSCSGSGERESPERKLLQGPMDISEKLFCSTCDQTFQNHQEQREHYKLDWHRFNLKQRLKDKPLLSALDFEKQSSTGDLSSISGSEDSDSASEEDLQTLDRERATFEKLSRPPGFYPHRVLFQNAQGQFLYAYRCVLGPHQDPPEEAELLLQNLQSRGPRDCVVLMAAAGHFAGAIFQGREVVTHKTFHRYTVRAKRGTAQGLRDARGGPSHSAGANLRRYNEATLYKDVRDLLAGPSWAKALEEAGTILLRAPRSGRSLFFGGKGAPLQRGDPRLWDIPLATRRPTFQELQRVLHKLTTLHVYEEDPREAVRLHSPQTHWKTVREERKKPTEEEIRKICRDEKEALGQNEESPKQGSGSEGEDGFQVELELVELTVGTLDLCESEVLPKRRRRKRNKKEKSRDQEAGAHRTLLQQTQEEEPSTQSSQAVAAPLGPLLDEAKAPGQPELWNALLAACRAGDVGVLKLQLAPSPADPRVLSLLSAPLGSGGFTLLHAAAAAGRGSVVRLLLEAGADPTVQDSRARPPYTVAADKSTRNEFRRFMEKNPDAYDYNKAQVPGPLTPEMEARQATRKREQKAARRQREEQQQRQQEQEEREREEQRRFAALSDREKRALAAERRLAAQLGAPTSPIPDSAIVNTRRCWSCGASLQGLTPFHYLDFSFCSTRCLQDHRRQAGRPSS

SEQ ID NO: 802090 - protein, 189 aa, Homo sapiens
LLCISHSEYNSCHCGFGLPFYVQFLFPYLGSGERESPERKLLQGPMDISEKLFCSTCDQTFQNHQEQREHYKLDWHRFNLKQRLKDKPLLSALDFEKQSSTGDLSSISGSEDSDSASEEDLQTLDRERATFEKLSRPPGFYPHRVLFQNAQGQFLYAYRCVLGPHQASDSTGCMANPNLLYTQPRFPLA

SEQ ID NO: 802091 - protein, 766 aa, Homo sapiens
VIAVEAGLNGRGKSGNRPEDLRAAQLPGRLELLLNNFCSAMSPAPDAAPAPASISLFDLSADAPVFQGLSLVSHAPGEALARAPRTSCSGSGERESPERKLLQGPMDISEKLFCSTCDQTFQNHQEQREHYKLDWHRFNLKQRLKDKPLLSALDFEKQSSTGDLSSISGSEDSDSASEEDLQTLDRERATFEKLSRPPGFYPHRVLFQNAQGQFLYAYRCVLGPHQDPPEEAELLLQNLQSRGPRDCVVLMAAAGHFAGAIFQGREVVTHKTFHRYTVRAKRGTAQGLRDARGGPSHSAGANLRRYNEATLYKDVRDLLAGPSWAKALEEAGTILLRAPRSGRSLFFGGKGAPLQRGDPRLWDIPLATRRPTFQELQRVLHKLTTLHVYEEDPREAVRLHSPQTHWKTVREERKKPTEEEIRKICRDEKEALGQNEESPKQGSGSEGEDGFQVELELVELTVGTLDLCESEVLPKRRRRKRNKKEKSRDQEAGAHRTLLQQTQEEEPSTQSSQAVAAPLGPLLDEAKAPGQPELWNALLAACRAGDVGVLKLQLAPSPADPRVLSLLSAPLGSGGFTLLHAAAAAGRGSVVRLLLEAGADPTVQDSRARPPYTVAADKSTRNEFRRFMEKNPDAYDYNKAQVPGPLTPEMEARQATRKREQKAARRQREEQQQRQQEQEEREREEQRRFAALSDREKRALAAERRLAAQLGAPTSPIPDSAIVNTRRCWSCGASLQGLTPFHYLDFSFCSTRCLQDHRRQAGRPSS

SEQ ID NO: 802092 - protein, 463 aa, Homo sapiens
VVTGIVVLQKSGNRPEDLRAAQLPGRLELLLNNFCSAMSPAPDAAPAPASISLFDLSADAPVFQGLSLVSHAPGEALARAPRTSCSGSGERESPERKLLQGPMDISEKLFCSTCDQTFQNHQEQREHYKLDWHRFNLKQRLKDKPLLSALDFEKQSSTGDLSSISGSEDSDSASEEDLQTLDRERATFEKLSRPPGFYPHRVLFQNAQGQFLYAYRCVLGPHQDPPEEAELLLQNLQSRGPRDCVVLMAAAGHFAGAIFQGREVVTHKTFHRYTVRAKRGTAQGLRDARGGPSHSAGANLRRYNEATLYKDVRDLLAGPSWAKALEEAGTILLRAPRSGRSLFFGGKGAPLQRGDPRLWDIPLATRRPTFQELQRVLHKLTTLHVYEEDPREAVRLHSPQTHWKTVREERKKPTEEEIRKICRDEKEALGQNEESPKQGLITIWQLSDLSFCPKNALANSLLS

SEQ ID NO: 802093 - protein, 463 aa, Homo sapiens; identical to SEQ ID NO: 802092

SEQ ID NO: 802094 - protein, 463 aa, Homo sapiens; identical to SEQ ID NO: 802092

SEQ ID NO: 802095 - protein, 463 aa, Homo sapiens; identical to SEQ ID NO: 802092

SEQ ID NO: 802096 - protein, 361 aa, Homo sapiens [sequence omitted]

SEQ ID NO: 802097 - protein, 410 aa, Homo sapiens
VIAVEAGLNGRGKSGNRPEDLRAAQLPGRLELLLNNFCSAMSPAPDAAPAPASISLFDLSADAPVFQGLSLREHYKLDWHRFNLKQRLKDKPLLSALDFEKQSSTGDLSSISGSEDSDSASEEDLQTLDRERATFEKLSRPPGFYPHRVLFQNAQGQFLYAYRCVLGPHQDPPEEAELLLQNLQSRGPRDCVVLMAAAGHFAGAIFQGREVVTHKTFHRYTVRAKRGTAQGLRDARGGPSHSAGANLRRYNEATLYKDVRDLLAGPSWAKALEEAGTILLRAPRSGRSLFFGGKGAPLQRGDPRLWDIPLATRRPTFQELQRVLHKLTTLHVYEEDPREAVRLHSPQTHWKTVREERKKPTEEEIRKICRDEKEALGQNEESPKQGLITIWQLSDLSFCPKNALANSLLS

SEQ ID NO: 802098 - protein, 308 aa, Homo sapiens
GPYYYYISGRRSEVLPKRRRRKRNKKEKSRDQEAGAHRTLLQQTQEEEPSTQSSQAVAAPLGPLLDEAKAPGQPELWNALLAACRAGDVGVLKLQLAPSPADPRVLSLLSAPLGSGGFTLLHAAAAAGRGSVVRLLLEAGADPTVQDSRARPPYTVAADKSTRNEFRRFMEKNPDAYDYNKAQVPGPLTPEMEARQATRKREQKAARRQREEQQQRQQEQEEREREEQRRFAALSDREKRALAAERRLAAQLGAPTSPIPDSAIVNTRRCWSCGASLQGLTPFHYLDFSFCSTRCLQDHRRQAGRPSS

SEQ ID NO: 802099 - protein, 261 aa, Homo sapiens
VVTGIVVLQKSGNRPEDLRAAQLPGRLELLLNNFCSAMSPAPDAAPAPASISLFDLSADAPVFQGLSLVSHAPGEALARAPRTSCSGSGERESPERKLLQGPMDISEKLFCSTCDQTFQNHQEQREHYKLDWHRFNLKQRLKDKPLLSALDFEKQSSTGDLSSISGSEDSDSASEEDLQTLDRERATFEKLSRPPGFYPHRVLFQNAQGQFLYAYRCVLGPHQDPPEEAELLLQNLQSRGPRDCVVLMAAAGHFAGAIFQG

SEQ ID NO: 802100 - protein, 726 aa, Homo sapiens
MSPAPDAAPAPASISLFDLSADAPVFQGLSLVSHAPGEALARAPRTSCSGSGERESPERKLLQGPMDISEKLFCSTCDQTFQNHQEQREHYKLDWHRFNLKQRLKDKPLLSALDFEKQSSTGDLSSISGSEDSDSASEEDLQTLDRERATFEKLSRPPGFYPHRVLFQNAQGQFLYAYRCVLGPHQDPPEEAELLLQNLQSRGPRDCVVLMAAAGHFAGAIFQGREVVTHKTFHRYTVRAKRGTAQGLRDARGGPSHSAGANLRRYNEATLYKDVRDLLAGPSWAKALEEAGTILLRAPRSGRSLFFGGKGAPLQRGDPRLWDIPLATRRPTFQELQRVLHKLTTLHVYEEDPREAVRLHSPQTHWKTVREERKKPTEEEIRKICRDEKEALGQNEESPKQGSGSEGEDGFQVELELVELTVGTLDLCESEVLPKRRRRKRNKKEKSRDQEAGAHRTLLQQTQEEEPSTQSSQAVAAPLGPLLDEAKAPGQPELWNALLAACRAGDVGVLKLQLAPSPADPRVLSLLSAPLGSGGFTLLHAAAAAGRGSVVRLLLEAGADPTVQDSRARPPYTVAADKSTRNEFRRFMEKNPDAYDYNKAQVPGPLTPEMEARQATRKREQKAARRQREEQQQRQQEQEEREREEQRRFAALSDREKRALAAERRLAAQLGAPTSPIPDSAIVNTRRCWSCGASLQGLTPFHYLDFSFCSTRCLQDHRRQAGRPSS

SEQ ID NO: 802101 - protein, 463 aa, Homo sapiens; identical to SEQ ID NO: 802092

SEQ ID NO: 802102 - protein, 463 aa, Homo sapiens; identical to SEQ ID NO: 802092

SEQ ID NO: 802103 - protein, 463 aa, Homo sapiens; identical to SEQ ID NO: 802092

SEQ ID NO: 802104 - protein, 366 aa, Homo sapiens [sequence omitted]

SEQ ID NO: 802105 - protein, 164 aa, Homo sapiens
PPEIGINTPKTVAADKSTRNEFRRFMEKNPDAYDYNKAQVPGPLTPEMEARQATRKREQKAARRQREEQQQRQQEQEEREREEQRRFAALSDREKRALAAERRLAAQLGAPTSPIPDSAIVNTRRCWSCGASLQGLTPFHYLDFSFCSTRCLQDHRRQAGRPSS

SEQ ID NO: 802106 - protein, 208 aa, Homo sapiens
VIAVEAGLNGRGKSGNRPEDLRAAQLPGRLELLLNNFCSAMSPAPDAAPAPASISLFDLSADAPVFQGLSLREHYKLDWHRFNLKQRLKDKPLLSALDFEKQSSTGDLSSISGSEDSDSASEEDLQTLDRERATFEKLSRPPGFYPHRVLFQNAQGQFLYAYRCVLGPHQDPPEEAELLLQNLQSRGPRDCVVLMAAAGHFAGAIFQG

SEQ ID NO: 802107 - protein, 530 aa, Homo sapiens
HLAHLSFFLLFFRTLGGKRERVGQMPAAAVQEAVGVCSYGMQLSWDINDPQMPQELALFDQFREWPDGYVRFIYSSDEKKAQRHLSGWAMRNTNNHNGHILKKSCLGVVVCTQACTLPDGSRLQLRPAICDKARLKQQKKACPNCHSALELIPCRGHSGYPVTNFWRLDGNAIFFQAKGVHDHPRPESKSETEARRSAIKRQMASFYQPQKKRIRESEAEENQDSSGHFSNIPPLENPEDFDIVTETSFPIPGQPCPSFPKSDVYKATCDLATFQGDKMPPFQKYSSPRIYLPRPPCSYELANPGYTNSSPYPTLYKDSTSIPNDTDWVHLNTLQCNVNSYSSYERSFDFTNKQHGWKPALGKPSLVERTNHGQFQAMATRPYYNPELPCRYLTTPPPGAPALQTVITTTTKVSYQAYQPPAMKYSDSVREVKSLSSCNYAPEDTGMSVYPEPWGPPVTVTRAASPSGPPPMKIAGDCRAIRPTVAIPHEPVSSRTDEAETWDVCLSGLGSAVSYSDRVGPFFTYNNEDF

SEQ ID NO: 802108 - protein, 112 aa, Homo sapiens
MFRVLCHCIDFIDFHSANLGMCALGRGGCQNPVIAGTGWGTILRRRGLDPPPPNRRTTSQAPRSLRKLRGRKGTGPQSPGLQSRPSLPPVPCSAPRVRVCPPQAPTVNTIPV

SEQ ID NO: 802109 - protein, 112 aa, Homo sapiens; identical to SEQ ID NO: 802108

SEQ ID NO: 802110 - protein, 112 aa, Homo sapiens; identical to SEQ ID NO: 802108

SEQ ID NO: 802111 - protein, 112 aa, Homo sapiens; identical to SEQ ID NO: 802108

SEQ ID NO: 802112 - protein, 112 aa, Homo sapiens; identical to SEQ ID NO: 802108

SEQ ID NO: 802113 - protein, 480 aa, Homo sapiens
VTREVEFAQTSNMARKRAAGGEPRGRELRSQKSKAKSKARREEEEEDAFEDEKPPKKSLLSKVSQGKRKRGCSHPGGSADGPAKKKVAKVTVKSENLKVIKDEALSDGDDLRDFPSDLKKAHHLKRGATMNEDSNEEEEESENDWEEVEELSEPVLGDVRESTAFSRSLLPVKPVEIEIETPEQAKTRERSEKIKLEFETYLRRAMKRFNKGVHEDTHKVHLLCLLANGFYRNNICSQPDLHAIGLSIIPARFTRVLPRDVDTYYLSNLVKWFIGTFTVNAELSASEQDNLQTTLERRFAIYSARDDEELVHIFLLILRALQLLTRLVLSLQPIPLKSATAKGKKPSKERLTADPGGSSETSSQVLENHTKPKTSKGTKQEETFAKGTCRPSAKGKRNKGGRKKRSKPSSSEEDEGPGDKQEKATQRRPHGRERRVASRVSYKEESGSDEAGSGSDFELSSGEASDPSDEDSEPGPPKQR

SEQ ID NO: 802114 - protein, 540 aa, Homo sapiens
MSSAAENGEAAPGKQNEEKTYKKTASSAIKGAIQLGIGYTVGNLTSKPERDVLMQDFYVVESVFLPSEGSNLTPAHHYPDFRFKTYAPLAFRYFRELFGIKPDDYLYSICSEPLIELSNPGASGSLFFVTSDDEFIIKTVQHKEAEFLQKLLPGYYMNLNQNPRTLLPKFYGLYCMQSGGINIRIVVMNNVLPRSMRMHFTYDLKGSTYKRRASRKEREKSNPTFKDLDFLQDMHEGLYFDTETYNALMKTLQRDCRVLESFKIMDYSLLLGIHFLDHSLKEKEEETPQNVPDAKRTGMQKVLYSTAMESIQGPGKSGDGIITENPDTMGGIPAKSHRGEKLLLFMGIIDILQSYRLMKKLEHSWKALVYDGDTVSVHRPSFYADRFLKFMNSRVFKKIQALKASPSKKRCNSIAALKATSQEIVSSISQEWKDEKRDLLTEGQSFSSLDEEALGSRHRPDLVPSTPSLFEAASLATTISSSSLYVNEHYPHDRPTLYSNSKGLPSSSTFTLEEGTIYLTAEPNTLEVQDDNASVLDVYL

SEQ ID NO: 802115 - protein, 540 aa, Homo sapiens; identical to SEQ ID NO: 802114

SEQ ID NO: 802116 - protein, 540 aa, Homo sapiens; identical to SEQ ID NO: 802114

SEQ ID NO: 802117 - protein, 540 aa, Homo sapiens; identical to SEQ ID NO: 802114

SEQ ID NO: 802118 - protein, 384 aa, Homo sapiens [sequence omitted]

SEQ ID NO: 802119 - protein, 540 aa, Homo sapiens; identical to SEQ ID NO: 802114

SEQ ID NO: 802120 - protein, 134 aa, Homo sapiens
MSSAAENGEAAPGKQNEEKTYKKTASSAIKGAIQLGIGYTVGNLTSKPERDVLMQDFYVVESVFLPSEGSNLTPAHHYPDFRFKTYAPLAFRYFRELFGIKPDDYLMRNLKLGSAKGDAQGYTHWWGQSLDQTV

SEQ ID NO: 802121 - protein, 540 aa, Homo sapiens; identical to SEQ ID NO: 802114

SEQ ID NO: 802122 - protein, 540 aa, Homo sapiens; identical to SEQ ID NO: 802114

SEQ ID NO: 802123 - protein, 540 aa, Homo sapiens; identical to SEQ ID NO: 802114

SEQ ID NO: 802124 - protein, 502 aa, Homo sapiens
MSSAAENGEAAPGKQNEEKTYKKTASSAIKGAIQLGIGYTVGNLTSKPERDVLMQDFYVVESVFLPSEGSNLTPAHHYPDFRFKTYAPLAFRYFRELFGIKPDDYLYSICSEPLIELSNPGASGSLFFVTSDDEFIIKTVQHKEAEFLQKLLPGYYMNLNQNPRTLLPKFYGLYCMQSGGINIRIVVMNNVLPRSMRMHFTYDLKGSTYKRRASRKEREKSNPTFKDLDFLQDMHEGLYFDTETYNALMKTLQRDCRVLESFKIMDYSLLLGIHFLDHSLKEKEEETPQNVPDAKRTGMQKVLYSTAMESIQGPGKSGDGIITENPDTMGGIPAKSHRGEKLLLFMGIIDILQSYRLMKKLEHSWKALVYDGDTVSVHRPSFYADRFLKFMNSRVFKKIQALKASPSKKRCNSIAALKATSQEIVSSISQEWKDEKRDLLTEGQSFSSLDEEALGSRHRPDLVPSTPSLFEAASLATTISSSSLYVNEHYPHDRPTLYSNSK

SEQ ID NO: 802125 - protein, 501 aa, Homo sapiens
MSSAAENGEAAPGKQNEEKTYKKTASSAIKGAIQLGIGYTVGNLTSKPERDVLMQDFYVVESVFLPSEGSNLTPAHHYPDFRFKTYAPLAFRYFRELFGIKPDDYLYSICSEPLIELSNPGASGSLFFVTSDDEFIIKTVQHKEAEFLQKLLPGYYMNLNQNPRTLLPKFYGLYCMQSGGINIRIVVMNNVLPRSMRMHFTYDLKGSTYKRRASRKEREKSNPTFKDLDFLQDMHEGLYFDTETYNALMKTLQRDCRVLESFKIMDYSLLLGIHFLDHSLKEKEEETPQNVPDAKRTGMQKVLYSTAMESIQGPGKSGDGIITENPDTMGGIPAKSHRGEKLLLFMGIIDILQSYRLMKKLEHSWKALVYDGDTVSVHRPSFYADRFLKFMNSRVFKKIQALKASPSKKRCNSIAALKATSQEIVSSISQEWKDEKRDLLTEGQSFSSLDEEALGSRHRPDLVPSTPSLFEAASLATTISSSSLYVNEHYPHDRPTLYSNR

SEQ ID NO: 802126 - protein, 197 aa, Homo sapiens
RRRCVPVEARAAGVFGDRLAGVFGSRGLKHGGVQAPRPRVVRAEPRAGFAVVRSPRRLCGRSHAPQPPAHLGLGPGCFPAVAVVVPVPGSRAHRPCELGLFFLLRVAHSSLGCFLAAQTCSGRLEKATPGLQLSPEGLPLGLRLGPWNPPSVSSAVPLLASIWVVAWILWLAASLLLRITALHCLSSGAWKPLYFLV

SEQ ID NO: 802127 - protein, 179 aa, Homo sapiens
RRRCVPVEARAAGVFGDRLAGVFGSRGLKHGGVQAPRPRVVRAEPRAGFAVVRSPRRLCGRSHAPQPPAHLGLGPGCFPAVAVVVPVPGSRAHRPFAALLVEGSFLGDPPIPPRRSGVLARGSAGADCLASSVTPGPSLWIPLLLVAGCVSCFVGLAVCVWMQARVSPAWPAGLFLLPR

SEQ ID NO: 802128 - protein, 317 aa, Homo sapiens
GASWFTPPSAETDPRSGPRTLCREGKYWTLKWARTETKRPQHASGFEWRGHSLCWDREQRDVESLKMLLDNGLRLGQWQEIPFTQDLQDKRSAWQLHVFFFQTGCQVGMNDDIRDSDLPDWRDRTPWCLEISWTTVSSQSCSPLLTSPGLRIDNITLLDPSSVQKKAMDRTETRFRKRGQITGKITTSRQPHRQNEQSPQRSTSGYPLQEVVDDEVLGPSAPGVDPSPPHRSFCWKRKMEWWDKSEESEEEPRKVLAPEPEEIWVAEMLCGLKMKLKRRRVSLVLPEHHEAFNRLLGRRTPQRAPPILFFPKTGNFQ

SEQ ID NO: 802129 - protein, 389 aa, Homo sapiens
TIFPSLTPFQKAVESRHQNVGRACFPFLKTRSCSSTHPLLGSPEMGRAGVMTNLIIRMRRNLGPGRERNFLQSQGRSAAGWKRKREWSDESEEEPEKELAPEPEETWVVETLCGLKMKLKQQRVSPILLEHHKDFNSQLAPGVDPSPPHRSFCWKRKMEWWDKSEESEEEPRKVLAPEPEEIWVAEMLCGLKMKLKRRRVSLVLPEHHEAFNRLLEDPVIKRFLAWDKDLRVSDKYLLAMVIAYFSRAGFPSWQYQRLHFFLALYLANDMEEDDEDSKQNIFHFLYGKNRSRIPLLRKRRFQLYRSMNPRARKNRSHIPLVRKRRFQLRRCMNPRARKNRSQIVLFQKRRFHFFCSMSCRAWVSPEELEEIQAYDPEHWVWARDRARLS

SEQ ID NO: 802130 - protein, 269 aa, Homo sapiens
GTLAPGWRLVKGFLNQPVDVELYQGLWDMCREQSSRERECGQTDQWGYFEAQPVLVARALMVTSLAATVLGLLLASLGVRCWQDEPNFVLAGLSGVVLFVAGLLGLIPVSWYNHFLGDRDVLPAPASPVTVQVSYSLVLGYLGSCLLLLGGFSLALSFAPWCDERCRRRRKGPSAGPRRSSVSTIQVEWPEPDLAPAIKYYSDGQHRPPPAQHRKPKTKPKVGFPMPRPRPKAYTNSVDVLDGEGWESQDAPSCSTHPCDSSLPCDSDL

SEQ ID NO: 802131 - protein, 269 aa, Homo sapiens; identical to SEQ ID NO: 802130

SEQ ID NO: 802132 - protein, 687 aa, Homo sapiens
EGAGMRRCPCRGSLNEAEAGALPAAARMGLEAPRGGRRRQPGQQRPGPGAGAPAGRPEGGGPWARTEGSSLHSEPERAGLGPAPGTESPQAEFWTDGQTEPAAAGLGVETERPKQKTEPDRSSLRTHLEWSWSELETTCLWTETGTDGLWTDPHRSDLQFQPEEASPWTQPGVHGPWTELETHGSQTQPERVKSWADNLWTHQNSSSLQTHPEGACPSKEPSADGSWKELYTDGSRTQQDIEGPWTEPYTDGSQKKQDTEAARKQPGTGGFQIQQDTDGSWTQPSTDGSQTAPGTDCLLGEPEDGPLEEPEPGELLTHLYSHLKCSPLCPVPRLIITPETPEPEAQPVGPPSRVEGGSGGFSSASSFDESEDDVVAGGGGASDPEDRSGSKPWKKLKTVLKYSPFVVSFRKHYPWVQLSGHAGNFQAGEDGRILKRFCQCEQRSLEQLMKDPLRPFVPAYYGMVLQDGQTFNQMEDLLADFEGPSIMDCKMGSRTYLEEELVKARERPRPRKDMYEKMVAVDPGAPTPEEHAQGAVTKPRYMQWRETMSSTSTLGFRIEGIKKADGTCNTNFKKTQALEQVTKVLEDFVDGDHVILQKYVACLEELREALEISPFFKTHEVVGSSLLFVHDHTGLAKVWMIDFGKTVALPDHQTLSHRLPWAEGNREDGYLWGLDNMICLLQGLAQS

SEQ ID NO: 802133 - protein, 536 aa, Homo sapiens
  misc_feature (16)..(16): Xaa can be any naturally occurring amino acid
APTTPKRNTAGQAPVXRMRAWVHGPWTELETHGSQTQPERVKSWADNLWTHQNSSSLQTHPEGACPSKEPSADGSWKELYTDGSRTQQDIEGPWTEPYTDGSQKKQDTEAARKQPGTGGFQIQQDTDGSWTQPSTDGSQTAPGTDCLLGEPEDGPLEEPEPGELLTHLYSHLKCSPLCPVPRLIITPETPEPEAQPVGPPSRVEGGSGGFSSASSFDESEDDVVAGGGGASDPEDRSGSKPWKKLKTVLKYSPFVVSFRKHYPWVQLSGHAGNFQAGEDGRILKRFCQCEQRSLEQLMKDPLRPFVPAYYGMVLQDGQTFNQMEDLLADFEGPSIMDCKMGSRTYLEEELVKARERPRPRKDMYEKMVAVDPGAPTPEEHAQGAVTKPRYMQWRETMSSTSTLGFRIEGIKKADGTCNTNFKKTQALEQVTKVLEDFVDGDHVILQKYVACLEELREALEISPFFKTHEVVGSSLLFVHDHTGLAKVWMIDFGKTVALPDHQTLSHRLPWAEGNREDGYLWGLDNMICLLQGLAQS

SEQ ID NO: 802134 - protein, 687 aa, Homo sapiens; identical to SEQ ID NO: 802132

SEQ ID NO: 802135 - protein, 174 aa, Homo sapiens [sequence omitted]

SEQ ID NO: 802136 - protein, 597 aa, Homo sapiens
EGAGMRRCPCRGSLNEAEAGALPAAARMGLEAPRGGRRRQPGQQRPGPGAGAPAGRPEGGGPWARTEGSSLHSEPERAGLGPAPGTESPQAEFWTDGQTEPAAAGLGVETERPKQKTEPDRSSLRTHLEWSWSELETTCLWTETGTDGLWTDPHRSDLQFQPEEASPWTQPGVHGPWTELETHGSQTQPERVKSWADNLWTHQNSSSLQTHPEGACPSKEPSADGSWKELYTDGSRTQQDIEGPWTEPYTDGSQKKQDTEAARKQPGTGGFQIQQDTDGSWTQPSTDGSQTAPGTDCLLGEPEDGPLEEPEPGELLTHLYSHLKCSPLCPVPRLIITPETPEPEAQPVGPPSRVEGGSGGFSSASSFDESEDDVVAGGGGASDPEDRSGSKPWKKLKTVLKYSPFVVSFRKHYPWVQLSGHAGNFQAGEDGRILKRFCQCEQRSLEQLMKDPLRPFVPAYYGMVLQDGQTFNQMEDLLADFEGPSIMDCKMGSRTYLEEELVKARERPRPRKDMYEKMVAVDPGAPTPEEHAQGAVTKPRYMQWRETMSSTSTLGFRIEGIKVRTRNRLACPGKAYSQIPGRASWGKPRESAGDGVG

SEQ ID NO: 802137 - protein, 399 aa, Homo sapiens
EGAGMRRCPCRGSLNEAEAGALPAAARMGLEAPRGGRRRQPGQQRPGPGAGAPAGRPEGGGPWARTEGSSLHSEPERAGLGPAPGTESPQAEFWTDGQTEPAAAGLGVETERPKQKTEPDRSSLRTHLEWSWSELETTCLWTETGTDGLWTDPHRSDLQFQPEEASPWTQPGVHGPWTELETHGSQTQPERVKSWADNLWTHQNSSSLQTHPEGACPSKEPSADGSWKELYTDGSRTQQDIEGPWTEPYTDGSQKKQDTEAARKQPGTGGFQIQQDTDGSWTQPSTDGSQTAPGTDCLLGEPEDGPLEEPEPGELLTHLYSHLKCSPLCPVPRLIITPETPEPEAQPVGPPSRVEGGSGGFSSASSFDESEDDVVAGGGGASDPEDRSGVSGTHPALEP

SEQ ID NO: 802138 - protein, 111 aa, Homo sapiens
LGPRWVRWTYLEEELVKARERPRPRKDMYEKMVAVDPGAPTPEEHAQGAVTKPRYMQWRETMSSTSTLGFRIEGIKVRTRNRLACPGKAYSQIPGRASWGKPRESAGDGVG

SEQ ID NO: 802139 - protein, 687 aa, Homo sapiens; identical to SEQ ID NO: 802132

SEQ ID NO: 802140 - protein, 575 aa, Homo sapiens
EGAGMRRCPCRGSLNEAEAGALPAAARMGLEAPRGGRRRQPGQQRPGPGAGAPAGRPEGGGPWARTEGSSLHSEPERAGLGPAPGTESPQAEFWTDGQTEPAAAGLGVETERPKQKTEPDRSSLRTHLEWSWSELETTCLWTETGTDGLWTDPHRSDLQFQPEEASPWTQPGVHGPWTELETHGSQTQPERVKSWADNLWTHQNSSSLQTHPEGACPSKEPSADGSWKELYTDGSRTQQDIEGPWTEPYTDGSQKKQDTEAARKQPGTGGFQIQQDTDGSWTQPSTDGSQTAPGTDCLLGEPEDGPLEEPEPGELLTHLYSHLKCSPLCPVPRLIITPETPEPEAQPVGPPSRVEGGSGGFSSASSFDESEDDVVAGGGGASDPEDRSGSKPWKKLKTVLKYSPFVVSFRKHYPWVQLSGHAGNFQAGEDGRILKRFCQCEQRSLEQLMKDPLRPFVPAYYGMVLQDGQTFNQMEDLLADFEGPSIMDCKMGSRTYLEEELVKARERPRPRKDMYEKMVAVDPGAPTPEEHAQGAVTKPRYMQWRETMSSTSTLGFRIEGIKLCNTVFVTVPGPL

SEQ ID NO: 802141 - protein, 72 aa, Homo sapiens
AGPLSFPLMAAPLAPAFPGLGPDPTLLCSLQSKPWKKLKTVLKYSPFVVSFRKHYPWVQLSGHAGKWGGGGQ

SEQ ID NO: 802142 - protein, 802 aa, Homo sapiens
MFISGRRTADKWRAEERLQCPAGSARAALARCADGGAVGPFKCVFVGEMAAQVGAVRVVRAVAAQEEPDKEGKEKPHAGVSPRGVKRQRRSSSGGSQEKRGRPSQEPPLAPPHRRRRSRQHPGPLPPTNAAPTVPGPVEPLLLPPPPPPSLAPAGPAVAAPLPAPSTSALFTFSPLTVSAAGPKHKGHKERHKHHHHRGPDGDPSSCGTDLKHKDKQENGERTGGVPLIKAPKRETPDENGKTQRADDFVLKKIKKKKKKKHREDMRGRRLKMYNKEVQTVCAGLTRISKEILTQGQINSTSGLNKESFRYLKDEQLCRLNLGMQEYRVPQGVQTPFMTHQEHSIRRNFLKTGTKFSNFIHEEHQSNGGALVLHAYMDELSFLSPMEMERFSEEFLALTFSENEKNAAYYALAIVHGAAAYLPDFLDYFAFNFPNTPVKMEILGKKDIETTTISNFHTQVNRTYCCGTYRAGPMRQISLVGAVDEEVGDYFPEFLDMLEESPFLKMTLPWGTLSSLRLQCRSQSDDGPIMWVRPGEQMIPTADMPKSPFKRRRSMNEIKNLQYLPRTSEPREVLFEDRTRAHADHVGQGFDWQSTAAVGVLKAVQFGEWSDQPRITKDVICFHAEDFTDVVQRLQLDLHEPPVSQCVQWVDEAKLNQMRREGIRYARIQLCDNDIYFIPRNVIHQFKTVSAVCSLAWHIRLKQYHPVVEATQNTESNSNMDCGLTGKRELEVDSQCVRIKTESEEACTEIQLLTTASSSFPPASELNLQQDQKTQPIPVLKVESRLDSDQQHNLQEHSTTSV

SEQ ID NO: 802143 - protein, 802 aa, Homo sapiens; identical to SEQ ID NO: 802142

SEQ ID NO: 802144 - protein, 799 aa, Homo sapiens
MFISGRRTADKWRAEERLQCPAGSARAALARCADGGAVGPFKCVFVGEMAAQVGAVRVVRAVAAQEEPDKEGKEKPHAGVSPRGVKRQRRSSSGGSQEKRGRPSQEPPLAPPHRRRRSRQHPGPLPPTNAAPTVPGPVEPLLLPPPPPPSLAPAGPAVAAPLPAPSTSALFTFSPLTVSAAGPKHKGHKERHKHHHHRGPDGDPSSCGTDLKHKDKQENGERTGGVPLIKAPKRETPDENGKTQRADDFVLKKIKKKKKKKHREDMRGRRLKMYNKEVQTVCAGLTRISKEILTQGQINSTSGLNKESFRYLKDEQLCRLNLGMQEYRVPQGVQTPFMTHQEHSIRRNFLKTGTKFSNFIHEEHQSNGGALVLHAYMDELSFLSPMEMERFSEEFLALTFSENEKNAAYYALAIVHGAAAYLPDFLDYFAFNFPNTPVKMEILGKKDIETTTISNFHTQVNRTYCCGTYRAGPMRQISLVGAVDEEVGDYFPEFLDMLEESPFLKMTLPWGTLSSLRLQCRSQSDDGPIMWVRPGEQMIPTADMPKSPFKRRRSMNEIKNLQYLPRTSEPREVLFEDRTRAHADHVGQGFDWQSTAAVGVLKAVQFGEWSDQPRITKDVICFHAEDFTDVVQRLQLDLHEPPVSQCVQWVDEAKLNQMRREGIRYARIQLCDNDIYFIPRNVIHQFKTVSAVCSLAWHIRLKQYHPVVEATQNTESNSNMDCGLTGKRELEVDSQCVRIKTESEEACTEIQLLTTASSSFPPASELNLQQDQKTQPIPVLKHFCVICTYSNTFFNFFKF

SEQ ID NO: 802145 - protein, 129 aa, Homo sapiens
MNLQFPRNVIHQFKTVSAVCSLAWHIRLKQYHPVVEATQNTESNSNMDCGLTGKRELEVDSQCVRIKTESEEACTEIQLLTTASSSFPPASELNLQQDQKTQPIPVLKVESRLDSDQQHNLQEHSTTSV

SEQ ID NO: 802146 - protein, 802 aa, Homo sapiens; identical to SEQ ID NO: 802142

SEQ ID NO: 802147 - protein, 485 aa, Homo sapiens
MFISGRRTADKWRAEERLQCPAGSARAALARCADGGAVGPFKCVFVGEMAAQVGAVRVVRAVAAQEEPDKEGKEKPHAGVSPRGVKRQRRSSSGGSQEKRGRPSQEPPLAPPHRRRRSRQHPGPLPPTNAAPTVPGPVEPLLLPPPPPPSLAPAGPAVAAPLPAPSTSALFTFSPLTVSAAGPKHKGHKERHKHHHHRGPDGDPSSCGTDLKHKDKQENGERTGGVPLIKAPKRETPDENGKTQRADDFVLKKIKKKKKKKHREDMRGRRLKMYNKEVQTVCAGLTRISKEILTQGQINSTSGLNKESFRYLKDEQLCRLNLGMQEYRVPQGVQTPFMTHQEHSIRRNFLKTGTKFSNFIHEEHQSNGGALVLHAYMDELSFLSPMEMERFSEEFLALTFSENEKNAAYYALAIVHGAAAYLPDFLDYFAFNFPNTPVKMEILGKKDIETTTISNFHTQVKRDILGGAPTGPGLMRKKNFFGTFI

SEQ ID NO: 802148 - protein, 221 aa, Homo sapiens
MAKRVAIVGAGVSGLASIKCCLEEGLEPTCFERSDDLGGLWRFTEHVEEGRASLYKSVVSNSCKEMSCYSDFPFPEDYPNYVPNSQFLEYLKMYANHFDLLKHIQFKTKVCSVTKCSDSAVSGQWEVVTMHEEKQESAIFDAVMVCTGFLTNPYLPLDSFPGINAFKGQYFHSRQYKHPDIFKDKRVLVIGMGNSGTDIAVEASHLAEKGVLQAPTEGGMG

SEQ ID NO: 802149 - protein, 411 aa, Homo sapiens
MAKRVAIVGAGVSGLASIKCCLEEGLEPTCFERSDDLGGLWRFTEHVEEGRASLYKSVVSNSCKEMSCYSDFPFPEDYPNYVPNSQFLEYLKMYANHFDLLKHIQFKTKVCSVTKCSDSAVSGQWEVVTMHEEKQESAIFDAVMVCTGFLTNPYLPLDSFPGINAFKGQYFHSRQYKHPDIFKDKRVLVIGMGNSGTDIAVEASHLAEKVFLSTTGGGWVISRIFDSGYPWDMVFMTRFQNMLRNSLPTPIVTWLMERKINNWLNHANYGLIPEDRTQLKEFVLNDELPGRIITGKVFIRPSIKEVKENSVIFNNTSKEEPIDIIVFATGYTFAFPFLDESVVKVEDGQASLYKYIFPAHLQKPTLAIIGLIKPLGSMIPTGETQARWAVRVLKGLACATARLYNQIISHT

SEQ ID NO: 802150 - protein, 306 aa, Homo sapiens
MAKRVAIVGAGVSGLASIKCCLEEGLEPTCFERSDDLGGLWRFTEHVEEGRASLYKSVVSNSCKEMSCYSDFPFPEDYPNYVPNSQFLEYLKMYANHFDLLKHIQFKTKVCSVTKCSDSAVSGQWEVVTMHEEKQESAIFDAVMVCTGFLTNPYLPLDSFPGINAFKGQYFHSRQYKHPDIFKDKRVLVIGMGNSGTDIAVEASHLAEKVFLSTTGGGWVISRIFDSGYPWDMVFMTRFQNMLRNSLPTPIVTWLMERKINNWLNHANYGLIPEDRTQLKEFVLNDELPGRIITGKVFIRPSIKEV

SEQ ID NO: 802151 - protein, 532 aa, Homo sapiens
MAKRVAIVGAGVSGLASIKCCLEEGLEPTCFERSDDLGGLWRFTEHVEEGRASLYKSVVSNSCKEMSCYSDFPFPEDYPNYVPNSQFLEYLKMYANHFDLLKHIQFKTKVCSVTKCSDSAVSGQWEVVTMHEEKQESAIFDAVMVCTGFLTNPYLPLDSFPGINAFKGQYFHSRQYKHPDIFKDKRVLVIGMGNSGTDIAVEASHLAEKVFLSTTGGGWVISRIFDSGYPWDMVFMTRFQNMLRNSLPTPIVTWLMERKINNWLNHANYGLIPEDRTQLKEFVLNDELPGRIITGKVFIRPSIKEVKENSVIFNNTSKEEPIDIIVFATGYTFAFPFLDESVVKVEDGQASLYKYIFPAHLQKPTLAIIGLIKPLGSMIPTGETQARWAVRVLKGVNKLPPPSVMIEEINARKENKPSWFGLCYCKALQSDYITYIDELLTYINAKPNLFSMLLTDPHLALTVFFGPCSPYQFRLTGPGKWEGARNAIMTQWDRTFKVIKARVVQESPSPFESFLKVFSFLALLVAIFLIFL

SEQ ID NO: 802152 - protein, 399 aa, Homo sapiens
MAKRVAIVGAGVSGLASIKCCLEEGLEPTCFERSDDLGGLWRFTEHVEEGRASLYKSVVSNSCKEMSCYSDFPFPEDYPNYVPNSQFLEYLKMYANHFDLLKHIQFKTKVCSVTKCSDSAVSGQWEVVTMHEEKQESAIFDAVMVCTGFLTNPYLPLDSFPGINAFKGQYFHSRQYKHPDIFKDKRVLVIGMGNSGTDIAVEASHLAEKVFLSTTGGGWVISRIFDSGYPWDMVFMTRFQNMLRNSLPTPIVTWLMERKINNWLNHANYGLIPEDRTQLKEFVLNDELPGRIITGKVFIRPSIKEVKENSVIFNNTSKEEPIDIIVFATGYTFAFPFLDESVVKVEDGQASLYKYIFPAHLQKPTLAIIGLIKPLGSMIPTGETQARWAVRVLKGKYKK

SEQ ID NO: 802153 - protein, 187 aa, Homo sapiens
MAKRVAIVGAGVSGLASIKCCLEEGLEPTCFERSDDLGGLWRFTEHVEEGRASLYKSVVSNSCKEMSCYSDFPFPEDYPNYVPNSQFLEYLKMYANHFDLLKHIQFKTKVCSVTKCSDSAVSGQWEVVTMHEEKAVLDSTLSHHTSFPYKLFSQISTKTPYFTNDCVVLKWCSYSTGLLKVKNKPKN

SEQ ID NO: 802154 - protein, 532 aa, Homo sapiens; identical to SEQ ID NO: 802151

SEQ ID NO: 802155 - protein, 576 aa, Homo sapiens
RYRRFKLSKSPNLPNSFSWLVRAAKGGVELVNKKPAFIFLMQENMAKRVAIVGAGVSGLASIKCCLEEGLEPTCFERSDDLGGLWRFTEHVEEGRASLYKSVVSNSCKEMSCYSDFPFPEDYPNYVPNSQFLEYLKMYANHFDLLKHIQFKTKVCSVTKCSDSAVSGQWEVVTMHEEKQESAIFDAVMVCTGFLTNPYLPLDSFPGINAFKGQYFHSRQYKHPDIFKDKRVLVIGMGNSGTDIAVEASHLAEKVFLSTTGGGWVISRIFDSGYPWDMVFMTRFQNMLRNSLPTPIVTWLMERKINNWLNHANYGLIPEDRTQLKEFVLNDELPGRIITGKVFIRPSIKEVKENSVIFNNTSKEEPIDIIVFATGYTFAFPFLDESVVKVEDGQASLYKYIFPAHLQKPTLAIIGLIKPLGSMIPTGETQARWAVRVLKGVNKLPPPSVMIEEINARKENKPSWFGLCYCKALQSDYITYIDELLTYINAKPNLFSMLLTDPHLALTVFFGPCSPYQFRLTGPGKWEGARNAIMTQWDRTFKVIKARVVQESPSPFESFLKVFSFLALLVAIFLIFL

SEQ ID NO: 802156 - protein, 208 aa, Homo sapiens
VRLPQPQGTTKVCSVTKCSDSAVSGQWEVVTMHEEKQESAIFDAVMVCTGFLTNPYLPLDSFPGINAFKGQYFHSRQYKHPDIFKDKRVLVIGMGNSGTDIAVEASHLAEKVFLSTTGGGWVISRIFDSGYPWDMVFMTRFQNMLRNSLPTPIVTWLMERKINNWLNHANYGLIPEDRTQLKEFVLNDELPGRIITGKVFIRPSIKEV

SEQ ID NO: 802157 - protein, 128 aa, Homo sapiens
MIEEINARKENKPSWFGLCYCKALQSDYITYIDELLTYINAKPNLFSMLLTDPHLALTVFFGPCSPYQFRLTGPGKWEGARNAIMTQWDRTFKVIKARVVQESPSPFESFLKVFSFLALLVAIFLIFL

SEQ ID NO: 802158 - protein, 532 aa, Homo sapiens; identical to SEQ ID NO: 802151

SEQ ID NO: 802159 - protein, 118 aa, Homo sapiens
MAKRVAIVGAGVSGLASIKCCLEEGLEPTCFERSDDLGGLWRFTEHVEEGRASLYKSVVSNSCKEMSCYSDFPFPEDYPNYVPNSQFLEYLKMYANHFDLLKHIQFKQTWSSTSLSLS

SEQ ID NO: 802160 - protein, 44 aa, Homo sapiens
MLEQVPALGETRLTLAAGEGPLPGVDPLVAGQEGRVAEVAATVW

SEQ ID NO: 802161 - protein, 204 aa, Homo sapiens
MASKEMFEDTVEERVINEEYKIWKKNTPFLYDLVMTHALQWPSLTVQWLPEVTKPEGKDYALHWLVLGTHTSDEQNHLVVARVHIPNDDAQFDASHCDSDKGEFGGFGSVTGKIECEIKINHEGEVNRARYMPQNPHIIATKTPSSDVLVFDYTKHPAKPDPSGECNPDLRLRGHQKEGYGLSWNSNLSGHLLSASDDHGGLGE

SEQ ID NO: 802162 - protein, 425 aa, Homo sapiens
MASKEMFEDTVEERVINEEYKIWKKNTPFLYDLVMTHALQWPSLTVQWLPEVTKPEGKDYALHWLVLGTHTSDEQNHLVVARVHIPNDDAQFDASHCDSDKGEFGGFGSVTGKIECEIKINHEGEVNRARYMPQNPHIIATKTPSSDVLVFDYTKHPAKPDPSGECNPDLRLRGHQKEGYGLSWNSNLSGHLLSASDDHTVCLWDINAGPKEGKIVDAKAIFTGHSAVVEDVAWHLLHESLFGSVADDQKLMIWDTRSNTTSKPSHLVDAHTAEVNCLSFNPYSEFILATGSADKTVALWDLRNLKLKLHTFESHKDEIFQVHWSPHNETILASSGTDRRLNVWDLSKIGEEQSAEDAEDGPPELLFIHGGHTAKISDFSWNPNEPWVICSVSEDNIMQIWQMAENIYNDEESDVTTSELEGQGS

SEQ ID NO: 802163 - protein, 425 aa, Homo sapiens; identical to SEQ ID NO: 802162

SEQ ID NO: 802164 - protein, 425 aa, Homo sapiens; identical to SEQ ID NO: 802162

SEQ ID NO: 802165 - protein, 388 aa, Homo sapiens
MASKEMFEDTVEERVINEEYKIWKKNTPFLYDLVMTHALQWPSLTVQWLPEVTKPEGKDYALHWLVLGTHTSDEQNHLVVARVHIPNDDAQFDASHCDSDKGEFGGFGSVTGKIECEIKINHEGEVNRARYMPQNPHIIATKTPSSDVLVFDYTKHPAKPDPSGECNPDLRLRGHQKEGYGLSWNSNLSGHLLSASDDHTVCLWDINAGPKEGKIVDAKAIFTGHSAVVEDVAWHLLHESLFGSVADDQKLMIWDTRSNTTSKPSHLVDAHTAEVNCLSFNPYSEFILATGSADKTVALWDLRNLKLKLHTFESHKDEIFQVHWSPHNETILASSGTDRRLNVWDLSKIGEEQSAEDAEDGPPELLAENIYNDEESDVTTSELEGQGS

SEQ ID NO: 802166 - protein, 175 aa, Homo sapiens
MASKEMFEDTVEERVINEEYKIWKKNTPFLYDLVMTHALQWPSLTVQWLPEVTKPEGKDYALHWLVLGTHTSDEQNHLVVARVHIPNDDAQFDASHCDSDKGEFGGFGSVTGKIECEIKINHEGEVNRARYMPQNPHIIATKTPSSDVLVFDYTKHPAKPEVTRRKAMVSPGIQI

SEQ ID NO: 802167 - protein, 520 aa, Homo sapiens
YRRPTALGNRPPRVIGLGAGAVGSQTRLSASSHFSQGGCACAQLPGRAGRRGLKSLVPSLERERRAPQTSVPASGEEAGKKDAASGEHPGSKTGPGLSTVVFEDTVEERVINEEYKIWKKNTPFLYDLVMTHALQWPSLTVQWLPEVTKPEGKDYALHWLVLGTHTSDEQNHLVVARVHIPNDDAQFDASHCDSDKGEFGGFGSVTGKIECEIKINHEGEVNRARYMPQNPHIIATKTPSSDVLVFDYTKHPAKPDPSGECNPDLRLRGHQKEGYGLSWNSNLSGHLLSASDDHTVCLWDINAGPKEGKIVDAKAIFTGHSAVVEDVAWHLLHESLFGSVADDQKLMIWDTRSNTTSKPSHLVDAHTAEVNCLSFNPYSEFILATGSADKTVALWDLRNLKLKLHTFESHKDEIFQVHWSPHNETILASSGTDRRLNVWDLSKIGEEQSAEDAEDGPPELLFIHGGHTAKISDFSWNPNEPWVICSVSEDNIMQIWQMAENIYNDEESDVTTSELEGQGS

SEQ ID NO: 802168 - protein, 391 aa, Homo sapiens
MTHALQWPSLTVQWLPEVTKPEGKDYALHWLVLGTHTSDEQNHLVVARVHIPNDDAQFDASHCDSDKGEFGGFGSVTGKIECEIKINHEGEVNRARYMPQNPHIIATKTPSSDVLVFDYTKHPAKPDPSGECNPDLRLRGHQKEGYGLSWNSNLSGHLLSASDDHTVCLWDINAGPKEGKIVDAKAIFTGHSAVVEDVAWHLLHESLFGSVADDQKLMIWDTRSNTTSKPSHLVDAHTAEVNCLSFNPYSEFILATGSADKTVALWDLRNLKLKLHTFESHKDEIFQVHWSPHNETILASSGTDRRLNVWDLSKIGEEQSAEDAEDGPPELLFIHGGHTAKISDFSWNPNEPWVICSVSEDNIMQIWQMAENIYNDEESDVTTSELEGQGS

SEQ ID NO: 802169 - protein, 395 aa, Homo sapiens
RSSRENYPRRNYYRTESQTDGFRRPEGKDYALHWLVLGTHTSDEQNHLVVARVHIPNDDAQFDASHCDSDKGEFGGFGSVTGKIECEIKINHEGEVNRARYMPQNPHIIATKTPSSDVLVFDYTKHPAKPDPSGECNPDLRLRGHQKEGYGLSWNSNLSGHLLSASDDHTVCLWDINAGPKEGKIVDAKAIFTGHSAVVEDVAWHLLHESLFGSVADDQKLMIWDTRSNTTSKPSHLVDAHTAEVNCLSFNPYSEFILATGSADKTVALWDLRNLKLKLHTFESHKDEIFQVHWSPHNETILASSGTDRRLNVWDLSKIGEEQSAEDAEDGPPELLFIHGGHTAKISDFSWNPNEPWVICSVSEDNIMQIWQMAENIYNDEESDVTTSELEGQGS

SEQ ID NO: 802170 - protein, 416 aa, Homo sapiens
MASKEMFEDTVEERVINEEYKIWKKNTPFLYDLVMTHALQWPSLTVQWLPEVTKPEGKDYALHWLVLGTHTSDEQNHLVVARVHIPNDDAQFDASHCDSDKGGKIECEIKINHEGEVNRARYMPQNPHIIATKTPSSDVLVFDYTKHPAKPDPSGECNPDLRLRGHQKEGYGLSWNSNLSGHLLSASDDHTVCLWDINAGPKEGKIVDAKAIFTGHSAVVEDVAWHLLHESLFGSVADDQKLMIWDTRSNTTSKPSHLVDAHTAEVNCLSFNPYSEFILATGSADKTVALWDLRNLKLKLHTFESHKDEIFQVHWSPHNETILASSGTDRRLNVWDLSKIGEEQSAEDAEDGPPELLFIHGGHTAKISDFSWNPNEPWVICSVSEDNIMQIWQMAENIYNDEESDVTTSELEGQGS

SEQ ID NO: 802171 - protein, 404 aa, Homo sapiens
MASKEMFEDTVEERVINEEYKIWKKNTPFLYDLVMTHALQWPSLTVQWLPEVTKPEGKDYALHWLVLGTHTSDEQNHLVVARVHIPNDDAQFDASHCDSDKGEFGGFGSVTGKIECEIKINHEGEVNRARYMPQNPHIIATKTPSSDVLVFDYTKHPAKPDPSGECNPDLRLRGHQKEGYGLSWNSNLSGHLLSASDDHTVCLWDINAGPKEGKIVDAKAIFTGHSAVVEDVAWHLLHESLFGSVADDQKLMIWDTRSNTTSKPSHLVDAHTAEVNCLSFNPYSEFILATGSADKTVALWDLRNLKLKLHTFESHKDEIFQVHWSPHNETILASSGTDRRLNVWDLSKIGEKHHQKCPWASELLVIYGDTLLRFFSWTPRAWVFARAGEQHQYGEGGISCGGRV

SEQ ID NO: 802172 - protein, 325 aa, Homo sapiens
MASKEMFEDTVEERVINEEYKIWKKNTPFLYDLVMTHALQWPSLTVQWLPEVTKPEGKDYALHWLVLGTHTSDEQNHLVVARVHIPNDDAQFDASHCDSDKGEFGGFGSVTGKIECEIKINHEGEVNRARYMPQNPHIIATKTPSSDVLVFDYTKHPAKPDPSGECNPDLRLRGHQKEGYGLSWNSNLSGHLLSASDDHTVCLWDINAGPKEGKIVDAKAIFTGHSAVVEDVAWHLLHESLFGSVADDQKLMIWDTRSNTTSKPSHLVDAHTAEVNCLSFNPYSEFILATGSADKTVVMGSGTLNYMHTSIYKMNLVTGFNMNIW

SEQ ID NO: 802173 - protein, 253 aa, Homo sapiens [sequence omitted]

SEQ ID NO: 802174 - protein, 204 aa, Homo sapiens; identical to SEQ ID NO: 802161

SEQ ID NO: 802175 - protein, 172 aa, Homo sapiens
MASKEMFEDTVEERVINEEYKIWKKNTPFLYDLVMTHALQWPSLTVQWLPEVTKPEGKDYALHWLVLGTHTSDEQNHLVVARVHIPNDDAQFDASHCDSDKGEFGGFGSVTGKIECEIKINHEGEVNRARYMPQNPHIIATKTPSSDVLVFDYTKHPAKPARSKVWLFRNHN

SEQ ID NO: 802176 - protein, 425 aa, Homo sapiens; identical to SEQ ID NO: 802162

SEQ ID NO: 802177 - protein, 444 aa, Homo sapiens
MASKEMFEDTVEERVINEEYKIWKKNTPFLYDLVMTHALQWPSLTVQWLPEVTKPEGKDYALHWLVLGTHTSDEQNHLVVARVHIPNDDAQFDASHCDSDKGEFGGFGSVTGKIECEIKINHEGEVNRARYMPQNPHIIATKTPSSDVLVFDYTKHPAKPDPSGECNPDLRLRGHQKEGYGLSWNSNLSGHLLSASDDHTVCLWDINAGPKEGKIVDAKAIFTGHSAVVEDVAWHLLHESLFGSVADDQKLMIWDTRSNTTSKPSHLVDAHTAEVNCLSFNPYSEFILATGSADKVCDSFLVSVCQEMKSRDSSVKLYQTRGSTIEKNVLYVVLHGDAHRVHWSPHNETILASSGTDRRLNVWDLSKIGEEQSAEDAEDGPPELLFIHGGHTAKISDFSWNPNEPWVICSVSEDNIMQIWQMAENIYNDEESDVTTSELEGQGS

SEQ ID NO: 802178 - protein, 228 aa, Homo sapiens
MASKEMFEDTVEERVINEEYKIWKKNTPFLYDLVMTHALQWPSLTVQWLPEVTKPEGKDYALHWLVLGTHTSDEQNHLVVARVHIPNDDAQFDASHCDSDKGEFGGFGSVTGKIECEIKINHEGEVNRARYMPQNPHIIATKTPSSDVLVFDYTKHPAKPDPSGECNPDLRLRGHQKEGYGLSWNSNLSGHLLSASDDHTVCLWDINAGPKEGCGLAPAARVIVWICC

SEQ ID NO: 802179 - protein, 155 aa, Homo sapiens
MASKEMFEDTVEERVINEEYKIWKKNTPFLYDLVMTHALQWPSLTVQWLPEVTKPEGKDYALHWLVLGTHTSDEQNHLVVARVHIPNDDAQFDASHCDSDKGEFGGFGSVTGKIECEIKINHEGEVNRARYMPQNPHIIATKTPTQVENVILISD

SEQ ID NO: 802180 - protein, 583 aa, Homo sapiens
MSTHGARKPPAARHWSRRRSRWLPDPPLRLLSLFPGRMRLRSAAWAGWEARVEKSRSKFGEREKSASDLGTRERGGGRKEGRGVWGAPRQQDGARAFDSGGQCVPLLWCRYGQAVRPMRVWSVHHCAYNDVSDVPHALRRLDGGLQNLNPGRRKGLGRSYTMEMFEDTVEERVINEEYKIWKKNTPFLYDLVMTHALQWPSLTVQWLPEVTKPEGKDYALHWLVLGTHTSDEQNHLVVARVHIPNDDAQFDASHCDSDKGEFGGFGSVTGKIECEIKINHEGEVNRARYMPQNPHIIATKTPSSDVLVFDYTKHPAKPDPSGECNPDLRLRGHQKEGYGLSWNSNLSGHLLSASDDHTVCLWDINAGPKEGKIVDAKAIFTGHSAVVEDVAWHLLHESLFGSVADDQKLMIWDTRSNTTSKPSHLVDAHTAEVNCLSFNPYSEFILATGSADKTVALWDLRNLKLKLHTFESHKDEIFQVHWSPHNETILASSGTDRRLNVWDLSKIGEEQSAEDAEDGPPELLFIHGGHTAKISDFSWNPNEPWVICSVSEDNIMQIWQMAENIYNDEESDVTTSELEGQGS

SEQ ID NO: 802181 - protein, 425 aa, Homo sapiens; identical to SEQ ID NO: 802162

SEQ ID NO: 802182 - protein, 294 aa, Homo sapiens
MPQNPHIIATKTPSSDVLVFDYTKHPAKPDPSGECNPDLRLRGHQKEGYGLSWNSNLSGHLLSASDDHTVCLWDINAGPKEGKIVDAKAIFTGHSAVVEDVAWHLLHESLFGSVADDQKLMIWDTRSNTTSKPSHLVDAHTAEVNCLSFNPYSEFILATGSADKTVALWDLRNLKLKLHTFESHKDEIFQVHWSPHNETILASSGTDRRLNVWDLSKIGEEQSAEDAEDGPPELLFIHGGHTAKISDFSWNPNEPWVICSVSEDNIMQIWQMAENIYNDEESDVTTSELEGQGS

SEQ ID NO: 802183 - protein, 146 aa, Homo sapiens
MASKEMFEDTVEERVINEEYKIWKKNTPFLYDLVMTHALQWPSLTVQWLPEVTKPEGKDYALHWLVLGTHTSDEQNHLVVARVHIPNDDAQFDASHCDSDKGGKIECEIKINHEGEVNRARYMPQNPHIIATKTPTQVENVILISD

SEQ ID NO: 802184 - protein, 159 aa, Homo sapiens
EEPCELQEFVTTFLYDLVMTHALQWPSLTVQWLPEVTKPEGKDYALHWLVLGTHTSDEQNHLVVARVHIPNDDAQFDASHCDSDKGEFGGFGSVTGKIECEIKINHEGEVNRARYMPQNPHIIATKTPSSDVLVFDYTKHPAKPEVTRRKAMVSPGIQI

SEQ ID NO: 802185 - protein, 175 aa, Homo sapiens
MASKEMFEDTVEERVINEEYKIWKKNTPFLYDLVMTHALQWPSLTVQWLPEVTKPEGKDYALHWLVLGTHTSDEQNHLVVARVHIPNDDAQFDASHCDSDKGEFGGFGSVTGKIECEIKINHEGEVNRARYMPQNPHIIATKTPSSDVLVFDYTKHPAKPARPKWRMDPGLRLSH

SEQ ID NO: 802186 - protein, 129 aa, Homo sapiens
MASKEMFEDTVEERVINEEYKIWKKNTPFLYDLVMTHALQWPSLTVQWLPEVTKPEGKDYALHWLVLGTHTSDEQNHLVVARVHIPNDDAQFDASHCDSDKGGRYIIYSNIGVKGKMSLSKHMLLKLYY

SEQ ID NO: 802187 - protein, 131 aa, Homo sapiens
GEPIVAISKCLPTQFQTLILHPSCCRPGFLYKPRCSAAPTLPAGTATPDGHVGWAVPFPPTVAPQGGPQDLHPSHADGAFSTSSVLGRWRKAQPHGLALPGASHIVPPTLCAPGGVKGPGAFDPQLRLAMP

SEQ ID NO: 802188 - protein, 566 aa, Homo sapiens
MVLEGNPEVGSPRTSDLQHRGNKGSCVLSSPGEDAQPGEEPIKYGELIVLGYNGCLASGDKGRRRSRLALSRRSHANGVKPDVMHHISTPLVSKALSNRGQHSISYTLSRSHSVIVEYTHDSDTDMFQIGRSTENMIDFVVTDTSPGGGAAEGPSAQSTISRYACRILCDRRPPYTARIYAAGFDASSNIFLGERAAKWRTPDGLMDGLTTNGVLVMHPAGGFSEDSAPGVWREISVCGNVYTLRDSRSAQQRGKLVENESNVLQDGSLIDLCGATLLWRTPAGLLRAPTLKQLEAQRQEANAARPQCPVGLSTLAFPSPARGRTAPDKQQPWVYVRCGHVHGYHGWGCRRERGPQERECPLCRLVGPYVPLWLGQEAGLCLDPGPPSHAFAPCGHVCSEKTARYWAQTPLPHGTHAFHAACPFCGAWLTGEHGLRPPHFPGPAGLGSLGPPAAVPTCPPRSPPPAAQRELCMWDTPCWHSTPDGHVGWAVPFPPTVAPQGGPQDLHPSHADGAFSTSSVLGRWRKAQPHGLALPGASHIVPPTLCAPGGVKGPGAFDPQLRLAMP

SEQ ID NO: 802189 - protein, 590 aa, Homo sapiens
MVLEGNPEVGSPRTSDLQHRGNKGSCVLSSPGEDAQPGEEPIKYGELIVLGCCEEGGEETEAQRGEVTGPRAHSCYNGCLASGDKGRRRSRLALSRRSHANGVKPDVMHHISTPLVSKALSNRGQHSISYTLSRSHSVIVEYTHDSDTDMFQIGRSTENMIDFVVTDTSPGGGAAEGPSAQSTISRYACRILCDRRPPYTARIYAAGFDASSNIFLGERAAKWRTPDGLMDGLTTNGVLVMHPAGGFSEDSAPGVWREISVCGNVYTLRDSRSAQQRGKLVENESNVLQDGSLIDLCGATLLWRTPAGLLRAPTLKQLEAQRQEANAARPQCPVGLSTLAFPSPARGRTAPDKQQPWVYVRCGHVHGYHGWGCRRERGPQERECPLCRLVGPYVPLWLGQEAGLCLDPGPPSHAFAPCGHVCSEKTARYWAQTPLPHGTHAFHAACPFCGAWLTGEHGLRPPHFPGPAGLGSLGPPAAVPTCPPRSPPPAAQRELCMWDTPCWHSTPDGHVGWAVPFPPTVAPQGGPQDLHPSHADGAFSTSSVLGRWRKAQPHGLALPGASHIVPPTLCAPGGVKGPGAFDPQLRLAMP

SEQ ID NO: 802190 - protein, 185 aa, Homo sapiens
QAGTGLEYIGSHPPPPALGVPVTRQRGAAAGRAHPAAAARGRAGARRGGSGAQRGPERGQPVAAQRPTNSSPGSTSAAGTSMATTAGAAGGSGAPRSANVLSAALWGLMCLYGLARRPASAWTLGRLAMPLHLAATSALRRLPATGPRHHCPTAPMLSMPPAPFAGPGLPASMGCVRLIFQGPLD

SEQ ID NO: 802191 - protein, 149 aa, Homo sapiens
MGRSLVLWGQQRRRSCSRPRLLGLGDPTWEPRGPMELVLPLLQGLAASFFGDLAYRAAAGTLGGKAHESPLCTYSPCLLSLSSQIGRSTENMIDFVVTDTSPGGGAAEGPSAQSTISRYACRILCDRRPPYTARIYAAGFDASSNIFLG

SEQ ID NO: 802192 - protein, 202 aa, Homo sapiens
RFTRMGSKSTGWEACSIQKGVACAQAQVSVSQKSSDRVSDGWSMDCGGNREGGGAKGWDHVTREDAGWRILNLICGLGRSLPTQFQTLILHPSCCRPGFLYKPRCSAAPTSPTCPACVQCLQPPSEWWVGGRLGLALADSHYGLDSVLSGIWGHRGNQTWFPPWWSSQSSGGQTVNKWQHGFMRARIRVQIRLWQASLVMEK

SEQ ID NO: 802193 - protein, 590 aa, Homo sapiens; identical to SEQ ID NO: 802189

SEQ ID NO: 802194 - protein, 566 aa, Homo sapiens; identical to SEQ ID NO: 802188

SEQ ID NO: 802195 - protein, 131 aa, Homo sapiens; identical to SEQ ID NO: 802187

SEQ ID NO: 802196 - protein, 87 aa, Homo sapiens
GGFSEDSAPGVWREISVCGNVYTLRDSRSAQQRGKLVGGPLHSPPLSLPGPHKLPIPLPKPGDDLQSFCPREPQQAPYQGIPGPGGS

SEQ ID NO: 802197 - protein, 137 aa, Homo sapiens
KTKITIVKTFNASGVKPQRNICNLSSICNDSAFFRGEIMFQYDKESTVPQNQHITNGTLTGVPSLSELKRSELNKTLQTLSETYFIMCATAEAQSTLNCTFTTKLNNTMNACAVIAALERVKIRPMEHCCCSVRKQH

SEQ ID NO: 802198 - protein, 401 aa, Homo sapiens
MADPKYADLPGIARNEPDVYETSDLPEDDQAEFDAEELTSTSVEHIIVNPNAAYDKFKDKRVGTKGLDFSDRIGKTKRTGYESGEYEMLGEGLGVKETPQQKYQRLLHEVQELTTEVEKIKTTVKESATEEKLTPVLLAKQLAALKQQLVASHLEKLLGPDAAINLTDPDGALAKRLLLQLEATKNSKGGSGGKTTGTPPDSSLVTYELHSRPEQDKFSQAAKVAELEKRLTELETAVRCDQDAQNPLSAGLQGACLMETVELLQAKVSALDLAVLDQVEARLQSVLGKVNEIAKHKASVEDADTQSKVHQLYETIQRWSPIASTLPELVQRLVTIKQLHEQAMQFGQLLTHLDTTQQMIANSLKDNTTLLTQVQTTMRENLATVEGNFASIDERMKKLGK

SEQ ID NO: 802199 - protein, 401 aa, Homo sapiens; identical to SEQ ID NO: 802198

SEQ ID NO: 802200 - protein, 401 aa, Homo sapiens; identical to SEQ ID NO: 802198

SEQ ID NO: 802201 - protein, 401 aa, Homo sapiens; identical to SEQ ID NO: 802198

SEQ ID NO: 802202 - protein, 401 aa, Homo sapiens; identical to SEQ ID NO: 802198

SEQ ID NO: 802203 - protein, 401 aa, Homo sapiens; identical to SEQ ID NO: 802198

SEQ ID NO: 802204 - protein, 452 aa, Homo sapiens
RGCCIGRAWVLFRCRRQAVLPDTGPNPASPLPEHRPRLHRGPGPPARLAAAMADPKYADLPGIARNEPDVYETSDLPEDDQAEFDAEELTSTSVEHIIVNPNAAYDKFKDKRVGTKGLDFSDRIGKTKRTGYESGEYEMLGEGLGVKETPQQKYQRLLHEVQELTTEVEKIKTTVKESATEEKLTPVLLAKQLAALKQQLVASHLEKLLGPDAAINLTDPDGALAKRLLLQLEATKNSKGGSGGKTTGTPPDSSLVTYELHSRPEQDKFSQAAKVAELEKRLTELETAVRCDQDAQNPLSAGLQGACLMETVELLQAKVSALDLAVLDQVEARLQSVLGKVNEIAKHKASVEDADTQSKVHQLYETIQRWSPIASTLPELVQRLVTIKQLHEQAMQFGQLLTHLDTTQQMIANSLKDNTTLLTQVQTTMRENLATVEGNFASIDERMKKLGK

SEQ ID NO: 802205 - protein, 314 aa, Homo sapiens
MLGEGLGVKETPQQKYQRLLHEVQELTTEVEKIKTTVKESATEEKLTPVLLAKQLAALKQQLVASHLEKLLGPDAAINLTDPDGALAKRLLLQLEATKNSKGGSGGKTTGTPPDSSLVTYELHSRPEQDKFSQAAKVAELEKRLTELETAVRCDQDAQNPLSAGLQGACLMETVELLQAKVSALDLAVLDQVEARLQSVLGKVNEIAKHKASVEDADTQSKVHQLYETIQRWSPIASTLPELVQRLVTIKQLHEQAMQFGQLLTHLDTTQQMIANSLKDNTTLLTQVQTTMRENLATVEGNFASIDERMKKLGK

SEQ ID NO: 802206 - protein, 378 aa, Homo sapiens
MADPKYADLPGIEELTSTSVEHIIVNPNAAYDKFKDKRVGTKGLDFSDRIGKTKRTGYESGEYEMLGEGLGVKETPQQKYQRLLHEVQELTTEVEKIKTTVKESATEEKLTPVLLAKQLAALKQQLVASHLEKLLGPDAAINLTDPDGALAKRLLLQLEATKNSKGGSGGKTTGTPPDSSLVTYELHSRPEQDKFSQAAKVAELEKRLTELETAVRCDQDAQNPLSAGLQGACLMETVELLQAKVSALDLAVLDQVEARLQSVLGKVNEIAKHKASVEDADTQSKVHQLYETIQRWSPIASTLPELVQRLVTIKQLHEQAMQFGQLLTHLDTTQQMIANSLKDNTTLLTQVQTTMRENLATVEGNFASIDERMKKLGK

SEQ ID NO: 802207 - protein, 495 aa, Homo sapiens
DAWVADAWPSAVLLLSRDFLLICRSLCRRLSPGPGDRTQPLPYPNTGPGSTEARVPQPVSPPPWRTLNTPTFPALPGMSQMFMKLATYLRMIKRSSMRSSRHCWSRCYWRTRVCSRATALERLQRMQRQEELTSTSVEHIIVNPNAAYDKFKDKRVGTKGLDFSDRIGKTKRTGYESGEYEMLGEGLGVKETPQQKYQRLLHEVQELTTEVEKIKTTVKESATEEKLTPVLLAKQLAALKQQLVASHLEKLLGPDAAINLTDPDGALAKRLLLQLEATKNSKGGSGGKTTGTPPDSSLVTYELHSRPEQDKFSQAAKVAELEKRLTELETAVRCDQDAQNPLSAGLQGACLMETVELLQAKVSALDLAVLDQVEARLQSVLGKVNEIAKHKASVEDADTQSKVHQLYETIQRWSPIASTLPELVQRLVTIKQLHEQAMQFGQLLTHLDTTQQMIANSLKDNTTLLTQVQTTMRENLATVEGNFASIDERMKKLGK

SEQ ID NO: 802208 - protein, 384 aa, Homo sapiens
MADPKYADLPGIARNEPDVYETSDLPEDDQAEFDAEELTSTSVEHIIVNPNAAYDKFKDKRVGTKGLDFSDRIGKTKRTGYESGEYEMLGEGLGVKETPQQKYQRLLHEVQELTTEVEKIKTTVKESATEEKLTPVLLAKQLAALKQQLVASHLEKLLGPDAAINLTDPDGALAKRLLLQLEATKNSKGGSGGKTTGTPPDSSLVTYELHSRPEQDKFSQAAKVAELEKRLTELETAVRCDQDAQNPLSAGLQGACLMETVELLQAKSVLGKVNEIAKHKASVEDADTQSKVHQLYETIQRWSPIASTLPELVQRLVTIKQLHEQAMQFGQLLTHLDTTQQMIANSLKDNTTLLTQVQTTMRENLATVEGNFASIDERMKKLGK

SEQ ID NO: 802209 - protein, 401 aa, Homo sapiens; identical to SEQ ID NO: 802198

SEQ ID NO: 802210 - protein, 401 aa, Homo sapiens; identical to SEQ ID NO: 802198

SEQ ID NO: 802211 - protein, 379 aa, Homo sapiens
MADPKYADLPGIARNEPDVYETSDLPEDDQAEFDAEELTSTSVEHIIVNPNAAYDKFKDKRVGTKGLDFSDRIGKTKRTGYESGEYEMLGEGLGVKETPQQKYQRLLHEVQELTTEVEKIKTTVKESATEEKLTPVLLAKQLAALKQQLVASHLEKLLGPDAAINLTDPDGALAKRLLLQLEATKNSKGGSGGKTTGTPPDSSLVTYELHSRPEQDKFSQAAKNPLSAGLQGACLMETVELLQAKVSALDLAVLDQVEARLQSVLGKVNEIAKHKASVEDADTQSKVHQLYETIQRWSPIASTLPELVQRLVTIKQLHEQAMQFGQLLTHLDTTQQMIANSLKDNTTLLTQVQTTMRENLATVEGNFASIDERMKKLGK

SEQ ID NO: 802212 - protein, 115 aa, Homo sapiens
MADPKYADLPGIARNEPDVYETSDLPEDDQAEFDAEELTSTSVEHIIVTIKQLHEQAMQFGQLLTHLDTTQQMIANSLKDNTTLLTQVQTTMRENLATVEGNFASIDERMKKLGK

SEQ ID NO: 802213 - protein, 290 aa, Homo sapiens
MADPKYADLPGIARNEPDVYETSDLPEDDQAEFDAEELTSTSVEHIIVNPNAAYDKFKDKRVGTKGLDFSDRIGKTKRTGYESGEYEMLGEGLGVKETPQQKYQRLLHEVQELTTEVEKIKTTVKESATEEKLTPVLLAKQLAALKQQLVASHLEKLLGPDAAINLTDPDGALAKRLLLQLEATKNSKGGSGGKTTGTPPDSSLVTYELHSRPEQDKFSQAAKVAELEKRLTELETAVRCDQDAQAWGIRTWAQPHANSCPILLCLVWGRIGSCPPTQLLWLTVILYNCF

SEQ ID NO: 802214 - protein, 267 aa, Homo sapiens
  misc_feature (258)..(258): Xaa can be any naturally occurring amino acid
  misc_feature (263)..(263): Xaa can be any naturally occurring amino acid
MADPKYADLPGIARNEPDVYETSDLPEDDQAEFDAEELTSTSVEHIIVNPNAAYDKFKDKRVGTKGLDFSDRIGKTKRTGYESGEYEMLGEGLGVKETPQQKYQRLLHEVQELTTEVEKIKTTVKESATEEKLTPVLLAKQLAALKQQLVASHLEKLLGPDAAINLTDPDGALAKRLLLQLEATKNSKGGSGGKTTGTPPDSSLVTYELHSRPEQDKFSQAAKVAELEKRLTELETAVRCDQDAQNPLSAGSTGTFSXENVKXLQQG

SEQ ID NO: 802215 - protein, 139 aa, Homo sapiens
MADPKYADLPGIARNEPDVYETSDLPEDDQAEFDAEELTSTSVEHIIVNPNAAYDKFKDKRVGTKGLDFSDRIGKTKRTGYESGEYEMLGEGLGVKETPQQKYQRLLHEVQELMPTHVQYCFAWCGEGLGLVPQHSFCG

SEQ ID NO: 802216 - protein, 139 aa, Homo sapiens; identical to SEQ ID NO: 802215

SEQ ID NO: 802217 - protein, 39 aa, Homo sapiens
MCGLAYSLISYLTPPCGSGSYIVGNTFSVPSPSGVFLVA

SEQ ID NO: 802218 - protein, 401 aa, Homo sapiens; identical to SEQ ID NO: 802198

SEQ ID NO: 802219 - protein, 401 aa, Homo sapiens; identical to SEQ ID NO: 802198

SEQ ID NO: 802220 - protein, 401 aa, Homo sapiens; identical to SEQ ID NO: 802198

SEQ ID NO: 802221 - protein, 401 aa, Homo sapiens; identical to SEQ ID NO: 802198

SEQ ID NO: 802222 - protein, 314 aa, Homo sapiens; identical to SEQ ID NO: 802205

SEQ ID NO: 802223 - protein, 415 aa, Homo sapiens
MADPKYADLPGIARNEPDVYETSDLPEDDQAEFDAELVRSLTFHLLFNGEELTSTSVEHIIVNPNAAYDKFKDKRVGTKGLDFSDRIGKTKRTGYESGEYEMLGEGLGVKETPQQKYQRLLHEVQELTTEVEKIKTTVKESATEEKLTPVLLAKQLAALKQQLVASHLEKLLGPDAAINLTDPDGALAKRLLLQLEATKNSKGGSGGKTTGTPPDSSLVTYELHSRPEQDKFSQAAKVAELEKRLTELETAVRCDQDAQNPLSAGLQGACLMETVELLQAKVSALDLAVLDQVEARLQSVLGKVNEIAKHKASVEDADTQSKVHQLYETIQRWSPIASTLPELVQRLVTIKQLHEQAMQFGQLLTHLDTTQQMIANSLKDNTTLLTQVQTTMRENLATVEGNFASIDERMKKLGK

SEQ ID NO: 802224 - protein, 401 aa, Homo sapiens; identical to SEQ ID NO: 802198

SEQ ID NO: 802225 - protein, 401 aa, Homo sapiens; identical to SEQ ID NO: 802198

SEQ ID NO: 802226 - protein, 252 aa, Homo sapiens
MADPKYADLPGIARNEPDVYETSDLPEDDQAEFDAEELTSTSVEHIIVNPNAAYDKFKDKRVGTKGLDFSDRIGKTKRTGYESGEYEMLGEGLGVKETPQQKYQRLLHEVQELTTEVEKIKTTVKESATEEKLTPVLLAKQLAALKQQLVASHLEKLLGPDAAINLTDPDGALAKRLLLQLEATKNSKGGSGGKTTGTPPDSSLVTYELHSRPEQDKFSQAAKVAELEKRLTELETAVRCDQDAQGQVFSCT

SEQ ID NO: 802227 - protein, 167 aa, Homo sapiens
METAVRCDQDANPLSAGLQGACLMETVELLQAKVSALDLAVLDQVEARLQSVLGKVNEIAKHKASVEDADTQSKVHQLYETIQRWSPIASTLPELVQRLVTIKQLHEQAMQFGQLLTHLDTTQQMIANSLKDNTTLLTQVQTTMRENLATVEGNFASIDERMKKLGK

SEQ ID NO: 802228 - protein, 252 aa, Homo sapiens; identical to SEQ ID NO: 802226

SEQ ID NO: 802229 - protein, 252 aa, Homo sapiens; identical to SEQ ID NO: 802226

SEQ ID NO: 802230 - protein, 107 aa, Homo sapiens
AVGFGGWVALVVVVPPRCVSCVPLALWLRRSVRLVVGLLLRTPRWSLYVSLRVAAFFGWLCLCHVVLCLFFFFFFFLFCFFFVLLVFLFFFFFFFFARVSKYSHLLN

SEQ ID NO: 802231 - protein, 122 aa, Homo sapiens
MADPKYADLPGIARNEPDVYETSDLPEDDQAEFDAEELTSTSVEHIIVNPNAAYDKFKDKRVGTKGLDFSDRIGKTKRTGYESGEYEMLGEGLGVKETPQQKYQRLLHEVQELLTVILYNCF

SEQ ID NO: 802232 - protein, 609 aa, Homo sapiens
MPHLLVTFRDVAIDFSQEEWECLDPAQRDLYRDVMLENYSNLISLDLESSCVTKKLSPEKEIYEMESLQWENMGKRINHHLQYNGLGDNMECKGNLEGQEASQEGLYMCVKITCEEKATESHSTSSTFHRIIPTKEKLYKCKECRQGFSYLSCLIQHEENHNIEKCSEVKKHRNTFSKKPSYIQHQRIQTGEKPYECMECGKAFGRTSDLIQHQKIHTNEKPYQCNACGKAFIRGSQLTEHQRVHTGEKPYDCKKCGKAFSYCSQYTLHQRIHSGEKPYECKDCGKAFILGSQLTYHQRIHSGEKPYECKECGKAFILGSHLTYHQRVHTGEKPYICKECGKAFLCASQLNEHQRIHTGEKPYECKECGKTFFRGSQLTYHLRVHSGERPYKCKECGKAFISNSNLIQHQRIHTGEKPYKCKECGKAFICGKQLSEHQRIHTGEKPFECKECGKAFIRVAYLTQHEKIHGEKHYECKECGKTFVRATQLTYHQRIHTGEKPYKCKECDKAFIYGSQLSEHQRIHRGEKPYECKQCGKAFIRGSHLTEHLRTHTGEKPYECKECGRAFSRGSEHTLHQRIHTGEKPYTCVQCGKDFRCPSQLTQHTRLHN

SEQ ID NO: 802233 - protein, 612 aa, Homo sapiens
MDLLFQLLVTFRDVAIDFSQEEWECLDPAQRDLYRDVMLENYSNLISLDLESSCVTKKLSPEKEIYEMESLQWENMGKRINHHLQYNGLGDNMECKGNLEGQEASQEGLYMCVKITCEEKATESHSTSSTFHRIIPTKEKLYKCKECRQGFSYLSCLIQHEENHNIEKCSEVKKHRNTFSKKPSYIQHQRIQTGEKPYECMECGKAFGRTSDLIQHQKIHTNEKPYQCNACGKAFIRGSQLTEHQRVHTGEKPYDCKKCGKAFSYCSQYTLHQRIHSGEKPYECKDCGKAFILGSQLTYHQRIHSGEKPYECKECGKAFILGSHLTYHQRVHTGEKPYICKECGKAFLCASQLNEHQRIHTGEKPYECKECGKTFFRGSQLTYHLRVHSGERPYKCKECGKAFISNSNLIQHQRIHTGEKPYKCKECGKAFICGKQLSEHQRIHTGEKPFECKECGKAFIRVAYLTQHEKIHGEKHYECKECGKTFVRATQLTYHQRIHTGEKPYKCKECDKAFIYGSQLSEHQRIHRGEKPYECKQCGKAFIRGSHLTEHLRTHTGEKPYECKECGRAFSRGSEHTLHQRIHTGEKPYTCVQCGKDFRCPSQLTQHTRLHN

SEQ ID NO: 802234 - protein, 424 aa, Homo sapiens
GAGPAGAVRGKGPRTRRSRRAGQCWPLAERWGSMKCLVTGGNVKVLGKAVHSLSRIGDELYLEPLEDGLSLRTVNSSRSAYACFLFAPLFFQQYQAATPGQDLLRCKILMKSFLSVFRSLAMLEKTVEKCCISLNGRSSRLVVQLHCKFGVRKTHNLSFQDCESLQAVFDPASCPHMLRAPARVLGEAVLPFSPALAEVTLGIGRGRRVILRSYHEEEADSTAKAMVTEMCLGEEDFQQLQAQEGVAITFCLKEFRGLLSFAESANLNLSIHFDAPGRPAIFTIKDSLLDGHFVLATLSDTDSHSQDLGSPERHQPVPQLQAHSTPHPDDFANDDIDSYMIAMETTIGNEGSRVLPSISLSPGPQPPKSPGPHSEEEDEAEPSTVPGTPPPKKFRSLFFGSILAPVRSPQGPSPVLAEDSEGEG

SEQ ID NO: 802235 - protein, 195 aa, Homo sapiens
HRLIIRGWLPSAASPWRRQHFLPQGIRGLLSFAESANLNLSIHFDAPGRPAIFTIKDSLLDGHFVLATLSDTDSHSQDLGSPERHQPVPQLQAHSTPHPDDFANDDIDSYMIAMETTIGNEGSRVLPSISLSPGPQPPKSPGPHSEEEDEAEPSTVPGTPPPKKFRSLFFGSILAPVRSPQGPSPVLAEDSEGEG

SEQ ID NO: 802236 - protein, 315 aa, Homo sapiens
MQSFLSVFRSLAMLEKTVEKCCISLNGRSSRLVVQLHCKFGVRKTHNLSFQDCESLQAVFDPASCPHMLRAPARVLGEAVLPFSPALAEVTLGIGRGRRVILRSYHEEEADSTAKAMVTEMCLGEEDFQQLQAQEGVAITFCLKEFRGLLSFAESANLNLSIHFDAPGRPAIFTIKDSLLDGHFVLATLSDTDSHSQDLGSPERHQPVPQLQAHSTPHPDDFANDDIDSYMIAMETTIGNEGSRVLPSISLSPGPQPPKSPGPHSEEEDEAEPSTVPGTPPPKKFRSLFFGSILAPVRSPQGPSPVLAEDSEGEG

SEQ ID NO: 802237 - protein, 453 aa, Homo sapiens
GAGPAGAVRGKGPRTRRSRRAGQCWPLAERWGSMKCLVTGGNVKVLGKAVHSLSRIGDELYLEPLEDGLSLRTVNSSRSAYACFLFAPLFFQQYQAATPGQDLLRCKILMKSFLSVFRSLAMLEKTVEKCCISLNGRSSRLVVQLHCKFGVRKTHNLSFQDCESLQAVFDPASCPHMLRAPARVLGEAVLPFSPALAEVTLGIGRGRRVILRSYHEEEADSTAKAMVTEMCLGEEDFQQLQAQEGVAITFCLKEFRGLLSFAESANLNLSIHFDAPGRYVPSLGTGKGSGMAGAEWDDQLGPPPLPRPAIFTIKDSLLDGHFVLATLSDTDSHSQDLGSPERHQPVPQLQAHSTPHPDDFANDDIDSYMIAMETTIGNEGSRVLPSISLSPGPQPPKSPGPHSEEEDEAEPSTVPGTPPPKKFRSLFFGSILAPVRSPQGPSPVLAEDSEGEG

SEQ ID NO: 802238 - protein, 442 aa, Homo sapiens
PTAASSLTFAIRCAARGTPRSPGARKAEACRGSQEQLAGGRRGPPRSRDTPDNVRRHVTAEALLGKAVHSLSRIGDELYLEPLEDGLSLRTVNSSRSAYACFLFAPLFFQQYQAATPGQDLLRCKILMKSFLSVFRSLAMLEKTVEKCCISLNGRSSRLVVQLHCKFGVRKTHNLSFQDCESLQAVFDPASCPHMLRAPARVLGEAVLPFSPALAEVTLGIGRGRRVILRSYHEEEADSTAKAMVTEMCLGEEDFQQLQAQEGVAITFCLKEFRGLLSFAESANLNLSIHFDAPGRPAIFTIKDSLLDGHFVLATLSDTDSHSQDLGSPERHQPVPQLQAHSTPHPDDFANDDIDSYMIAMETTIGNEGSRVLPSISLSPGPQPPKSPGPHSEEEDEAEPSTVPGTPPPKKFRSLFFGSILAPVRSPQGPSPVLAEDSEGEG

SEQ ID NO: 802239 - protein, 342 aa, Homo sapiens
MQSFLSVFRSLAMLEKTVEKCCISLNGRSSRLVVQLHCKFGEWAAGQPRGASAGRSARPTETLIAHPGVRKTHNLSFQDCESLQAVFDPASCPHMLRAPARVLGEAVLPFSPALAEVTLGIGRGRRVILRSYHEEEADSTAKAMVTEMCLGEEDFQQLQAQEGVAITFCLKEFRGLLSFAESANLNLSIHFDAPGRPAIFTIKDSLLDGHFVLATLSDTDSHSQDLGSPERHQPVPQLQAHSTPHPDDFANDDIDSYMIAMETTIGNEGSRVLPSISLSPGPQPPKSPGPHSEEEDEAEPSTVPGTPPPKKFRSLFFGSILAPVRSPQGPSPVLAEDSEGEG

SEQ ID NO: 802240 - protein, 245 aa, Homo sapiens
MKSFLSVFRSLAMLEKTVEKCCISLNGRSSRLVVQLHCKFDSTAKAMVTEMCLGEEDFQQLQAQEGVAITFCLKEFRGLLSFAESANLNLSIHFDAPGRPAIFTIKDSLLDGHFVLATLSDTDSHSQDLGSPERHQPVPQLQAHSTPHPDDFANDDIDSYMIAMETTIGNEGSRVLPSISLSPGPQPPKSPGPHSEEEDEAEPSTVPGTPPPKKFRSLFFGSILAPVRSPQGPSPVLAEDSEGEG

SEQ ID NO: 802241 - protein, 344 aa, Homo sapiens
MQSFLSVFRSLAMLEKTVEKCCISLNGRSSRLVVQLHCKFGVRKTHNLSFQDCESLQAVFDPASCPHMLRAPARVLGEAVLPFSPALAEVTLGIGRGRRVILRSYHEEEADSTAKAMVTEMCLGEEDFQQLQAQEGVAITFCLKEFRGLLSFAESANLNLSIHFDAPGRYVPSLGTGKGSGMAGAEWDDQLGPPPLPRPAIFTIKDSLLDGHFVLATLSDTDSHSQDLGSPERHQPVPQLQAHSTPHPDDFANDDIDSYMIAMETTIGNEGSRVLPSISLSPGPQPPKSPGPHSEEEDEAEPSTVPGTPPPKKFRSLFFGSILAPVRSPQGPSPVLAEDSEGEG

SEQ ID NO: 802242 - protein, 1073 aa, Homo sapiens
MAAAGQLCLLYLSAGLLSRLGAAFNLDTREDNVIRKYGDPGSLFGFSLAMHWQLQPEDKRLLLVGAPRAEALPLQRANRTGGLYSCDITARGPCTRIEFDNDADPTSESKEDQWMGVTVQSQGPGGKVVTCAHRYEKRQHVNTKQESRDIFGRCYVLSQNLRIEDDMDGGDWSFCDGRLRGHEKFGSCQQGVAATFTKDFHYIVFGAPGTYNWKGIVRVEQKNNTFFDMNIFEDGPYEVGGETEHDESLVPVPANSYLGFSLDSGKGIVSKDEITFVSGAPRANHSGAVVLLKRDMKSAHLLPEHIFDGEGLASSFGYDVAVVDLNKDGWQDIVIGAPQYFDRDGEVGGAVYVYMNQQGRWNNVKPIRLNGTKDSMFGIAVKNIGDINQDGYPDIAVGAPYDDLGKVFIYHGSANGINTKPTQVLKGISPYFGYSIAGNMDLDRNSYPDVAVGSLSDSVTIFRSRPVINIQKTITVTPNRIDLRQKTACGAPSGICLQVKSCFEYTANPAGYNPSISIVGTLEAEKERRKSGLSSRVQFRNQGSEPKYTQELTLKRQKQKVCMEETLWLQDNIRDKLRPIPITASVEIQEPSSRRRVNSLPEVLPILNSDEPKTAHIDVHFLKEGCGDDNVCNSNLKLEYKFCTREGNQDKFSYLPIQKGVPELVLKDQKDIALEITVTNSPSNPRNPTKDGDDAHEAKLIATFPDTLTYSAYRELRAFPEKQLSCVANQNGSQADCELGNPFKRNSNVTFYLVLSTTEVTFDTPDLDINLKLETTSNQDNLAPITAKAKVVIELLLSVSGVAKPSQVYFGGTVVGEQAMKSEDEVGSLIEYEFRVINLGKPLTNLGTATLNIQWPKEISNGKWLLYLVKVESKGLEKVTCEPQKEINSLNLTESHNSRKKREITEKQIDDNRKFSLFAERKYQTLNCSVNVNCVNIRCPLRGLDSKASLILRSRLWNSTFLEEYSKLNYLDILMRAFIDVTAAAENIRLPNAGTQVRVTVFPSKTVAQYSGVPWWIILVAILAGILMLALLVFILWKCGFFKRNKKDHYDATYHKAEIHAQPSDKERLTSDA

SEQ ID NO: 802243 - protein, 638 aa, Homo sapiens
MAAAGQLCLLYLSAGLLSRLGAAFNLDTREDNVIRKYGDPGSLFGFSLAMHWQLQPEDKRLLLVGAPRAEALPLQRANRTGGLYSCDITARGPCTRIEFDNDADPTSESKEDQWMGVTVQSQGPGGKVVTCAHRYEKRQHVNTKQESRDIFGRCYVLSQNLRIEDDMDGGDWSFCDGRLRGHEKFGSCQQGVAATFTKDFHYIVFGAPGTYNWKGIVRVEQKNNTFFDMNIFEDGPYEVGGETEHDESLVPVPANSYLGFSLDSGKGIVSKDEITFVSGAPRANHSGAVVLLKRDMKSAHLLPEHIFDGEGLASSFGYDVAVVDLNKDGWQDIVIGAPQYFDRDGEVGGAVYVYMNQQGRWNNVKPIRLNGTKDSMFGIAVKNIGDINQDGYPDIAVGAPYDDLGKVFIYHGSANGINTKPTQVLKGISPYFGYSIAGNMDLDRNSYPDVAVGSLSDSVTIFRSRPVINIQKTITVTPNRIDLRQKTACGAPSGICLQVKSCFEYTANPAGYNPSISIVGTLEAEKERRKSGLSSRVQFRNQGSEPKYTQELTLKRQKQKVCMEETLWLQDNIRDKLRPIPITASVEIQEPSSRRRVNSLPEVLPILNSDEPKTAHIDVHFLKEGCGDDNVCNSNLKL

SEQ ID NO: 802244 - protein, 1073 aa, Homo sapiens; identical to SEQ ID NO: 802242

SEQ ID NO: 802245 - protein, 1073 aa, Homo sapiens; identical to SEQ ID NO: 802242

SEQ ID NO: 802246 - protein, 1073 aa, Homo sapiens; identical to SEQ ID NO: 802242

SEQ ID NO: 802247 - protein, 511 aa, Homo sapiens
MEETLWLQDNIRDKLRPIPITASVEIQEPSSRRRVNSLPEVLPILNSDEPKTAHIDVHFLKEGCGDDNVCNSNLKLEYKFCTREGNQDKFSYLPIQKGVPELVLKDQKDIALEITVTNSPSNPRNPTKDGDDAHEAKLIATFPDTLTYSAYRELRAFPEKQLSCVANQNGSQADCELGNPFKRNSNVTFYLVLSTTEVTFDTPDLDINLKLETTSNQDNLAPITAKAKVVIELLLSVSGVAKPSQVYFGGTVVGEQAMKSEDEVGSLIEYEFRVINLGKPLTNLGTATLNIQWPKEISNGKWLLYLVKVESKGLEKVTCEPQKEINSLNLTESHNSRKKREITEKQIDDNRKFSLFAERKYQTLNCSVNVNCVNIRCPLRGLDSKASLILRSRLWNSTFLEEYSKLNYLDILMRAFIDVTAAAENIRLPNAGTQVRVTVFPSKTVAQYSGVPWWIILVAILAGILMLALLVFILWKCGFFKRNKKDHYDATYHKAEIHAQPSDKERLTSDA

SEQ ID NO: 802248 - protein, 197 aa, Homo sapiens
MTKNYINWNYFGYNFFQESHNSRKKREITEKQIDDNRKFSLFAERKYQTLNCSVNVNCVNIRCPLRGLDSKASLILRSRLWNSTFLEEYSKLNYLDILMRAFIDVTAAAENIRLPNAGTQVRVTVFPSKTVAQYSGVPWWIILVAILAGILMLALLVFILWKCGFFKRNKKDHYDATYHKAEIHAQPSDKERLTSDA

SEQ ID NO: 802249 - protein, 1073 aa, Homo sapiens; identical to SEQ ID NO: 802242

SEQ ID NO: 802250 - protein, 860 aa, Homo sapiens
MAAAGQLCLLYLSAGLLSRLGAAFNLDTREDNVIRKYGDPGSLFGFSLAMHWQLQPEDKRLLLVGAPRAEALPLQRANRTGGLYSCDITARGPCTRIEFDNDADPTSESKEDQWMGVTVQSQGPGGKVVTCAHRYEKRQHVNTKQESRDIFGRCYVLSQNLRIEDDMDGGDWSFCDGRLRGHEKFGSCQQGVAATFTKDFHYIVFGAPGTYNWKGIVRVEQKNNTFFDMNIFEDGPYEVGGETEHDESLVPVPANSYLGFSLDSGKGIVSKDEITFVSGAPRANHSGAVVLLKRDMKSAHLLPEHIFDGEGLASSFGYDVAVVDLNKDGWQDIVIGAPQYFDRDGEVGGAVYVYMNQQGRWNNVKPIRLNGTKDSMFGIAVKNIGDINQDGYPDIAVGAPYDDLGKVFIYHGSANGINTKPTQVLKGISPYFGYSIAGNMDLDRNSYPDVAVGSLSDSVTIFRSRPVINIQKTITVTPNRIDLRQKTACGAPSGICLQVKSCFEYTANPAGYNPSISIVGTLEAEKERRKSGLSSRVQFRNQGSEPKYTQELTLKRQKQKVCMEETLWLQDNIRDKLRPIPITASVEIQEPSSRRRVNSLPEVLPILNSDEPKTAHIDVHFLKEGCGDDNVCNSNLKLEYKFCTREGNQDKFSYLPIQKGVPELVLKDQKDIALEITVTNSPSNPRNPTKDGDDAHEAKLIATFPDTLTYSAYRELRAFPEKQLSCVANQNGSQADCELGNPFKRNSNVTFYLVLSTTEVTFDTPDLDINLKLETTSNQDNLAPITAKAKVVIELLLSVSGVAKPSQVYFGGTVVGEQAMKSEDEVGSLIEYEFRLINLGKPLTNLGSTLSNSLGKHVRE

SEQ ID NO: 802251 - protein, 288 aa, Homo sapiens
MAAAGQLCLLYLSAGLLSRLGAAFNLDTREDNVIRKYGDPGSLFGFSLAMHWQLQPEDKRLLLVGAPRAEALPLQRANRTGGLYSCDITARGPCTRIEFDNDADPTSESKEDQWMGVTVQSQGPGGKVVTCAHRYEKRQHVNTKQESRDIFGRCYVLSQNLRIEDDMDGGDWSFCDGRLRGHEKFGSCQQGVAATFTKDFHYIVFGAPGTYNWKGIVRVEQKNNTFFDMNIFEDGPYEVGGETEHDESLVPVPANSYLGRSRHRWLPLPTFSDTLCETPSQGLWPLDF

SEQ ID NO: 802252 - protein, 1073 aa, Homo sapiens; identical to SEQ ID NO: 802242

SEQ ID NO: 802253 - protein, 1091 aa, Homo sapiens
MAAAGQLCLLYLSAGLLSRLGAAFNLDTREDNVIRKYGDPGSLFGFSLAMHWQLQPEDKRLLLVGAPRAEALPLQRANRTGGLYSCDITARGPCTRIEFDNDADPTSESKEDQWMGVTVQSQGPGGKVVTCAHRYEKRQHVNTKQESRDIFGRCYVLSQNLRIEDDMDGGDWSFCDGRLRGHEKFGSCQQGVAATFTKDFHYIVFGAPGTYNWKGIVRVEQKNNTFFDMNIFEDGPYEVGGETEHDESLVPVPANSYLGFSLDSGKGIVSKDEITFVSGAPRANHSGAVVLLKRDMKSAHLLPEHIFDGEGLASSFGYDVAVVDLNKDGWQDIVIGAPQYFDRDGEVGGAVYVYMNQQGRWNNVKPIRLNGTKDSMFGIAVKNIGDINQDGYPDIAVGAPYDDLGKVFIYHGSANGINTKPTQVLKGISPYFGYSIAGNMDLDRNSYPDVAVGSLSDSVTIFRSRPVINIQKTITVTPNRIDLRQKTACGAPSGICLQVKSCFEYTANPAGYNPSISIVGTLEAEKERRKSGLSSRVQFRNQGSEPKYTQELTLKRQKQKVCMEETLWLQDNIRDKLRPIPITASVEIQEPSSRRRVNSLPEVLPILNSDEPKTAHIDVHFLKEGCGDDNVCNSNLKLEYKFCTREGNQDKFSYLPIQKGVPELVLKDQKDIALEITVTNSPSNPRNPTKDGDDAHEAKLIATFPDTLTYSAYRELRAFPEKQLSCVANQNGSQADCELGNPFKRNSNVTFYLVLSTTEVTFDTPDLDINLKLETTSNQDNLAPITAKAKVVIELLLSVSGVAKPSQVYFGGTVVGEQAMKSEDEVGSLIEYEFRVINLGKPLTNLGTATLNIQWPKEISNGKWLLYLVKVESKGLEKVTCEPQKEINSLNLTESHNSRKKREITEKQIDDNRKFSLFAERKYQTLNCSVNVNCVNIRCPLRGLDSKASLILRSRLWNSTFLEEYSKLNYLDILMRAFIDVTAAAENIRLPNAGTQVRVTVFPSKTVAQYSGVPWWIILVAILAGILMLALLVFILWKCGFFKRSRYDDSVPRYHAVRIRKEEREIKDEKYIDNLEKKQWITKWNENESYS

SEQ ID NO: 802254 - protein, 1073 aa, Homo sapiens; identical to SEQ ID NO: 802242

SEQ ID NO: 802255 - protein, 478 aa, Homo sapiens
IGSGVVLVLPILNSDEPKTAHIDVHFLKEGCGDDNVCNSNLKLEYKFCTREGNQDKFSYLPIQKGVPELVLKDQKDIALEITVTNSPSNPRNPTKDGDDAHEAKLIATFPDTLTYSAYRELRAFPEKQLSCVANQNGSQADCELGNPFKRNSNVTFYLVLSTTEVTFDTPDLDINLKLETTSNQDNLAPITAKAKVVIELLLSVSGVAKPSQVYFGGTVVGEQAMKSEDEVGSLIEYEFRVINLGKPLTNLGTATLNIQWPKEISNGKWLLYLVKVESKGLEKVTCEPQKEINSLNLTESHNSRKKREITEKQIDDNRKFSLFAERKYQTLNCSVNVNCVNIRCPLRGLDSKASLILRSRLWNSTFLEEYSKLNYLDILMRAFIDVTAAAENIRLPNAGTQVRVTVFPSKTVAQYSGVPWWIILVAILAGILMLALLVFILWKCGFFKRNKKDHYDATYHKAEIHAQPSDKERLTSDA

SEQ ID NO: 802256 - protein, 117 aa, Homo sapiens
MDSTFLEEYSKLNYLDILMRAFIDVTAAAENIRLPNAGTQVRVTVFPSKTVAQYSGVPWWIILVAILAGILMLALLVFILWKCGFFKRNKKDHYDATYHKAEIHAQPSDKERLTSDA

SEQ ID NO: 802257 - protein, 1019 aa, Homo sapiens
MAAAGQLCLLYLSAGLLSRLGAAFNLDTREDNVIRKYGDPGSLFGFSLAMHWQLQPEDKRLLLVGAPRAEALPLQRANRTGGLYSCDITARGPCTRIEFDNDADPTSESKEDQWMGVTVQSQGPGGKVVTCAHRYEKRQHVNTKQESRDIFGRCYVLSQNLRIEDDMDGGDWSFCDGRLRGHEKFGSCQQGVAATFTKDFHYIVFGAPGTYNWKGIVRVEQKNNTFFDMNIFEDGPYEVGGETEHDESLVPVPANSYLGFSLDSGKGIVSKDEITFVSGAPRANHSGAVVLLKRDMKSAHLLPEHIFDGEGLASSFGYDVAVVDLNKDGWQDIVIGAPQYFDRDGEVGGAVYVYMNQQGRWNNVKPIRLNGTKDSMFGIAVKNIGDINQDGYPDIAVGAPYDDLGKVFIYHGSANGINTKPTQVLKGISPYFGYSIAGNMDLDRNSYPDVAVGSLSDSVTIFRSRPVINIQKTITVTPNRIDLRQKTACGAPSGICLQVKSCFEYTANPAGYNPSISIVGTLEAEKERRKSGLSSRVQFRNQGSEPKYTQELTLKRQKQKVCMEETLWLQDNIRDKLRPIPITASVEIQEPSSRRRVNSLPEVLPILNSDEPKTAHIDVHFLKEGCGDDNVCNSNLKLEYKFCTREGNQDKFSYLPIQKGVPELVLKDQKDIALEITVTNSPSNPRNPTKDGDDAHEAKLIATFPDTLTYSAYRELRAFPEKQLSCVANQNGSQADCELGNPFKRNSNVTFYLVLSTTEVTFDTPDLDINLKLETTSNQDNLAPITAKAKVVIELLLSVSGVAKPSQVYFGGTVVGEQAMKSEDEVGSLIEYEFRVINLGKPLTNLGTATLNIQWPKEISNGKWLLYLVKVESKGLEKVTCEPQKEINSLNLTESHNSRKKREITEKQIDDNRKFSLFAERKYQTLNCSVNVNCVNIRCPLRGLDSKASLILRSRLWNSTFLEEYSKLNYLDILMRAFIDVTAAAENIRLPNAGTQVRGSPASFRFRTCLFSLYPTLMS

SEQ ID NO: 802258 - protein, 112 aa, Homo sapiens
STPGDHLVSILFPRKLPGRRGTGRRAGFLLANCFLPAAAELRSRADRRMSDSPSLSTLATRRSLRWPGETYNTLQQIPWEGGGKRLKLEENSDVWKRFPEITRRKCFPVYKF

SEQ ID NO: 802259 - protein, 261 aa, Homo sapiens
DAVVAAERLEGAAGQAEGASARDRAAAAAMATKDPTAVERANLLNMAKLSIKGLIESALSFGRTLDSDYPPLQQFFVVMEHCLKHGLKVRKSFLSYNKTIWGPLELVEKLYPEAEEIGASVRDLPGLKTPLGRARAWLRLALMQKKMADYLRCLIIQRDLLSEFYEYHALMMEEEGAVIVGLLVGLNVIDANLCVKGEDLDSQVGVIDFSMYLKNEEDIGNKERYDFHKLFHILGFLYSSLQIIIRSIYLQCGFILLFSPL

SEQ ID NO: 802260 - protein, 633 aa, Homo sapiens
GLEVPRRPGARTGPATKDPTAVERANLLNMAKLSIKGLIESALSFGRTLDSDYPPLQQFFVVMEHCLKHGLKVRKSFLSYNKTIWGPLELVEKLYPEAEEIGASVRDLPGLKTPLGRARAWLRLALMQKKMADYLRCLIIQRDLLSEFYEYHALMMEEEGAVIVGLLVGLNVIDANLCVKGEDLDSQVGVIDFSMYLKNEEDIGNKERNVQIAAILDQKNYVEELNRQLNSTVSSLHSRVDSLEKSNTKLIEELAIAKNNIIKLQEENHQLRSENKLILMKTQQHLEVTKVDVETELQTYKHSRQGLDEMYNEARRQLRDESQLRQDVENELAVQVSMKHEIELAMKLLEKDIHEKQDTLIGLRQQLEEVKAINIEMYQKLQGSEDGLKEKNEIIARLEEKTNKITAAMRQLEQSSSLSFTQSCLNYTRLQQAEKAQMEAEDEDEKYLQECLSKSDSLQKQISQKEKQLVQLETDLKIEKEWRQTLQEDLQKEKDALSHLRNETQQIISLKKEFLNLQDENQQLKKIYHEQEQALQELGNKLSESKLKIEDIKEANKALQGLVWLKDKEATHCKLCEKEFSLSKRKHHCRNCGEIFCNACSDNELPLPSSPKPVRVCDSCHALLIQRCSSNLP

SEQ ID NO: 802261 - protein, 196 aa, Homo sapiens
MEAEDEDEKYLQECLSKSDSLQKQISQKEKQLVQLETDLKIEKEWRQTLQEDLQKEKDALSHLRNETQQIISLKKEFLNLQDENQQLKKIYHEQEQALQELGNKLSESKLKIEDIKEANKALQGLVWLKDKEATHCKLCEKEFSLSKRKHHCRNCGEIFCNACSDNELPLPSSPKPVRVCDSCHALLIQRCSSNLP

SEQ ID NO: 802262 - protein, 639 aa, Homo sapiens
GLEVPRRPGARTGPATKDPTAVERANLLNMAKLSIKGLIESALSFGRTLDSDYPPLQQFFVVMEHCLKHGLKVRKSFLSYNKTIWGPLELVEKLYPEAEEIGASVRDLPGLKTPLGRARAWLRLALMQKKMADYLRCLIIQRDLLSEFYEYHALMMEEEGAVIVGLLVGLNVIDANLCVKGEDLDSQVGVIDFSMYLKNEEDIGNKERNVQIAAILDQKNYVEELNRQLNSTVSSLHSRVDSLEKSNTKLIEELAIAKNNIIKLQEENHQLRSENKLILMKTQQHLEVTKVDVETELQTYKHSRQGLDEMYNEARRQLRDESQLRQDVENELAVQVSMKHEIELAMKLLEKDIHEKQDTLIGLRQQLEEVKAINIEMYQKLQGSEDGLKEKNEIIARLEEKTNKITAAMRQLEQRLQQAEKAQMEAEDEDEKYLQECLSKSDSLQKQISQKEKQLVQLETDLKIEKEWRQTLQEDLQKEKDALSHLRNETQQIISLKKEFLNLQDENQQLKKIYHEQEQALQELGNKLSESKLKIEDIKEANKALQGLVWLKDKEATHCKLCEKEFSLSKRKHHCRNCGEIFCNACSDNELPLPSSPKPTWQLLHLHVSQTLHLLLLWLCHQLQYQYELVLDLVVRRTK

SEQ ID NO: 802263 - protein, 612 aa, Homo sapiens
GLEVPRRPGARTGPATKDPTAVERANLLNMAKLSIKGLIESALSFGRTLDSDYPPLQQFFVVMEHCLKHGLKVRKSFLSYNKTIWGPLELVEKLYPEAEEIGASVRDLPGLKTPLGRARAWLRLALMQKKMADYLRCLIIQRDLLSEFYEYHALMMEEEGAVIVGLLVGLNVIDANLCVKGEDLDSQVGVIDFSMYLKNEEDIGNKERNVQIAAILDQKNYVEELNRQLNSTVSSLHSRVDSLEKSNTKLIEELAIAKNNIIKLQEENHQLRSENKLILMKTQQHLEVTKVDVETELQTYKHSRQGLDEMYNEARRQLRDESQLRQDVENELAVQVSMKHEIELAMKLLEKDIHEKQDTLIGLRQQLEEVKAINIEMYQKLQGSEDGLKEKNEIIARLEEKTNKITAAMRQLEQRLQQAEKAQMEAEDEDEKYLQECLSKSDSLQKQISQKEKQLVQLETDLKIEKEWRQTLQEDLQKEKDALSHLRNETQQIISLKKEFLNLQDENQQLKKIYHEQEQALQELGNKLSESKLKIEDIKEANKALQGLVWLKDKEATHCKLCEKEFSLSKRKTWQLLHLHVSQTLHLLLLWLCHQLQYQYELVLDLVVRRTK

SEQ ID NO: 802264 - protein, 619 aa, Homo sapiens
GLEVPRRPGARTGPATKDPTAVERANLLNMAKLSIKGLIESALSFGRTLDSDYPPLQQFFVVMEHCLKHGLKVRKSFLSYNKTIWGPLELVEKLYPEAEEIGASVRDLPGLKTPLGRARAWLRLALMQKKMADYLRCLIIQRDLLSEFYEYHALMMEEEGAVIVGLLVGLNVIDANLCVKGEDLDSQVGVIDFSMYLKNEEDIGNKERNVQIAAILDQKNYVEELNRQLNSTVSSLHSRVDSLEKSNTKLIEELAIAKNNIIKLQEENHQLRSENKLILMKTQQHLEVTKVDVETELQTYKHSRQGLDEMYNEARRQLRDESQLRQDVENELAVQVSMKHEIELAMKLLEKDIHEKQDTLIGLRQQLEEVKAINIEMYQKLQGSEDGLKEKNEIIARLEEKTNKITAAMRQLEQRLQQAEKAQMEAEDEDEKYLQECLSKSDSLQKQISQKEKQLVQLETDLKIEKEWRQTLQEDLQKEKDALSHLRNETQQIISLKKEFLNLQDENQQLKKIYHEQEQALQELGNKLSESKLKIEDIKEANKALQGLVWLKDKEATHCKLCEKEFSLSKRKHHCRNCGEIFCNACSDNELPLPSSPKPVRVCDSCHALLIQRCSSNLP

SEQ ID NO: 802265 - protein, 619 aa, Homo sapiens; identical to SEQ ID NO: 802264

SEQ ID NO: 802266 - protein, 619 aa, Homo sapiens; identical to SEQ ID NO: 802264

SEQ ID NO: 802267 - protein, 552 aa, Homo sapiens
GLEVPRRPGARTGPATKDPTAVERANLLNMAKLSIKGLIESALSFGRTLDSDYPPLQQFFVVMEHCLKHGLKVRKSFLSYNKTIWGPLELVEKLYPEAEEIGASVRDLPGLKTPLGRARAWLRLALMQKKMADYLRCLIIQRDLLSEFYEYHALMMEEEGAVIVGLLVGLNVIDANLCVKGEDLDSQVGVIDFSMYLKNEEDIGNKERNVQIAAILDQKNYVEELNRQLNSTVSSLHSRVDSLEKSNTKLIEELAIAKNNIIKLQEENHQLRSENKLILMKTQQHLEVTKVDVETELQTYKHSRQGLDEMYNEARRQLRDESQLRQDVENELAVQVSMKHEIELAMKLLEKDIHEKQDTLIGLRQQLEEVKAINIEMYQKLQGSEDGLKEKNEIIARLEEKTNKITAAMRQLEQRLQQAEKAQMEAEDEDEKYLQECLSKSDSLQKQISQKEKQLVQLETDLKIEKEWRQTLQEDLQKEKDALSHLRNETQQIISLKKEFLNLQDENQQLKKIYHEQEQALQELGNKLSESKLKIEDIKEANKALQVSRTFS

SEQ ID NO: 802268 - protein, 530 aa, Homo sapiens
GLEVPRRPGARTGPATKDPTAVERANLLNMAKLSIKGLIESALSFGRTLDSDYPPLQQFFVVMEHCLKHGLKVRKSFLSYNKTIWGPLELVEKLYPEAEEIGASVRDLPGLKTPLGRARAWLRLALMQKKMADYLRCLIIQRDLLSEFYEYHALMMEEEGAVIVGLLVGLNVIDANLCVKGEDLDSQVGVIDFSMYLKNEEDIGNKERNVQIAAILDQKNYVEELNRQLNSTVSSLHSRVDSLEKSNTKLIEELAIAKNNIIKLQEENHQLRSENKLILMKTQQHLEVTKVDVETELQTYKHSRQGLDEMYNEARRQLRDESQLRQDVENELAVQVSMKHEIELAMKLLEKDIHEKQDTLIGLRQQLEEVKAINIEMYQKLQGSEDGLKEKNEIIARLEEKTNKITAAMRQLEQRLQQAEKAQMEAEDEDEKYLQECLSKSDSLQKQISQKEKQLVQLETDLKIEKEWRQTLQEDLQKEKDALSHLRNETQQIISLKKEFLNLQDENQQLKKIYHEQEQALQELGNKLSE

SEQ ID NO: 802269 - protein, 485 aa, Homo sapiens
GLEVPRRPGARTGPATKDPTAVERANLLNMAKLSIKGLIESALSFGRTLDSDYPPLQQFFVVMEHCLKHGLKVRKSFLSYNKTIWGPLELVEKLYPEAEEIGASVRDLPGLKTPLGRARAWLRLALMQKKMADYLRCLIIQRDLLSEFYEYHALMMEEEGAVIVGLLVGLNVIDANLCVKGEDLDSQVGVIDFSMYLKNEEDIGNKERNVQIAAILDQKNYVEELNRQLNSTVSSLHSRVDSLEKSNTKLIEELAIAKNNIIKLQEENHQLRSENKLILMKTQQHLEVTKVDVETELQTYKHSRQGLDEMYNEARRQLRDESQLRQDVENELAVQVSMKHEIELAMKLLEKDIHEKQDTLIGLRQQLEEVKAINIEMYQKLQGSEDGLKEKNEIIARLEEKTNKITAAMRQLEQRYSISSLSFFFSFLLPFFFIQFLHLPQKPLGRHRLGHVFCLSPAGFCVFALVVAWNQVALYYADSFEVVIL

SEQ ID NO: 802270 - protein, 109 aa, Homo sapiens
DPAVRAGLGAGRGGGRAGQGGGRGPPGAPALADGHPRGLPRALLAPGLCRGHRVDSQRPERSRGGVGAKAQLGAEAARAFPWASVRRGAFTRAGTAASSRAARAATRAH

SEQ ID NO: 802271 - protein, 963 aa, Homo sapiens
MGLPEPGPLRLLALLLLLLLLLLLRLQHLAAAAADPLLGGQGPAKECEKDQFQCRNERCIPSVWRCDEDDDCLDHSDEDDCPKKTCADSDFTCDNGHCIHERWKCDGEEECPDGSDESEATCTKQVCPAEKLSCGPTSHKCVPASWRCDGEKDCEGGADEAGCATLCAPHEFQCGNRSCLAAVFVCDGDDDCGDGSDERGCADPACGPREFRCGGDGGGACIPERWVCDRQFDCEDRSDEAAELCGRPGPGATSAPAACATVSQFACRSGECVHLGWRCDGDRDCKDKSDEADCPLGTCRGDEFQCGDGTCVLAIKHCNQEQDCPDGSDEAGCLQGLNECLHNNGGCSHICTDLKIGFECTCPAGFQLLDQKTCGDIDECKDPDACSQICVNYKGYFKCECYPGYEMDLLTKNCKAAAGKSPSLIFTNRHEVRRIDLVKRNYSRLIPMLKNVVALDVEVATNRIYWCDLSYRKIYSAYMDKASDPKEQEVLIDEQLHSPEGLAVDWVHKHIYWTDSGNKTISVATVDGGRRRTLFSRNLSEPRAIAVDPLRGFMYWSDWGDQAKIEKSGLNGVDRQTLVSDNIEWPNGITLDLLSQRLYWVDSKLHQLSSIDFSGGNRKTLISSTDFLSHPFGIAVFEDKVFWTDLENEAIFSANRLNGLEISILAENLNNPHDIVIFHELKQPRAPDACELSVQPNGGCEYLCLPAPQISSHSPKYTCACPDTMWLGPDMKRCYRAPQSTSTTTLASTMTRTVPATTRAPGTTVHRSTYQNHSTETPSLTAAVPSSVSVPRAPSISPSTLSPATSNHSQHYANEDSKMGSTVTAAVIGIIVPIVVIALLCMSGYLIWRNWKRKNTKSMNFDNPVYRKTTEEEDEDELHIGRTAQIGHVYPAAISSFDRPLWAEPCLGETREPEDPAPALKELFVLPGEPRSQLHQLPKNPLSELPVVKSKRVALSLEDDGLP

SEQ ID NO: 802272 - protein, 793 aa, Homo sapiens [sequence omitted]

SEQ ID NO: 802273 - protein, 700 aa, Homo sapiens [sequence omitted]

SEQ ID NO: 802274 - protein, 571 aa, Homo sapiens
MGLPEPGPLRLLALLLLLLLLLLLRLQHLAAAAADPLLGGQGPAKECEKDQFQCRNERCIPSVWRCDEDDDCLDHSDEDDCPKKTCADSDFTCDNGHCIHERWKCDGEEECPDGSDESEATCTKQVCPAEKLSCGPTSHKCVPASWRCDGEKDCEGGADEAGCATLCAPHEFQCGNRSCLAAVFVCDGDDDCGDGSDERGCADPACGPREFRCGGDGGGACIPERWVCDRQFDCEDRSDEAAELCGRPGPGATSAPAACATVSQFACRSGECVHLGWRCDGDRDCKDKSDEADCPLGTCRGDEFQCGDGTCVLAIKHCNQEQDCPDGSDEAGCLQGLNECLHNNGGCSHICTDLKIGFECTCPAGFQLLDQKTCGDIDECKDPDACSQICVNYKGYFKCECYPGYEMDLLTKNCKAAAGKSPSLIFTNRHEVRRIDLVKRNYSRLIPMLKNVVALDVEVATNRIYWCDLSYRKIYSAYMDKASDPKEQEVLIDEQLHSPEGLAVDWVHKHIYWTDSGNKTISVATVDGGRRRTLFSRNLSEPRAIAVDPLRGSAEPALVLGRLQATPTVQH

SEQ ID NO: 802275 - protein, 998 aa, Homo sapiens
MGLPEPGPLRLLALLLLLLLLLLLRLQHLAAAAADPLLGGQGPAKECEKDQFQCRNERCIPSVWRCDEDDDCLDHSDEDDCPKKTCADSDFTCDNGHCIHERWKCDGEEECPDGSDESEATCTKQVCPAEKLSCGPTSHKCVPASWRCDGEKDCEGGADEAGCATLCAPHEFQCGNRSCLAAVFVCDGDDDCGDGSDERGCADPACGPREFRCGGDGGGACIPERWVCDRQFDCEDRSDEAAELCGRPGPGATSAPAACATVSQFACRSGECVHLGWRCDGDRDCKDKSDEADCPLGTCRGDEFQCGDGTCVLAIKHCNQEQDCPDGSDEAGCLQVPPTFLGNRRRPRGLNECLHNNGGCSHICTDLKIGFECTCPAGFQLLDQKTCGDIDECKDPDACSQICVNYKGYFKCECYPGYEMDLLTKNCKAAAGKSPSLIFTNRHEVRRIDLVKRNYSRLIPMLKNVVALDVEVATNRIYWCDLSYRKIYSAYMDKASDPKEQEVLIDEQLHSPEGLAVDWVHKHIYWTDSGNKTISVATVDGGRRRTLFSRNLSEPRAIAVDPLRGFMYWSDWGDQAKIEKSGLNGVDRQTLVSDNIEWPNGITLDLLSQRLYWVDSKLHQLSSIDFSGGNRKTLISSTDFLSHPFGIAVFEDKVFWTDLENEAIFSANRLNGLEISILAENLNNPHDIVIFHELKQPRAPDACELSVQPNGGCEYLCLPAPQISSHSPKYTCACPDTMWLGPDMKRCYRVSGSFWNALKTSSEEPLIAVASAPQSTSTTTLASTMTRTVPATTRAPGTTVHRSTYQNHSTETPSLTAAVPSSVSVPRAPSISPSTLSPATSNHSQHYANEDSKMGSTVTAAVIGIIVPIVVIALLCMSGYLIWRNWKRKNTKSMNFDNPVYRKTTEEEDEDELHIGRTAQIGHVYPAAISSFDRPLWAEPCLGETREPEDPAPALKELFVLPGEPRSQLHQLPKNPLSELPVVKSKRVALSLEDDGLP

SEQ ID NO: 802276 - protein, 122 aa, Homo sapiens
MSGYLIWRNWKRKNTKSMNFDNPVYRKTTEEEDEDELHIGRTAQIGHVYPAAISSFDRPLWAEPCLGETREPEDPAPALKELFVLPGEPRSQLHQLPKNPLSELPVVKSKRVALSLEDDGLP

SEQ ID NO: 802277 - protein, 762 aa, Homo sapiens
MGLPEPGPLRLLALLLLLLLLLLLRLQHLAAAAADPLLGGQGPAKECEKDQFQCRNERCIPSVWRCDEDDDCLDHSDEDDCPKKTCADSDFTCDNGHCIHERWKCDGEEECPDGSDESEATCTKQVCPAEKLSCGPTSHKCVPASWRCDGEKDCEGGADEAGCATLCAPHEFQCGNRSCLAAVFVCDGDDDCGDGSDERGCADPACGPREFRCGGDGGGACIPERWVCDRQFDCEDRSDEAAELCGRPGPGATSAPAACATVSQFACRSGECVHLGWRCDGDRDCKDKSDEADCPLGTCRGDEFQCGDGTCVLAIKHCNQEQDCPDGSDEAGCLQVPPTFLGNRRRPRGLNECLHNNGGCSHICTDLKIGFECTCPAGFQLLDQKTCGDIDECKDPDACSQICVNYKGYFKCECYPGYEMDLLTKNCKAAAGKSPSLIFTNRHEVRRIDLVKRNYSRLIPMLKNVVALDVEVATNRIYWCDLSYRKIYSAYMDKASDPKEQEVLIDEQLHSPEGLAVDWVHKHIYWTDSGNKTISVATVDGGRRRTLFSRNLSEPRAIAVDPLRGFMYWSDWGDQAKIEKSGLNGVDRQTLVSDNIEWPNGITLDLLSQRLYWVDSKLHQLSSIDFSGGNRKTLISSTDFLSHPFGIAVFEDKVFWTDLENEAIFSANRLNGLEISILAENLNNPHDIVIFHELKQPRAPDACELSVQPNGGCEYLCLPAPQISSHSPKYTCACPDTMWLGPDMKRCYRVSGSFWNALKTSS

SEQ ID NO: 802278 - protein, 415 aa, Homo sapiens
MGLPEPGPLRLLALLLLLLLLLLLRLQHLAAAAADPLLGGQGPAKECEKDQFQCRNERCIPSVWRCDEDDDCLDHSDEDDCPKKTCADSDFTCDNGHCIHERWKCDGEEECPDGSDESEATCTKQVCPAEKLSCGPTSHKCVPASWRCDGEKDCEGGADEAGCATLCAPHEFQCGNRSCLAAVFVCDGDDDCGDGSDERGCADPACGPREFRCGGDGGGACIPERWVCDRQFDCEDRSDEAAELCGRPGPGATSAPAACATVSQFACRSGECVHLGWRCDGDRDCKDKSDEADCPLGTCRGDEFQCGDGTCVLAIKHCNQEQDCPDGSDEAGCLQGLNECLHNNGGCSHICTDLKIGFECTCPAGFQLLDQKTCGGETFSHTPKQKQILLLVLTPAPPHSLRRDGEGLWHRDLRC

SEQ ID NO: 802279 - protein, 700 aa, Homo sapiens [sequence omitted]

SEQ ID NO: 802280 - protein, 976 aa, Homo sapiens
MGLPEPGPLRLLALLLLLLLLLLLRLQHLAAAAADPLLGGQGPAKECEKDQFQCRNERCIPSVWRCDEDDDCLDHSDEDDCPKKTCADSDFTCDNGHCIHERWKCDGEEECPDGSDESEATCTKQVCPAEKLSCGPTSHKCVPASWRCDGEKDCEGGADEAGCATLCAPHEFQCGNRSCLAAVFVCDGDDDCGDGSDERGCADPACGPREFRCGGDGGGACIPERWVCDRQFDCEDRSDEAAELCGRPGPGATSAPAACATVSQFACRSGECVHLGWRCDGDRDCKDKSDEADCPLGTCRGDEFQCGDGTCVLAIKHCNQEQDCPDGSDEAGCLQVPPTFLGNRRRPRGLNECLHNNGGCSHICTDLKIGFECTCPAGFQLLDQKTCGDIDECKDPDACSQICVNYKGYFKCECYPGYEMDLLTKNCKAAAGKSPSLIFTNRHEVRRIDLVKRNYSRLIPMLKNVVALDVEVATNRIYWCDLSYRKIYSAYMDKASDPKEQEVLIDEQLHSPEGLAVDWVHKHIYWTDSGNKTISVATVDGGRRRTLFSRNLSEPRAIAVDPLRGFMYWSDWGDQAKIEKSGLNGVDRQTLVSDNIEWPNGITLDLLSQRLYWVDSKLHQLSSIDFSGGNRKTLISSTDFLSHPFGIAVFEDKVFWTDLENEAIFSANRLNGLEISILAENLNNPHDIVIFHELKQPRAPDACELSVQPNGGCEYLCLPAPQISSHSPKYTCACPDTMWLGPDMKRCYRAPQSTSTTTLASTMTRTVPATTRAPGTTVHRSTYQNHSTETPSLTAAVPSSVSVPRAPSISPSTLSPATSNHSQHYANEDSKMGSTVTAAVIGIIVPIVVIALLCMSGYLIWRNWKRKNTKSMNFDNPVYRKTTEEEDEDELHIGRTAQIGHVYPAAISSFDRPLWAEPCLGETREPEDPAPALKELFVLPGEPRSQLHQLPKNPLSELPVVKSKRVALSLEDDGLP

SEQ ID NO: 802281 - protein, 762 aa, Homo sapiens; identical to SEQ ID NO: 802277

SEQ ID NO: 802282 - protein, 762 aa, Homo sapiens; identical to SEQ ID NO: 802277

SEQ ID NO: 802283 - protein, 682 aa, Homo sapiens
MGLPEPGPLRLLALLLLLLLLLLLRLQHLAAAAADPLLGGQGPAKECEKDQFQCRNERCIPSVWRCDEDDDCLDHSDEDDCPKKTCADSDFTCDNGHCIHERWKCDGEEECPDGSDESEATCTKQVCPAEKLSCGPTSHKCVPASWRCDGEKDCEGGADEAGCATLCAPHEFQCGNRSCLAAVFVCDGDDDCGDGSDERGCADPACGPREFRCGGDGGGACIPERWVCDRQFDCEDRSDEAAELCGRPGPGATSAPAACATVSQFACRSGECVHLGWRCDGDRDCKDKSDEADCPLGTCRGDEFQCGDGTCVLAIKHCNQEQDCPDGSDEAGCLQVPPTFLGNRRRPRGLNECLHNNGGCSHICTDLKIGFECTCPAGFQLLDQKTCGDIDECKDPDACSQICVNYKGYFKCECYPGYEMDLLTKNCKAAAGKSPSLIFTNRHEVRRIDLVKRNYSRLIPMLKNVVALDVEVATNRIYWCDLSYRKIYSAYMDKASDPKEQEVLIDEQLHSPEGLAVDWVHKHIYWTDSGNKTISVATVDGGRRRTLFSRNLSEPRAIAVDPLRGFMYWSDWGDQAKIEKSGLNGVDRQTLVSDNIEWPNGITLDLLSQRLYWVDSKLHQLSSIDFSGGNRKTLISSTDFLSHPFGIAVFEDKVFWTDLENEAIFADNGLTDTPYYTPHYTP

SEQ ID NO: 802284 - protein, 160 aa, Homo sapiens
VVIALLCMSGYLIWRNWKRKNTKSMNFDNPVYRKTTEEEDEDELHIGRTAQIGHVYPAVSISHWENSYLPTIFPSILSSPPILSSFPSFLPSLPSFRPSLPPFLPSFPPSLSFFFPSFLPFLPPSLPPSFLPQTFIKNAPCIRHCSRPWGTQKCWGRWLR

SEQ ID NO: 802285 - protein, 67 aa, Homo sapiens
MIICTAVQKYSFLLDSENPRTSTQRACSKEGMRFCRAVVRAVIRKDASGSIVFPSKLPSSASAGCGW

SEQ ID NO: 802286 - protein, 324 aa, Homo sapiens
MATVTATTKVPEIRDVTRIERIGAHSHIRGLGLDDALEPRQASQGMVGQLAARRAAGVVLEMIREGKIAGRAVLIAGQPGTGKTAIAMGMAQALGPDTPFTAIAGSEIFSLEMSKTEALTQAFRRSIGVRIKEETEIIEGEVVEIQIDRPATGTGSKVGKLTLKTTEMETIYDLGTKMIESLTKDKVQAGDVITIDKATGKISKLGRSFTRARDYDAMGSQTKFVQCPDGGAPETQGGGAHRVPARDRTSSTLAPRASWRSSQVTQGRSSQKSVSRSMPRWLSGARRARRRSSLECCSSTRSTCWTSRASPSSTGPWRVTWRLS

SEQ ID NO: 802287 - protein, 338 aa, Homo sapiens
MATVTATTKVPEIRDVTRIERIGAHSHIRGLGLDDALEPRQASQGMVGQLAARRAAGVVLEMIREGKIAGRAVLIAGQPGTGKTAIAMGMAQALGPDTPFTAIAGSEIFSLEMSKTEALTQAFRRSIGVRIKEETEIIEGEVVEIQIDRPATGTGSKVGKLTLKTTEMETIYDLGTKMIESLTKDKVQAGDVITIDKATGKISKLGRSFTRARDYDAMGSQTKFVQCPDGGAPKRRGWCPRSWPKSSLNLAPKVPGLSPVTRGVTSSRASCRCCMAGGTGASRGGPQPRWRRSSHGGEGGGWSPVAGGTRLRGGSPTKPPVGVSGALRVFCAQIRRLL

SEQ ID NO: 802288 - protein, 255 aa, Homo sapiens
MATVTATTKVPEIRDVTRIERIGAHSHIRGLGLDDALEPRQASQGMVGQLAARRAAGVVLEMIREGKIAGRAVLIAGQPGTGKTAIAMGMAQALGPDTPFTAIAGSEIFSLEMSKTEALTQAFRRSIGVRIKEETEIIEGEVVEIQIDRPATGTGSKVGKLTLKTTEMETIYDLGTKMIESLTKDKVQAGDVITIDKATGKISKLGRSFTRARDYDAMGSQVRPGLPGSPRPQHWGVFISSITPLTHGVWIFLLP

SEQ ID NO: 802289 - protein, 266 aa, Homo sapiens
HIFERHNTVQNTNEQIRKSNHCEQTQLTATTKVPEIRDVTRIERIGAHSHIRGLGLDDALEPRQASQGMVGQLAARRAAGVVLEMIREGKIAGRAVLIAGQPGTGKTAIAMGMAQALGPDTPFTAIAGSEIFSLEMSKTEALTQAFRRSIGVRIKEETEIIEGEVVEIQIDRPATGTGSKVGKLTLKTTEMETIYDLGTKMIESLTKDKVQAGDVITIDTRPTRGQDLPKAEGPLPFNNGRPGESQPNGLIGGSTRTKGFLLDKVA

SEQ ID NO: 802290 - protein, 324 aa, Homo sapiens; identical to SEQ ID NO: 802286

SEQ ID NO: 802291 - protein, 340 aa, Homo sapiens
MATVTATTKVPEIRDVTRIERIGAHSHIRGLGLDDALEPRQASQGMVGQLAARRAAGVVLEMIREGKIAGRAVLIAGQPGTGKTAIAMGMAQALGPDTPFTAIAGSEIFSLEMSKTEALTQAFRRSIGVRIKEETEIIEGEVVEIQIDRPATGTGSKVGKLTLKTTEMETIYDLGTKMIESLTKDKVQAGDVITIDKATGKISKLGRSFTRARDYDAMGSQTKFVQCPDGGAPETQGGGAHRVPARDRTSSTLAPRASWRSSQVTHGEISRSREPIHAGGDARGQGDLLGVSRSPGGGVSSHGGEMGAVGPGPWAHPASGGFPRKTAGDRRGLWCVLPPP

SEQ ID NO: 802292 - protein, 340 aa, Homo sapiens
NPQTTPPFMMSRGLLAEGQRTATTKVPEIRDVTRIERIGAHSHIRGLGLDDALEPRQASQGMVGQLAARRAAGVVLEMIREGKIAGRAVLIAGQPGTGKTAIAMGMAQALGPDTPFTAIAGSEIFSLEMSKTEALTQAFRRSIGVRIKEETEIIEGEVVEIQIDRPATGTGSKVGKLTLKTTEMETIYDLGTKMIESLTKDKVQAGDVITIDKATGKISKLGRSFTRARDYDAMGSQTKFVQCPDGGAPETQGGGAHRVPARDRTSSTLAPRASWRSSQVTQGRSSQKSVSRSMPRWLSGARRARRRSSLECCSSTRSTCWTSRASPSSTGPWRVTWRLS

SEQ ID NO: 802293 - protein, 279 aa, Homo sapiens
MVGQLAARRAAGVVLEMIREGKIAGRAVLIAGQPGTGKTAIAMGMAQALGPDTPFTAIAGSEIFSLEMSKTEALTQAFRRSIGVRIKEETEIIEGEVVEIQIDRPATGTGSKVGKLTLKTTEMETIYDLGTKMIESLTKDKVQAGDVITIDKATGKISKLGRSFTRARDYDAMGSQTKFVQCPDGGAPETQGGGAHRVPARDRTSSTLAPRASWRSSQVTQGRSSQKSVSRSMPRWLSGARRARRRSSLECCSSTRSTCWTSRASPSSTGPWRVTWRLS

SEQ ID NO: 802294 - protein, 279 aa, Homo sapiens; identical to SEQ ID NO: 802293

SEQ ID NO: 802295 - protein, 439 aa, Homo sapiens
MATVTATTKVPEIRDVTRIERIGAHSHIRGLGLDDALEPRQASQGMVGQLAARRAAGVVLEMIREGKIAGRAVLIAGQPGTGKTAIAMGMAQALGPDTPFTAIAGSEIFSLEMSKTEALTQAFRRSIGVRIKEETEIIEGEVVEIQIDRPATGTGSKVGKLTLKTTEMETIYDLGTKMIESLTKDKVQAGDVITIDKATGKISKLGRSFTRARDYDAMGSQTKFVQCPDGGAPETQGGGAHRVPARDRREQINAKVAEWREEGKAEIIPGVLFIDEVHMLDIESFSFLNRALESDMAPVLIMATNRGITRIRGTSYQSPHGIPIDLLDRLLIVSTTPYSEKDTKQILRIRCEEEDVEMSEDAYTVLTRIGLETSLRYAIQLITAASLVCRKRKGTEVQVDDIKRVYSLFLDESRSTQYMKEYQDAFLFNELKGETMDTS

SEQ ID NO: 802296 - protein, 327 aa, Homo sapiens
FIWQTCFTATTKVPEIRDVTRIERIGAHSHIRGLGLDDALEPRQASQGMVGQLAARRAAGVVLEMIREGKIAGRAVLIAGQPGTGKTAIAMGMAQALGPDTPFTAIAGSEIFSLEMSKTEALTQAFRRSIGVRIKEETEIIEGEVVEIQIDRPATGTGSKVGKLTLKTTEMETIYDLGTKMIESLTKDKVQAGDVITIDKATGKISKLGRSFTRARDYDAMGSQTKFVQCPDGGAPETQGGGAHRVPARDRTSSTLAPRASWRSSQVTQGRSSQKSVSRSMPRWLSGARRARRRSSLECCSSTRSTCWTSRASPSSTGPWRVTWRLS

SEQ ID NO: 802297 - protein, 341 aa, Homo sapiens
PVRPRFIRPRTLAVGEHHGNVTATTKVPEIRDVTRIERIGAHSHIRGLGLDDALEPRQASQGMVGQLAARRAAGVVLEMIREGKIAGRAVLIAGQPGTGKTAIAMGMAQALGPDTPFTAIAGSEIFSLEMSKTEALTQAFRRSIGVRIKEETEIIEGEVVEIQIDRPATGTGSKVGKLTLKTTEMETIYDLGTKMIESLTKDKVQAGDVITIDKATGKISKLGRSFTRARDYDAMGSQTKFVQCPDGGAPETQGGGAHRVPARDRTSSTLAPRASWRSSQVTQGRSSQKSVSRSMPRWLSGARRARRRSSLECCSSTRSTCWTSRASPSSTGPWRVTWRLS

SEQ ID NO: 802298 - protein, 279 aa, Homo sapiens; identical to SEQ ID NO: 802293

SEQ ID NO: 802299 - protein, 313 aa, Homo sapiens
MATVTATTKVPEIRDVTRIERIGAHSHIRGLGLDDALEPRQASQGMVGQLAARRAAGVVLEMIREGKIAGRAVLIAMGMAQALGPDTPFTAIAGSEIFSLEMSKTEALTQAFRRSIGVRIKEETEIIEGEVVEIQIDRPATGTGSKVGKLTLKTTEMETIYDLGTKMIESLTKDKVQAGDVITIDKATGKISKLGRSFTRARDYDAMGSQTKFVQCPDGGAPETQGGGAHRVPARDRTSSTLAPRASWRSSQVTQGRSSQKSVSRSMPRWLSGARRARRRSSLECCSSTRSTCWTSRASPSSTGPWRVTWRLS

SEQ ID NO: 802300 - protein, 161 aa, Homo sapiens [sequence omitted]

SEQ ID NO: 802301 - protein, 490 aa, Homo sapiens
KPRARYEAWVVRLVSIMATVTATTKVPEIRDVTRIERIGAHSHIRGLGLDDALEPRQASQGMVGQLAARRAAGVVLEMIREGKIAGRAVLIAGQPGTGKTAIAMGMAQALGPDTPFTAIAGSEIFSLEMSKTEALTQAFRRSIGVRIKEETEIIEGEVVEIQIDRPATGTGSKVGKLTLKTTEMETIYDLGTKMIESLTKDKVQAGDVITGGNSNPQNSGNRQGDGQDLQAGPLLHTRPRLRRYGLPDQVRAVPRWGSSRNARRWCTPCPCTRSNVINSRTQGFLALFSGDTGEIKSEVREQINAKVAEWREEGKAEIIPGVLFIDEVHMLDIESFSFLNRALESDMAPVLIMATNRGITRIRGTSYQSPHGIPIDLLDRLLIVSTTPYSEKDTKQILRIRCEEEDVEMSEDAYTVLTRIGLETSLRYAIQLITAASLVCRKRKGTEVQVDDIKRVYSLFLDESRSTQYMKEYQDAFLFNELKGETMDTS

SEQ ID NO: 802302 - protein, 161 aa, Homo sapiens [sequence omitted]

SEQ ID NO: 802303 - protein, 152 aa, Homo sapiens
RYSFGTRYSSAPQYEYRPGKRGLTILRYSSAPRYSSAPLLDRLLIVSTTPYSEKDTKQILRIRCEEEDVEMSEDAYTVLTRIGLETSLRYAIQLITAASLVCRKRKGTEVQVDDIKRVYSLFLDESRSTQYMKEYQDAFLFNELKGETMDTS

SEQ ID NO: 802304 - protein, 81 aa, Homo sapiens
PTFKIILAQRPVPQSLAPVCDEEGCRTLRFEPFGSLGLLVVPMALEFQAGSTGRYLFSVSESARAPSEPLVGRNCRGTRES

SEQ ID NO: 802305 - protein, 279 aa, Homo sapiens; identical to SEQ ID NO: 802293

SEQ ID NO: 802306 - protein, 357 aa, Homo sapiens
PVRPRFIRPRTLAVGEHHGNVTATTKVPEIRDVTRIERIGAHSHIRGLGLDDALEPRQASQGMVGQLAARRAAGVVLEMIREGKIAGRAVLIAGQPGTGKTAIAMGMAQALGPDTPFTAIAGSEIFSLEMSKTEALTQAFRRSIGVRIKEETEIIEGEVVEIQIDRPATGTGSKVGKLTLKTTEMETIYDLGTKMIESLTKDKVQAGDVITIDKATGKISKLGRSFTRARDYDAMGSQTKFVQCPDGGAPETQGGGAHRVPARDRTSSTLAPRASWRSSQVTHGEISRSREPIHAGGDARGQGDLLGVSRSPGGGVSSHGGEMGAVGPGPWAHPASGGFPRKTAGDRRGLWCVLPPP

SEQ ID NO: 802307 - protein, 324 aa, Homo sapiens; identical to SEQ ID NO: 802286

SEQ ID NO: 802308 - protein, 324 aa, Homo sapiens; identical to SEQ ID NO: 802286

SEQ ID NO: 802309 - protein, 279 aa, Homo sapiens; identical to SEQ ID NO: 802293

SEQ ID NO: 802310 - protein, 330 aa, Homo sapiens
LVANSARGSCTATTKVPEIRDVTRIERIGAHSHIRGLGLDDALEPRQASQGMVGQLAARRAAGVVLEMIREGKIAGRAVLIAGQPGTGKTAIAMGMAQALGPDTPFTAIAGSEIFSLEMSKTEALTQAFRRSIGVRIKEETEIIEGEVVEIQIDRPATGTGSKVGKLTLKTTEMETIYDLGTKMIESLTKDKVQAGDVITIDKATGKISKLGRSFTRARDYDAMGSQTKFVQCPDGGAPETQGGGAHRVPARDRTSSTLAPRASWRSSQVTQGRSSQKSVSRSMPRWLSGARRARRRSSLECCSSTRSTCWTSRASPSSTGPWRVTWRLS

SEQ ID NO: 802311 - protein, 324 aa, Homo sapiens; identical to SEQ ID NO: 802286

SEQ ID NO: 802312 - protein, 340 aa, Homo sapiens
KPRARYEAWVVRLVSIMATVTATTKVPEIRDVTRIERIGAHSHIRGLGLDDALEPRQASQGMVGQLAARRAAGVVLEMIREGKIAGRAVLIAGQPGTGKTAIAMGMAQALGPDTPFTAIAGSEIFSLEMSKTEALTQAFRRSIGVRIKEETEIIEGEVVEIQIDRPATGTGSKVGKLTLKTTEMETIYDLGTKMIESLTKDKVQAGDVITIDKATGKISKLGRSFTRARDYDAMGSQTKFVQCPDGGAPETQGGGAHRVPARDRTSSTLAPRASWRSSQVTQGRSSQKSVSRSMPRWLSGARRARRRSSLECCSSTRSTCWTSRASPSSTGPWRVTWRLS

SEQ ID NO: 802313 - protein, 324 aa, Homo sapiens; identical to SEQ ID NO: 802286

SEQ ID NO: 802314 - protein, 339 aa, Homo sapiens
MATVTATTKVPEIRDVTRIERIGAHSHIRGLGLDDALEPRQASQGMVGQLAARRAAGVVLEMIREGKIAGRAVLIAGQPGTGKTAIAMGMAQALGPDTPFTAIAGSEIFSLEMSKTEALTQAFRRSIGVRIKEETEIIEGEVVEIQIDRPATGTGSKVGKLTLKTTEMETIYDLGTKMIESLTKDKVQAGDVITIDKATGKISKLGRSFTRARDYDAMGSQTKFVQCPDGGAPKRRGWCPRSWPKSSLNLAPKVPGLSPVTRGVTSSRASCRCCMAGGTGASRGGPQPRWRRSSHGGEGGGWSPVAGGTRLRGGSPTKPPGGSDAAPFVSFVLRFVVCC

SEQ ID NO: 802315 - protein, 312 aa, Homo sapiens
SGSGEHHGNRCAHSHIRGLGLDDALEPRQASQGMVGQLAARRAAGVVLEMIREGKIAGRAVLIAGQPGTGKTAIAMGMAQALGPDTPFTAIAGSEIFSLEMSKTEALTQAFRRSIGVRIKEETEIIEGEVVEIQIDRPATGTGSKVGKLTLKTTEMETIYDLGTKMIESLTKDKVQAGDVITIDKATGKISKLGRSFTRARDYDAMGSQTKFVQCPDGGAPETQGGGAHRVPARDRTSSTLAPRASWRSSQVTQGRSSQKSVSRSMPRWLSGARRARRRSSLECCSSTRSTCWTSRASPSSTGPWRVTWRLS

SEQ ID NO: 802316 - protein, 161 aa, Homo sapiens [sequence omitted]

SEQ ID NO: 802317 - protein, 260 aa, Homo sapiens
MPFPALSPPFFPHPRPIDQVRAVPRWGSSRNARRWCTPCPCTRSNVINSRTQGFLALFSGDTGEIKSEVREQINAKVAEWREEGKAEIIPGVLFIDEVHMLDIESFSFLNRALESDMAPVLIMATNRGITRIRGTSYQSPHGIPIDLLDRLLIVSTTPYSEKDTKQILRIRCEEEDVEMSEDAYTVLTRIGLETSLRYAIQLITAASLVCRKRKGTEVQVDDIKRVYSLFLDESRSTQYMKEYQDAFLFNELKGETMDTS

SEQ ID NO: 802318 - protein, 177 aa, Homo sapiens
MATVTATTKVPEIRDVTRIERIGAHSHIRGLGLDDALEPRQASQGMVGQLAARRAAGVVLEMIREGKIAGRAVLIAGQPGTGKTAIAMGMAQALGPDTPFTAIAGSEIFSLEMSKTEALTQAFRRSIGVRIKEETEIIEGEVVEIQIDRPATGTGSKRERHEADPPHPVRGRRCGDE

SEQ ID NO: 802319 - protein, 85 aa, Homo sapiens
GGWASLGPFLSLPYPPSPCRDVITIDKATGKISKLGRSFTRARDYDAMGSQVRPGLPGSPRPQHWGVFISSITPLTHGVWIFLLP

SEQ ID NO: 802320 - protein, 180 aa, Homo sapiens
GRPVRRRPAARVLRLRCRGSRARSLQQARGQQRVAQGSGPVQRREARPGASRRRGPALQQQLGHPRVSVPGGLVQRGAPRPVHRAHRGPSLQQETHQGRVAPQHGQKESSVRLTGKEARSSGGWVESPVLIRAREATETTSRQLPRGTAARMDLEEAPPKTPVSRVPPQWGQPQLPLQCL

SEQ ID NO: 802321 - protein, 183 aa, Homo sapiens
AALRFLLARGARVDARDGAGATALGLAAALGRSQDIEVLLGHGADPGIRDRHGRSALHRAAARGHLLAVQLLVTQGAEVDARDTLGLTPLHHASREGHVEVAGCLLDRGAQVDATGWLRKTPLHLAAERGHGPTVGLLLSRGASPTLRTQWAEVAQMPEGDLPQALPELGGGEKECEGIESTG

SEQ ID NO: 802322 - protein, 174 aa, Homo sapiens
MDSQRPEPREEEEEEQELRWMELDSEEALGTRTEGPSVVQGWGHLLQAVWRGPAGLVTQLLRQGASVEERTLRCCWATGQTQASGTGMAALRCTGLPPEDTCLPSSCWSPRGPRWMRGTPWASHPCITPLGKATWRLPAACWTGVPRWMLPAGSERPPYTWLQSEGMGLPWGFC

SEQ ID NO: 802323 - protein, 157 aa, Homo sapiens
ATRPMPHKDIEVLLGHGADPGIRDRHGRSALHRAAARGHLLAVQLLVTQGAEVDARDTLGLTPLHHASREGHVEVAGCLLDRGAQVDATGWLRKTPLHLAAERGHGPTVGLLLSRGASPTLRTQWAEVAQMPEGDLPQALPELGGGEKECEGIESTG

SEQ ID NO: 802324 - protein, 185 aa, Homo sapiens
MDSQRPEPREEEEEEQELRWMELDSEEALGTRTEGPSVVQGWGHLLQAVWRGPAGLVTQLLRQGASVEERDHAGRTPLHLAVLRGHAPLVRLLLQRGAPVGAVDRAGRTALHEAAWHGHSRVAELLLQRGASAAARSGTGLTPLHWAAALGHTLLAARLLEAPGPGPAAAEAEDARGWTAAHWAA

SEQ ID NO: 802325 - protein, 164 aa, Homo sapiens
AAALGRSQVRPALRPAVMGGGAGPGSPETCHRGSWSQAGGRCPGTKALSAPPAVPLRCSPVPWRPGRDPRPGARLHAGGSNRLSASAGPVPETPVPGQRAGCWLQILGFALRTLRGKSGRFQAGQPWVRPHNMRKWCQERQAAAGTEEAWAGQTPGGSAPRLPG

SEQ ID NO: 802326 - protein, 174 aa, Homo sapiens; identical to SEQ ID NO: 802322

SEQ ID NO: 802327 - protein, 174 aa, Homo sapiens; identical to SEQ ID NO: 802322

SEQ ID NO: 802328 - protein, 116 aa, Homo sapiens
RTSPCPPPQPGIGRRGRHPPLGGLSQLGQEWVRGLPEGGPHGEPCEAFQGHIGVHPRLRFLGEVASEQLSSTSMFLLVLPNRLAFVPQEGSRTGALAASRGGSMLDRGLCPKAGPS

SEQ ID NO: 802329 - protein, 61 aa, Homo sapiens
MCGVCHSSQQPPEPLTEMWRTSAIKALNATGQANLSLEALFQILSVVPVYNNLTIYTTVMS

SEQ ID NO: 802330 - protein, 199 aa, Homo sapiens
MRTADREARPGLPSLLLLLLAGAGLSAASPPAAPRFNVSLDSVPELRWLPVLRHYDLDLVRAAMAQVIGDRVPKWVHVLIGKVVLELERFLPQPFTGEIRGMCDFMNLSLADCLLVNLAYESSVFCTSIVAQDSRGHIYHGRNLDYPFGNVLRKLTVDVQFLKNGQIAFTGTTFIGYVGLWTGQSPHKFTVSGDERDPE

SEQ ID NO: 802331 - protein, 323 aa, Homo sapiens
MRTADREARPGLPSLLLLLLAGAGLSAASPPAAPRFNVSLDSVPELRWLPVLRHYDLDLVRAAMAQVIGDRVPKWVHVLIGKVVLELERFLPQPFTGEIRGMCDFMNLSLADCLLVNLAYESSVFCTSIVAQDSRGHIYHGRNLDYPFGNVLRKLTVDVQFLKNGQIAFTGTTFIGYVGLWTGQSPHKFTVSGDERDKGWWWENAIAALFRRHIPVSWLIRATLSESENFEAAVGKLAKTPLIADVYYIVGGTSPREGVVITRNRDGPADIWPLDPLNGAWFRVETNYDHWKPAPKEDDRRTSAIKALNATGQANLSLEALFQ

SEQ ID NO: 802332 - protein, 222 aa, Homo sapiens
MCDFMNLSLADCLLVNLAYESSVFCTSIVAQDSRGHIYHGRNLDYPFGNVLRKLTVDVQFLKNGQIAFTGTTFIGYVGLWTGQSPHKFTVSGDERDKGWWWENAIAALFRRHIPVSWLIRATLSESENFEAAVGKLAKTPLIADVYYIVGGTSPREGVVITRNRDGPADIWPLDPLNGAWFRVETNYDHWKPAPKEDDRRTSAIKALNATGQANLSLEALFQ

SEQ ID NO: 802333 - protein, 237 aa, Homo sapiens
STHASARNRDGPADIWPLDPLNGAWFRVETNYDHWKPAPKEDDRRTSAIKALNATGQANLSLEALFQILRWFQFITMKAGQVRWLTPVIPALWECLTQADSGCAILKEWADKGWWWENAIAALFRRHIPVSWLIRATLSESENFEAAVGKLAKTPLIADVYYIVGGTSPREGVVITRNRDGPADIWPLDPLNGAWFRVETNYDHWKPAPKEDDRRTSAIKALNATGQANLSLEALFQ

SEQ ID NO: 802334 - protein, 334 aa, Homo sapiens [sequence omitted]

SEQ ID NO: 802335 - protein, 323 aa, Homo sapiens; identical to SEQ ID NO: 802331

SEQ ID NO: 802336 - protein, 326 aa, Homo sapiens
MRTADREARPGLPSLLLLLLAGAGLSAASPPAAPRFNVSLDSVPELRWLPVLRHYDLDLVRAAMAQVIGDRVPKWVHVLIGKVVLELERFLPQPFTGEIRGMCDFMNLSLADCLLVNLAYESSVFCTSIVAQDSRGHIYHGRNLDYPFGNVLRKLTVDVQFLKNGQIAFTGTTFIGYVGLWTGQSPHKFTVSGDERDKGWWWENAIAALFRRHIPVSWLIRATLSESENFEAAVGKLAKTPLIADVYYIVGGTSPREGVVITRNRDGPADIWPLDPLNGAWFRVETNYDHWKPAPKEDDRRTSAIKALNATGQANLSLEALFQMIF

SEQ ID NO: 802337 - protein, 323 aa, Homo sapiens; identical to SEQ ID NO: 802331

SEQ ID NO: 802338 - protein, 156 aa, Homo sapiens
IPWLVNDDDKGWWWENAIAALFRRHIPVSWLIRATLSESENFEAAVGKLAKTPLIADVYYIVGGTSPREGVVITRNRDGPADIWPLDPLNGAWFRVETNYDHWKPAPKEDDRRTSAIKALNATGQANLSLEALFQILSVVPVYNKPHNLYYGNERR

SEQ ID NO: 802339 - protein, 344 aa, Homo sapiens
MRTADREARPGLPSLLLLLLAGAGLSAASPPAAPRFNVSLDSVPELRWLPVLRHYDLDLVRAAMAQVIGDRVPKWVHVLIGKVVLELERFLPQPFTGEIRGMCDFMNLSLADCLLVNLAYESSVFCTSIVAQDSRGHIYHGRNLDYPFGNVLRKLTVDVQFLKNGQIAFTGTTFIGYVGLWTGQSPHKFTVSGDERDKGWWWENAIAALFRRHIPVSWLIRATLSESENFEAAVGKLAKTPLIADVYYIVGGTSPREGVVITRNRDGPADIWPLDPLNGAWFRVETNYDHWKPAPKEDDRRTSAIKALNATGQANLSLEALFQILSVVPVYNKPHNLYYGNERR

SEQ ID NO: 802340 - protein, 327 aa, Homo sapiens
MRTADREARPGLPSLLLLLLAGAGLSAASPPAAPRFNVSLDSVPELRWLPVLRHYDLDLVRAAMAQVIGDRVPKWVHVLIGKVVLELERFLPQPFTGEIRGMCDFMNLSLADCLLVNLAYESSVFCTSIVAQDSRGHIYHGRNLDYPFGNVLRKLTVDVQFLKNGQIAFTGTTFIGYVGLWTGQSPHKFTVSGDERDKGWWWENAIAALFRRHIPVSWLIRATLSESENFEAAVGKLAKTPLIADVYYIVGGTSPREGVVITRNRDGPADIWPLDPLNGAWSRVKSDYDHGVGGRSTNRIGQYRPSRAPEATWTQRSACRDDHFSRC

SEQ ID NO: 802341 - protein, 323 aa, Homo sapiens; identical to SEQ ID NO: 802331

SEQ ID NO: 802342 - protein, 323 aa, Homo sapiens; identical to SEQ ID NO: 802331

SEQ ID NO: 802343 - protein, 323 aa, Homo sapiens; identical to SEQ ID NO: 802331

SEQ ID NO: 802344 - protein, 373 aa, Homo sapiens
SRPKDVAPLAVHTQSQRRRPLSGSDALVLFVSRDRVPKWVHVLIGKVVLELERFLPQPFTGEIRGMCDFMNLSLADCLLVNLAYESSVLSAPSPRGVTRGLRGPPTQTSGRRHIFRVIKTGRCLLPRNLQRFLFASLGKSELHIVGFERESRFSDSTLNFPSTCSPGFSLPQSRFCTSIVAQDSRGHIYHGRNLDYPFGNVLRKLTVDVQFLKNGQIAFTGTTFIGYVGLWTGQSPHKFTVSGDERDKGWWWENAIAALFRRHIPVSWLIRATLSESENFEAAVGKLAKTPLIADVYYIVGGTSPREGVVITRNRDGPADIWPLDPLNGAWFRVETNYDHWKPAPKEDDRRTSAIKALNATGQANLSLEALFQ

SEQ ID NO: 802345 - protein, 344 aa, Homo sapiens; identical to SEQ ID NO: 802339

SEQ ID NO: 802346 - protein, 323 aa, Homo sapiens; identical to SEQ ID NO: 802331

SEQ ID NO: 802347 - protein, 323 aa, Homo sapiens; identical to SEQ ID NO: 802331

SEQ ID NO: 802348 - protein, 323 aa, Homo sapiens; identical to SEQ ID NO: 802331

SEQ ID NO: 802349 - protein, 69 aa, Homo sapiens
LIPRVSHGPSSLNGAWFRVETNYDHWKPAPKEDDRRTSAIKALNATGQANLSLEALFQPHNLYYGNERR

SEQ ID NO: 802350 - protein, 308 aa, Homo sapiens
MRTADREARPGLPSLLLLLLAGAGLSAASPPAAPRFNVSLDSVPELRWLPVLRHYDLDLVRAAMAQVIGDRVPKWVHVLIGKVVLELERFLPQPFTGEIRGMCDFMNLSLADCLLVNLAYESSVFCTSIVAQDSRGHIYHGRNLDYPFGNVLRKLTVDVQFLKNGQIAFTGTTFIGYVGLWTGQSPHKFTVSGDERDKGWWWENAIAALFRRHIPVSWLIRATLSESENFEAAVGKLAKTPLIADVYYIVGGTSPREGVVITRNRDGPADIWPLDPLNGAPLVLQGCSWKRFLTNVKRETGGSQWFQT

SEQ ID NO: 802351 - protein, 128 aa, Homo sapiens [sequence omitted]

SEQ ID NO: 802352 - protein, 132 aa, Homo sapiens
QEPEIEGRRPRLGVVHEEREEGNKARLKRKRENRKRPFPETDRQTNPRRVKSTVFPACWEPSPHFELGQRSPAHKASEEGMSLPNWRISSRAQLRNTCHSTRRFTPNFKSSFLESRRLSTPQVWSPGPEAGR

SEQ ID NO: 802353 - protein, 128 aa, Homo sapiens
QEPEIEGRRPRLGVVHEEREEGNKARLKRKRENRKRPFPETDRQTNPRRVKSTVFPACWEPSPHFELGQRSPAHKASEEGMSLPNWRISSRAQLRNTCHSTRRFTPNFKSSFLESRRLSTPQMRKPRH

SEQ ID NO: 802354 - protein, 318 aa, Homo sapiens
MSSFLINSNYIEPKFPPFEEYAQHSGSGGADGGPGGGPGYQQPPAPPTQHLPLQQPQLPHAGGGREPPASYYAPRTAREPAYPAAALYPAHGAADTAYPYGYRGGASPGRPPQPEQPPAQAKGPAHGLHASHVLQPQPPPPLQPRAVPPAAPRRCEAAPATPGVPAGGSAPACPLLLADKSPLGLKGKEPVVYPWMKKIHVSAVNPSYNGGEPKRSRTAYTRQQVLELEKEFHFNRYLTRRRRIEIAHTLCLSERQVKIWFQNRRMKWKKDHKLPNTKMRSSNSASASAGPPGKAQTQSPHLHPHPHPSTSTPVPSSI

SEQ ID NO: 802355 - protein, 300 aa, Homo sapiens
RRSGGARWFREHSGFGILQSERLPVVLRPVGLAALRRIGYGKEGRLWLQERAVKGRGRTCVLWALVWASELAGPRWPSRSHTYILPDHPPGWQRWSCSMGSPGQGQTVGPSSPSCPPWRETEEFYQQSNSVLACNRASYEYGASCFYSDKDLSGASPSGSGKQRGPGDYLHFSPEQQYKPDSSSGQGKALHDEGADRKYTSPVYPWMQRMNSCAGAVYGSHGRRGRQTYTRYQTLELEKEFHFNRYLTRRRRIEIANALCLTERQIKIWFQNRRMKWKKENKLINSTQPSGEDSEAKAGE

SEQ ID NO: 802356 - protein, 245 aa, Homo sapiens
MWMRTVNMNFFIISLARIEPHSFAPLRPACFGALPSSRARLCFVRRWRAKGSPGQARPGGSRWRLGALRSRRRGSSFATRNLANFLRPLAPGKRTILLSGCPSDSCQRGRSFWEPPCYVCRLAIQTVNFRSRSVQTTSSQNSLKNGSLRVKVLELEKEFHFNRYLTRRRRIEIAHTLCLSERQVKIWFQNRRMKWKKDHKLPNTKMRSSNSASASAGPPGKAQTQSPHLHPHPHPSTSTPVPSSI

SEQ ID NO: 802357 - protein, 328 aa, Homo sapiens
MWMRTVNMNFFIISLARIEPHSFAPLRPACFGALPSSRARLCFVRRWRAKGSPGQARPGGSRWRLGALRSRRRGSSFATRNLANFLRPLAPGKRTILLSGCPSDSCQRGRSFWEPPLIQPEFSARCRLPFARFFDEEVSEALGGGIGAWVEFYQQSNSVLACNRASYEYGASCFYSDKDLSGASPSGSGKQRGPGDYLHFSPEQQYKPDSSSGQGKALHDEGADRKYTSPVYPWMQRMNSCAGAVYGSHGRRGRQTYTRYQTLELEKEFHFNRYLTRRRRIEIANALCLTERQIKIWFQNRRMKWKKENKLINSTQPSGEDSEAKAGE

SEQ ID NO: 802358 - protein, 318 aa, Homo sapiens; identical to SEQ ID NO: 802354

SEQ ID NO: 802359 - protein, 234 aa, Homo sapiens
MSSYFVNPTFPGSLPSGQDSFLGQLPLYQAGYDALRPFPASYGASSLPDKTYTSPCFFYQQSNSVLACNRASYEYGASCFYSDKDLSGASPSGSGKQRGPGDYLHFSPEQQYKPDSSSGQGKALHDEGADRKYTSPVYPWMQRMNSCAGAVYGSHGRRGRQTYTRYQTLELEKEFHFNRYLTRRRRIEIANALCLTERQIKIWFQNRRMKWKKENKLINSTQPSGEDSEAKAGE

SEQ ID NO: 802360 - protein, 500 aa, Homo sapiens
MSSFLINSNYIEPKFPPFEEYAQHSGSGGADGGPGGGPGYQQPPAPPTQHLPLQQPQLPHAGGGREPPASYYAPRTAREPAYPAAALYPAHGAADTAYPYGYRGGASPGRPPQPEQPPAQAKGPAHGLHASHVLQPQPPPPLQPRAVPPAAPRRCEAAPATPGVPAGGSAPACPLLLADKSPLGLKGKEPVVYPWMKKIHVSAGTWRRLGGAGGGPGLGLGSRVGVRRERLRGRGPREGSPHLARAAVRCGYVRASQPPDPNMRTLLYPGSLYQEIYETPNCEGSNYSPHKFNCPGRGFRPCVFEAFLQPQCPAPFFMALGCFPLSIACETFSLPFYVSCVNLVSGYYIMMMSNCSSPPHLLSPPPFPLFRSLLLGLLFRGSGFSVNPSYNGGEPKRSRTAYTRQQVLELEKEFHFNRYLTRRRRIEIAHTLCLSERQVKIWFQNRRMKWKKDHKLPNTKMRSSNSASASAGPPGKAQTQSPHLHPHPHPSTSTPVPSSI

SEQ ID NO: 802361 - protein, 174 aa, Homo sapiens
MASTTSTKKMMEEATCSICLSLMTNPVSINCGHSYCHLCITDFFKNPSQKQLRQETFCCPQCRAPFHMDSLRPNKQLGSLIEALKETDQEMSCEEHGEQFHLFCEDEGQLICWRCERAPQHKGHTTALVEDVCQGYKGSPKLANEPWNESGKVARRINGKRDRQHAENRAKRQL

SEQ ID NO: 802362 - protein, 465 aa, Homo sapiens
MASTTSTKKMMEEATCSICLSLMTNPVSINCGHSYCHLCITDFFKNPSQKQLRQETFCCPQCRAPFHMDSLRPNKQLGSLIEALKETDQEMSCEEHGEQFHLFCEDEGQLICWRCERAPQHKGHTTALVEDVCQGYKEKLQKAVTKLKQLEDRCTEQKLSTAMRITKWKEKVQIQRQKIRSDFKNLQCFLHEEEKSYLWRLEKEEQQTLSRLRDYEAGLGLKSNELKSHILELEEKCQGSAQKLLQNVNDTLSRSWAVKLETSEAVSLELHTMCNVSKLYFDVKKMLRSHQVSVTLDPDTAHHELILSEDRRQVTRGYTQENQDTSSRRFTAFPCVLGCEGFTSGRRYFEVDVGEGTGWDLGVCMENVQRGTGMKQEPQSGFWTLRLCKKKGYVALTSPPTSLHLHEQPLLVGIFLDYEAGVVSFYNGNTGCHIFTFPKASFSDTLRPYFQVYQYSPLFLPPPGD

SEQ ID NO: 802363 - protein, 193 aa, Homo sapiens
MCNVSKLYFDVKKMLRSHQVSVTLDPDTAHHELILSEDRRQVTRGYTQENQDTSSRRFTAFPCVLGCEGFTSGRRYFEVDVGEGTGWDLGVCMENVQRGTGMKQEPQSGFWTLRLCKKKGYVALTSPPTSLHLHEQPLLVGIFLDYEAGVVSFYNGNTGCHIFTFPKASFSDTLRPYFQVYQYSPLFLPPPGD

SEQ ID NO: 802364 - protein, 465 aa, Homo sapiens; identical to SEQ ID NO: 802362

SEQ ID NO: 802365 - protein, 465 aa, Homo sapiens; identical to SEQ ID NO: 802362

SEQ ID NO: 802366 - protein, 193 aa, Homo sapiens; identical to SEQ ID NO: 802363

SEQ ID NO: 802367 - protein, 465 aa, Homo sapiens; identical to SEQ ID NO: 802362

SEQ ID NO: 802368 - protein, 465 aa, Homo sapiens; identical to SEQ ID NO: 802362

SEQ ID NO: 802369 - protein, 459 aa, Homo sapiens
MASTTSTKKMMEEATCSICLSLMTNPVSINCGHSYCHLCITDFFKNPSQKQLRQETFCCPQCRAPFHMDSLRPNKQLGSLIEALKETDQEMSCEEHGEQFHLFCEDEGQLICWRCERAPQHKGHTTALVEDVCQGYKEKLQKAVTKLKQLEDRCTEQKLSTAMRITKWKEKVQIQRQKIRSDFKNLQCFLHEEEKSYLWRLEKEEQQTLSRLRDYEAGLGLKSNELKSHILELEEKCQGSAQKLLQNVNDTLSRSWAVKLETSEAVSLELHTMCNVSKLYFDVKKMLRSHQVSVTLDPDTAHHELILSEDRRQVTRGYTQENQDTSSRRFTAFPCVLGCEGFTSGRRYFEVDVGEGTGWDLGVCMENVQRGTGMKQEPQSGFWTLRLCKKKGYVALTSPPTSLHLHEQPLLVGILAATSLLSRRLPSLILSGPISRFINILLCFCLPQVTKEKSRSSLV

SEQ ID NO: 802370 - protein, 497 aa, Homo sapiens
MASTTSTKKMMEEATCSICLSLMTNPVSINCGHSYCHLCITDFFKNPSQKQLRQETFCCPQCRAPFHMDSLRPNKQLGSLIEALKETDQEMSCEEHGEQFHLFCEDEGQLICWRCERAPQHKGHTTALVEDVCQGYKEKLQKAVTKLKQLEDRCTEQKLSTAMRITKWKEKVQIQRQKIRSDFKNLQCFLHEEEKSYLWRLEKEEQQTLSRLRDYEAGLGLKSNELKSHILELEEKCQGSAQKLLQNVNDTLSRYVLFECRRGGVCVYRNEWNAPLKKSLASAYSRSWAVKLETSEAVSLELHTMCNVSKLYFDVKKMLRSHQVSVTLDPDTAHHELILSEDRRQVTRGYTQENQDTSSRRFTAFPCVLGCEGFTSGRRYFEVDVGEGTGWDLGVCMENVQRGTGMKQEPQSGFWTLRLCKKKGYVALTSPPTSLHLHEQPLLVGIFLDYEAGVVSFYNGNTGCHIFTFPKASFSDTLRPYFQVYQYSPLFLPPPGD

SEQ ID NO: 802371 - protein, 465 aa, Homo sapiens; identical to SEQ ID NO: 802362

SEQ ID NO: 802372 - protein, 465 aa, Homo sapiens; identical to SEQ ID NO: 802362

SEQ ID NO: 802373 - protein, 309 aa, Homo sapiens
MASTTSTKKMMEEATCSICLSLMTNPVSINCGHSYCHLCITDFFKNPSQKQLRQETFCCPQCRAPFHMDSLRPNKQLGSLIEALKETDQEMSCEEHGEQFHLFCEDEGQLICWRCERAPQHKGHTTALVEDVCQGYKEKLQKAVTKLKQLEDRCTEQKLSTAMRITKWKEKVQIQRQKIRSDFKNLQCFLHEEEKSYLWRLEKEEQQTLSRLRDYEAGLGLKSNELKSHILELEEKCQGSAQKLLQNVNDTLSRSWAVKLETSEAVSLELHTMCNVSKLYFDVKKMLRSHQGMFTKEFLNTVDRRGLMQ

SEQ ID NO: 802374 - protein, 453 aa, Homo sapiens
AGGLLRWLSPAPMDAPPGGVESALSCFSFNQDCTSLAIGTKAGYKLFSLSSVEQLDQVHGSNEIPDVYIVERLFSSSLVVVVSHTKPRQMNVYHFKKGTEICNYSYSSNILSIRLNRQRLLVCLEESIYIHNIKDMKLLKTLLDIPANPTGLCALSINHSNSYLAYPGSLTSGEIVLYDGNSLKTVCTIAAHEGTLAAITFNASGSKLASASEKGTVIRVFSVPDGQKLYEFRRGMKRYVTISSLVFSMDSQFLCASSNTETVHIFKLEQVTNSRPEEPSTWSGYMGKMFMAATNYLPTQVSDMMHQDRAFATARLNFSGQRNICTLSTIQKLPRLLVASSSGHLYMYNLDPQDGGECVLIKTHSLLGSGTTEENKENDLRPSLPQSYAATVARPSASSASTVPGYSEDGGALRGEVIPEHEFATGPVCLDDENEFPPIILCRGNQKGKTKQS

SEQ ID NO: 802375 - protein, 111 aa, Homo sapiens
MASSVLDDLCESRLDISPPSVDHSNSYLAYPGSLTSGEIVLYDGNSLKTVCTIAAHEGTLAAITFNASGSKLASASEKGTVIRVFSVPDGQKLYEFRRGMKRQLSSLTAGR

SEQ ID NO: 802376 - protein, 446 aa, Homo sapiens
MEAEAADAPPGGVESALSCFSFNQDCTSLAIGTKAGYKLFSLSSVEQLDQVHGSNEIPDVYIVERLFSSSLVVVVSHTKPRQMNVYHFKKGTEICNYSYSSNILSIRLNRQRLLVCLEESIYIHNIKDMKLLKTLLDIPANPTGLCALSINHSNSYLAYPGSLTSGEIVLYDGNSLKTVCTIAAHEGTLAAITFNASGSKLASASEKGTVIRVFSVPDGQKLYEFRRGMKRYVTISSLVFSMDSQFLCASSNTETVHIFKLEQVTNSRPEEPSTWSGYMGKMFMAATNYLPTQVSDMMHQDRAFATARLNFSGQRNICTLSTIQKLPRLLVASSSGHLYMYNLDPQDGGECVLIKTHSLLGSGTTEENKENDLRPSLPQSYAATVARPSASSASTVPGYSEDGGALRGEVIPEHEFATGPVCLDDENEFPPIILCRGNQKGKTKQS

SEQ ID NO: 802377 - protein, 227 aa, Homo sapiens [sequence omitted]

SEQ ID NO: 802378 - protein, 318 aa, Homo sapiens
MKLLKTLLDIPANPTGLCALSINHSNSYLAYPGSLTSGEIVLYDGNSLKTVCTIAAHEGTLAAITFNASGSKLASASEKGTVIRVFSVPDGQKLYEFRRGMKRYVTISSLVFSMDSQFLCASSNTETVHIFKLEQVTNSRPEEPSTWSGYMGKMFMAATNYLPTQVSDMMHQDRAFATARLNFSGQRNICTLSTIQKLPRLLVASSSGHLYMYNLDPQDGGECVLIKTHSLLGSGTTEENKENDLRPSLPQSYAATVARPSASSASTVPGYSEDGGALRGEVIPEHEFATGPVCLDDENEFPPIILCRGNQKGKTKQS

SEQ ID NO: 802379 - protein, 353 aa, Homo sapiens
KASSGRTGKNGMVDRESNRLLVCLEESIYIHNIKDMKLLKTLLDIPANPTGLCALSINHSNSYLAYPGSLTSGEIVLYDGNSLKTVCTIAAHEGTLAAITFNASGSKLASASEKGTVIRVFSVPDGQKLYEFRRGMKRYVTISSLVFSMDSQFLCASSNTETVHIFKLEQVTNSRPEEPSTWSGYMGKMFMAATNYLPTQVSDMMHQDRAFATARLNFSGQRNICTLSTIQKLPRLLVASSSGHLYMYNLDPQDGGECVLIKTHSLLGSGTTEENKENDLRPSLPQSYAATVARPSASSASTVPGYSEDGGALRGEVIPEHEFATGPVCLDDENEFPPIILCRGNQKGKTKQS

SEQ ID NO: 802380 - protein, 104 aa, Homo sapiens
MMISFFFHLLLIVTSSLLGSGTTEENKENDLRPSLPQSYAATVARPSASSASTVPGYSEDGGALRGEVIPEHEFATGPVCLDDENEFPPIILCRGNQKGKTKQS

SEQ ID NO: 802381 - protein, 437 aa, Homo sapiens [sequence omitted]

SEQ ID NO: 802382 - protein, 446 aa, Homo sapiens; identical to SEQ ID NO: 802376

SEQ ID NO: 802383 - protein, 358 aa, Homo sapiens
MEAEAADAPPGGVESALSCFSFNQDCTSLAIGTKAGYKLFSLSSVEQLDQVHGSNEIPDVYIVERLFSSSLVVVVSHTKPRQMNVYHFKKGTEICNYSYSSNILSIRLNRQRLLVCLEESIYIHNIKDMKLLKTLLDIPANPTGLCALSINHSNSYLAYPGSLTSGEIVLYDGNSLKTVCTIAAHEGTLAAITFNASGSKLASASEKGTVIRVFSVPDGQKLYEFRRGMKRYVTISSLVFSMDSQFLCASSNTETVHIFKLEQVTNSRPEEPSTWSGYMGKMFMAATNYLPTQVSDMMHQDRAFATARLNFSGQRNICTLSTIQKLPRLLVASSSGHLYMYNLDPQDGGECVLIKTHR

SEQ ID NO: 802384 - protein, 325 aa, Homo sapiens
MEAEAADAPPGGVESALSCFSFNQDCTSLAIGTKAGYKLFSLSSVEQLDQVHGSNEIPDVYIVERLFSSSLVVVVSHTKPRQMNVYHFKKGTEICNYSYSSNILSIRLNRQRLLVCLEESIYIHNIKDMKLLKTLLDIPANPTGLCALSINHSNSYLAYPGSLTSGEIVLYDGNSLKTVCTIAAHEGTLAAITFNASGSKLASASEKGTVIRVFSVPDGQKLYEFRRGMKRYVTISSLVFSMDSQFLCASSNTETVHIFKLEQVTNSRPEEPSTWSGYMGKMFMAATNYLPTQVSDMMHQDRAFATARLNFSGQRNICTLSTYVQ

SEQ ID NO: 802385 - protein, 86 aa, Homo sapiens
PVHYSQSTRRAFDLEWLHGKDVYGCYQLPPYPGVRHDASGQGFCHCTLELLRTEEHLYPLNVRTMTPTLNKTTLSSMYFSKAQKSP

SEQ ID NO: 802386 - protein, 449 aa, Homo sapiens
DRRPGPWSRRGRAAEVAVAGSELRLPGPSPRWRPRPRTLPRAGLSRRSAASLSTRTAHEIPDVYIVERLFSSSLVVVVSHTKPRQMNVYHFKKGTEICNYSYSSNILSIRLNRQRLLVCLEESIYIHNIKDMKLLKTLLDIPANPTGLCALSINHSNSYLAYPGSLTSGEIVLYDGNSLKTVCTIAAHEGTLAAITFNASGSKLASASEKGTVIRVFSVPDGQKLYEFRRGMKRYVTISSLVFSMDSQFLCASSNTETVHIFKLEQVTNSRPEEPSTWSGYMGKMFMAATNYLPTQVSDMMHQDRAFATARLNFSGQRNICTLSTIQKLPRLLVASSSGHLYMYNLDPQDGGECVLIKTHSLLGSGTTEENKENDLRPSLPQSYAATVARPSASSASTVPGYSEDGGALRGEVIPEHEFATGPVCLDDENEFPPIILCRGNQKGKTKQS

SEQ ID NO: 802387 - protein, 131 aa, Homo sapiens
MFSLALRIQKLPRLLVASSSGHLYMYNLDPQDGGECVLIKTHSLLGSGTTEENKENDLRPSLPQSYAATVARPSASSASTVPGYSEDGGALRGEVIPEHEFATGPVCLDDENEFPPIILCRGNQKGKTKQS

SEQ ID NO: 802388 - protein, 437 aa, Homo sapiens [sequence omitted]

SEQ ID NO: 802389 - protein, 437 aa, Homo sapiens [sequence omitted]

SEQ ID NO: 802390 - protein, 240 aa, Homo sapiens
MEAEAADAPPGGVESALSCFSFNQDCTSLAIGTKAGYKLFSLSSVEQLDQVHGSNEIPDVYIVERLFSSSLVVVVSHTKPRQMNVYHFKKGTEICNYSYSSNILSIRLNRQRLLVCLEESIYIHNIKDMKLLKTLLDIPANPTGLCALSINHSNSYLAYPGSLTSGEIVLYDGNSLKTVCTIAAHEGTLAAITFNASGSKLASASEKGTVIRVFSVPDGQKLYEFRRGMKRQLSSLTAGR

SEQ ID NO: 802391 - protein, 121 aa, Homo sapiens
MSLTFRRPKTLRLRRQPRYPRKSTPRRNKLGHYAIIKFPLATESAVKKIEENNTLVFTVDVKANKHQIRQAVKKLYDSDVAKVTTLICPDKENKAYVRLAPDYDAFDVVTKLGSPKLSPAG

SEQ ID NO: 802392 - protein, 121 aa, Homo sapiens; identical to SEQ ID NO: 802391

SEQ ID NO: 802393 - protein, 81 aa, Homo sapiens
RGAWREGRRECACGRVRDWGSWLWVWYRGFSGCRPPRGSGAVREPTTRFASLRPARRLLHTCRSHAGGLDSEGREVDLGDI

SEQ ID NO: 802394 - protein, 81 aa, Homo sapiens; identical to SEQ ID NO: 802393

SEQ ID NO: 802395 - protein, 130 aa, Homo sapiens
SNQRDSVGVGPSEPHAGYNLPVCRFLSPLEKRSIRVGVTRFSRCRLSPLSLTRKGNSLTPCASRVRQCLALLQLVHGALHPLSCAPCLALPSEMNPQMEMQKSPVFCVAHAGSCRPELFLLGHLGSTTLR

SEQ ID NO: 802396 - protein, 121 aa, Homo sapiens; identical to SEQ ID NO: 802391

SEQ ID NO: 802397 - protein, 121 aa, Homo sapiens; identical to SEQ ID NO: 802391

SEQ ID NO: 802398 - protein, 74 aa, Homo sapiens
RGAWREGRRECACGRVRDWGSWLWVWYRGFSGCRPPRGSGAVRNSKRTLCMNNLFPHYRVGNKQISKNNSASLQ

SEQ ID NO: 802399 - protein, 77 aa, Homo sapiens
APLAPPFCGVFGRGSRECKPRGRWGPEGLRRRIPRMKNYSQSCKGEESLLCWWEDQLFPYFLESSLTQCMKSKNLSH

SEQ ID NO: 802400 - protein, 159 aa, Homo sapiens [sequence omitted]

SEQ ID NO: 802401 - protein, 159 aa, Homo sapiens [sequence omitted]

SEQ ID NO: 802402 - protein, 345 aa, Homo sapiens
AAGQQPNGPGESWLPTGPGIGPAGLCWACGVSGCCSHGWWSGGPRSGAGGWHEMPYATGTPVGRQFLHEKCQTWVQVHLQGLQKVVFRSWQQAAAHQRCTVTRPEQLLLQSYFQAWCEVVRDTGVLRAQHQAFQDGLRRRALGAVFATWREAQEVAAGAQEQRVAQASLARWRSCGQQGQEDGQQQKARAPQAFPAWPVAPGMHHEAQQQAGESAGAQAAQCWTWCWALWVHESCRGQVSRAHASWKPRAWVLEASVQSAVRGGVQRAILTQLRPAELRRFLRTVQLRVRLGLPGAGKTRSCWTQATELVPPAPSLQCSLGGRRKPRGTAWAQSKETLPRGTNGV

SEQ ID NO: 802403 - protein, 322 aa, Homo sapiens [sequence omitted]

SEQ ID NO: 802404 - protein, 124 aa, Homo sapiens
EAVADELADAAQGQLLLRALQDGHGDERDVRVWTNPPRFNFQENRRRSGWRRRGCVANARGVQGRLVGSRKSLPGVAGTRNPIPVCPLRPGRGAPASPEEGARGEEFREEIISEIFAEDAGMWI

SEQ ID NO: 802405 - protein, 444 aa, Homo sapiens
AGKSIRAFASPPCPPGWRVAYATVTGLLGRSRASEGCERSCSMHTTESKNEHLEDENFQTSTTPQSLIDPNNTAHEETKTVLSDTEEIKPQTKKETYISCPLRGVLNVIITNGVILFVIWCMTWSILGSEALPGGNLFGLFIIFYSAIIGGKILQLIRIPLVPPLPPLLGMLLAGFTIRNVPFINEHVHVPNTWSSILRSIALTIILIRAGLGLDPQALRHLKVVCFRLAVGPCLMEASAAAVFSHFIMKFPWQWAFLLGFVLGAVSPAVVVPYMMVLQENGYGVEEGIPTLLMAASSMDDILAITGFNTCLSIVFSSGGILNNAIASIRNVCISLLAGIVLGFFVRYFPSEDQKKLTLKRGFLVLTMCVSAVLGSQRIGLHGSGGLCTLVLSFIAGTKWSQEKMKVQKIITTVWDIFQPLLFGLVGAEVSVSSLESNIVGKNN

SEQ ID NO: 802406 - protein, 489 aa, Homo sapiens
AGKSIRAFASPPCPPGWRVAYATVTGLLGRSRASEGCERSCSMHTTESKNEHLEDENFQTSTTPQSLIDPNNTAHEETKTVLSDTEEIKPQTKKETYISCPLRGVLNVIITNGVILFVIWCMTWSILGSEALPGGNLFGLFIIFYSAIIGGKILQLIRIPLVPPLPPLLGMLLAGFTIRNVPFINEHVHVPNTWSSILRSIALTIILIRAGLGLDPQALRHLKVVCFRLAVGPCLMEASAAAVFSHFIMKFPWQWAFLLGFVLGAVSPAVVVPYMMVLQENGYGVEEGIPTLLMAASSMDDILAITGFNTCLSIVFSSGGILNNAIASIRNVCISLLAGIVLGFFVRYFPSEDQKKLTLKRGFLVLTMCVSAVLGSQRIGLHGSGGLCTLVLSFIAGTKWSQEKMKVQKIITTVWDIFQPLLFGLVGAEVSVSSLESNIVGCVRSSGSRNSKSLRTPLGTICEGCDDSSIFSHLDHSSKWSSTYGHSGA

SEQ ID NO: 802407 - protein, 500 aa, Homo sapiens
AGKSIRAFASPPCPPGWRVAYATVTGLLGRSRASEGCERSCSMHTTESKNEHLEDENFQTSTTPQSLIDPNNTAHEETKTVLSDTEEIKPQTKKETYISCPLRGVLNVIITNGMLLAGFTIRNVPFINEHVHVPNTWSSILRSIALTIILIRAGLGLDPQALRHLKVVCFRLAVGPCLMEASAAAVFSHFIMKFPWQWAFLLGFVLGAVSPAVVVPYMMVLQENGYGVEEGIPTLLMAASSMDDILAITGFNTCLSIVFSSGGILNNAIASIRNVCISLLAGIVLGFFVRYFPSEDQKKLTLKRGFLVLTMCVSAVLGSQRIGLHGSGGLCTLVLSFIAGTKWSQEKMKVQKIITTVWDIFQPLLFGLVGAEVSVSSLESNIVGISVATLSLALCVRILTTYLLMCFAGFSFKEKIFIALAWMPKATVQAVLGPLALETARVSAPHLEPYAKDVMTVAFLAILITAPNGALLMGILGPKMLTRHYDPSKIKLQLSTLEHH

SEQ ID NO: 802408 - protein, 537 aa, Homo sapiens
SAGTPRDYGISRASEGCERSCSMHTTESKNEHLEDENFQTSTTPQSLIDPNNTAHEETKTVLSDTEEIKPQTKKETYISCPLRGVLNVIITNGVILFVIWCMTWSILGSEALPGGNLFGLFIIFYSAIIGGKILQLIRIPLVPPLPPLLGMLLAGFTIRNVPFINEHVHVPNTWSSILRSIALTIILIRAGLGLDPQALRHLKVVCFRLAVGPCLMEASAAAVFSHFIMKFPWQWAFLLGFVLGAVSPAVVVPYMMVLQENGYGVEEGIPTLLMAASSMDDILAITGFNTCLSIVFSSGGILNNAIASIRNVCISLLAGIVLGFFVRYFPSEDQKKLTLKRGFLVLTMCVSAVLGSQRIGLHGSGGLCTLVLSFIAGTKWSQEKMKVQKIITTVWDIFQPLLFGLVGAEVSVSSLESNIVGISVATLSLALCVRILTTYLLMCFAGFSFKEKIFIALAWMPKATVQAVLGPLALETARVSAPHLEPYAKDVMTVAFLAILITAPNGALLMGILGPKMLTRHYDPSKIKLQLSTLEHH

SEQ ID NO: 802409 - protein, 514 aa, Homo sapiens
AGKSIRAFASPPCPPGWRVAYATVTGLLGRSRASEGCERSCSMHTTESKNEHLEDENFQTSTTPQSLIDPNNTAHEETKTVLSDTEEIKPQTKKETYISCPLRGVLNVIITNGVILFVIWCMTWSILGSEALPGGNLFGLFIIFYSAIIGGKILQLIRIPLVPPLPPLLGMLLAGFTIRNVPFINEHVHVPNTWSSILRSIALTIILIRAGLGLDPQFVLGAVSPAVVVPYMMVLQENGYGVEEGIPTLLMAASSMDDILAITGFNTCLSIVFSSGGILNNAIASIRNVCISLLAGIVLGFFVRYFPSEDQKKLTLKRGFLVLTMCVSAVLGSQRIGLHGSGGLCTLVLSFIAGTKWSQEKMKVQKIITTVWDIFQPLLFGLVGAEVSVSSLESNIVGISVATLSLALCVRILTTYLLMCFAGFSFKEKIFIALAWMPKATVQAVLGPLALETARVSAPHLEPYAKDVMTVAFLAILITAPNGALLMGILGPKMLTRHYDPSKIKLQLSTLEHH

SEQ ID NO: 802410 - protein, 557 aa, Homo sapiens
AGKSIRAFASPPCPPGWRVAYATVTGLLGRSRASEGCERSCSMHTTESKNEHLEDENFQTSTTPQSLIDPNNTAHEETKTVLSDTEEIKPQTKKETYISCPLRGVLNVIITNGVILFVIWCMTWSILGSEALPGGNLFGLFIIFYSAIIGGKILQLIRIPLVPPLPPLLGMLLAGFTIRNVPFINEHVHVPNTWSSILRSIALTIILIRAGLGLDPQALRHLKVVCFRLAVGPCLMEASAAAVFSHFIMKFPWQWAFLLGFVLGAVSPAVVVPYMMVLQENGYGVEEGIPTLLMAASSMDDILAITGFNTCLSIVFSSGGILNNAIASIRNVCISLLAGIVLGFFVRYFPSEDQKKLTLKRGFLVLTMCVSAVLGSQRIGLHGSGGLCTLVLSFIAGTKWSQEKMKVQKIITTVWDIFQPLLFGLVGAEVSVSSLESNIVGISVATLSLALCVRILTTYLLMCFAGFSFKEKIFIALAWMPKATVQAVLGPLALETARVSAPHLEPYAKDVMTVAFLAILITAPNGALLMGILGPKMLTRHYDPSKIKLQLSTLEHH

SEQ ID NO: 802411 - protein, 115 aa, Homo sapiens
AGKSIRAFASPPCPPGWRVAYATVTGLLGRSRASEGCERSCSMHTTESKNEHLEDENFQTSTTPQSLIDPNNTAHEETKTVLSDTEEIKPQTKKETYISCPLRGVLNVIITNVLF

SEQ ID NO: 802412 - protein, 448 aa, Homo sapiens
ARGSAGPSVHNGESRRRSPSPTQCGARREPRRKLSASARQARRRRAMYSGNRSGGHGYWDGGGAAGAEGPAPAGTLSPAPLFSPGTYERLALLLGSIGLLGVGNNLLVLVLYYKFQRLRTPTHLLLVNISLSDLLVSLFGVTFTFVSCLRNGWVWDTVGCVWDGFSGSLFGIVSIATLTVLAYERYIRVVHARVINFSWAWRAITYIWLYSLAWAGAPLLGWNRYILDVHGLGCTVDWKSKDANDSSFVLFLFLGCLVVPLGVIAHCYGHILYSIRMLRCVEDLQTIQVIKILKYEKKLAKMCFLMIFTFLVCWMPYIVICFLVVNGHGHLVTPTISIVSYLFAKSNTVYNPVIYVFMIRKFRRSLLQLLCLRLLRCQRPAKDLPAAGSEMQIRPIVMSQKDGDRPKKKVTFNSSSIIFIITSDESLSVDDSDKTNGSKVDVIQVRPL

SEQ ID NO: 802413 - protein, 235 aa, Homo sapiens
ARGSAGPSVHNGESRRRSPSPTQCGARREPRRKLSASARQARRRRAMYSGNRSGGHGYWDGGGAAGAEGPAPAGTLSPAPLFSPGTYERLALLLGSIGLLGVGNNLLVLVLYYKFQRLRTPTHLLLVNISLSDLLVSLFGVTFTFVSCLRNGWVWDTVGCVWDGFSGSLFGIVSIATLTVLAYERYIRVVHARVINFSWAWRAITYIWLYSLAWAGAPLLGWNSFVVWKIFRQFK

SEQ ID NO: 802414 - protein, 152 aa, Homo sapiens
MKLAKMCFLMIFTFLVCWMPYIVICFLVVNGHGHLVTPTISIVSYLFAKSNTVYNPVIYVFMIRKFRRSLLQLLCLRLLRCQRPAKDLPAAGSEMQIRPIVMSQKDGDRPKKKVTFNSSSIIFIITSDESLSVDDSDKTNGSKVDVIQVRPL

SEQ ID NO: 802415 - protein, 448 aa, Homo sapiens; identical to SEQ ID NO: 802412

SEQ ID NO: 802416 - protein, 183 aa, Homo sapiens
ARGSAGPSVHNGESRRRSPSPTQCGARREPRRKLSASARQARRRRAMYSGNRSGGHGYWDGGGAAGAEGPAPAGTLSPAPLFSPGTYERLALLLGSIGLLGVGNNLLVLVLYYKFQRLRTPTHLLLVNISLSDLLVSLFGVTFTFVSCLRNGWVWDTVGCVWDGFSGSLFEKSSSHKCIYDAF

SEQ ID NO: 802417 - protein, 188 aa, Homo sapiens
ARGSAGPSVHNGESRRRSPSPTQCGARREPRRKLSASARQARRRRAMYSGNRSGGHGYWDGGGAAGAEGPAPAGTLSPAPLFSPGTYERLALLLGSIGLLGVGNNLLVLVLYYKFQRLRTPTHLLLVNISLSDLLVSLFGVTFTFVSCLRNGWVWDTVGCVWDGFSGSLFASLCGRSSDNSSDQDFKI

SEQ ID NO: 802418 - protein, 204 aa, Homo sapiens
DAWSTHASGRVQKGFSNPGLTSRWKKYIAVRKPLRCVEDLQTIQVIKILKYEKKLAKMCFLMIFTFLVCWMPYIVICFLVVNGHGHLVTPTISIVSYLFAKSNTVYNPVIYVFMIRKFRRSLLQLLCLRLLRCQRPAKDLPAAGSEMQIRPIVMSQKDGDRPKKKVTFNSSSIIFIITSDESLSVDDSDKTNGSKVDVIQVRPL

SEQ ID NO: 802419 - protein, 339 aa, Homo sapiens
MDETVAEFIKRTILKIPMNELTTILKAWDFLSENQLQTVNFRQRKESVVQHLIHLCEEKRASISDAALLDIIYMQFHQHQKVWDVFQMSKGPGEDVDLFDMKQFKNSFKKILQRALKNVTVSFRETEENAVWIRIAWGTQYTKPNQYKPTYVVYYSQTPYAFTSSSMLRRNTPLLGQALTIASKHHQIVKMDLRSRYLDSLKAIVFKQYNQTFETHNSTTPLQERSLGLDINMDSRIIHENIVEKERVQRITQETFGDYPQPQLEFAQYKLETKFKSGLNGSILAERKEPLRCLIKFSSPHLLEALKSLAPAGIADAPLSPLLTCIPNKRMNYFKIRDK

SEQ ID NO: 802420 - protein, 353 aa, Homo sapiens [sequence omitted]

SEQ ID NO: 802421 - protein, 198 aa, Homo sapiens
MDETVAEFIKRTILKIPMNELTTILKAWDFLSENQLQTVNFRQRKESVVQHLIHLCEEKRASISDAALLDIIYMQFHQHQKVWDVFQMSKGPGEDVDLFDMKQFKNSFKKILQRALKNVTVSFRETEENAVWIRIAWGTQYTKPNQYKPTYVVYYSQTPYAFTSSSMLRRNTPLLGQRLTIGLENTIRLVNGPEKLGF

SEQ ID NO: 802422 - protein, 126 aa, Homo sapiens
MEFFSRHQKSLGMFFQIEKRAQGEDVDLFDMKQFKNSFKKILQRALKNVTVSFRETEENAVWIRIAWGTQYTKPNQYKPTYVVYYSQTPYAFTSSSMLRRNTPLLGQALTIASKHHQIVKMDLRSR

SEQ ID NO: 802423 - protein, 223 aa, Homo sapiens
YWWCLRRSETAGDVGRAKEMDETVAEFIKRTILKIPMNELTTILKAWDFLSENQLQTVNFRQRKESVVQHLIHLCEEKRASISDAALLDIIYMQFHQHQKVWDVFQMSKGPGEDVDLFDMKQFKNSFKKILQRALKNVTVSFRETEENAVWIRIAWGTQYTKPNQYKPTYVVYYSQTPYAFTSSSMLRRNTPLLGQELEATGKIYLRQEEIILDITEMKKACN

SEQ ID NO: 802424 - protein, 271 aa, Homo sapiens
ALSHPVPLQQRSKVWDFLQMSKGPGEDVDLFDMKQFKNSFKKILQRALKNVTVSFRETEENAVWIRIAWGTQYTKPNQYKPTYVVYYSQTPYAFTSSSMLRRNTPLLGQALTIASKHHQIVKMDLRSRYLDSLKAIVFKQYNQTFETHNSTTPLQERSLGLDINMDSRIIHENIVEKERVQRITQETFGDYPQPQLEFAQYKLETKFKSGLNGSILAERKEPLRCLIKFSSPHLLEALKSLAPAGIADAPLSPLLTCIPNKRMNYFKIRDK

SEQ ID NO: 802425 - protein, 293 aa, Homo sapiens
MDETVAEFIKRTILKIPMNELTTILKAWDFLSENQLQTVNFRQRKESVVQHLIHLCEEKRASISDAALLDIIYMQFHQHQKVWDVFQMSKGPGEDVDLFDMKQFKNSFKKILQRALKNVTVSFRETEENAVWIRIAWGTQYTKPNQYKPTYVVYYSQTPYAFTSSSMLRRNTPLLGQWRWGFAMLPRLVSNSRLQVILSLPKCWDRHELTVPHLGLTYSNSEMITKRKNRLPALIFFKVPKENRNQPISIRMATAEKKQKITNAKEDMEKLKLLRTVGGHVNWDSHCGNRYSS

SEQ ID NO: 802426 - protein, 204 aa, Homo sapiens
MDETVAEFIKRTILKIPMNELTTILKAWDFLSENQLQTVNFRQRKESVVQHLIHLCEEKRASISDAALLDIIYMQFHQHQKVWDVFQMSKGPGEDVDLFDMKQFKNSFKKILQRALKNVTVSFRETEENAVWIRIAWGTQYTKPNQYKPTYVVYYSQTPYAFTSSSMLRRNTPLLGQELEATGKIYLRQEEIILDITEMKKACN

SEQ ID NO: 802427 - protein, 287 aa, Homo sapiens
MDETVAEFIKRTILKIPMNELTTILKAWDFLSENQLQTVNFRQRKESVVQHLIHLCEEKRASISDAALLDIIYMQFHQHQKVWDVFQMSKGPGEDVDLFDMKQFKNSFKKILQRALKNVTVSFRETEENAVWIRIAWGTQYTKPNQYKPTYVVYYSQTPYAFTSSSMLRRNTPLLGQALTIASKHHQIVKMDLRSRYLDSLKAIVFKQYNQTFETHNSTTPLQERSLGLDINMDSRIIHENIVEKERVQRITQETFGDYPQPQLEFAQYKLETKFKSGLNGSILAER

SEQ ID NO: 802428 - protein, 128 aa, Homo sapiens
ALSHPVPLQQRSKVWDFLQMSKGPGEDVDLFDMKQFKNSFKKILQRALKNVTVSFRETEENAVWIRIAWGTQYTKPNQYKPTYVVYYSQTPYAFTSSSMLRRNTPLLGQALTIASKHHQIVKMDLRSR

SEQ ID NO: 802429 - protein, 204 aa, Homo sapiens; identical to SEQ ID NO: 802426

SEQ ID NO: 802430 - protein, 196 aa, Homo sapiens
MDETVAEFIKRTILKIPMNELTTILKAWDFLSENQLQTVNFRQRKESVVQHLIHLCEEKRASISDAALLDIIYMQFHQHQKVWDVFQMSKGPGEDVDLFDMKQFKNSFKKILQRALKNVTVSFRETEENAVWIRIAWGTQYTKPNQYKPTYVVYYSQTPYAFTSSSMLRRNTPLLGQALTIASKHHQIVKMDLRSR

SEQ ID NO: 802431 - protein, 312 aa, Homo sapiens
YWWCLRRSETAGDVGRAKEMDETVAEFIKRTILKIPMNELTTILKAWDFLSENQLQTVNFRQRKESVVQHLIHLCEEKRASISDAALLDIIYMQFHQHQKVWDVFQMSKGPGEDVDLFDMKQFKNSFKKILQRALKNVTVSFRETEENAVWIRIAWGTQYTKPNQYKPTYVVYYSQTPYAFTSSSMLRRNTPLLGQWRWGFAMLPRLVSNSRLQVILSLPKCWDRHELTVPHLGLTYSNSEMITKRKNRLPALIFFKVPKENRNQPISIRMATAEKKQKITNAKEDMEKLKLLRTVGGHVNWDSHCGNRYSS

SEQ ID NO: 802432 - protein, 98 aa, Homo sapiens
EDVVGVRRDASVTPLNVPRHVLPDQLDAGADAVGPWTRAGQDGKYRCLEQRGREEAHGPSLLRVPPALRPSVLKVKALPVLRYPLLPSHLASSLCFPP

SEQ ID NO: 802433 - protein, 150 aa, Homo sapiens
LLPPHPHQQMHRDEEDSDVDVTFQPWHKEMLQQLLVMLSSTVATRPQKAACPHQESQSHGPPKESRPSIQLPRTGSLLPQLSDITPYQPGDLGLVPRQVHIPPNPQDLRLLSSITRVGTFRAHSSPEMRAPGSLKRLEKFSLPEVPLRPK

SEQ ID NO: 802434 - protein, 71 aa, Homo sapiens
LLPPHPHQQMHRDEEDSDVDVTFQPWHKEMLQQLLVMLSSTVATRPQKAACPHQESQSHGPPKERCVPLVL

SEQ ID NO: 802435 - protein, 155 aa, Homo sapiens
LLPPHPHQQMHRDEEDSDVDVTFQPWHKEMLQQLLVMLSSTVATRPQKAACPHQESQSHGPPKESRPSIQLPRTGSLLPQLSDITPYQPGDLGLVPRQVHIPPNPQDLRLLSSITRVGTFRAHSSPERPVGPNAEERKRRATLQWGRGAKKGPRN

SEQ ID NO: 802436 - protein, 89 aa, Homo sapiens
MGTVLGSPWARNLARRRLCDPRPPPHSRPSIQLPRTGSLLPQLSDITPYQPGDLGLVPRQVHIPPNPQDLRLLSSITRVGTFRAHSSPE

SEQ ID NO: 802437 - protein, 131 aa, Homo sapiens
WVARTSGPQPSALSRGPLTSLLKGGGSVATVLLGQALSGRGGEELSAVAHPTLRAGTEWATPRARLHAGSARLEAALQGARRNPGDSAERAETELTKGLAAAERGSRHSGYLTETSNPRRYKALHRRQSTT

SEQ ID NO: 802438 - protein, 131 aa, Homo sapiens; identical to SEQ ID NO: 802437

SEQ ID NO: 802439 - protein, 91 aa, Homo sapiens
SRPGTRRPLGSSQPASSSQAIAGLPAARVPASAVSHRAHRSPAPGSSPQGYGQIGPWFWNGESVAPNRRLNVTRRKDPLQDPVPLPRFISC

SEQ ID NO: 802440 - protein, 327 aa, Homo sapiens
MTMESGAENQQSGDAAVTEAENQQMTVQAQPQIATLAQVSMPAAHATSSAPTVTLVQLPNGQTVQVHGVIQAAQPSVIQSPQVQTVQISTIAESEDSQESVDSVTDSQKRREILSRRPSYRKILNDLSSDAPGVPRIEEEKSEEETSAPAITTVTVPTPIYQTSSGQYIAITQGGAIQLANNGTDGVQGLQTLTMTNAAATQPGTTILQYAQTTDGQQILVPSNQVVVQAASGDVQTYQIRTAPTSTIAPGVVMASSPALPTQPAEEAARKREVRLMKNREAARECRRKKKEYVKCLENRVAVLENQNKTLIEELKALKDLYCHKSD

SEQ ID NO: 802441 - protein, 327 aa, Homo sapiens; identical to SEQ ID NO: 802440

SEQ ID NO: 802442 - protein, 325 aa, Homo sapiens
MESGAENQQSGDAAVTEAENQQMTVQAQPQIATLAQVSMPAAHATSSAPTVTLVQLPNGQTVQVHGVIQAAQPSVIQSPQVQTVQISTIAESEDSQESVDSVTDSQKRREILSRRPSYRKILNDLSSDAPGVPRIEEEKSEEETSAPAITTVTVPTPIYQTSSGQYIAITQGGAIQLANNGTDGVQGLQTLTMTNAAATQPGTTILQYAQTTDGQQILVPSNQVVVQAASGDVQTYQIRTAPTSTIAPGVVMASSPALPTQPAEEAARKREVRLMKNREAARECRRKKKEYVKCLENRVAVLENQNKTLIEELKALKDLYCHKSD

SEQ ID NO: 802443 - protein, 122 aa, Homo sapiens
MESGAENQQSGDAAVTEAENQQMTVQAQPQIATLAQVSMPAAHATSSAPTVTLVQLPNGQTVQVHGVIQAAQPSVIQSPQVQTVQISTIAESEDSQESVDSVTDSQKRREILSRRPSYRREV

SEQ ID NO: 802444 - protein, 234 aa, Homo sapiens
MTMESGAENQQSGDAAVTEAENQQMTVQAQPQIATLAQVSMPAAHATSSAPTVTLVQLPNGQTVQVHGVIQAAQPSVIQSPQVQTVQISTIAESEDSQESVDSVTDSQKRREILSRRPSYRKILNDLSSDAPGVPRIEEEKSEEETSAPAITTVTVPTPIYQTSSGQYIAITQGGAIQLANNGTDGVQGLQTLTMTNAAATQPGTTILQYAQTTDGQQILVPSNQVVVQGTQKL

SEQ ID NO: 802445 - protein, 341 aa, Homo sapiens
MTMESGAENQQSGDAAVTEAENQQMTVQAQPQIATLAQVSMPAAHATSSAPTVTLVQLPNGQTVQVHGVIQAAQPSVIQSPQVQTVQSSCKDLKRLFSGTQISTIAESEDSQESVDSVTDSQKRREILSRRPSYRKILNDLSSDAPGVPRIEEEKSEEETSAPAITTVTVPTPIYQTSSGQYIAITQGGAIQLANNGTDGVQGLQTLTMTNAAATQPGTTILQYAQTTDGQQILVPSNQVVVQAASGDVQTYQIRTAPTSTIAPGVVMASSPALPTQPAEEAARKREVRLMKNREAARECRRKKKEYVKCLENRVAVLENQNKTLIEELKALKDLYCHKSD

SEQ ID NO: 802446 - protein, 313 aa, Homo sapiens [sequence omitted]

SEQ ID NO: 802447 - protein, 327 aa, Homo sapiens; identical to SEQ ID NO: 802440

SEQ ID NO: 802448 - protein, 341 aa, Homo sapiens; identical to SEQ ID NO: 802445

SEQ ID NO: 802449 - protein, 287 aa, Homo sapiens
MPAAHATSSAPTVTLVQLPNGQTVQVHGVIQAAQPSVIQSPQVQTVQISTIAESEDSQESVDSVTDSQKRREILSRRPSYRKILNDLSSDAPGVPRIEEEKSEEETSAPAITTVTVPTPIYQTSSGQYIAITQGGAIQLANNGTDGVQGLQTLTMTNAAATQPGTTILQYAQTTDGQQILVPSNQVVVQAASGDVQTYQIRTAPTSTIAPGVVMASSPALPTQPAEEAARKREVRLMKNREAARECRRKKKEYVKCLENRVAVLENQNKTLIEELKALKDLYCHKSD

SEQ ID NO: 802450 - protein, 138 aa, Homo sapiens
MTMESGAENQQSGDAAVTEAENQQMTVQAQPQIATLAQVSMPAAHATSSAPTVTLVQLPNGQTVQVHGVIQAAQPSVIQSPQVQTVQSSCKDLKRLFSGTQISTIAESEDSQESVDSVTDSQKRREILSRRPSYRREV

SEQ ID NO: 802451 - protein, 248 aa, Homo sapiens
MTMESGAENQQSGDAAVTEAENQQMTVQAQPQIATLAQVSMPAAHATSSAPTVTLVQLPNGQTVQVHGVIQAAQPSVIQSPQVQTVQSSCKDLKRLFSGTQISTIAESEDSQESVDSVTDSQKRREILSRRPSYRKILNDLSSDAPGVPRIEEEKSEEETSAPAITTVTVPTPIYQTSSGQYIAITQGGAIQLANNGTDGVQGLQTLTMTNAAATQPGTTILQYAQTTDGQQILVPSNQVVVQGTQKL

SEQ ID NO: 802452 - protein, 280 aa, Homo sapiens
MTMESGAENQQSGDAAVTEAENQQMTVQAQPQIATLAQVSMPAAHATSSAPTVTLVQLPNGQTVQVHGVIQAAQPSVIQSPQVQTVQISTIAESEDSQESVDSVTDSQKRREILSRRPSYRKILNDLSSDAPGVPRIEEEKSEEETSAPAITTVTVPTPIYQTSSGQYIAITQGGAIQLANNGTDGVQGLQTLTMTNAAATQPGTTILQYAQTTDGQQILVPSNQVVVQAASGDVQTYQIRTAPTSTIAPGVVMASSPALPTQPAEEAARKREVRLMKNR

SEQ ID NO: 802453 - protein, 691 aa, Homo sapiens
MDQREILQKFLDEAQSKKITKEEFANEFLKLKRQSTKYKADKTYPTTVAEKPKNIKKNRYKDILPYDYSRVELSLITSDEDSSYINANFIKGVYGPKAYIATQGPLSTTLLDFWRMIWEYSVLIIVMACMEYEMGKKKCERYWAEPGEMQLEFGPFSVSCEAEKRKSDYIIRTLKVKFNSETRTIYQFHYKNWPDHDVPSSIDPILELIWDVRCYQEDDSVPICIHCSAGCGRTGVICAIDYTWMLLKDGIIPENFSVFSLIREMRTQRPSLVQTQEQYELVYNAVLELFKRQMDVIRDKHSGTESQAKHCIPEKNHTLQADSYSPNLPKSTTKAAKMMNQQRTKMEIKESSSFDFRTSEISAKEELVLHPAKSSTSFDFLELNYSFDKNADTTMKWQTKAFPIVGEPLQKHQSLDLGSLLFEGCSNSKPVNAAGRYFNSKVPITRTKSTPFELIQQRETKEVDSKENFSYLESQPHDSCFVEMQAQKVMHVSSAELNYSLPYDSKHQIRNASNVKHHDSSALGVYSYIPLVENPYFSSWPPSGTSSKMSLDLPEKQDGTVFPSSLLPTSSTSLFSYYNSHDSLSLNSPTNISSLLNQESAVLATAPRIDDEIPPPLPVRTPESFIVVEEAGEFSPNVPKSLSSAVKVKIGTSLEWGGTSEPKKFDDSVILRPSKSVKLRSPKSGKNFSWL

SEQ ID NO: 802454 - protein, 807 aa, Homo sapiens
MDQREILQKFLDEAQSKKITKEEFANEFLKLKRQSTKYKADKTYPTTVAEKPKNIKKNRYKDILPYDYSRVELSLITSDEDSSYINANFIKGVYGPKAYIATQGPLSTTLLDFWRMIWEYSVLIIVMACMEYEMGKKKCERYWAEPGEMQLEFGPFSVSCEAEKRKSDYIIRTLKVKFNSETRTIYQFHYKNWPDHDVPSSIDPILELIWDVRCYQEDDSVPICIHCSAGCGRTGVICAIDYTWMLLKDGIIPENFSVFSLIREMRTQRPSLVQTQEQYELVYNAVLELFKRQMDVIRDKHSGTESQAKHCIPEKNHTLQADSYSPNLPKSTTKAAKMMNQQRTKMEIKESSSFDFRTSEISAKEELVLHPAKSSTSFDFLELNYSFDKNADTTMKWQTKAFPIVGEPLQKHQSLDLGSLLFEGCSNSKPVNAAGRYFNSKVPITRTKSTPFELIQQRETKEVDSKENFSYLESQPHDSCFVEMQAQKVMHVSSAELNYSLPYDSKHQIRNASNVKHHDSSALGVYSYIPLVENPYFSSWPPSGTSSKMSLDLPEKQDGTVFPSSLLPTSSTSLFSYYNSHDSLSLNSPTNISSLLNQESAVLATAPRIDDEIPPPLPVRTPESFIVVEEAGEFSPNVPKSLSSAVKVKIGTSLEWGGTSEPKKFDDSVILRPSKSVKLRSPKSELHQDRSSPPPPLPERTLESFFLADEDCMQAQSIETYSTSYPDTMENSTSSKQTLKTPGKSFTRSKSLKILRNMKKSICNSCPPNKPAESVQSNNSSSFLNFGFANRFSKPKGPRNPPPTWNI

SEQ ID NO: 802455 - protein, 640 aa, Homo sapiens
MDQREILQKFLDEAQSKKITKEEFANEFLKLKRQSTKYKADKTYPTTVAEKPKNIKKNRYKDILPYDYSRVELSLITSDEDSSYINANFIKGVYGPKAYIATQGPLSTTLLDFWRMIWEYSVLIIVMACMEYEMGKKKCERYWAEPGEMQLEFGPFSVSCEAEKRKSDYIIRTLKVKFNSETRTIYQFHYKNWPDHDVPSSIDPILELIWDVRCYQEDDSVPICIHCSAGCGRTGVICAIDYTWMLLKDGIIPENFSVFSLIREMRTQRPSLVQTQEQYELVYNAVLELFKRQMDVIRDKHSGTESQAKHCIPEKNHTLQADSYSPNLPKSTTKAAKMMNQQRTKMEIKESSSFDFRTSEISAKEELVLHPAKSSTSFDFLELNYSFDKNADTTMKWQTKAFPIVGEPLQKHQSLDLGSLLFEGCSNSKPVNAAGRYFNSKVPITRTKSTPFELIQQRETKEVDSKENFSYLESQPHDSCFVEMQAQKVMHVSSAELNYSLPYDSKHQIRNASNVKHHDSSALGVYSYIPLVENPYFSSWPPSGTSSKMSLDLPEKQDGTVFPSSLLPTSSTSLFSYYNSHDSLSLNSPTNISSLLNQESAVLATAPRIDDEIPPPLPVRTPESFIVVEEAGEYSSVSIK

SEQ ID NO: 802456 - protein, 807 aa, Homo sapiens; identical to SEQ ID NO: 802454

SEQ ID NO: 802457 - protein, 179 aa, Homo sapiens
MDQREILQKFLDEAQSKKITKEEFANEFLKLKRQSTKYKADKTYPTTVAEKPKNIKKNRYKDILPYDYSRVELSLITSDEDSSYINANFIKGVYGPKAYIATQGPLSTTLLDFWRMIWEYSVLIIVMACMEYEMGKEAEKRKSDYIIRTLKVKFNSVSVILAHQTSLQNLFSQITPAHF

SEQ ID NO: 802458 - protein, 621 aa, Homo sapiens
FGVRPGCCSGDQLVSLGGRCFPRPPGAMIQNVGNHLRRGLASVFSNRTSRKSALRAGNDSAMADGEGYRNPTEVQMSQLVLPCHTNQRGELSVGQLLKWIDTTACLSAERHAGCPCVTASMDDIYFEHTISVGQVVNIKAKVNRAFNSSMEVGIQVASEDLCSEKQWNVCKALATFVARREITKVKLKQITPRTEEEKMEHSVAAERRRMRLVYADTIKDLLANCAIQGDLESRDCSRMVPAEKTRVESVELVLPPHANHQGNTFGGQIMAWMENVATIAASRLCRAHPTLKAIEMFHFRGPSQVGDRLVLKAIVNNAFKHSMEVGVCVEAYRQEAETHRRHINSAFMTFVVLDADDQPQLLPWIRPQPGDGERRYREASARKKIRLDRKYIVSCKQTEVPLSVPWDPSNQVYLSYNNVSSLKMLVAKDNWVLSSEISQVRLYTLEDDKFLSFHMEMVVHVDAAQAFLLLSDLRQRPEWDKHYRSVELVQQVDEDDAIYHVTSPALGGHTKPQDFVILASRRKPCDNGDPYVIALRSVTLPTHRETPEYRRGETLCSGFCLWREGDQLTKVSYYNQATPGVLNYVTTNVAGLSSEFYTTFKACEQFLLDNRNDLAPSLQTL

SEQ ID NO: 802459 - protein, 102 aa, Homo sapiens
LTLQDLHCELGFQLQHKVGIQVASEDLCSEKQWNVCKALATFVARREITKVKLKQITPRTEEEKMEHSVAAERRRMRLVYADTIKDLLANCAIQGGEQLPAV

SEQ ID NO: 802460 - protein, 645 aa, Homo sapiens
MIQNVGNHLRRLSLEGEIAEPLGWFIISSNLQTSPRGCQIPHGLAVESGITFSKCRPLEFYSGLASVFSNRTSRKSALRAGNDSAMADGEGYRNPTEVQMSQLVLPCHTNQRGELSVGQLLKWIDTTACLSAERHAGCPCVTASMDDIYFEHTISVGQVVNIKAKVNRAFNSSMEVGIQVASEDLCSEKQWNVCKALATFVARREITKVKLKQITPRTEEEKMEHSVAAERRRMRLVYADTIKDLLANCAIQGDLESRDCSRMVPAEKTRVESVELVLPPHANHQGNTFGGQIMAWMENVATIAASRLCRAHPTLKAIEMFHFRGPSQVGDRLVLKAIVNNAFKHSMEVGVCVEAYRQEAETHRRHINSAFMTFVVLDADDQPQLLPWIRPQPGDGERRYREASARKKIRLDRKYIVSCKQTEVPLSVPWDPSNQVYLSYNNVSSLKMLVAKDNWVLSSEISQVRLYTLEDDKFLSFHMEMVVHVDAAQAFLLLSDLRQRPEWDKHYRSVELVQQVDEDDAIYHVTSPALGGHTKPQDFVILASRRKPCDNGDPYVIALRSVTLPTHRETPEYRRGETLCSGFCLWREGDQLTKVSYYNQATPGVLNYVTTNVAGLSSEFYTTFKACEQFLLDNRNDLAPSLQTL

SEQ ID NO: 802461 - protein, 621 aa, Homo sapiens; identical to SEQ ID NO: 802458

SEQ ID NO: 802462 - protein, 634 aa, Homo sapiens
FGVRPGCCSGDQLVSLGGRCFPRPPGAMIQNVGNHLRRGLASVFSNRTSRKSALRAGNDSAMADGEGYRNPTEVQMSQLVLPCHTNQRGELSVGQLLKWIDTTACLSAERHAGCPCVTASMDDIYFEHTISVGQVVNIKAKVNRAFNSSMEVGIQVASEDLCSEKQWNVCKALATFVARREITKVKLKQITPRTEEEKMEHSVAAERRRMRLVYADTIKDLLANCAIQGDLESRDCSRMVPAEKTRVESVELVLPPHANHQGNTFGGQIMAWMENVATIAASRLCRAHPTLKAIEMFHFRGPSQVGDRLVLKAIVNNAFKHSMEVGVCVEAYRQEAETHRRHINSAFMTFVVLDADDQPQLLPWIRPQPGDGERRYREASARKKIRLDRKYIVSCKQTEVPLSVPWDPSNQVYLSYNNVSSLKMLVAKDNWVLSSEISQVRLYTLEDDKFLSFHMEMVVHVDAAQAFLLLSDLRQRPEWDKHYRSVELVQQVDEDDAIYHVTSPALGGHTKPQDFVILASRRKPCDNGDPYVIALRSVTLPTHRETPEYRRGETLCSGFCLWREGDQLTKCCWVRVSLTELVSASGFYSWGLESRSKGRRSDGWNGKLAGGHLSTLKAIPVAKINSRFGYLQDT

SEQ ID NO: 802463 - protein, 170 aa, Homo sapiens
GPRRPVSEPLPADSLPGRPQRAPLASALHAAGAEPPILWGLASVFSNRTSRKSALRAGNDSAMADGEGYRNPTEVQMSQLVLPCHTNQRGELSVGQLLKWIDTTACLSAERHAGCPCVTASMDDIYFEHTIRCRTSGEYQGQRRTRGLTKSRHGKVGNTKVRQQEGPWSI

SEQ ID NO: 802464 - protein, 578 aa, Homo sapiens
GPRRPVSEPLPADSLPGRPQRAPLASALHAAGAEPPILWGLASVFSNRTSRKSALRAGNDSAMADGEGYRNPTEVQMSQLVLPCHTNQRGELSVGQLLKWIDTTACLSGGIQVASEDLCSEKQWNVCKALATFVARREITKVKLKQITPRTEEEKMEHSVAAERRRMRLVYADTIKDLLANCAIQGDLESRDCSRMVPAEKTRVESVELVLPPHANHQGNTFGGQIMAWMENVATIAASRLCRAHPTLKAIEMFHFRGPSQVGDRLVLKAIVNNAFKHSMEVGVCVEAYRQEAETHRRHINSAFMTFVVLDADDQPQLLPWIRPQPGDGERRYREASARKKIRLDRKYIVSCKQTEVPLSVPWDPSNQVYLSYNNVSSLKMLVAKDNWVLSSEISQVRLYTLEDDKFLSFHMEMVVHVDAAQAFLLLSDLRQRPEWDKHYRSVELVQQVDEDDAIYHVTSPALGGHTKPQDFVILASRRKPCDNGDPYVIALRSVTLPTHRETPEYRRGETLCSGFCLWREGDQLTKVSYYNQATPGVLNYVTTNVAGLSSEFYTTFKACEQFLLDNRNDLAPSLQTL

SEQ ID NO: 802465 - protein, 1205 aa, Homo sapiens
MVLLSLWLIAAALVEVRTSADGQAGNEEMVQIDLPIKRYREYELVTPVSTNLEGRYLSHTLSASHKKRSARDVSSNPEQLFFNITAFGKDFHLRLKPNTQLVAPGAVVEWHETSLVPGNITDPINNHQPGSATYRIRKTEPLQTNCAYVGDIVDIPGTSVAISNCDGLAGMIKSDNEEYFIEPLERGKQMEEEKGRIHVVYKRSAVEQAPIDMSKDFHYRESDLEGLDDLGTVYGNIHQQLNETMRRRRHAGENDYNIEVLLGVDDSVVRFHGKEHVQNYLLTLMNIVNEIYHDESLGVHINVVLVRMIMLGYAKSISLIERGNPSRSLENVCRWASQQQRSDLNHSEHHDHAIFLTRQDFGPAGMQGYAPVTGMCHPVRSCTLNHEDGFSSAFVVAHETGHVLGMEHDGQGNRCGDETAMGSVMAPLVQAAFHRYHWSRCSGQELKRYIHSYDCLLDDPFDHDWPKLPELPGINYSMDEQCRFDFGVGYKMCTAFRTFDPCKQLWCSHPDNPYFCKTKKGPPLDGTECAAGKWCYKGHCMWKNANQQKQDGNWGSWTKFGSCSRTCGTGVRFRTRQCNNPMPINGGQDCPGVNFEYQLCNTEECQKHFEDFRAQQCQQRNSHFEYQNTKHHWLPYEHPDPKKRCHLYCQSKETGDVAYMKQLVHDGTHCSYKDPYSICVRGECVKVGCDKEIGSNKVEDKCGVCGGDNSHCRTVKGTFTRTPRKLGYLKMFDIPPGARHVLIQEDEASPHILAIKNQATGHYILNGKGEEAKSRTFIDLGVEWDYNIEDDIESLHTDGPLHDPVIDLIIPQENDTRSSLTYKYIIHEDSVPTINSNNVIQEELDTFEWALKSWSQCSKPCGGGFQYTKYGCRRKSDNKMVHRSFCEANKKPKPIRRMCNIQECTHPLWVAEEWEHCTKTCGSSGYQLRTVRCLQPLLDGTNRSVHSKYCMGDRPESRRPCNRVPCPAQWKTGPWSECSVTCGEGTEVRQVLCRAGDHCDGEKPESVRACQLPPCNDEPCLGDKSIFCQMEVLARYCSIPGYNKLCCESCSKRSSTLPPPYLLEAAETHDDVISNPSDLPRSLVMPTSLVPYHSETPAKKMSLSSISSVGGPNAYAAFRPNSKPDGANLRQRSAQQAGSKTVRLVTVPSSPPTKRVHLSSASQMAAASFFAASDSIGASSQARTSKKDGKIIDNRRPTRSSTLER

SEQ ID NO: 802466 - protein, 163 aa, Homo sapiens
LVTPVSTNLEGRYLSHTLSASHKKRSARDVSSNPEQLFFNITAFGKDFHLRLKPNTQLVAPGAVVEWHETSLVPGNITDPINNHQPGSATYRIRKTEPLQTNCAYVGDIVDIPGTSVAISNCDGLVRLLLFCAYVCRCWECSHGFCIVWKVEVERRLHCYVTF

SEQ ID NO: 802467 - protein, 546 aa, Homo sapiens
MKQLVHDGTHCSYKDPYSICVRGECVKVGCDKEIGSNKVEDKCGVCGGDNSHCRTVKGTFTRTPRKLGYLKMFDIPPGARHVLIQEDEASPHILAIKNQATGHYILNGKGEEAKSRTFIDLGVEWDYNIEDDIESLHTDGPLHDPVIVLIIPQENDTRSSLTYKYIIHEDSVPTINSNNVIQEELDTFEWALKSWSQCSKPCGGGFQYTKYGCRRKSDNKMVHRSFCEANKKPKPIRRMCNIQECTHPLWVAEEWEHCTKTCGSSGYQLRTVRCLQPLLDGTNRSVHSKYCMGDRPESRRPCNRVPCPAQWKTGPWSECSVTCGEGTEVRQVLCRAGDHCDGEKPESVRACQLPPCNDEPCLGDKSIFCQMEVLARYCSIPGYNKLCCESCSKRSSTLPPPYLLEAAETHDDVISNPSDLPRSLVMPTSLVPYHSETPAKKMSLSSISSVGGPNAYAAFRPNSKPDGANLRQRSAQQAGSKTVRLVTVPSSPPTKRVHLSSASQMAAASFFAASDSIGASSQARTSKKDGKIIDNRRPTRSSTLER

SEQ ID NO: 802468 - protein, 91 aa, Homo sapiens
ACLASRPPLPQRYPLRTLTRCSSVLAESAQNVAGPKGLFTTLAGVSICCATTFISGEINPIYLLASPWRTVSSDKKQPIYLLQPDPTSPDA

SEQ ID NO: 802469 - protein, 85 aa, Homo sapiens
ACLASRPPLPQRYPLRTLTRCSSVLAESAQNVAGPKGLFTTLAGVSICCATTFISGEINPIYLLASPWRTVSSDKSTLNWNLELD

SEQ ID NO: 802470 - protein, 131 aa, Homo sapiens
QIKGRGGGEREKEESRLSNMKGPPTFCSLLLLSLLLSPDPTAAFLLPPSTACCTQLYRKPLSDKLLRKVIQVELQEADGDCHLQAFVLHLAQRSICIHPQNPSLSQWFEHQERKLHGTLPKLNFGMLRKMG

SEQ ID NO: 802471 - protein, 132 aa, Homo sapiens
AASSTLGFRVPRPEMGSKAKKRVLLPTRPAPPTVEQILEDVRGAPAEDPVFTILAPEDPPVPFRMMEDAEAPGEQLYQQSRAYVAANQRLQQAGNVLRQRCELLQRAGEDLEREVAQMKQAALPAAEAASSG

SEQ ID NO: 802472 - protein, 132 aa, Homo sapiens; identical to SEQ ID NO: 802471

SEQ ID NO: 802473 - protein, 118 aa, Homo sapiens
MGSKAKKRVLLPTRPAPPTVEQILEDVRGAPAEDPVFTILAPEDPPVPFRMMEDAEAPGEQLYQQSRAYVAANQRLQQAGNVLRQRCELLQRAGEDLEREVAQMKQAALPAAEAASSG

SEQ ID NO: 802474 - protein, 108 aa, Homo sapiens
MLLKLLTWPREVPAVSQGGRWGGGRLLPSLPTLHFCAACSHSFPCPPSWARAVLPEVALTWGRPSSRSPCPPLTLPGSGCCGCPIPAVAPATAPSGSWVPPAPHWGLP

SEQ ID NO: 802475 - protein, 145 aa, Homo sapiens
MGSKAKKRVLLPTRPAPPTVEQILEDVRGAPAEDPVFTILAPEEGRGSPVPGKSGPETPAARGRERSTPLTPDPTPWEPPQHGHGPYPLRVSLYSSVEWDRFSEGSSDRGGGRALWFRPVSPALSEDEAGGSLEPRSSRPAWPTW

SEQ ID NO: 802476 - protein, 132 aa, Homo sapiens; identical to SEQ ID NO: 802471

SEQ ID NO: 802477 - protein, 88 aa, Homo sapiens
AASSTLGFRVPRPEMGSKAKKRVLLPTRPAPPTVEQILEDVRGAPAEDPVFTILAPEDCTPAWATEQDPVCLKRNEALKQTDYGVGAP

SEQ ID NO: 802478 - protein, 155 aa, Homo sapiens
RERDRDGCVRVRWAGGAARARAERWTPRSAPPSPPSEMGSKAKKRVLLPTRPAPPTVEQILEDVRGAPAEDPVFTILAPEDPPVPFRMMEDAEAPGEQLYQQSRAYVAANQRLQQAGNVLRQRCELLQRAGEDLEREVAQMKQAALPAAEAASSG

SEQ ID NO: 802479 - protein, 107 aa, Homo sapiens
ETMRRRGALRAGTRVFSTLAVGKQQAAWTTVAELGWKGFPSIAQLLYKNMARLFAKICERSVGFQSCFSFLGGTSQLGSPATPASQSFETSLGLSFQKEGQAAIFAV

SEQ ID NO: 802480 - protein, 358 aa, Homo sapiens
MKTAENIRGTGSDGPRKRGLCVLCGLPAAGKSTFARALAHRLQQEQGWAIGVVAYDDVMPDAFLAGARARPAPSQWKLLRQELLKYLEYFLMAVINGCQMSVPPNRTEAMWEDFITCLKDQDLIFSAAFEAQSCYLLTKTAVSRPLFLVLDDNFYYQSMRYEVYQLARKYSLGFCQLFLDCPLETCLQRNGQRPQALPPETIHLMGRKLEKPNPEKNAWEHNSLTIPSPACASEASLEVTDLLLTALENPVKYAEDNMEQKDTDRIICSTNILHKTDQTLRRIVSQTMKEAKDEQVLPHNLKLLAEELNKLKAEFLEDLKQGNKKYLCFQQTIDIPDVISFFHYEKDNIVQKYFSKQH

SEQ ID NO: 802481 - protein, 358 aa, Homo sapiens; identical to SEQ ID NO: 802480

SEQ ID NO: 802482 - protein, 358 aa, Homo sapiens; identical to SEQ ID NO: 802480

SEQ ID NO: 802483 - protein, 238 aa, Homo sapiens
MKTAENIRGTGSDGPRKRGLCVLCGLPAAGKSTFARALAHRLQQEQGWAIGVVAYDDVMPDAFLAGARARPAPSQWKLLRQELLKYLEYFLMAVINGCQMSVPPNRTEAMWEDFITCLKDQDLIFSAAFEAQSCYLLTKTAVSRPLFLVLDDNFYYQSMRYEVYQLARKYSLGFCQLFLDCPLETCLQRNGQRPQALPPETIHLMGRKLEKPTLRKMLGNTTASQFRVQHVLRRPAWK

SEQ ID NO: 802484 - protein, 348 aa, Homo sapiens
MKTAENIRGTGSDGPRKRGLCVLCGLPAAGKSTFARALAHRLQQEQGWAIGVVAYDDVMPDAFLAGARARPAPSQWKLLRQELLKYLEYFLMAVINGCQMSVPPNRTEAMWEDFITCLKDQDLIFSAAFEAQSCYLLTKTAVSRPLFLVLDDNFYYQSMRYEVYQLARKYSLGFCQLFLDCPLETCLQRNGQRPQALPPETIHLMGRKLEKPNPEKNAWEHNSLTIPSPACASEASLEVTDLLLTALENPVKYAEDNMEQKDTDRIICSTNILHKTDQTLRRIVSQTMKEAKGNQEAFSEMTFKQRWVRANHAAIWRIILGNEHIKCRSAKVGWLQCCRIEKRPLSTG

SEQ ID NO: 802485 - protein, 135 aa, Homo sapiens
MEFSDAMSFGVRTVVKVRPAPRPPTGRWQTPWSHRTAVCPSGERREAMAKEGMLGGQRGVPTHGQQEKKRGQCNHGGRDWRDVATSQALPAATRNRNRQRRDSPPEPPEEYSPADTLVLAQESRFGLLASRTVRK

SEQ ID NO: 802486 - protein, 118 aa, Homo sapiens [sequence omitted]

SEQ ID NO: 802487 - protein, 1281 aa, Homo sapiens
MVRKKNPPLRNVASEGEGQILEPIGTESKVSGKNKEFSADQMSENTDQSDAAELNHKEEHSLHVQDPSSSSKKDLKSAVLSEKAGFNYESPSKGGNFPSFPHDEVTDRNMLAFSSPAAGGVCEPLKSPQRAEADDPQDMACTPSGDSLETKEDQKMSPKATEETGQAQSGQANCQGLSPVSVASKNPQVPSDGGVRLNKSKTDLLVNDNPDPAPLSPELQDFKCNICGYGYYGNDPTDLIKHFRKYHLGLHNRTRQDAELDSKILALHNMVQFSHSKDFQKVNRSVFSGVLQDINSSRPVLLNGTYDVQVTSGGTFIGIGRKTPDCQGNTKYFRCKFCNFTYMGNSSTELEQHFLQTHPNKIKASLPSSEVAKPSEKNSNKSIPALQSSDSGDLGKWQDKITVKAGDDTPVGYSVPIKPLDSSRQNGTEATSYYWCKFCSFSCESSSSLKLLEHYGKQHGAVQSGGLNPELNDKLSRGSVINQNDLAKSSEGETMTKTDKSSSGAKKKDFSSKGAEDNMVTSYNCQFCDFRYSKSHGPDVIVVGPLLRHYQQLHNIHKCTIKHCPFCPRGLCSPEKHLGEITYPFACRKSNCSHCALLLLHLSPGAAGSSRVKHQCHQCSFTTPDVDVLLFHYESVHESQASDVKQEANHLQGSDGQQSVKESKEHSCTKCDFITQVEEEISRHYRRAHSCYKCRQCSFTAADTQSLLEHFNTVHCQEQDITTANGEEDGHAISTIKEEPKIDFRVYNLLTPDSKMGEPVSESVVKREKLEEKDGLKEKVWTESSSDDLRNVTWRGADILRGSPSYTQASLGLLTPVSGTQEQTKTLRDSPNVEAAHLARPIYGLAVETKGFLQGAPAGGEKSGALPQQYPASGENKSKDESQSLLRRRRGSGVFCANCLTTKTSLWRKNANGGYVCNACGLYQKLHSTPRPLNIIKQNNGEQIIRRRTRKRLNPEALQAEQLNKQQRGSNEEQVNGSPLERRSEDHLTESHQREIPLPSLSKYEAQGSLTKSHSAQQPVLVSQTLDIHKRMQPLHIQIKSPQESTGDPGNSSSVSEGKGSSERGSPIEKYMRPAKHPNYSPPGSPIEKYQYPLFGLPFVHNDFQSEADWLRFWSKYKLSVPGNPHYLSHVPGLPNPCQNYVPYPTFNLPPHFSAVGSDNDIPLDLAIKHSRPGPTANGASKEKTKAPPNVKNEGPLNVVKTEKVDRSTQDELSTKCVHCGIVFLDEVMYALHMSCHGDSGPFQCSICQHLCTDKYDFTTHIQRGLHRNNAQVEKNGKPKE

SEQ ID NO: 802488 - protein, 825 aa, Homo sapiens
NEEQLEDDETGTCTTIPRTSTGNGIVKASTYAAAEGETMTKTDKSSSGAKKKDFSSKGAEDNMVTSYNCQFCDFRYSKSHGPDVIVVGPLLRHYQQLHNIHKCTIKHCPFCPRGLCSPEKHLGEITYPFACRKSNCSHCALLLLHLSPGAAGSSRVKHQCHQCSFTTPDVDVLLFHYESVHESQASDVKQEANHLQGSDGQQSVKESKEHSCTKCDFITQVEEEISRHYRRAHSCYKCRQCSFTAADTQSLLEHFNTVHCQEQDITTANGEEDGHAISTIKEEPKIDFRVYNLLTPDSKMGEPVSESVVKREKLEEKDGLKEKVWTESSSDDLRNVTWRGADILRGSPSYTQASLGLLTPVSGTQEQTKTLRDSPNVEAAHLARPIYGLAVETKGFLQGAPAGGEKSGALPQQYPASGENKSKDESQSLLRRRRGSGVFCANCLTTKTSLWRKNANGGYVCNACGLYQKLHSTPRPLNIIKQNNGEQIIRRRTRKRLNPEALQAEQLNKQQRGSNEEQVNGSPLERRSEDHLTESHQREIPLPSLSKYEAQGSLTKSHSAQQPVLVSQTLDIHKRMQPLHIQIKSPQESTGDPGNSSSVSEGKGSSERGSPIEKYMRPAKHPNYSPPGSPIEKYQYPLFGLPFVHNDFQSEADWLRFWSKYKLSVPGNPHYLSHVPGLPNPCQNYVPYPTFNLPPHFSAVGSDNDIPLDLAIKHSRPGPTANGASKEKTKAPPNVKNEGPLNVVKTEKVDRSTQDELSTKCVHCGIVFLDEVMYALHMSCHGDSGPFQCSICQHLCTDKYDFTTHIQRGLHRNNAQVEKNGKPKE

SEQ ID NO: 802489 - protein, 1281 aa, Homo sapiens
MVRKKNPPLRNVASEGEGQILEPIGTESKVSGKNKEFSADQMSENTDQSDAAELNHKEEHSLHVQDPSSSSKKDLKSAVLSEKAGFNYESPSKGGNFPSFPHDEVTDRNMLAFSFPAAGGVCEPLKSPQRAEADDPQDMACTPSGDSLETKEDQKMSPKATEETGQAQSGQANCQGLSPVSVASKNPQVPSDGGVRLNKSKTDLLVNDNPDPAPLSPELQDFKCNICGYGYYGNDPTDLIKHFRKYHLGLHNRTRQDAELDSKILALHNMVQFSHSKDFQKVNRSVFSGVLQDINSSRPVLLNGTYDVQVTSGGTFIGIGRKTPDCQGNTKYFRCKFCNFTYMGNSSTELEQHFLQTHPNKIKASLPSSEVAKPSEKNSNKSIPALQSSDSGDLGKWQDKITVKAGDDTPVGYSVPIKPLDSSRQNGTEATSYYWCKFCSFSCESSSSLKLLEHYGKQHGAVQSGGLNPELNDKLSRGSVINQNDLAKSSEGETMTKTDKSSSGAKKKDFSSKGAEDNMVTSYNCQFCDFRYSKSHGPDVIVVGPLLRHYQQLHNIHKCTIKHCPFCPRGLCSPEKHLGEITYPFACRKSNCSHCALLLLHLSPGAAGSSRVKHQCHQCSFTTPDVDVLLFHYESVHESQASDVKQEANHLQGSDGQQSVKESKEHSCTKCDFITQVEEEISRHYRRAHSCYKCRQCSFTAADTQSLLEHFNTVHCQEQDITTANGEEDGHAISTIKEEPKIDFRVYNLLTPDSKMGEPVSESVVKREKLEEKDGLKEKVWTESSSDDLRNVTWRGADILRGSPSYTQASLGLLTPVSGTQEQTKTLRDSPNVEAAHLARPIYGLAVETKGFLQGAPAGGEKSGALPQQYPASGENKSKDESQSLLRRRRGSGVFCANCLTTKTSLWRKNANGGYVCNACGLYQKLHSTPRPLNIIKQNNGEQIIRRRTRKRLNPEALQAEQLNKQQRGSNEEQVNGSPLERRSEDHLTESHQREIPLPSLSKYEAQGSLTKSHSAQQPVLVSQTLDIHKRMQPLHIQIKSPQESTGDPGNSSSVSEGKGSSERGSPIEKYMRPAKHPNYSPPGSPIEKYQYPLFGLPFVHNDFQSEADWLRFWSKYKLSVPGNPHYLSHVPGLPNPCQNYVPYPTFNLPPHFSAVGSDNDIPLDLAIKHSRPGPTANGASKEKTKAPPNVKNEGPLNVVKTEKVDRSTQDELSTKCVHCGIVFLDEVMYALHMSCHGDSGPFQCSICQHLCTDKYDFTTHIQRGLHRNNAQVEKNGKPKE

SEQ ID NO: 802490 - protein, 674 aa, Homo sapiens
MNSGAMRIHSKGHFQGGIQVKNEKNRPSLKSLKTDNRPEKSKCKPLWGKVFYLDLPSVTISEKLQKDIKDLGGRVEEFLSKDISYLISNKKEAKFAQTLGRISPVPSPESAYTAETTSPHPSHDGSSFKSPDTVCLSRGKLLVEKAIKDHDFIPSNSILSNALSWGVKILHIDDIRYYIEQKKKELYLLKKSSTSVRDGGKRVGSGAQKTRTGRLKKPFVKVEDMSQLYRPFYLQLTNMPFINYSIQKPCSPFDVDKPSSMQKQTQVKLRIQTDGDKYGGTSIQLQLKEKKKKGYCECCLQKYEDLETHLLSEQHRNFAQSNQYQVVDDIVSKLVFDFVEYEKDTPKKKRIKYSVGSLSPVSASVLKKTEQKEKVELQHISQKDCQEDDTTVKEQNFLYKETQETEKKLLFISEPIPHPSNELRGLNEKMSNKCSMLSTAEDDIRQNFTQLPLHKNKQECILDISEHTLSENDLEELRVDHYKCNIQASVHVSDFSTDNSGSQPKQKSDTVLFPAKDLKEKDLHSIFTHDSGLITINSSQEHLTVQAKAPFHTPPEEPNECDFKNMDSLPSGKIHRKVKIILGRNRKENLEPNAEFDKRTEFITQEENRICSSPVQSLLDLFQTSEEKSEFLGFTSYTEKSGICNVLDIWEEENSDNLLTAFFSSPSTSTFTGF

SEQ ID NO: 802491 - protein, 674 aa, Homo sapiens; identical to SEQ ID NO: 802490

SEQ ID NO: 802492 - protein, 626 aa, Homo sapiens
MNSGAMRIHSKGHFQGGIQVKNEKNRPSLKSLKTDNRPEKSKCKPLWGKVFYLDLPSVTISEKLQKDIKDLGGRVEEFLSKDISYLISNKKEAKFAQTLGRISPVPSPESAYTAETTSPHPSHDGSSFKSPDTVCLSRGKLLVEKAIKDHDFIPSNSILSNALSWGVKILHIDDIRYYIEQKKKELYLLKKSSTSVRDGKPCSPFDVDKPSSMQKQTQVKLRIQTDGDKYGGTSIQLQLKEKKKKGYCECCLQKYEDLETHLLSEQHRNFAQSNQYQVVDDIVSKLVFDFVEYEKDTPKKKRIKYSVGSLSPVSASVLKKTEQKEKVELQHISQKDCQEDDTTVKEQNFLYKETQETEKKLLFISEPIPHPSNELRGLNEKMSNKCSMLSTAEDDIRQNFTQLPLHKNKQECILDISEHTLSENDLEELRVDHYKCNIQASVHVSDFSTDNSGSQPKQKSDTVLFPAKDLKEKDLHSIFTHDSGLITINSSQEHLTVQAKAPFHTPPEEPNECDFKNMDSLPSGKIHRKVKIILGRNRKENLEPNAEFDKRTEFITQEENRICSSPVQSLLDLFQTSEEKSEFLGFTSYTEKSGICNVLDIWEEENSDNLLTAFFSSPSTSTFTGF

SEQ ID NO: 802493 - protein, 414 aa, Homo sapiens
MQKQTQVKLRIQTDGDKYGGTSIQLQLKEKKKKGYCECCLQKYEDLETHLLSEQHRNFAQSNQYQVVDDIVSKLVFDFVEYEKDTPKKKRIKYSVGSLSPVSASVLKKTEQKEKVELQHISQKDCQEDDTTVKEQNFLYKETQETEKKLLFISEPIPHPSNELRGLNEKMSNKCSMLSTAEDDIRQNFTQLPLHKNKQECILDISEHTLSENDLEELRVDHYKCNIQASVHVSDFSTDNSGSQPKQKSDTVLFPAKDLKEKDLHSIFTHDSGLITINSSQEHLTVQAKAPFHTPPEEPNECDFKNMDSLPSGKIHRKVKIILGRNRKENLEPNAEFDKRTEFITQEENRICSSPVQSLLDLFQTSEEKSEFLGFTSYTEKSGICNVLDIWEEENSDNLLTAFFSSPSTSTFTGF

SEQ ID NO: 802494 - protein, 414 aa, Homo sapiens; identical to SEQ ID NO: 802493

SEQ ID NO: 802495 - protein, 674 aa, Homo sapiens; identical to SEQ ID NO: 802490

SEQ ID NO: 802496 - protein, 436 aa, Homo sapiens [sequence omitted]

SEQ ID NO: 802497 - protein, 415 aa, Homo sapiens
GGAGGPQAGGRRAQGADLLERGPRARGGVPARSQAGGGPRQAADSLRLREPQQDRPGGAIEGSPIPVLTVPTAPYEDQRPSGGGGLRRPTGLFEGQRNYLPNFIQSVLSSIDLRDRQGCTMVVGSDGRYFSRTAIEIVVQMAAANGIGGLIIGQNGILSTPAVSCIIRKIKAAGGIILTASHCPGGPGGEFGVKFNVANGGPAPDVVSDKIYQISKTIEEYAICPDLQIDLSRLGRQEFDLENKFKPFRVEIVDPVDIYLNLLQTIFDFHAIKSLLTGPSQLKIRVDAMHGVMEPYVRKVLCDELGAPANSAINCVPLEDFGGQHPDPNLTYAMTLLEAMKGGEYGFGAAFDADGDRYMILGQNGFFVSPSDSLAIIAANLSCIPYFHQMGVRGFGRSMPTSMALDRETSGDTIC

SEQ ID NO: 802498 - protein, 238 aa, Homo sapiens
MVRGWVAPSQAFPRITQLLGLPTYRYHVLLGLVVSLGGLTESTIRHSTQSLFEYMKGIQSDPQALGSFSGTLLQIFEDNLLNERVSVPLLKTLDHVLTHGCFDIFTTEEDHPFAVKLLALCKKEIKNSKDIQKLLSGIAVFCGMVQFPGDVRRQALLQLCLLLCHRFPLIRKTTASQVYETLLTYSDVVGADVLDEVVTVLSDTAWDAELAVVREQRNRLCDLLGVPRPQLVPQPGAC

SEQ ID NO: 802499 - protein, 201 aa, Homo sapiens
MGLRPMEGTFPHGIDILTTADYFAVGNRSNCFLVIRVIRELAARALHNLAQQAPEFSATQVFPRLLSMTLSPDLHMRHGSILACAEVAYALYKLAAQENRPVTDHLDEQAVQGLKQIHQQLYDRQLYRGLGGQLMRQAVCVLIEKLSLSKMPFRGDTVIDGWQWLINDTLRHLHLISSHSRQQMKMQQSRPCGATEMHKAT

SEQ ID NO: 802500 - protein, 300 aa, Homo sapiens
TGPWVENLDEVVISVFIAGFPEYTQPMIDHLVTMKISHWDGVIRELAARALHNLAQQAPEFSATQVFPRLLSMTLSPDLHMRHGSILACAEVAYALYKLAAQENRPVTDHLDEQAVQGLKQIHQQLYDRQLYRGLGGQLMRQAVCVLIEKLSLSKMPFRGDTVIDGWQWLINDTLRHLHLISSHSRQQMKDAAVSALAALCSEYYMKEPGEADPAIQEELITQYLAELRNPEEMTRCGFSLALGALPGFLLKGRLQQSPGQSVPTFPGRSRESESGELRVRRGERPNGGACLGPGVYRGA

SEQ ID NO: 802501 - protein, 1192 aa, Homo sapiens [sequence omitted]

SEQ ID NO: 802502 - protein, 1192 aa, Homo sapiens [sequence omitted]

SEQ ID NO: 802503 - protein, 1303 aa, Homo sapiens
GQGAAGSWVCLTDTGHFLGLLLNVPELSAVILKALTYDEKRGACSVGTNVRDAACYVCWAFARAYEPQELKPFVTAISSALVIAAVFDRDINCRRAASAAFQENVGRQGTFPHGIDILTTADYFAVGNRSNCFLVISVFIAGFPEYTQPMIDHLVTMKISHWDGVIRELAARALHNLAQQAPEFSATQVFPRLLSMTLSPDLHMRHGSILACAEVAYALYKLAAQENRPVTDHLDEQAVQGLKQIHQQLYDRQLYRGLGGQLMRQGLCVLIEKLSLSKMPFRGDTVIDGWQWLINDTLRHLQIAESYLIVSDKARDAAAVLVSRFITRPDVKQSKMAEFLDWSLCNLARSSFQTMQGVITMDGTLQALAQIFKHGKREDCLPYAATVLRCLDGCRLPESNQTLLRKLGVKLVQRLGLTFLKPKVAAWRYQRGCRSLAANLQLLTQGQSEQKPLILTEDDDEDDDVPEGVERVIEQLLVGLKDKDTVVRWSAAKGIGRMAGRLPRALADDVVGSVLDCFSFQETDKAWHGGCLALAELGRRGLLLPSRLVDVVAVILKALTYDEKRGACSVGTNVRDAACYVCWAFARAYEPQELKPFVTAISSALVIAAVFDRDINCRRAASAAFQENVGRQGTFPHGIDILTTADYFAVGNRSNCFLVISVFIAGFPEYTQPMIDHLVTMKISHWDGVIRELAARALHNLAQQAPEFSATQVFPRLLSMTLSPDLHMRHGSILACAEVAYALYKLAAQENRPVTDHLDEQAVQGLKQIHQQLYDRQLYRGLGGQLMRQAVCVLIEKLSLSKMPFRGDTVIDGWQWLINDTLRHLHLISSHSRQQMKDAAVSALAALCSEYYMKEPGEADPAIQEELITQYLAELRNPEEMTRCGFSLALGALPGFLLKGRLQQVLTGLRAVTHTSPEDVSFAESRRDGLKAIARICQTVGVKAGAPDEAVCGENVSQIYCALLGCMDDYTTDSRGDVGTWVRKAAMTSLMDLTLLLARSQPELIEAHTCERIMCCVAQQASEKIDRFRAHAASVFLTLLHFDSPPIPHVPHRGELEKLFPRSDVASVNWSAPSQAFPRITQLLGLPTYRYHVLLGLVVSLGGLTESTIRHSTQSLFEYMKGIQSDPQALGSFSGTLLQIFEDNLLNERVSVPLLKTLDHVLTHGCFDIFTTEEDHPFAVKLLALCKKEIKNSKDIQKLLSGIAVFCGMVQFPGDVRRQALLQLCLLLCHRFPLIRKTTASQVYETLLTYSDVVGADVLDEVVTVLSDTAWDAELAVVREQRNRLCDLLGVPRPQLVPQPGAC

SEQ ID NO: 802504 - protein, 725 aa, Homo sapiens
MALSDEPAAGGPEEEAEDETLAFGAALEAFGESAETRALLGRLREVHGGGAEREVALERFRVIMDKYQEQPHLLDPHLEWMMNLLLDIVQDQTSPASLVHLAFKFLYIITKVRGYKTFLRLFPHEVADVEPVLDLVTIQNPKDHEAWETRYMLLLWLSVTCLIPFDFSRLDGNLLTQPGQARMSIMDRILQIAESYLIVSDKARDAAAVLVSRFITRPDVKQSKMAEFLDWSLCNLARSSFQTMQGVITMDGTLQALAQIFKHGKREDCLPYAATVLRCLDGCRLPESNQTLLRKLGVKLVQRLGLTFLKPKVAAWRYQRGCRSLAANLQLLTQGQSEQKPLILTEDDDEDDDVPEGVERVIEQLLVGLKDKDTVVRWSAAKGIGRMAGRLPRALADDVVGSVLDCFSFQETDKAWHGGCLALAELGRRGLLLPSRLVDVVAVILKALTYDEKRGACSVGTNVRDAACYVCWAFARAYEPQELKPFVTAISSALVIAAVFDRDINCRRAASAAFQENVGRQGTFPHGIDILTTADYFAVGNRSNCFLVISVFIAGFPEYTQPMIDHLVTMKISHWDGVIRELAARALHNLAQQAPEFSATQVFPRLLSMTLSPDLHMRHGSILACAEVAYALYKLAAQENRPVTDHLDEQAVQGLKQIHQQLYDRQLYRGLGGQLMRQAVCVLIEKLSLSKMPFRGDTVIDGWQWLINDIAVASRWPWAPFQASF

SEQ ID NO: 802505 - protein, 1192 aa, Homo sapiens [sequence omitted]

SEQ ID NO: 802506 - protein, 829 aa, Homo sapiens
APSPSRLPGLVSGWLGPSSEPSVPVFCGTAAAGSAARGRPGKAGLGAWVLQGSFTERLSGRSCSSEKLAVSPGGCLVVAVILKALTYDEKRGACSVGTNVRDAACYVCWAFARAYEPQELKPFVTAISSALVIAAVFDRDINCRRAASAAFQENVGRQGTFPHGIDILTTADYFAVGNRSNCFLVISVFIAGFPEYTQPMIDHLVTMKISHWDGVIRELAARALHNLAQQAPEFSATQVFPRLLSMTLSPDLHMRHGSILACAEVAYALYKLAAQENRPVTDHLDEQAVQGLKQIHQQLYDRQLYRGLGGQLMRQAVCVLIEKLSLSKMPFRGDTVIDGWQWLINDTLRHLHLISSHSRQQMKDAAVSALAALCSEYYMKEPGEADPAIQEELITQYLAELRNPEEMTRCGFSLALGALPGFLLKGRLQQVLTGLRAVTHTSPEDVSFAESRRDGLKAIARICQTVGVKAGAPDEAVCGENVSQIYCALLGCMDDYTTDSRGDVGTWVRKAAMTSLMDLTLLLARSQPELIEAHTCERIMCCVAQQASEKIDRFRAHAASVFLTLLHFDSPPIPHVPHRGELEKLFPRSDVASVNWSAPSQAFPRITQLLGLPTYRYHVLLGLVVSLGGLTESTIRHSTQSLFEYMKGIQSDPQALGSFSGTLLQIFEDNLLNERVSVPLLKTLDHVLTHGCFDIFTTEEDHPFAVKLLALCKKEIKNSKDIQKLLSGIAVFCGMVQFPGDVRRQALLQLCLLLCHRFPLIRKTTASQVYETLLTYSDVVGADVLDEVVTVLSDTAWDAELAVVREQRNRLCDLLGVPRPQLVPQPGAC

SEQ ID NO: 802507 - protein, 712 aa, Homo sapiens
MVCDPPSNAVRKVLQLVLSIGKEHGDSGSQCAAFQENVGRQGTFPHGIDILTTADYFAVGNRSNCFLVISVFIAGFPEYTQPMIDHLVTMKISHWDGVIRELAARALHNLAQQAPEFSATQVFPRLLSMTLSPDLHMRHGSILACAEVAYALYKLAAQENRPVTDHLDEQAVQGLKQIHQQLYDRQLYRGLGGQLMRQAVCVLIEKLSLSKMPFRGDTVIDGWQWLINDTLRHLHLISSHSRQQMKDAAVSALAALCSEYYMKEPGEADPAIQEELITQYLAELRNPEEMTRCGFSLALGALPGFLLKGRLQQVLTGLRAVTHTSPEDVSFAESRRDGLKAIARICQTVGVKAGAPDEAVCGENVSQIYCALLGCMDDYTTDSRGDVGTWVRKAAMTSLMDLTLLLARSQPELIEAHTCERIMCCVAQQASEKIDRFRAHAASVFLTLLHFDSPPIPHVPHRGELEKLFPRSDVASVNWSAPSQAFPRITQLLGLPTYRYHVLLGLVVSLGGLTESTIRHSTQSLFEYMKGIQSDPQALGSFSGTLLQIFEDNLLNERVSVPLLKTLDHVLTHGCFDIFTTEEDHPFAVKLLALCKKEIKNSKDIQKLLSGIAVFCGMVQFPGDVRRQALLQLCLLLCHRFPLIRKTTASQVYETLLTYSDVVGADVLDEVVTVLSDTAWDAELAVVREQRNRLCDLLGVPRPQLVPQPGAC

SEQ ID NO: 802508 - protein, 630 aa, Homo sapiens
MIDHLVTMKISHWDGVIRELAARALHNLAQQAPEFSATQVFPRLLSMTLSPDLHMRHGSILACAEVAYALYKLAAQENRPVTDHLDEQAVQGLKQIHQQLYDRQLYRGLGGQLMRQAVCVLIEKLSLSKMPFRGDTVIDGWQWLINDTLRHLHLISSHSRQQMKDAAVSALAALCSEYYMKEPGEADPAIQEELITQYLAELRNPEEMTRCGFSLALGALPGFLLKGRLQQVLTGLRAVTHTSPEDVSFAESRRDGLKAIARICQTVGVKAGAPDEAVCGENVSQIYCALLGCMDDYTTDSRGDVGTWVRKAAMTSLMDLTLLLARSQPELIEAHTCERIMCCVAQQASEKIDRFRAHAASVFLTLLHFDSPPIPHVPHRGELEKLFPRSDVASVNWSAPSQAFPRITQLLGLPTYRYHVLLGLVVSLGGLTESTIRHSTQSLFEYMKGIQSDPQALGSFSGTLLQIFEDNLLNERVSVPLLKTLDHVLTHGCFDIFTTEEDHPFAVKLLALCKKEIKNSKDIQKLLSGIAVFCGMVQFPGDVRRQALLQLCLLLCHRFPLIRKTTASQVYETLLTYSDVVGADVLDEVVTVLSDTAWDAELAVVREQRNRLCDLLGVPRPQLVPQPGAC

SEQ ID NO: 802509 - protein, 651 aa, Homo sapiens
MGLRPMEGTFPHGIDILTTADYFAVGNRSNCFLVIRVIRELAARALHNLAQQAPEFSATQVFPRLLSMTLSPDLHMRHGSILACAEVAYALYKLAAQENRPVTDHLDEQAVQGLKQIHQQLYDRQLYRGLGGQLMRQAVCVLIEKLSLSKMPFRGDTVIDGWQWLINDTLRHLHLISSHSRQQMKDAAVSALAALCSEYYMKEPGEADPAIQEELITQYLAELRNPEEMTRCGFSLALGALPGFLLKGRLQQVLTGLRAVTHTSPEDVSFAESRRDGLKAIARICQTVGVKAGAPDEAVCGENVSQIYCALLGCMDDYTTDSRGDVGTWVRKAAMTSLMDLTLLLARSQPELIEAHTCERIMCCVAQQASEKIDRFRAHAASVFLTLLHFDSPPIPHVPHRGELEKLFPRSDVASVNWSAPSQAFPRITQLLGLPTYRYHVLLGLVVSLGGLTESTIRHSTQSLFEYMKGIQSDPQALGSFSGTLLQIFEDNLLNERVSVPLLKTLDHVLTHGCFDIFTTEEDHPFAVKLLALCKKEIKNSKDIQKLLSGIAVFCGMVQFPGDVRRQALLQLCLLLCHRFPLIRKTTASQVYETLLTYSDVVGADVLDEVVTVLSDTAWDAELAVVREQRNRLCDLLGVPRPQLVPQPGAC

SEQ ID NO: 802510 - protein, 1041 aa, Homo sapiens
MALSDEPAAGGPEEEAEDETLAFGAALEAFGESAETRALLGRLREVHGGGAEREVALERFRVIMDKYQEQPHLLDPHLEWMMNLLLDIVQDQTSPASLVHLAFKFLYIITKVRGYKTFLRLFPHEVADVEPVLDLVTIQNPKDHEAWETRYMLLLWLSVTCLIPFDFSRLDGNLLTQPGQARMSIMDRILQIAESYLIVSDKARDAAAVLVSRFITRPDVKQSKMAEFLDWSLCNLARSSFQTMQGVITMDGTLQALAQIFKHGKREDCLPYAATVLRCLDGCRLPESNQTLLRKLGVKLVQRLGLTFLKPKVAAWRYQRGCRSLAANLQLLTQGQSEQKPLILTEDDDEDDDVPEGVERVIEQLLVGLKDKDTVVRWSAAKGIGRMAGRLPRALADDVVGSVLDCFSFQETDKAWHGGCLALAELGRRGLLLPSRLVDVVAVILKALTYDEKRGACSVGTNVRDAACYVCWAFARAYEPQELKPFVTAISSALVIAAVFDRDINCRRAASAAFQENVGRQGTFPHGIDILTTADYFAVGNRSNCFLVISVFIAGFPEYTQPMIDHLVTMKISHWDGVIRELAARALHNLAQQAPEFSATQVFPRLLSMTLSPDLHMRHGSILACAEVAYALYKLAAQENRPVTDHLDEQAVQGLKQIHQQLYDRQLYRGLGGQLMRQAVCVLIEKLSLSKMPFRGDTVIDGWQWLINDTLRHLHLISSHSRQQMKDAAVSALAALCSEYYMKEPGEADPAIQEELITQYLAELRNPEEMTRCGFSLALGALPGFLLKGRLQQVLTGLRAVTHTSPEDVSFAESRRDGLKAIARICQTVGVKAGAPDEAVCGENVSQIYCALLGCMDDYTTDSRGDVGTWVRKAAMTSLMDLTLLLARSQPELIEAHTCERIMCCVAQQASEKIDRFRAHAASVFLTLLHFDSPPIPHVPHRGELEKLFPRSDVASVNWSAPSQAFPRITQLLGLPTYRYHVLLGLVVSLGGLTESTVRRRRAGWGRRWLQECLVLPCLLGACMELGLFFHCFLSLSGIFG

SEQ ID NO: 802511 - protein, 1041 aa, Homo sapiens; identical to SEQ ID NO: 802510

SEQ ID NO: 802512 - protein, 435 aa, Homo sapiens
MDKYQEQPHLLDPHLEWMMNLLLDIVQDQTSPASLVHLAFKFLYIITKVRGYKTFLRLFPHEVADVEPVLDLVTIQNPKDHEAWETRYMLLLWLSVTCLIPFDFSRLDGNLLTQPGQARMSIMDLTLLLARSQPELIEAHTCERIMCCVAQQASEKIDRFRAHAASVFLTLLHFDSPPIPHVPHRGELEKLFPRSDVASVNWSAPSQAFPRITQLLGLPTYRYHVLLGLVVSLGGLTESTIRHSTQSLFEYMKGIQSDPQALGSFSGTLLQIFEDNLLNERVSVPLLKTLDHVLTHGCFDIFTTEEDHPFAVKLLALCKKEIKNSKDIQKLLSGIAVFCGMVQFPGDVRRQALLQLCLLLCHRFPLIRKTTASQVYETLLTYSDVVGADVLDEVVTVLSDTAWDAELAVVREQRNRLCDLLGVPRPQLVPQPGAC

SEQ ID NO: 802513 - protein, 731 aa, Homo sapiens
MALSDEPAAGGPEEEAEDETLAFGAALEAFGESAETRALLGRLREVHGGGAEREVALERFRVIMDKYQEQPHLLDPHLEWMMNLLLDIVQDQTSPASLVHLAFKFLYIITKVRGYKTFLRLFPHEVADVEPVLDLVTIQNPKDHEAWETRYMLLLWLSVTCLIPFDFSRLDGNLLTQPGQARMSIMDRILQIAESYLIVSDKARDAAAVLVSRFITRPDVKQSKMAEFLDWSLCNLARSSFQTMQGVITMDGTLQALAQIFKHGKREDCLPYAATVLRCLDGCRLPESNQTLLRKLGVKLVQRLGLTFLKPKVAAWRYQRGCRSLAANLQLLTQGQSEQKPLILTEDDDEDDDVPEGVERVIEQLLVGLKDKDTVVRWSAAKGIGRMAGRLPRALADDVVGSVLDCFSFQETDKAWHGGCLALAELGRRGLLLPSRLVDVVAVILKALTYDEKRGACSVGTNVRDAACYVCWAFARAYEPQELKPFVTAISSALVIAAVFDRDINCRRAASAAFQENVGRQGTFPHGIDILTTADYFAVGNRSNCFLVISVFIAGFPEYTQPMIDHLVTMKISHWDGVIRELAARALHNLAQQAPEFSATQVFPRLLSMTLSPDLHMRHGSILACAEVAYALYKLAAQENRPVTDHLDEQAVQGLKQIHQQLYDRQLYRGLGGQLMRQADLVIVPQMPPEHTVQGCHLSDVPMGARSCLLSGIKTIPHMSWTAGDLVALGV

SEQ ID NO: 802514 - protein, 218 aa, Homo sapiens
FSLEKCLHFFLFSFPDCCGLILPCHTCDLRVFSPCLSFHAPSGGLTLSSRPSISPCSLRHRFFWVSVPLLKTLDHVLTHGCFDIFTTEEDHPFAVKLLALCKKEIKNSKDIQKLLSGIAVFCGMVQFPGDVRRQALLQLCLLLCHRFPLIRKTTASQVYETLLTYSDVVGADVLDEVVTVLSDTAWDAELAVVREQRNRLCDLLGVPRPQLVPQPGAC

SEQ ID NO: 802515 - protein, 748 aa, Homo sapiens
MALSDEPAAGGPEEEAEDETLAFGAALEAFGESAETRALLGRLREVHGGGAEREVALERFRVIMDKYQEQPHLLDPHLEWMMNLLLDIVQDQTSPASLVHLAFKFLYIITKVRGYKTFLRLFPHEVADVEPVLDLVTIQNPKDHEAWETRYMLLLWLSVTCLIPFDFSRLDGNLLTQPGQARMSIMDRILQIAESYLIVSDKARDAAAVLVSRFITRPDVKQSKMAEFLDWSLCNLARSSFQTMQGVITMDGTLQALAQIFKHGKREDCLPYAATVLRCLDGCRLPESNQTLLRKLGVKLVQRLGLTFLKPKVAAWRYQRGCRSLAANLQLLTQGQSEQKPLILTEDDDEDDDVPEGVERVIEQLLVGLKDKDTVVRWSAAKGIGRMAGRLPRALADDVVGSVLDCFSFQETDKAWHGGCLALAELGRRGLLLPSRLVDVVAVILKALTYDEKRGACSVGTNVRDAACYVCWAFARAYEPQELKPFVTAISSALVIAAVFDRDINCRRAASAAFQENVGRQGTFPHGIDILTTADYFAVGNRSNCFLVISVFIAGFPEYTQPMIDHLVTMKISHWDGVIRELAARALHNLAQQAPEFSATQVFPRLLSMTLSPDLHMRHGSILACAEVAYALYKLAAQENRPVTDHLDEQAVQGLKQIHQQLYDRQLYRGLGGQLMRQAVCVLIEKLSLSKMPFRGDTVIDGWQWLINDTLRHLHLISSHSRQQMKRPAASQMSAARGIVRVQCVPLQ

SEQ ID NO: 802516 - protein, 147 aa, Homo sapiens
MSSDTEIRIPGNDLPVRSGHPFAVKLLALCKKEIKNSKDIQKLLSGIAVFCGMVQFPGDVRRQALLQLCLLLCHRFPLIRKTTASQVYETLLTYSDVVGADVLDEVVTVLSDTAWDAELAVVREQRNRLCDLLGVPRPQLVPQPGAC

SEQ ID NO: 802517 - protein, 110 aa, Homo sapiens
GAHLEPCAAPGRFCGMVQFPGDVRRQALLQLCLLLCHRFPLIRKTTASQVYETLLTYSDVVGADVLDEVVTVLSDTAWDAELAVVREQRNRLCDLLGVPRPQLVPQPGAC

SEQ ID NO: 802518 - protein, 517 aa, Homo sapiens
MALSDEPAAGGPEEEAEDETLAFGAALEAFGESAETRALLGRLREVHGGGAEREVALERFRVIMDKYQEQPHLLDPHLEWMMNLLLDIVQDQTSPASLVHLAFKFLYIITKVRGYKTFLRLFPHEVADVEPVLDLVTIQNPKDHEAWETRYMLLLWLSVTCLIPFDFSRLDGNLLTQPGQARMSIMDRILQIAESYLIVSDKARDAAAVLVSRFITRPDVKQSKMAEFLDWSLCNLARSSFQTMQGVITMDGTLQALAQIFKHGKREDCLPYAATVLRCLDGCRLPESNQTLLRKLGVKLVQRLGLTFLKPKVAAWRYQRGCRSLAANLQLLTQGQSEQKPLILTEDDDEDDDVPEGVERVIEQLLVGLKDKDTVVRWSAAKGIGRMAGRLPRALADDVVGSVLDCFSFQETDKAWHGGCLALAELGRRGLLLPSRLVDVVAVILKALTYDEKRGACSVGTNVRDAACYVCWAFARAYEPQELKPFVTAISSALVIAAVFDRDINCRRAASWDPLEQ

SEQ ID NO: 802519 - protein, 104 aa, Homo sapiens
YPSSSASHEWGRGWVRGPQKLPLCTSPARHSSSKVTKTSTSVLTGAGAQGCCAVSLVTRVGSFLSASFRQEVISEREEENHVQIHGGSGDGLSIRTQPPPFLCV

SEQ ID NO: 802520 - protein, 542 aa, Homo sapiens
MFNSVFIAGFPEYTQPMIDHLVTMKISHWDGVIRELAARALHNLAQQAPEFSATQVFPRLLSMTLSPDLHMRHGSILACAEVAYALYKLAAQENRPVTDHLDEQAVQGLKQIHQQPCICSWGLMSPESKAEFCVCVCRISLGRQCVHLSGLREILKGFCDPELYDRQLYRGLGGQLMRQAVCVLIEKLSLSKMPFRGDTVIDGWQWLINDTLRHLHLISSHSRQQMKDAAVSALAALCSEYYMKEPGEADPAIQEELITQYLAELRNPEEMTRCGFSLALGALPGFLLKGRLQQVLTGLRAVTHTSPEDVSFAESRRDGLKAIARICQTVGVKAGAPDEAVCGENVSQIYCALLGCMDDYTTDSRGDVGTWVRKAAMTSLMDLTLLLARSQPELIEAHTCERIMCCVAQQASEKIDRFRAHAASVFLTLLHFDSPPIPHVPHRGELEKLFPRSDVASVNWSAPSQAFPRITQLLGLPTYRYHVLLGLVVSLGGLTESTVRRRRAGWGRRWLQECLVLPCLLGACMELGLFFHCFLSLSGIFG

SEQ ID NO: 802521 - protein, 218 aa, Homo sapiens; identical to SEQ ID NO: 802514

SEQ ID NO: 802522 - protein, 273 aa, Homo sapiens
SGGSERTARGTDTGGRNHVVAVILKALTYDEKRGACSVGTNVRDAACYVCWAFARAYEPQELKPFVTAISSALVIAAVFDRDINCRRAASAAFQENVGRQGTFPHGIDILTTADYFAVGNRSNCFLVISVFIAGFPEYTQPMIDHLVTMKISHWDGVIRELAARALHNLAQQAPEFSATQVFPRLLSMTLSPDLHMRHGSILACAEVAYALYKLAAQENRPVTDHLDEQAVQGLKQIHQQLYDRSVIQGSGKDSHETSSVCLTRNSVPFQNAL

SEQ ID NO: 802523 - protein, 1192 aa, Homo sapiens [sequence omitted]

SEQ ID NO: 802524 - protein, 1230 aa, Homo sapiens
MALSDEPAAGGPEEEAEDETLAFGAALEAFGESAETRALLGRLREVHGGGAEREVALERFRVIMDKYQEQPHLLDPHLEWMMNLLLDIVQDQTSPASLVHLAFKFLYIITKVRGYKTFLRLFPHEVADVEPVLDLVTIQNPKDHEAWETRYMLLLWLSVTCLIPFDFSRLDGNLLTQPGQARMSIMDRILQIAESYLIVSDKARDAAAVLVSRFITRPDVKQSKMAEFLDWSLCNLARSSFQTMQGVITMDGTLQALAQIFKHGKREDCLPYAATVLRCLDGCRLPESNQTLLRKLGVKLVQRLGLTFLKPKVAAWRYQRGCRSLAANLQLLTQGQSEQKPLILTEDDDEDDDVPEGVERVIEQLLVGLKDKDTVVRWSAAKGIGRMAGRLPRALADDVVGSVLDCFSFQETDKAWHGGCLALAELGRRGLLLPSRLVDVVAVILKALTYDEKRGACSVGTNVRDAACYVCWAFARAYEPQELKPFVTAISSALVIAAVFDRDINCRRAASAAFQENVGRQGTFPHGIDILTTADYFAVGNRSNCFLVISVFIAGFPEYTQPMIDHLVTMKISHWDGVIRELAARALHNLAQQAPEFSATQVFPRLLSMTLSPDLHMRHGSILACAEVAYALYKLAAQENRPVTDHLDEQAVQGLKQIHQQLYDRQLYRGLGGQLMRQAVCVLIEKLSLSKMPFRGDTVIDGWQWLINDTLRHLHLISSHSRQQMKDAAVSALAALCSEYYMKEPGEADPAIQEELITQYLAELRNPEEMTRCGFSLALGALPGFLLKGRLQQVLTGLRAVTHTSPEDVSFAESRRDGLKAIARICQTVGVKAGAPDEAVCGENVSQIYCALLGCMDDYTTDSRGDVGTWVRKAAMTSLMDLTLLLARSQPELIEAHTCERIMCCVAQQASEKIDRFRAHAASVFLTLLHFDSPPIPHVPHRGELEKLFPRSDVASVNWSAPSQAFPRITQLLGLPTYRYHVLLGLVVSLGGLTESTIRHSTQSLFEYMKGIQSDPQALGSFSGTLLQIFEDNLLNERVSVPLLKTLDHVLTHGCFDIFTTEEDHPFAVKLLALCKKEIKNSKDIQKLLSGIAVDFPSATLACVGTVQMCAHTHLRLGAPGPHCAHGSALPRFCGMVQFPGDVRRQALLQLCLLLCHRFPLIRKTTASQVYETLLTYSDVVGADVLDEVVTVLSDTAWDAELAVVREQRNRLCDLLGVPRPQLVPQPGAC

SEQ ID NO: 802525 - protein, 1239 aa, Homo sapiens
MALSDEPAAGGPEEEAEDETLAFGAALEAFGESAETRALLGRLREVHGGGAEREVALERFRVIMDKYQEQPHLLDPHLEWMMNLLLDIVQDQTSPASLVHLAFKFLYIITKVRGYKTFLRLFPHEVADVEPVLDLVTIQNPKDHEAWETRYMLLLWLSVTCLIPFDFSRLDGNLLTQPGQARMSIMDRILQIAESYLIVSDKARDAAAVLVSRFITRPDVKQSKMAEFLDWSLCNLARSSFQTMQGVITMDGTLQALAQIFKHGKREDCLPYAATVLRCLDGCRLPESNQTLLRKLGVKLVQRLGLTFLKPKVAAWRYQRGCRSLAANLQLLTQGQSEQKPLILTEDDDEDDDVPEGVERVIEQLLVGLKDKDTVVRWSAAKGIGRMAGRLPRALADDVVGSVLDCFSFQETDKAWHGGCLALAELGRRGLLLPSRLVDVVAVILKALTYDEKRGACSVGTNVRDAACYVCWAFARAYEPQELKPFVTAISSALVIAAVFDRDINCRRAASAAFQENVGRQGTFPHGIDILTTADYFAVGNRSNCFLVISVFIAGFPEYTQPMIDHLVTMKISHWDGVIRELAARALHNLAQQAPEFSATQVFPRLLSMTLSPDLHMRHGSILACAEVAYALYKLAAQENRPVTDHLDEQAVQGLKQIHQQPCICSWGLMSPESKAEFCVCVCRISLGRQCVHLSGLREILKGFCDPELYDRQLYRGLGGQLMRQAVCVLIEKLSLSKMPFRGDTVIDGWQWLINDTLRHLHLISSHSRQQMKDAAVSALAALCSEYYMKEPGEADPAIQEELITQYLAELRNPEEMTRCGFSLALGALPGFLLKGRLQQVLTGLRAVTHTSPEDVSFAESRRDGLKAIARICQTVGVKAGAPDEAVCGENVSQIYCALLGCMDDYTTDSRGDVGTWVRKAAMTSLMDLTLLLARSQPELIEAHTCERIMCCVAQQASEKIDRFRAHAASVFLTLLHFDSPPIPHVPHRGELEKLFPRSDVASVNWSAPSQAFPRITQLLGLPTYRYHVLLGLVVSLGGLTESTIRHSTQSLFEYMKGIQSDPQALGSFSGTLLQIFEDNLLNERVSVPLLKTLDHVLTHGCFDIFTTEEDHPFAVKLLALCKKEIKNSKDIQKLLSGIAVFCGMVQFPGDVRRQALLQLCLLLCHRFPLIRKTTASQVYETLLTYSDVVGADVLDEVVTVLSDTAWDAELAVVREQRNRLCDLLGVPRPQLVPQPGAC

SEQ ID NO: 802526 - protein, 1064 aa, Homo sapiens
MALSDEPAAGGPEEEAEDETLAFGAALEAFGESAETRALLGRLREVHGGGAEREVALERFRVIMDKYQEQPHLLDPHLEWMMNLLLDIVQDQTSPASLVHLAFKFLYIITKVRGYKTFLRLFPHEVADVEPVLDLVTIQNPKDHEAWETRYMLLLWLSVTCLIPFDFSRLDGNLLTQPGQARMSIMDRILQIAESYLIVSDKARDAAAVLVSRFITRPDVKQSKMAEFLDWSLCNLARSSFQTMQGVITMDGTLQALAQIFKHGKREDCLPYAATVLRCLDGCRLPESNQTLLRKLGVKLVQRLGLTFLKPKVAAWRYQRGCRSLAANLQLLTQGQSEQKPLILTEDDDEDDDVPEGVERVIEQLLVGLKDKDTVVRWSAAKGIGRMAGRLPRALADDVVGSVLDCFSFQETDKAWHGGCLALAELGRRGLLLPSRLVDVVAVILKALTYDEKRGACSVGTNVRDAACYVCWAFARAYEPQELKPFVTAISSALVIAAVFDRDINCRRAASAAFQENVGRQGTFPHGIDILTTADYFAVGNRSNCFLVISVFIAGFPEYTQPMIDHLVTMKISHWDGVIRELAARALHNLAQQAPEFSATQVFPRLLSMTLSPDLHMRHGSILACAEVAYALYKLAAQENRPVTDHLDEQAVQGLKQIHQQLYDRQLYRGLGGQLMRQAVCVLIEKLSLSKMPFRGDTVIDGWQWLINDTLRHLHLISSHSRQQMKDAAVSALAALCSEYYMKEPGEADPAIQEELITQYLAELRNPEEMTRCGFSLALGALPGFLLKGRLQQVLTGLRAVTHTSPEDVSFAESRRDGLKAIARICQTVGVKAGAPDEAVCGENVSQIYCALLGCMDDYTTDSRGDVGTWVRKAAMTSLMDLTLLLARSQPELIEAHTCERIMCCVAQQASEKIDRFRAHAASVFLTLLHFDSPPIPHVPHRGELEKLFPRSDVASVNWSAPSQAFPRITQLLGLPTYRYHVLLGLVVSLGGLTESTIRHSTQSLFEYMKGIQSDPQALGSFSGTLLQIFEDNLLNERVSVPLLKTLDHVLTHGCFDIFTTEEE

SEQ ID NO: 802527 - protein, 764 aa, Homo sapiens [sequence omitted]

SEQ ID NO: 802528 - protein, 678 aa, Homo sapiens
RNGQTGFESNCAEFPPTGSEFSFFRVSPPLHAVFSSVFIAGFPEYTQPMIDHLVTMKISHWDGVIRELAARALHNLAQQAPEFSATQVFPRLLSMTLSPDLHMRHGSILACAEVAYALYKLAAQENRPVTDHLDEQAVQGLKQIHQQLYDRQLYRGLGGQLMRQAVCVLIEKLSLSKMPFRGDTVIDGWQWLINDTLRHLHLISSHSRQQMKDAAVSALAALCSEYYMKEPGEADPAIQEELITQYLAELRNPEEMTRCGFSLALGALPGFLLKGRLQQVLTGLRAVTHTSPEDVSFAESRRDGLKAIARICQTVGVKAGAPDEAVCGENVSQIYCALLGCMDDYTTDSRGDVGTWVRKAAMTSLMDLTLLLARSQPELIEAHTCERIMCCVAQQASEKIDRFRAHAASVFLTLLHFDSPPIPHVPHRGELEKLFPRSDVASVNWSAPSQAFPRITQLLGLPTYRYHVLLGLVVSLGGLTESTIRHSTQSLFEYMKGIQSDPQALGSFSGTLLQIFEDNLLNERVSVPLLKTLDHVLTHGCFDIFTTEEDHPFAVKLLALCKKEIKNSKDIQKLLSGIAVFCGMVQFPGDVRRQALLQLCLLLCHRFPLIRKTTASQVYETLLTYSDVVGADVLDEVVTVLSDTAWDAELAVVREQRNRLCDLLGVPRPQLVPQPGAC

SEQ ID NO: 802529 - protein, 678 aa, Homo sapiens
MGLRPMEGTFPHGIDILTTADYFAVGNRSNCFLVISVFIAGFPEYTQPMIDHLVTMKISHWDGVIRELAARALHNLAQQAPEFSATQVFPRLLSMTLSPDLHMRHGSILACAEVAYALYKLAAQENRPVTDHLDEQAVQGLKQIHQQLYDRQLYRGLGGQLMRQAVCVLIEKLSLSKMPFRGDTVIDGWQWLINDTLRHLHLISSHSRQQMKDAAVSALAALCSEYYMKEPGEADPAIQEELITQYLAELRNPEEMTRCGFSLALGALPGFLLKGRLQQVLTGLRAVTHTSPEDVSFAESRRDGLKAIARICQTVGVKAGAPDEAVCGENVSQIYCALLGCMDDYTTDSRGDVGTWVRKAAMTSLMDLTLLLARSQPELIEAHTCERIMCCVAQQASEKIDRFRAHAASVFLTLLHFDSPPIPHVPHRGELEKLFPRSDVASVNWSAPSQAFPRITQLLGLPTYRYHVLLGLVVSLGGLTESTIRHSTQSLFEYMKGIQSDPQALGSFSGTLLQIFEDNLLNERVSVPLLKTLDHVLTHGCFDIFTTEEDHPFAVKLLALCKKEIKNSKDIQKLLSGIAVFCGMVQFPGDVRRQALLQLCLLLCHRFPLIRKTTASQVYETLLTYSDVVGADVLDEVVTVLSDTAWDAELAVVREQRNRLCDLLGVPRPQLVPQPGAC

SEQ ID NO: 802530 - protein, 468 aa, Homo sapiens [sequence omitted]

SEQ ID NO: 802531 - protein, 337 aa, Homo sapiens
MDDYTTDSRGDVGTWVRKAAMTSLMDLTLLLARSQPELIEAHTCERIMCCVAQQASEKIDRFRAHAASVFLTLLHFDSPPIPHVPHRGELEKLFPRSDVASVNWSAPSQAFPRITQLLGLPTYRYHVLLGLVVSLGGLTESTIRHSTQSLFEYMKGIQSDPQALGSFSGTLLQIFEDNLLNERVSVPLLKTLDHVLTHGCFDIFTTEEDHPFAVKLLALCKKEIKNSKDIQKLLSGIAVFCGMVQFPGDVRRQALLQLCLLLCHRFPLIRKTTASQVYETLLTYSDVVGADVLDEVVTVLSDTAWDAELAVVREQRNRLCDLLGVPRPQLVPQPGAC

SEQ ID NO: 802532 - protein, 306 aa, Homo sapiens
CDLADPFCGCLSCERIMCCVAQQASEKIDRFRAHAASVFLTLLHFDSPPIPHVPHRGELEKLFPRSDVASVNWSAPSQAFPRITQLLGLPTYRYHVLLGLVVSLGGLTESTIRHSTQSLFEYMKGIQSDPQALGSFSGTLLQIFEDNLLNERVSVPLLKTLDHVLTHGCFDIFTTEEDHPFAVKLLALCKKEIKNSKDIQKLLSGIAVFCGMVQFPGDVRRQALLQLCLLLCHRFPLIRKTTASQVYETLLTYSDVVGADVLDEVVTVLSDTAWDAELAVVREQRNRLCDLLGVPRPQLVPQPGAC

SEQ ID NO: 802533 - protein, 161 aa, Homo sapiens
TAPSPLRVSVPLLKTLDHVLTHGCFDIFTTEEDHPFAVKLLALCKKEIKNSKDIQKLLSGIAVFCGMVQFPGDVRRQALLQLCLLLCHRFPLIRKTTASQVYETLLTYSDVVGADVLDEVVTVLSDTAWDAELAVVREQRNRLCDLLGVPRPQLVPQPGAC

SEQ ID NO: 802534 - protein, 742 aa, Homo sapiens
MALSDEPAAGGPEEEAEDETLAFGAALEAFGESAETRALLGRLREVHGGGAEREVALERFRVIMDKYQEQPHLLDPHLEWMMNLLLDIVQDQTSPASLVHLAFKFLYIITKVRGYKTFLRLFPHEVADVEPVLDLVTIQNPKDHEAWETRYMLLLWLSVTCLIPFDFSRLDGNLLTQPGQARMSIMDRILQIAESYLIVSDKARDAAAVLVSRFITRPDVKQSKMAEFLDWSLCNLARSSFQTMQGVITMDGTLQALAQIFKHGKREDCLPYAATVLRCLDGCRLPESNQTLLRKLGVKLVQRLGLTFLKPKVAAWRYQRGCRSLAANLQLLTQGQSEQKPLILTEDDDEDDDVPEGVERVIEQLLVGLKDKDTVVRWSAAKGIGRMAGRLPRALADDVVGSVLDCFSFQETDKAWHGGCLALAELGRRGLLLPSRLVDVVAVILKALTYDEKRGACSVGTNVRDAACYVCWAFARAYEPQELKPFVTAISSALVIAAVFDRDINCRRAASAAFQENVGRQGTFPHGIDILTTADYFAVGNRSNCFLVISVFIAGFPEYTQPMIDHLVTMKISHWDGVIRELAARALHNLAQQAPEFSATQVFPRLLSMTLSPDLHMRHGSILACAEVAYALYKLAAQENRPVTDHLDEQAVQGLKQIHQQLYDRQLYRGLGGQLMRQAVCVLIEKLSLSKMPFRGDTVIDGWQWLINDTLRHLHLISSHSRQQMKMQQSRPCGATEMHKAT

SEQ ID NO: 802535 - protein, 798 aa, Homo sapiens
MALSDEPAAGGPEEEAEDETLAFGAALEAFGESAETRALLGRLREVHGGGAEREVALERFRVIMDKYQEQPHLLDPHLEWMMNLLLDIVQDQTSPASLVHLAFKFLYIITKVRGYKTFLRLFPHEVADVEPVLDLVTIQNPKDHEAWETRYMLLLWLSVTCLIPFDFSRLDGNLLTQPGQARMSIMDRILQIAESYLIVSDKARDAAAVLVSRFITRPDVKQSKMAEFLDWSLCNLARSSFQTMQGVITMDGTLQALAQIFKHGKREDCLPYAATVLRCLDGCRLPESNQTLLRKLGVKLVQRLGLTFLKPKVAAWRYQRGCRSLAANLQLLTQGQSEQKPLILTEDDDEDDDVPEGVERVIEQLLVGLKDKDTVVRWSAAKGIGRMAGRLPRALADDVVGSVLDCFSFQETDKAWHGGCLALAELGRRGLLLPSRLVDVVAVILKALTYDEKRGACSVGTNVRDAACYVCWAFARAYEPQELKPFVTAISSALVIAAVFDRDINCRRAASAAFQENVGRQGTFPHGIDILTTADYFAVGNRSNCFLVISVFIAGFPEYTQPMIDHLVTMKISHWDGVIRELAARALHNLAQQAPEFSATQVFPRLLSMTLSPDLHMRHGSILACAEVAYALYKLAAQENRPVTDHLDEQAVQGLKQIHQQLYDRQLYRGLGGQLMRQAVCVLIEKLSLSKMPFRGDTVIDGWQWLINDTLRHLHLISSHSRQQMKDAAVSALAALCSESRSPRRSCVRRECFPDLLCAAGLHGRLHHGQQRGRGHLGPQGRHDQSDGSDTSAGSEPA

SEQ ID NO: 802536 - protein, 475 aa, Homo sapiens
MALSDEPAAGGPEEEAEDETLAFGAALEAFGESAETRALLGRLREVHGGGAEREVALERFRVIMDKYQEQPHLLDPHLEWMMNLLLDIVQDQTSPASLVHLAFKFLYIITKVRGYKTFLRLFPHEVADVEPVLDLVTIQNPKDHEAWETRYMLLLWLSVTCLIPFDFSRLDGNLLTQPGQARMSIMDRILQIAESYLIVSDKARDAAAVLVSRFITRPDVKQSKMAEFLDWSLCNLARSSFQTMQGVITMDGTLQALAQIFKHGKREDCLPYAATVLRCLDGCRLPESNQTLLRKLGVKLVQRLGLTFLKPKVAAWRYQRGCRSLAANLQLLTQGQSEQKPLILTEDDDEDDDVPEGVERVIEQLLVGLKDKDTVVRWSAAKGIGRMAGRLPRALADDVVGSVLDCFSFQETDKAWHGGCLALAELGRRGLLLPSRLVDVGTVILKALTYDEKRAPQQGPLDTRQNSVGPRPSPN

SEQ ID NO: 802537 - protein, 930 aa, Homo sapiens [sequence omitted]

SEQ ID NO: 802538 - protein, 808 aa, Homo sapiens
MLLGWASLLLCAFRLPLAAVGPAATPAQDKAGQPPTAAAAAQPRRRQGEEVQERAEPPGHPHPLAQRRRSKGLVQNIDQLYSGGGKVGYLVYAGGRRFLLDLERDGSVGIAGFVPAGGGTSAPWRHRSHCFYRGTVDASPRSLAVFDLCGGLDGFFAVKHARYTLKPLLRGPWAEEEKGRVYGDGSARILHVYTREGFSFEALPPRASCETPASTPEAHEHAPAHSNPSGRAALASQLLDQSALSPAGGSGPQTWWRRRRRSISRARQVELLLVADASMARLYGRGLQHYLLTLASIANRLYSHASIENHIRLAVVKVVVLGDKDKSLEVSKNAATTLKNFCKWQHQHNQLGDDHEEHYDAAILFTREDLCGHHSCDTLGMADVGTICSPERSCAVIEDDGLHAAFTVAHEIGHLLGLSHDDSKFCEETFGSTEDKRLMSSILTSIDASKPWSKCTSATITEFLDDGHGNCLLDLPRKQILGPEELPGQTYDATQQCNLTFGPEYSVCPGMDVCARLWCAVVRQGQMVCLTKKLPAVEGTPCGKGRICLQGKCVDKTKKKYYSTSSHGNWGSWGSWGQCSRSCGGGVQFAYRHCNNPAPRNNGRYCTGKRAIYHSCSLMPCPPNGKSFRHEQCEAKNGYQSDAKGVKTFVEWVPKYAGVLPADVCKLTCRAKGTGYYVVFSPKVTDGTECRPYSNSVCVRGKCVRTGCDGIIGSKLQYDKCGVCGGDNSSCTKIVGTFNKKSKGYTDVVRIPEGATHIKVRQFKAKDQTRFTAYLALKKKNEVGAAEAGNQSFILGTLAHAVCFLRPK

SEQ ID NO: 802539 - protein, 930 aa, Homo sapiens [sequence omitted]

SEQ ID NO: 802540 - protein, 408 aa, Homo sapiens
MSKRDIVLTNVTVVQLLRQPCPVTRAPPPPEPKAEVEPQPQPEPTPVREEIKPPPPPLPPHPATPPPKMVSVARELTVGINGFGRIGRLVLRACMEKGVKVVAVNDPFIDPEYMVYMFKYDSTHGRYKGSVEFRNGQLVVDNHEISVYQCKEPKQIPWRAVGSPYVVESTGVYLSIQAASDHISAGAQRVVISAPSPDAPMFVMGVNENDYNPGSMNIVSNASCTTNCLAPLAKVIHERFGIVEGLMTTVHSYTATQKTVDGPSRKAWRDGRGAHQNIIPASTGAAKAVTKVIPELKGKLTGMAFRVPTPDVSVVDLTCRLAQPAPYSAIKEAVKAAAKGPMAGILAYTEDEVVSTDFLGDTHSSIFDAKAGIALNDNFVKLISWYDNEYGYSHRVVDLLRYMFSRDK

SEQ ID NO: 802541 - protein, 395 aa, Homo sapiens
NPFPPFPRIVTRAPPPPEPKAEVEPQPQPEPTPVREEIKPPPPPLPPHPATPPPKMVSVARELTVGINGFGRIGRLVLRACMEKGVKVVAVNDPFIDPEYMVYMFKYDSTHGRYKGSVEFRNGQLVVDNHEISVYQCKEPKQIPWRAVGSPYVVESTGVYLSIQAASDHISAGAQRVVISAPSPDAPMFVMGVNENDYNPGSMNIVSNASCTTNCLAPLAKVIHERFGIVEGLMTTVHSYTATQKTVDGPSRKAWRDGRGAHQNIIPASTGAAKAVTKVIPELKGKLTGMAFRVPTPDVSVVDLTCRLAQPAPYSAIKEAVKAAAKGPMAGILAYTEDEVVSTDFLGDTHSSIFDAKAGIALNDNFVKLISWYDNEYGYSHRVVDLLRYMFSRDK

SEQ ID NO: 802542 - protein, 118 aa, Homo sapiens
MDYEGGAQAGETDSALPLPHSKEPKQIPWRAVGSPYVVESTGVYLSIQAASVSWGEVPRASWGDDGAKKPLTPALPPQDHISAGAQRVVISAPSPDAPMFVMGVNENDYNPGSMNIVR

SEQ ID NO: 802543 - protein, 110 aa, Homo sapiens
NLVSLEEDLKEGASRAQTMGNSLLKERAIYVLVRIISKRERTWPPPAMSPYWRTWMTITQSWQRNCAGCQASPLWATTGGSVWALGEAAMSKAPLQGPERALIKGMDCTL

SEQ ID NO: 802544 - protein, 303 aa, Homo sapiens
MEHLGPHHLHPGHAEPISFGIDQILNSPDQGGCMGPASRLQDGEYGLGCLVGGAYTYGGGGSAAATGAGGAGAYGTGGPGGPGGPAGGGGACSMGPLTGSYNVNMALAGGPGPGGGGGSSGGAGALSAAGVIRVPAHRPLAGAVAHPQPLATGLPTVPSVPAMPGVNNLTGLTFPWMESNRRYTKDRFTGHPYQNRTPPKKKNRGLTTRPKSLASRRWRRPASEPAHSALWDPRPTQGSLRPETQDSSPPSWPQTAPRRGTLPSHGPEGPPHLCRHCSPFGGRAQGTRTRAPLPEASRTCLNC

SEQ ID NO: 802545 - protein, 330 aa, Homo sapiens
MEHLGPHHLHPGHAEPISFGIDQILNSPDQGGCMGPASRLQDGEYGLGCLVGGAYTYGGGGSAAATGAGGAGAYGTGGPGGPGGPAGGGGACSMGPLTGSYNVNMALAGGPGPGGGGGSSGGAGALSAAGVIRVPAHRPLAGAVAHPQPLATGLPTVPSVPAMPGVNNLTGLTFPWMESNRRYTKDRFTGHPYQNRTPPKKKKPRTSFTRLQICELEKRFHRQKYLASAERAALAKALKMTDAQVKTWFQNRRTKWRRQTAEEREAERQQANRILLQLQQEAFQKSLAQPLPADPLCVHNSSLFALQNLQPWSDDSTKITSVTSVASACE

SEQ ID NO: 802546 - protein, 342 aa, Homo sapiens
MEHLGPHHLHPGHAEPISFGIDQILNSPDQGGCMGPASRLQDGEYGLGCLVGGAYTYGGGGSAAATGAGGAGAYGTGGPGGPGGPAGGGGACSMGPLTGSYNVNMALAGGPGPGGGGGSSGGAGALSAAGVIRVPAHRPLAGAVAHPQPLATGLPTVPSVPAMPGVNNLTGLTFPWMESNRRYTKDRFTVALSPFTVTRRIGHPYQNRTPPKKKKPRTSFTRLQICELEKRFHRQKYLASAERAALAKALKMTDAQVKTWFQNRRTKWRRQTAEEREAERQQANRILLQLQQEAFQKSLAQPLPADPLCVHNSSLFALQNLQPWSDDSTKITSVTSVASACE

SEQ ID NO: 802547 - protein, 321 aa, Homo sapiens
AKADSAIVPTRLGGGVRQRPIVESYIGFIESYRDPFGSRGEFEGFVAVVNKAMSAKFERLVASAEQLLKELPWPPTFEKDKFLTPDFTSLDVLTFAGSGIPAGINIPNYDDLRQTEGFKNVSLGNVLAVAYATQREKLTFLEEDDKDLYILWKGPSFDVQVGLHELLGHGSGKLFVQDEKGAFNFDQETVINPETGEQIQSWYRSGETWDSKFSTIASSYEECRAESVGLYLCLHPQVLEEDLGLKAADARKDGIYVTWPHGRSGCSPGVQNTEAYNGDRAISGRVGPENWRREKGSYITHKVQGQTGAPDKPPGNPPKAP

SEQ ID NO: 802548 - protein, 757 aa, Homo sapiens
MGEPEAGSEFANGAAAAAGPMADTQYILPNDIGVSSLDCREAFRLLSPTERLYAYHLSRAAWYGGLAVLLQTSPEAPYIYALLSRLFRAQDPDQLRQHALAEGLTEEEYQAFLVYAAGVYSNMGNYKSFGDTKFVPNLPKEKLERVILGSEAAQQHPEEVRGLWQTCGELMFSLEPRLRHLGLGKEGITTYFSGNCTMEDAKLAQDFLDSQNLSAYNTRLFKEVDGEGKPYYEVRLASVLGSEPSLDSEVTSKLKSYEFRGSPFQVTRGDYAPILQKVVEQLEKAKAYAANSHQGQMLAQYIESFTQGSIEAHKRGSRFWIQDKGPIVESYIGFIESYRDPFGSRGEFEGFVAVVNKAMSAKFERLVASAEQLLKELPWPPTFEKDKFLTPDFTSLDVLTFAGSGIPAGINIPNYDDLRQTEGFKNVSLGNVLAVAYATQREKLTFLEEDDKDLYILWKGPSFDVQVGLHELLGHGSGKLFVQDEKGAFNFDQETVINPETGEQIQSWYRSGETWDSKFSTIASSYEECRAESVGLYLCLHPQVLEIFGFEGADAEDVIYVNWLNMVRAGLLALEFYTPEAFNWRQAHMQARFVILRVLLEAGEGLVTITPTTGSDGRPDARVRLDRSKIRSVGKPALERFLRRLQVLKSTGDVAGGRALYEGYATVTDAPPECFLTLRDTVLLRKESRKLIVQPNTRLEGSDVQLLEYEASAAGLIRSFSERFPEDGPELEEILTQLATADARFWKGPSEAPSGQA

SEQ ID NO: 802549 - protein, 737 aa, Homo sapiens
MADTQYILPNDIGVSSLDCREAFRLLSPTERLYAYHLSRAAWYGGLAVLLQTSPEAPYIYALLSRLFRAQDPDQLRQHALAEGLTEEEYQAFLVYAAGVYSNMGNYKSFGDTKFVPNLPKEKLERVILGSEAAQQHPEEVRGLWQTCGELMFSLEPRLRHLGLGKEGITTYFSGNCTMEDAKLAQDFLDSQNLSAYNTRLFKEVDGEGKPYYEVRLASVLGSEPSLDSEVTSKLKSYEFRGSPFQVTRGDYAPILQKVVEQLEKAKAYAANSHQGQMLAQYIESFTQGSIEAHKRGSRFWIQDKGPIVESYIGFIESYRDPFGSRGEFEGFVAVVNKAMSAKFERLVASAEQLLKELPWPPTFEKDKFLTPDFTSLDVLTFAGSGIPAGINIPNYDDLRQTEGFKNVSLGNVLAVAYATQREKLTFLEEDDKDLYILWKGPSFDVQVGLHELLGHGSGKLFVQDEKGAFNFDQETVINPETGEQIQSWYRSGETWDSKFSTIASSYEECRAESVGLYLCLHPQVLEIFGFEGADAEDVIYVNWLNMVRAGLLALEFYTPEAFNWRQAHMQARFVILRVLLEAGEGLVTITPTTGSDGRPDARVRLDRSKIRSVGKPALERFLRRLQVLKSTGDVAGGRALYEGYATVTDAPPECFLTLRDTVLLRKESRKLIVQPNTRLEGSDVQLLEYEASAAGLIRSFSERFPEDGPELEEILTQLATADARFWKGPSEAPSGQA

SEQ ID NO: 802550 - protein, 740 aa, Homo sapiens
MVGGRVEIRRGANDIGVSSLDCREAFRLLSPTERLYAYHLSRAAWYGGLAVLLQTSPEAPYIYALLSRLFRAQDPDQLRQHALAEGLTEEEYQAFLVYAAGVYSNMGNYKSFGDTKFVPNLPKEKLERVILGSEAAQQHPEEVRGLWQTCGELMFSLEPRLRHLGLGKEGITTYFSGNCTMEDAKLAQDFLDSQNLSAYNTRLFKEVDGEGKPYYEVRLASVLGSEPSLDSEVTSKLKSYEFRGSPFQVTRGDYAPILQKVVEQLEKAKAYAANSHQGQMLAQYIESFTQGSIEAHKRGSRFWIQDKGPIVESYIGFIESYRDPFGSRGEFEGFVAVVNKAMSAKFERLVASAEQLLKELPWPPTFEKDKFLTPDFTSLDVLTFAGSGIPAGINIPNYDDLRQTEGFKNVSLGNVLAVAYATQREKLTFLEEDDKDLYILWKGPSFDVQVGLHELLGHGSGKLFVQDEKGAFNFDQETVINPETGEQIQSWYRSGETWDSKFSTIASSYEECRAESVGLYLCLHPQVLEIFGFEGADAEDVIYVNWLNMVRAGLLALEFYTPEAFNWRQAHMQARFVILRVLLEAGEGLVTITPTTGSDGRPDARVRLDRSKIRSVGKPALERFLRRLQVLKSTGDVAGGRALYEGYATVTDAPPECFLTLRDTVLLRKESRKLIVQPNTRLEGSDVQLLEYEASAAGLIRSFSERFPEDGPELEEILTQLATADARFWKGPSEAPSGQA

SEQ ID NO: 802551 - protein, 759 aa, Homo sapiens
MAGSSRGLNRHEANGAAAAAGPMADTQYILPNDIGVSSLDCREAFRLLSPTERLYAYHLSRAAWYGGLAVLLQTSPEAPYIYALLSRLFRAQDPDQLRQHALAEGLTEEEYQAFLVYAAGVYSNMGNYKSFGDTKFVPNLPKEKLERVILGSEAAQQHPEEVRGLWQTCGELMFSLEPRLRHLGLGKEGITTYFSGNCTMEDAKLAQDFLDSQNLSAYNTRLFKEVDGEGKPYYEVRLASVLGSEPSLDSEVTSKLKSYEFRGSPFQVTRGDYAPILQKVVEQLEKAKAYAANSHQGQMLAQYIESFTQGSIEAHKRGSRFWIQDKGPIVESYIGFIESYRDPFGSRGEFEGFVAVVNKAMSAKFERLVASAEQLLKELPWPPTFEKDKFLTPDFTSLDVLTFAGSGIPAGINIPNYDDLRQTEGFKNVSLGNVLAVAYATQREKLTFLEEDDKDLYILWKGPSFDVQVGLHELLGHGSGKLFVQDEKGAFNFDQETVINPETGEQIQSWYRSGETWDSKFSTIASSYEECRAESVGLYLCLHPQVLEIFGFEGADAEDVIYVNWLNMVRAGLLALEFYTPEAFNWRQAHMQARFVILRVLLEAGEGLVTITPTTGSDGRPDARVRLDRSKIRSVGKPALERFLRRLQVLKSTGDVAGGRALYEGYATVTDAPPECFLTLRDTVLLRKESRKLIVQPNTRLEGSDVQLLEYEASAAGLIRSFSERFPEDGPELEEILTQLATADARFWKGPSEAPSGQA

SEQ ID NO: 802552 - protein, 759 aa, Homo sapiens; identical to SEQ ID NO: 802551

SEQ ID NO: 802553 - protein, 451 aa, Homo sapiens
AKADSAIVPTRLGGGVRQRPIVESYIGFIESYRDPFGSRGEFEGFVAVVNKAMSAKFERLVASAEQLLKELPWPPTFEKDKFLTPDFTSLDVLTFAGSGIPAGINIPNYDDLRQTEGFKNVSLGNVLAVAYATQREKLTFLEEDDKDLYILWKGPSFDVQVGLHELLGHGSGKLFVQDEKGAFNFDQETVINPETGEQIQSWYRSGETWDSKFSTIASSYEECRAESVGLYLCLHPQVLEIFGFEGADAEDVIYVNWLNMVRAGLLALEFYTPEAFNWRQAHMQARFVILRVLLEAGEGLVTITPTTGSDGRPDARVRLDRSKIRSVGKPALERFLRRLQVLKSTGDVAGGRALYEGYATVTDAPPECFLTLRDTVLLRKESRKLIVQPNTRLEGSDVQLLEYEASAAGLIRSFSERFPEDGPELEEILTQLATADARFWKGPSEAPSGQA

SEQ ID NO: 802554 - protein, 272 aa, Homo sapiens
NLEDPDSTEAVINPETGEQIQSWYRSGETWDSKFSTIASSYEECRAESVGLYLCLHPQVLEIFGFEGADAEDVIYVNWLNMVRAGLLALEFYTPEAFNWRQAHMQARFVILRVLLEAGEGLVTITPTTGSDGRPDARVRLDRSKIRSVGKPALERFLRRLQVLKSTGDVAGGRALYEGYATVTDAPPECFLTLRDTVLLRKESRKLIVQPNTRLEGSDVQLLEYEASAAGLIRSFSERFPEDGPELEEILTQLATADARFWKGPSEAPSGQA

SEQ ID NO: 802555 - protein, 503 aa, Homo sapiens
PWLDRGRGLNRHEANGAAAAAGPMADTQYILPNDIGVSSLDCREAFRLLSPTERLYAYHLSRAAWYGGLAVLLQTSPEAPYIYALLSRLFRAQDPDQLRQHALAEGLTEEEYQAFLVYAAGVYSNMGNYKSFGDTKFVPNLPKEKLERVILGSEAAQQHPEEVRGLWQTCGELMFSLEPRLRHLGLGKEGITTYFSGNCTMEDAKLAQDFLDSQNLSAYNTRLFKEVDGEGKPYYEVRLASVLGSEPSLDSEVTSKLKSYEFRGSPFQVTRGDYAPILQKVVEQLEKAKAYAANSHQGQMLAQYIESFTQGSIEAHKRGSRFWIQDKGPIVESYIGFIESYRDPFGSRGEFEGFVAVVNKAMSAKFERLVASAEQLLKELPWPPTFEKDKFLTPDFTSLDVLTFAGSGIPAGINIPNYDDLRQTEGFKNVSLGNVLAVAYATQREKLTFLEEDDKDLYILWKGPSFDVQVGLHELLGHGSGKLFVQDEKGAFNFDQETVIVGL

SEQ ID NO: 802556 - protein, 341 aa, Homo sapiens
LVINGDIYAVGRKTGIGAAAAAGPMADTQYILPNDIGVSSLDCREAFRLLSPTERLYAYHLSRAAWYGGLAVLLQTSPEAPYIYALLSRLFRAQDPDQLRQHALAEGLTEEEYQAFLVYAAGVYSNMGNYKSFGDTKFVPNLPKEKLERVILGSEAAQQHPEEVRGLWQTCGELMFSLEPRLRHLGLGKEGITTYFSGNCTMEDARVRLDRSKIRSVGKPALERFLRRLQVLKSTGDVAGGRALYEGYATVTDAPPECFLTLRDTVLLRKESRKLIVQPNTRLEGSDVQLLEYEASAAGLIRSFSERFPEDGPELEEILTQLATADARFWKGPSEAPSGQA

SEQ ID NO: 802557 - protein, 396 aa, Homo sapiens
PWLDRGRGLNRHEANGAAAAAGPMADTQYILPNDIGVSSLDCREAFRLLSPTERLYAYHLSRAAWYGGLAVLLQTSPEAPYIYALLSRLFRAQDPDQLRQHALAEGLTEEEYQAFLVYAAGVYSNMGNYKSFGDTKFVPNLPKEKLERVILGSEAAQQHPEEVRGLWQTCGELMFSLEPRLRHLGLGKEGITTYFSGNCTMEDAKLAQDFLDSQNLSAYNTRLFKEVDGEGKPYYEVRLASVLGSEPSLDSEVTSKLKSYEFRGSPFQVTRGDYAPILQKVVEQLEKAKAYAANSHQGQMLAQYIESFTQGSIEAHKRGSRFWIQDKGPIVESYIGFIESYRDPFGSRGEFEGFVAVVNKAMSAKFERLVASAEQLLKELPWPPTALSSLPIASPL

SEQ ID NO: 802558 - protein, 70 aa, Homo sapiens
SQSPNEWGSRKQEVSLRTEQLLQQGPWRTPSTSCPMTSACLAWTAVRQHFPACQLLPLCDLISSALPYVE

SEQ ID NO: 802559 - protein, 307 aa, Homo sapiens
KRSWYGLGCLDAAAAGPMADTQYILPNDIGVSSLDCREAFRLLSPTERLYAYHLSRAAWYGGLAVLLQTSPEAPYIYALLSRLFRAQDPDQLRQHALAEGLTEEEYQAFLVYAAGVYSNMGNYKSFGDTKFVPNLPKEKLERVILGSEAAQQHPEEVRGLWQTCGELMFSLEPRLRHLGLGKEGITTYFSGNCTMEDAKLAQDFLDSQNLSAYNTRLFKEVDGEGKPYYEVRLASVLGSEPSLDSEVTSKLKSYEFRGSPFQVTRGDYAPISKLGARKASLSQSPAHGPYNPPARPKGPARTPRVPT

SEQ ID NO: 802560 - protein, 759 aa, Homo sapiens; identical to SEQ ID NO: 802551

SEQ ID NO: 802561 - protein, 761 aa, Homo sapiens
LVINGDIYAVGRKTGIGAAAAAGPMADTQYILPNDIGVSSLDCREAFRLLSPTERLYAYHLSRAAWYGGLAVLLQTSPEAPYIYALLSRLFRAQDPDQLRQHALAEGLTEEEYQAFLVYAAGVYSNMGNYKSFGDTKFVPNLPKEKLERVILGSEAAQQHPEEVRGLWQTCGELMFSLEPRLRHLGLGKEGITTYFSGNCTMEDAKLAQDFLDSQNLSAYNTRLFKEVDGEGKPYYEVRLASVLGSEPSLDSEVTSKLKSYEFRGSPFQVTRGDYAPILQKVVEQLEKAKAYAANSHQGQMLAQYIESFTQGSIEAHKRGSRFWIQDKGPIVESYIGFIESYRDPFGSRGEFEGFVAVVNKAMSAKFERLVASAEQLLKELPWPPTFEKDKFLTPDFTSLDVLTFAGSGIPAGINIPNYDDLRQTEGFKNVSLGNVLAVAYATQREKLTFLEEDDKDLYILWKGPSFDVQVGLHELLGHGSGKLFVQDEKGAFNFDQETVINPETGEQIQSWYRSGETWDSKFSTIASSYEECRAESVGLYLCLHPQVLEIFGFEGADAEDVIYVNWLNMVRAGLLALEFYTPEAFNWRQAHMQARFVILRVLLEAGEGLVTITPTTGSDGRPDARVRLDRSKIRSVGKPALERFLRRLQVLKSTGDVAGGRALYEGYATVTDAPPECFLTLRDTVLLRKESRKLIVQPNTRLEGSDVQLLEYEASAAGLIRSFSERFPEDGPELEEILTQLATADARFWKGPSEAPSGQA

SEQ ID NO: 802562 - protein, 510 aa, Homo sapiens
MAGSSRGLNRHEANGAAAAAGPMADTQYILPNDIGVSSLDCREAFRLLSPTERLYAYHLSRAAWYGGLAVLLQTSPEAPYIYALLSRLFRAQDPDQLRQHALAEGLTEEEYQAFLVYAAGVYSNMGNYKSFGDTKFVPNLPKEKLERVILGSEAAQQHPEEVRGLWQTCGELMFSLEPRLRHLGLGKEGITTYFSGNCTMEDAKLAQDFLDSQNLSAYNTRLFKEVDGEGKPYYEVRLASVLGSEPSLDSEVTSKLKSYEFRGSPFQVTRGDYAPILQKVVEQLEKAKAYAANSHQGQMLAQYIESFTQGSIEAHKRGSRFWIQDKGPIVESYIGFIESYRDPFGSRGEFEGFVAVVNKAMSAKFERLVASAEQLLKELPWPPTFEKDKFLTPDFTSLDVLTFAGSGIPAGINIPNYDDLRQTEGFKNVSLGNVLAVAYATQREKLTFLEEDDKDLYILWKGPSFDVQVGLHELLGHGSGKLFVQDEKGAFNFDQETVINPETGEQDLWL

SEQ ID NO: 802563 - protein, 759 aa, Homo sapiens; identical to SEQ ID NO: 802551

SEQ ID NO: 802564 - protein, 399 aa, Homo sapiens
MSAKFERLVASAEQLLKELPWPPTFEKDKFLTPDFTSLDVLTFAGSGIPAGINIPNYDDLRQTEGFKNVSLGNVLAVAYATQREKLTFLEEDDKDLYILWKGPSFDVQVGLHELLGHGSGKLFVQDEKGAFNFDQETVINPETGEQIQSWYRSGETWDSKFSTIASSYEECRAESVGLYLCLHPQVLEIFGFEGADAEDVIYVNWLNMVRAGLLALEFYTPEAFNWRQAHMQARFVILRVLLEAGEGLVTITPTTGSDGRPDARVRLDRSKIRSVGKPALERFLRRLQVLKSTGDVAGGRALYEGYATVTDAPPECFLTLRDTVLLRKESRKLIVQPNTRLEGSDVQLLEYEASAAGLIRSFSERFPEDGPELEEILTQLATADARFWKGPSEAPSGQA

SEQ ID NO: 802565 - protein, 265 aa, Homo sapiens
GTLSPTVELLFQIQSWYRSGETWDSKFSTIASSYEECRAESVGLYLCLHPQVLEIFGFEGADAEDVIYVNWLNMVRAGLLALEFYTPEAFNWRQAHMQARFVILRVLLEAGEGLVTITPTTGSDGRPDARVRLDRSKIRSVGKPALERFLRRLQVLKSTGDVAGGRALYEGYATVTDAPPECFLTLRDTVLLRKESRKLIVQPNTRLEGSDVQLLEYEASAAGLIRSFSERFPEDGPELEEILTQLATADARFWKGPSEAPSGQA

SEQ ID NO: 802566 - protein, 393 aa, Homo sapiens
PWLDRGRGLNRHEANGAAAAAGPMADTQYILPNDIGVSSLDCREAFRLLSPTERLYAYHLSRAAWYGGLAVLLQTSPEAPYIYALLSRLFRAQDPDQLRQHALAEGLTEEEYQAFLVYAAGVYSNMGNYKSFGDTKFVPNLPKEKLERVILGSEAAQQHPEEVRGLWQTCGELMFSLEPRLRHLGLGKEGITTYFSGNCTMEDAKLAQDFLDSQNLSAYNTRLFKEVDGEGKPYYEVRLASVLGSEPSLDSEVTSKLKSYEFRGSPFQVTRGDYAPILQKVVEQLEKAKAYAANSHQGQMLAQYIESFTQGSIEAHKRGSRFWIQDKGPIVESYIGFIESYRDPFGSRGEFEGFVAVVNKAMSAKFERLVASAEQLLKELPWPPTFEKDKFLS

SEQ ID NO: 802567 - protein, 341 aa, Homo sapiens; identical to SEQ ID NO: 802556

SEQ ID NO: 802568 - protein, 168 aa, Homo sapiens
MVGPSSCSVPLNKPGGMEGPRAPPPYQAQALQGEPAETPEPVLDPGPLTLPTPSSVPGRGLGQSSWSSAGRPSSPSSGRHSPLSGRRPRGAEPGRVLGVHPSLRRQVPQGPTHLKPACTVEVVEVDTPRGFSKARLAAPCSGKLNYSRFRSSVDSHQSGGVLKEFYVD

SEQ ID NO: 802569 - protein, 168 aa, Homo sapiens; identical to SEQ ID NO: 802568

SEQ ID NO: 802570 - protein, 116 aa, Homo sapiens
MAGRSRPFPPLPGNRGSPQTDLRETSPRFRAPPAEPRARGLTRGPTQGPPERQDSGPDLQRLQAQRPQAAWAERRFQALARSLNCRKIFQHCFYKSLFRPNQRGDRGELKTPFFHV

SEQ ID NO: 802571 - protein, 168 aa, Homo sapiens; identical to SEQ ID NO: 802568

SEQ ID NO: 802572 - protein, 104 aa, Homo sapiens [sequence omitted]

SEQ ID NO: 802573 - protein, 105 aa, Homo sapiens
AGWYWSGVYGSPRAQPALVPAASRAPPPRAAEAGVAAALVPRTAARAGAGGDAAVTPPAGRVRAPWLAARALSHRCRETEARPKRICVKPAQGSGPPQPSPAPGD

SEQ ID NO: 802574 - protein, 340 aa, Homo sapiens
MNPFHASCWNTSAELLNKSWNKEFAYQTASVVDTVILPSMIGIICSTGLVGNILIVFTIIRSRKKTVPDIYICNLAVADLVHIVGMPFLIHQWARGGEWVFGGPLCTIITSLDTCNQFACSAIMTVMSVDRYFALVQPFRLTRWRTRYKTIRINLGLWAASFILALPVWVYSKVIKFKDGVESCAFDLTSPDDVLWYTLYLTITTFFFPLPLILVCYILILCYTWEMYQQNKDARCCNPSVPKQRVMKLTKMVLVLVVVFILSAAPYHVIQLVNLQMEQPTLAFYVGYYLSICLSYASSSINPFLYILLSGNFQKRLPQIQRRATEKEINNMGNTLKSHF

SEQ ID NO: 802575 - protein, 196 aa, Homo sapiens
MNPFHASCWNTSAELLNKSWNKEFAYQTASVVDTVILPSMIGIICSTGLVGNILIVFTIIRSRKKTVPDIYICNLAVADLVHIVGMPFLIHQWARGGEWVFGGPLCTIITSLDTCNQFACSAIMTVMSVDRYFALVQPFRLTRWRTRYKTIRINLGLWAASFILALPVWVYSKVIKFKDGVESCAFDLTSPDDVLW

SEQ ID NO: 802576 - protein, 186 aa, Homo sapiens
MYEAGVNRPCGFRGGYVEVVNMDAAVQQQMLKLMSVRLCPPVPGQALLDLVVSPPAPTDPSFAQFQAEKQAVLAELAAKAKLTEQVFNEAPGISCNPVQGAMYSFPRVQLPPRAVERAQELGLAPDMFFCLRLLEETGICVVPGSGFGQREGTYHFRMTILPPLEKLRLLLEKLSRFHAKFTLEYS

SEQ ID NO: 802577 - protein, 496 aa, Homo sapiens
MASSTGDRSQAVRHGLRAKVLTLDGMNPRVRRVEYAVRGPIVQRALELEQELRQGVKKPFTEVIRANIGDAQAMGQRPITFLRQVLALCVNPDLLSSPNFPDDAKKRAERILQACGGHSLGAYSVSSGIQLIREDVARYIERRDGGIPADPNNVFLSTGASDAIVTVLKLLVAGEGHTRTGVLIPIPQYPLYSATLAELGAVQVDYYLDEERAWALDVAELHRALGQARDHCRPRALCVINPGNPTGQVQTRECIEAVIRFAFEERLFLLADEVYQDNVYAAGSQFHSFKKVLMEMGPPYAGQQELASFHSTSKGYMGECGFRGGYVEVVNMDAAVQQQMLKLMSVRLCPPVPGQALLDLVVSPPAPTDPSFAQFQAEKQAVLAELAAKAKLTEQVFNEAPGISCNPVQGAMYSFPRVQLPPRAVERAQELGLAPDMFFCLRLLEETGICVVPGSGFGQREGTYHFRMTILPPLEKLRLLLEKLSRFHAKFTLEYS

SEQ ID NO: 802578 - protein, 489 aa, Homo sapiens
MASSTGDRSQAVRHGLRAKVLTLDGMNPRVRRVEYAVRGPIVQRALELEQELRQGVKKPFTEVIRANIGDAQAMGQRPITFLRQVLALCVNPDLLSSPNFPDDAKKRAERILQACGGHSLGAYSVSSGIQLIREDVARYIERRDGGIPADPNNVFLSTGASDAIVTVLKLLVAGEGHTRTGVLIPIPQYPLYSATLAELGAVQVDYYLDEERAWALDVAELHRALGQARDHCRPRALCVINPGNPTGQVQTRECIEAVIRFAFEERLFLLADEVRGAGEREAGQQSAPVTPCAFQVYQDNVYAAGSQFHSFKKVLMEMGPPYAGQQELASFHSTSKGYMGECGFRGGYVEVVNMDAAVQQQMLKLMSVRLCPPVPGQALLDLVVSPPAPTDPSFAQFQAEKQAVLAELAAKAKLTEQVFNEAPGISCNPVQGAMYSFPRVQLPPRAVERAQELGLAPDMFFCLRLLEETGICVVPGSGFGQREGTYHFR

SEQ ID NO: 802579 - protein, 496 aa, Homo sapiens; identical to SEQ ID NO: 802577

SEQ ID NO: 802580 - protein, 496 aa, Homo sapiens; identical to SEQ ID NO: 802577

SEQ ID NO: 802581 - protein, 410 aa, Homo sapiens
SPVLPILSCPSPGAYSVSSGIQLIREDVARYIERRDGGIPADPNNVFLSTGASDAIVTVLKLLVAGEGHTRTGVLIPIPQYPLYSATLAELGAVQVDYYLDEERAWALDVAELHRALGQARDHCRPRALCVINPGNPTGQVQTRECIEAVIRFAFEERLFLLADEVRGAGEREAGQQSAPVTPCAFQVYQDNVYAAGSQFHSFKKVLMEMGPPYAGQQELASFHSTSKGYMGECGFRGGYVEVVNMDAAVQQQMLKLMSVRLCPPVPGQALLDLVVSPPAPTDPSFAQFQAEKQAVLAELAAKAKLTEQVFNEAPGISCNPVQGAMYSFPRVQLPPRAVERAQELGLAPDMFFCLRLLEETGICVVPGSGFGQREGTYHFRMTILPPLEKLRLLLEKLSRFHAKFTLEYS

SEQ ID NO: 802582 - protein, 147 aa, Homo sapiens
SLSDGSPSTGAGPGPRYVLLPAPPGGDRHLRGARERLWAAGRHLPLPVRPGPHSLSRHPGPSLTVNSFQDDHSAPLGETAAAAGEAEQVPCQVHPRVLLSTPAGARLGRPGLCAQEPWEALEPTVLALDAWRGGVGGVLGPCLSAGP

SEQ ID NO: 802583 - protein, 53 aa, Homo sapiens
MKRQFGRLHSLFWKSWQKMNSFLLTPKLDTSLMSGWRYRQRLPRLHTFLKKSL

SEQ ID NO: 802584 - protein, 343 aa, Homo sapiens
MLVVQMPFSFPMAHFILFVFTVSTIFHVQQRLAKIQAMWELPVQIPVLASTSKALGPSQLRGMWTINAIGRLGNQMGEYATLYALAKMNGRPAFIPAQMHSTLAPIFRITLPVLHSATASRIPWQNYHLNDWMEEEYRHIPGEYVRFTGYPCSWTFYHHLRQEILQEFTLHDHVREEAQKFLRGLQVNGSRPGTFVGVHVRRGDYVHVMPKVWKGVVADRRYLQQALDWFRARYSSLIFVVTSNGMAWCRENIDTSHGDVVFAGDGIEGSPAKDFALLTQCNHTIMTIGTFGIWAAYLTGGDTIYLANYTLPDSPFLKIFKPEAAFLPEWTGIAADLSPLLKH

SEQ ID NO: 802585 - protein, 343 aa, Homo sapiens; identical to SEQ ID NO: 802584

SEQ ID NO: 802586 - protein, 343 aa, Homo sapiens; identical to SEQ ID NO: 802584

SEQ ID NO: 802587 - protein, 373 aa, Homo sapiens
MLKRKPSNVSEKEKHQKPKRSSSFGNFDRFRNNSLSKPDDSTEAHEGDPTNGSGEQSKTSNNGGGLGKKMRAISWTMKKKVGKKYIKALSEEKDEEDGENAHPYRNSDPVIGTHTEKVSLKASDSMDSLYSGQSSSSGITSCSDGTSNRDSFRLDDDGPYSGPFCGRARVHTDFTPSPYDTDSLKIKKGDIIDIICKTPMGMWTGMLNNKVGNFKFIYVDVISEEEAAPKKIKANRRSNSKKSKTLQEFLERIHLQEYTSTLLLNGYETLEDLKDIKESHLIELNIENPDDRRRLLSAAENFLEEEIIQEQENEPEPLSLSSDISLNKSQLDDCPRDSGCYISSGNSDNGKEDLESENLSDMVHKIIITEPSD

SEQ ID NO: 802588 - protein, 194 aa, Homo sapiens
MLKRKPSNVSEKEKHQKPKRSSSFGNFDRFRNNSLSKPDDSTEAHEGDPTNGSGEQSKTSNNGGGLGKKMRAISWTMKKKVGKKYIKALSEEKDEEDGENAHPYRNSDPVIGTHTEKVSLKASDSMDSLYSGQSSSSGITSCSDGTSNRDSFRLDDDGPYSGPFCGRARFLYPFSPSFYPFLPLYLQGRYFDIF

SEQ ID NO: 802589 - protein, 358 aa, Homo sapiens
MLKRKPSNVSEKEKHQKPKRSSSFGNFDRFRNNSLSKPDDSTEAHEGDPTNGSGEQSKTSNNGGGLGKKMRAISWTMKKKVGKKYIKALSEEKDEEDGENAHPYRNSDPVIGTHTEKVSLKASDSMDSLYSGQSSSSGITSCSDGTSNRDSFRLDDDGPYSGPFCGRARVHTDFTPSPYDTDSLKIKWTGMLNNKVGNFKFIYVDVISEEEAAPKKIKANRRSNSKKSKTLQEFLERIHLQEYTSTLLLNGYETLEDLKDIKESHLIELNIENPDDRRRLLSAAENFLEEEIIQEQENEPEPLSLSSDISLNKSQLDDCPRDSGCYISSGNSDNGKEDLESENLSDMVHKIIITEPSD

SEQ ID NO: 802590 - protein, 373 aa, Homo sapiens; identical to SEQ ID NO: 802587

SEQ ID NO: 802591 - protein, 441 aa, Homo sapiens
MEIRLDTLSASLGRSSTLNNCNLEDKLAWYEGEAYMWHHWKPFPENPLWTCLDFQIAQVGPWDHCSSCIRHTRLKSSCSDMDLLHSWRSSSFGNFDRFRNNSLSKPDDSTEAHEGDPTNGSGEQSKTSNNGGGLGKKMRAISWTMKKKVGKKYIKALSEEKDEEDGENAHPYRNSDPVIGTHTEKVSLKASDSMDSLYSGQSSSSGITSCSDGTSNRDSFRLDDDGPYSGPFCGRARVHTDFTPSPYDTDSLKIKKGDIIDIICKTPMGMWTGMLNNKVGNFKFIYVDVISEEEAAPKKIKANRRSNSKKSKTLQEFLERIHLQEYTSTLLLNGYETLEDLKDIKESHLIELNIENPDDRRRLLSAAENFLEEEIIQEQENEPEPLSLSSDISLNKSQLDDCPRDSGCYISSGNSDNGKEDLESENLSDMVHKIIITEPSD

SEQ ID NO: 802592 - protein, 357 aa, Homo sapiens
MLKRKPSNVSEKEKHQKPKRSSSFGNFDRFRNNSLSKPDDSTEAHEGDPTNGSGEQSKTSNNGGGLGKKMRAISWTMKKKVGKKYIKALSEEKVIGTHTEKVSLKASDSMDSLYSGQSSSSGITSCSDGTSNRDSFRLDDDGPYSGPFCGRARVHTDFTPSPYDTDSLKIKKGDIIDIICKTPMGMWTGMLNNKVGNFKFIYVDVISEEEAAPKKIKANRRSNSKKSKTLQEFLERIHLQEYTSTLLLNGYETLEDLKDIKESHLIELNIENPDDRRRLLSAAENFLEEEIIQEQENEPEPLSLSSDISLNKSQLDDCPRDSGCYISSGNSDNGKEDLESENLSDMVHKIIITEPSD

SEQ ID NO: 802593 - protein, 106 aa, Homo sapiens
MRRACMGGVRVRLPDRCPRWDFEVRPACVPRGALFPEGFPGREQNRAASGAAWLCVFLCDCWMFPCVFLCVRVSVCVVCGERNVARAVKRGFSVVRLRSDAPVSLA

SEQ ID NO: 802594 - protein, 751 aa, Homo sapiens
MRLLGAAAVAALGRGRAPASLGWQRKQVNWKACRWSSSGVIPNEKIRNIGISAHIDSGKTTLTERVLYYTGRIAKMHEVKGKDGVGAVMDSMELERQRGITIQSAATYTMWKDVNINIIDTPGHVDFTIEVERALRVLDGAVLVLCAVGGVQCQTMTVNRQMKRYNVPFLTFINKLDRMGSNPARALQQMRSKLNHNAAFMQIPMGLEGNFKGIVDLIEERAIYFDGDFGQIVRYGEIPAELRAAATDHRQELIECVANSDEQLGEMFLEEKIPSISDLKLAIRRATLKRSFTPVFLGSALKNKGVQPLLDAVLEYLPNPSEVQNYAILNKEDDSKEKTKILMNSSRDNSHPFVGLAFKLEVGRFGQLTYVRSYQGELKKGDTIYNTRTRKKVRLQRLARMHADMMEDVEEVYAGDICALFGIDCASGDTFTDKANSGLSMESIHVPDPVISIAMKPSNKNDLEKFSKGIGRFTREDPTFKVYFDTENKETVISGMGELHLEIYAQRLEREYGCPCITGKPKVAFRETITAPVPFDFTHKKQSGGAGQYGKVIGVLEPLDPEDYTKLEFSDETFGSNIPKQFVPAVEKGFLDACEKGPLSGHKLSGLRFVLQDGAHHMVDSNEISFIRAGEGALKQALANATLCILEPIMAVEVVAPNEFQGQVIAGINRRHGVITGQDGVEDYFTLYADVPLNDMFGYSTELRSCTEGKGEYTMEYSRYQPCLPSTQEDVINKYLEATGQLPVKKGKAKN

SEQ ID NO: 802595 - protein, 730 aa, Homo sapiens
MRLLGAAAVAALGRGRAPASLGWQRKQVNWKACRWSSSGVIPNEKIRNIGISAHIDSGKTTLTERVLYYTGRIAKMHEVKGKDGVGAVMDSMELERQRGITIQSAATYTMWKDVNINIIDTPGHVDFTIEVERALRVLDGAVLVLCAVGGVQCQTMTVNRQMKRYNVPFLTFINKLDRMGSNPARALQQMRSKLNHNAAFMQIPMGLEGNFKGIVDLIEERAIYFDGDFGQIVRYGEIPAELRAAATDHRQELIECVANSDEQLGEMFLEEKIPSISDLKLAIRRATLKRSFTPVFLGSALKNKGVQPLLDAVLEYLPNPSEVQNYAILNKEDKSENRILVGRFGQLTYVRSYQGELKKGDTIYNTRTRKKVRLQRLARMHADMMEDVEEVYAGDICALFGIDCASGDTFTDKANSGLSMESIHVPDPVISIAMKPSNKNDLEKFSKGIGRFTREDPTFKVYFDTENKETVISGMGELHLEIYAQRLEREYGCPCITGKPKVAFRETITAPVPFDFTHKKQSGGAGQYGKVIGVLEPLDPEDYTKLEFSDETFGSNIPKQFVPAVEKGFLDACEKGPLSGHKLSGLRFVLQDGAHHMVDSNEISFIRAGEGALKQALANATLCILEPIMAVEVVAPNEFQGQVIAGINRRHGVITGQDGVEDYFTLYADVPLNDMFGYSTELRSCTEGKGEYTMEYSRYQPCLPSTQEDVINKYLEATGQLPVKKGKAKN

SEQ ID NO: 802596 - protein, 751 aa, Homo sapiens; identical to SEQ ID NO: 802594

SEQ ID NO: 802597 - protein, 410 aa, Homo sapiens
MRLLGAAAVAALGRGRAPASLGWQRKQVNWKACRWSSSGVIPNEKIRNIGISAHIDSGKTTLTERVLYYTGRIAKMHEVKGKDGVGAVMDSMELERQRGITIQSAATYTMWKDVNINIIDTPGHVDFTIEVERALRVLDGAVLVLCAVGGVQCQTMTVNRQMKRYNVPFLTFINKLDRMGSNPARALQQMRSKLNHNAAFMQIPMGLEGNFKGIVDLIEERAIYFDGDFGQIVRYGEIPAELRAAATDHRQELIECVANSDEQLGEMFLEEKIPSISDLKLAIRRATLKRSFTPVFLGSALKNKGVQPLLDAVLEYLPNPSEVQNYAILNKEDDSKEKTKILMNSSRDNSHPFVGLAFKLEFLSRSFFRLTRQKDHRRPIQRTTLYLIVMSPYDLLGCNSFLDFPCFSRD

SEQ ID NO: 802598 - protein, 751 aa, Homo sapiens; identical to SEQ ID NO: 802594

SEQ ID NO: 802599 - protein, 702 aa, Homo sapiens
MRLLGAAAVAALGRGRAPASLGWQRKQVNWKACRWSSSGVIPNEKIRNIGISAHIDSGKTTLTERVLYYTGRIAKMHEVKGKDGVGAVMDSMELERQRGITIQSAATYTMWKDVNINIIDTPGHVDFTIEVERALRVLDGAVLVLCAVGGVQCQTMTVNRQMKRYNVPFLTFINKLDRMGSNPARALQQMRSKLNHNAAFMQIPMGLEGNFKGIVDLIEERAIYFDGDFGQIVRYGEIPAELRAAATDHRQELIECVANSDEQLGEMFLEEKIPSISDLKLAIRRATLKRSFTPVFLGSALKNKGVQPLLDAVLEYLPNPSEVQNYAILNKEDDSKEKTKILMNSSRDNSHPFVGLAFKLEVGRFGQLTYVRSYQGELKKGDTIYNTRTRKKVRLQRLARMHADMMEDVEEVYAGDICALFGIDCASGDTFTDKANSGLSMESIHVPDPVISIAMKPSNKNDLEKFSKGIGRFTREDPTFKVYFDTENKETVISGMGELHLEIYAQRLEREYGCPCITGKPKVAFRETITAPVPFDFTHKKQSGGAGQYGKVIGVLEPLDPEDYTKLEFSDETFGSNIPKQFVPAVEKGFLDACEKGPLSGHKLSGLRFVLQDGAHHMVDSNEISFIRAGEGALKQALANATLCILEPIMAVEVVAPNEFQGQVIAGINRRHGVITGQDGVEDYFTLYADVSSLGHWQSCFY

SEQ ID NO: 802600 - protein, 591 aa, Homo sapiens
MRLLGAAAVAALGRGRAPASLGWQRKQVNWKACRWSSSGVIPNEKIRNIGISAHIDSGKTTLTERVLYYTGRIAKMHEVKGKDGVGAVMDSMELERQRGITIQSAATYTMWKDVNINIIDTPGHVDFTIEVERALRVLDGAVLVLCAVGGVQCQTMTVNRQMKRYNVPFLTFINKLDRMGSNPARALQQMRSKLNHNAAFMQIPMGLEGNFKGIVDLIEERAIYFDGDFGQIVRYGEIPAELRAAATDHRQELIECVANSDEQLGEMFLEEKIPSISDLKLAIRRATLKRSFTPVFLGSALKNKGVQPLLDAVLEYLPNPSEVQNYAILNKEDDSKEKTKILMNSSRDNSHPFVGLAFKLEVGRFGQLTYVRSYQGELKKGDTIYNTRTRKKVRLQRLARMHADMMEDVEEVYAGDICALFGIDCASGDTFTDKANSGLSMESIHVPDPVISIAMKPSNKNDLEKFSKGIGRFTREDPTFKVYFDTENKETVISGMGELHLEIYAQRLEREYGCPCITGKPKVAFRETITAPVPFDFTHKKQSGGAGQYGKVIGVLEPLDPEDYTKLEFSDETFGSNIPKQFVPAVEKVNF

SEQ ID NO: 802601 - protein, 751 aa, Homo sapiens; identical to SEQ ID NO: 802594

SEQ ID NO: 802602 - protein, 751 aa, Homo sapiens; identical to SEQ ID NO: 802594

SEQ ID NO: 802603 - protein, 230 aa, Homo sapiens [sequence omitted]

SEQ ID NO: 802604 - protein, 229 aa, Homo sapiens
MAEDKTKPSELDQGKYDADDNVKIICLGDSAVGKSKLMERFLMDGFQPQQLSTYALTLYKHTATVDGRTILVDFWDTAGQERFQSMHASYYHKAHACIMVFDVQRKVTYRNLSTWYTELREFRPEIPCIVVANKIDADINVTQKSFNFAKKFSLPLYFVSAADGTNVVKLFNDAIRLAVSYKQNSQDFMDEIFQELENFSLEQEEEDVPDQEQSSSIETPSEEAASPHS

SEQ ID NO: 802605 - protein, 145 aa, Homo sapiens
MAEDKTKPSELDQGKYDADDNVKIICLGDSAVGKSKLMERFLMDGFQPQQLSTYALTLYKHTATVDGRTILVDFWDTAGQERFQSMHASYYHKAHACIMVFDVQRKVTYRNLSTWYTELREFRPEIPCIVVANKIDGGAIPAPGC

SEQ ID NO: 802606 - protein, 145 aa, Homo sapiens; identical to SEQ ID NO: 802605

SEQ ID NO: 802607 - protein, 145 aa, Homo sapiens; identical to SEQ ID NO: 802605

SEQ ID NO: 802608 - protein, 145 aa, Homo sapiens; identical to SEQ ID NO: 802605

SEQ ID NO: 802609 - protein, 117 aa, Homo sapiens
MAEDKTKPSELDQGKYDADDNVKIICLGDSAVGKSKLMERFLMDGFQPQQLSTYALTLYKHTATVDGRTILVDFWDTAGQERFQSMHASYYHKAHACIMLTASCICCISVGSPQTLF

SEQ ID NO: 802610 - protein, 235 aa, Homo sapiens
MAEDKTKPSELDQGKYDADDNVKIICLGDSAVGKSKLMERFLMDGFQPQQLSTYALTLYKHTATVDGRTILVDFWDTAGQERFQSMHASYYHKAHACIMVFDVQRKVTYRNLSTWYTELREFRPEIPCIVVANKIDADINVTQKSFNFAKKFSLPLYFVSAADGTNVVKVWLTAELFNDAIRLAVSYKQNSQDFMDEIFQELENFSLEQEEEDVPDQEQSSSIETPSEEAASPHS

SEQ ID NO: 802611 - protein, 229 aa, Homo sapiens; identical to SEQ ID NO: 802604

SEQ ID NO: 802612 - protein, 229 aa, Homo sapiens; identical to SEQ ID NO: 802604

SEQ ID NO: 802613 - protein, 235 aa, Homo sapiens; identical to SEQ ID NO: 802610

SEQ ID NO: 802614 - protein, 90 aa, Homo sapiens
LDQGKYDADDNVKIICLGDSAVGKSKYVGRLGNKYQPQRGSRSFKKSSRGRGAWLLGAGEGAVLAGAQMFMGERGESREPLCVSGGGGRS

SEQ ID NO: 802615 - protein, 137 aa, Homo sapiens
SSCEDAGRAGSGVCCGASWAGGRGSRARRVQTGGRARGADPQRPWSLQPSLGTAREGKSAPVAGLARGDSPSEASLAVWARGRPGRGKHGKVASRGCCGGRDGQPGDAWTWLVAKNIYRKIAYPLRWQGHGQASLRP

SEQ ID NO: 802616 - protein, 145 aa, Homo sapiens; identical to SEQ ID NO: 802605

SEQ ID NO: 802617 - protein, 145 aa, Homo sapiens; identical to SEQ ID NO: 802605

SEQ ID NO: 802618 - protein, 145 aa, Homo sapiens; identical to SEQ ID NO: 802605

SEQ ID NO: 802619 - protein, 229 aa, Homo sapiens; identical to SEQ ID NO: 802604

SEQ ID NO: 802620 - protein, 229 aa, Homo sapiens; identical to SEQ ID NO: 802604

SEQ ID NO: 802621 - protein, 145 aa, Homo sapiens; identical to SEQ ID NO: 802605

SEQ ID NO: 802622 - protein, 127 aa, Homo sapiens
MMKLCKPKNMGKEETQEATLSPQGPLPARPPATVWDVSAVAPGGPAAGQPRAAWPRRLTAAVKGFWATRPSFSTFYFVFAIFVVSTIFHCHQHLALVPAPWAYSARVVLAPRHLPREDLFTINSKGR

SEQ ID NO: 802623 - protein, 86 aa, Homo sapiens
AGGSRPRLSLHTSPQAEGAGSGLGQPRDRLPQCSGGLKGSSSTARVDTEAEEDAKSDETSFWFKSFFRFHYGLFFYRCADVHSATF

SEQ ID NO: 802624 - protein, 52 aa, Homo sapiens
MCFSIEFSLVLKMSEKGHLGLAPAGSSGRAGGWGAATAGGTAGGAAGASPAP

SEQ ID NO: 802625 - protein, 225 aa, Homo sapiens
MASQARAVIPVLSQGFPGPKPALISWMEQESEAWSPAAQDPEKGERLGGARRGDVPNRKEEEPEEVPRAKGPRKAPVKESPEVLVERNPDPAISVAPARAQPPKNAAWDPTTGAQPPAPIPSMDAQAGQRRHVCTDCGRRFTYPSLLVSHRRMHSGERPFPCPECGMRFKRKFAVEAHQWIHRSCSGGRRGRRPGIRAVPRAPVRGDRDPPVLFRHYPDIFEECG

SEQ ID NO: 802626 - protein, 220 aa, Homo sapiens
MPSSHDGLSGFPGPKPALISWMEQESEAWSPAAQDPEKGERLGGARRGDVPNRKEEEPEEVPRAKGPRKAPVKESPEVLVERNPDPAISVAPARAQPPKNAAWDPTTGAQPPAPIPSMDAQAGQRRHVCTDCGRRFTYPSLLVSHRRMHSGERPFPCPECGMRFKRKFAVEAHQWIHRSCSGGRRGRRPGIRAVPRAPVRGDRDPPVLFRHYPDIFEECG

SEQ ID NO: 802627 - protein, 103 aa, Homo sapiens
MDAQAGQRRHVCTDCGRRFTYPSLLVSHRRMHSGERPFPCPECGMRFKRKFAVEAHQWIHRSCSGGRRGRRPGIRAVPRAPVRGDRDPPVLFRHYPDIFEECG

SEQ ID NO: 802628 - protein, 103 aa, Homo sapiens; identical to SEQ ID NO: 802627

SEQ ID NO: 802629 - protein, 262 aa, Homo sapiens
MPRSPLRSSLSTEASGPRGPFKCPASPRPITAQLLPGSSPIIGRCVLRVQRGFPGPKPALISWMEQESEAWSPAAQDPEKGERLGGARRGDVPNRKEEEPEEVPRAKGPRKAPVKESPEVLVERNPDPAISVAPARAQPPKNAAWDPTTGAQPPAPIPSMDAQAGQRRHVCTDCGRRFTYPSLLVSHRRMHSGERPFPCPECGMRFKRKFAVEAHQWIHRSCSGGRRGRRPGIRAVPRAPVRGDRDPPVLFRHYPDIFEECG

SEQ ID NO: 802630 - protein, 262 aa, Homo sapiens
MAPPPAPLLAPRPGETRPGCRKPGTVSFADVAVYFSPEEWGCLRPAQRALYRDVMQETYGHLGALGFPGPKPALISWMEQESEAWSPAAQDPEKGERLGGARRGDVPNRKEEEPEEVPRAKGPRKAPVKESPEVLVERNPDPAISVAPARAQPPKNAAWDPTTGAQPPAPIPSMDAQAGQRRHVCTDCGRRFTYPSLLVSHRRMHSGERPFPCPECGMRFKRKFAVEAHQWIHRSCSRILRRGKDWEELGEEMSPDIFEECG

SEQ ID NO: 802631 - protein, 276 aa, Homo sapiens
MAPPPAPLLAPRPGETRPGCRKPGTVSFADVAVYFSPEEWGCLRPAQRALYRDVMQETYGHLGALGFPGPKPALISWMEQESEAWSPAAQDPEKGERLGGARRGDVPNRKEEEPEEVPRAKGPRKAPVKESPEVLVERNPDPAISVAPARAQPPKNAAWDPTTGAQPPAPIPSMDAQAGQRRHVCTDCGRRFTYPSLLVSHRRMHSGERPFPCPECGMRFKRKFAVEAHQWIHRSCSGGRRGRRPGIRAVPRAPVRGDRDPPVLFRHYPDIFEECG

SEQ ID NO: 802632 - protein, 199 aa, Homo sapiens
MEQESEAWSPAAQDPEKGERLGGARRGDVPNRKEEEPEEVPRAKGPRKAPVKESPEVLVERNPDPAISVAPARAQPPKNAAWDPTTGAQPPAPIPSMDAQAGQRRHVCTDCGRRFTYPSLLVSHRRMHSGERPFPCPECGMRFKRKFAVEAHQWIHRSCSGGRRGRRPGIRAVPRAPVRGDRDPPVLFRHYPDIFEECG

SEQ ID NO: 802633 - protein, 199 aa, Homo sapiens; identical to SEQ ID NO: 802632

SEQ ID NO: 802634 - protein, 103 aa, Homo sapiens; identical to SEQ ID NO: 802627

SEQ ID NO: 802635 - protein, 276 aa, Homo sapiens; identical to SEQ ID NO: 802631

SEQ ID NO: 802636 - protein, 545 aa, Homo sapiens
EILCPLSGRLFGCCRHLMATRVEEAARGRGGGAEEATEAGRGGRRRSPRQKFEIGTMEEAGICGLGVKADMLCNSQSNDILQHQGSNCGGTSNKHSLEEDEGSDFITENRNLVSPAYCTQESREEIPGGEARTDPPDGQQDSECNRNKEKTLGKEVLLLMQALNTLSTPEEKLAALCKKYADLLEESRSVQKQMKILQKKQAQIVKEKVHLQSEHSKAILARSKLESLCRELQRHNKTLKEENMQQAREEEERRKEATAHFQITLNEIQAQLEQHDIHNAKLRQENIELGEKLKKLIEQYALREEHIDKVFKHKELQQQLVDAKLQQTTQLIKEADEKHQREREFLLKEATESRHKYEQMKQQEVQLKQQLSLYMDKFEEFQTTMAKSNELFTTFRQEMEKMTKKIKKLEKETIIWRTKWENNNKALLQMAEEKTVRDKEYKALQIKLERLEKLCRALQTERNELNEKVEVLKEQVSIKAAIKAANRDLATPVMQPCTALDSHKELNTSSKRALGAHLEAEPKSQRSAVQKPPSTGSAPAIESVD

SEQ ID NO: 802637 - protein, 545 aa, Homo sapiens; identical to SEQ ID NO: 802636

SEQ ID NO: 802638 - protein, 86 aa, Homo sapiens
PGGAALLGPGKAGRQGRGQESPTLGVLRARAAVPLCALSPPPRKTSCTCEGHFRSFLSVRLECNGAIMAHCALHLPGSSHPPISAS

SEQ ID NO: 802639 - protein, 114 aa, Homo sapiens
HLPPPNGYSGSEMREIAEILPAQEKVEARIDLKMGKKPVTDHKLNVDKVIKNINTISSELKKIKELSQLLLCDLILHFNHPIKTENLAEAERNNPLFEESKISDVSLVSNSFSI

SEQ ID NO: 802640 - protein, 81 aa, Homo sapiens
EELGRWRQSHCGSLSLARAGSGGGSWGAGMWLSPPVNHGWGGVAEAPGWGLQRAICCSTQEALRLVGDRVSLCHPGWSEVA

SEQ ID NO: 802641 - protein, 81 aa, Homo sapiens; identical to SEQ ID NO: 802640

SEQ ID NO: 802642 - protein, 81 aa, Homo sapiens; identical to SEQ ID NO: 802640

SEQ ID NO: 802643 - protein, 81 aa, Homo sapiens; identical to SEQ ID NO: 802640

SEQ ID NO: 802644 - protein, 81 aa, Homo sapiens; identical to SEQ ID NO: 802640

SEQ ID NO: 802645 - protein, 552 aa, Homo sapiens
VRRAPPHEHLFPSGERGPFSFLVSRRGLGPGKMGKKGKKEKKGRGAEKTAAKMEKKVSKRSRKEEEDLEALIAHFQTLDAKRTQTVELPCPPPSPRLNASLSVHPEKDELILFGGEYFNGQKTFLYNELYVYNTRKDTWTKVDIPSPPPRRCAHQAVVVPQGGGQLWVFGGEFASPNGEQFYHYKDLWVLHLATKTWEQVKSTGGPSGRSGHRMVAWKRQLILFGGFHESTRDYIYYNDVYAFNLDTFTWSKLSPSGTGPTPRSGCQMSVTPQGGIVVYGGYSKQRVKKDVDKGTRHSDMFLLKPEDGREDKWVWTRMNPSGVKPTPRSGFSVAMAPNHQTLFFGGVCDEEEEESLSGEFFNDLYFYDATRNRWFEGQLKGPKSEKKKRRRGRKEEPEGGSRPACGGAGTQGPVQLVKEVVAEDGTVVTIKQVLTAPGSAGQPRSEDEDSLEEAGSPAPGPCPRSNAMLAVKHGVLYVYGGMFEAGDRQVTLSDLHCLDLHRMEAWKALVEMDPETQEWLEETDSEEDSEEVEGAEGGVDDEDSGEESGAED

SEQ ID NO: 802646 - protein, 287 aa, Homo sapiens
LLPEKCALMWLHLGTRAPQRPKRESRGFPGWGCRTGQALPCRARPPAPAPSHPSSSLSLTPGPGSPRQTGPPCQTVAALYGLGAWQSHCGGGVGCHGQGRQPLGCQGWWSTLNPYLLESPGLFHTRSCGKLWDPKAVLISGVTSSHSSLRSPGTRPGVSLCKELPGCWAELCCRPRKMTKKDRAEPHLPLLGGPEGARAQQSPILHSLGSKRLPRCGWQLLTSSGGAAGGLCPMGHRREKDGGRVCTLGRTGGRHRPEQVAWAHEKGVSETGCLSQMPGVDEADEWQ

SEQ ID NO: 802647 - protein, 259 aa, Homo sapiens
MVAWKRQLILFGGFHESTRDYIYYNDVYAFNLDTFTWSKLSPSGTGPTPRSGCQMSVTPQGGIVVYGGYSKQRVKKDVDKGTRHSDMFLLKPEDGREDKWVWTRMNPSGVKPTPRSGFSVAMAPNHQTLFFGGVCDEEEEESLSGEFFNDLYFYDATRNRWFEGQLKKLRSGWRRRTRKRTVRRLRAPRVGSTTKTAERRAVRRTEKSPCQGRLASAVPTSAQDPAVLSEALGASVRPDAQERAEGGWPRPGCELSPMV

SEQ ID NO: 802648 - protein, 552 aa, Homo sapiens; identical to SEQ ID NO: 802645

SEQ ID NO: 802649 - protein, 521 aa, Homo sapiens
VRRAPPHEHLFPSGERGPFSFLVSRRGLGPGKMGKKGKKEKKGRGAEKTAAKMEKKVSKRSRKEEEDLEALIAHFQTLDAKRTQTVELPCPPPSPRLNASLSVHPEKDELILFGGEYFNGQKTFLYNELYVYNTRKDTWTKVDIPSPPPRRCAHQAVVVPQGGGQLWVFGGEFASPNGEQFYHYKDLWVLHLATKTWEQVKDYIYYNDVYAFNLDTFTWSKLSPSGTGPTPRSGCQMSVTPQGGIVVYGGYSKQRVKKDVDKGTRHSDMFLLKPEDGREDKWVWTRMNPSGVKPTPRSGFSVAMAPNHQTLFFGGVCDEEEEESLSGEFFNDLYFYDATRNRWFEGQLKGPKSEKKKRRRGRKEEPEGGSRPACGGAGTQGPVQLVKEVVAEDGTVVTIKQVLTAPGSAGQPRSEDEDSLEEAGSPAPGPCPRSNAMLAVKHGVLYVYGGMFEAGDRQVTLSDLHCLDLHRMEAWKALVEMDPETQEWLEETDSEEDSEEVEGAEGGVDDEDSGEESGAED

SEQ ID NO: 802650 - protein, 339 aa, Homo sapiens
MVAWKRQLILFGGFHESTRDYIYYNDVYAFNLDTFTWSKLSPSGTGPTPRSGCQMSVTPQGGIVVYGGYSKQRVKKDVDKGTRHSDMFLLKPEDGREDKWVWTRMNPSGVKPTPRSGFSVAMAPNHQTLFFGGVCDEEEEESLSGEFFNDLYFYDATRNRWFEGQLKGPKSEKKKRRRGRKEEPEGGSRPACGGAGTQGPVQLVKEVVAEDGTVVTIKQVLTAPGSAGQPRSEDEDSLEEAGSPAPGPCPRSNAMLAVKHGVLYVYGGMFEAGDRQVTLSDLHCLDLHRMEAWKALVEMDPETQEWLEETDSEEDSEEVEGAEGGVDDEDSGEESGAED

SEQ ID NO: 802651 - protein, 552 aa, Homo sapiens; identical to SEQ ID NO: 802645

SEQ ID NO: 802652 - protein, 552 aa, Homo sapiens; identical to SEQ ID NO: 802645

SEQ ID NO: 802653 - protein, 552 aa, Homo sapiens; identical to SEQ ID NO: 802645

SEQ ID NO: 802654 - protein, 521 aa, Homo sapiens; identical to SEQ ID NO: 802649

SEQ ID NO: 802655 - protein, 107 aa, Homo sapiens
FLKQTETFNYMNAHMLKTACALPEGRACLSGYFCVLHSLTGCDKPCAHAASTAGRLRAGGDMPWSPLRRLRAGGDMPWPPVVSQRDRTPRALTRGRHGTHSRFLHAR

SEQ ID NO: 802656 - protein, 520 aa, Homo sapiens
MGKKGKKEKKGRGAEKTAAKMEKKVSKRSRKEEEDLEALIAHFQTLDAKRTQTVELPCPPPSPRLNASLSVHPEKDELILFGGEYFNGQKTFLYNELYVYNTRKDTWTKVDIPSPPPRRCAHQAVVVPQGGGQLWVFGGEFASPNGEQFYHYKDLWVLHLATKTWEQVKSTGGPSGRSGHRMVAWKRQLILFGGFHESTRDYIYYNDVYAFNLDTFTWSKLSPSGTGPTPRSGCQMSVTPQGGIVVYGGYSKQRVKKDVDKGTRHSDMFLLKPEDGREDKWVWTRMNPSGVKPTPRSGFSVAMAPNHQTLFFGGVCDEEEEESLSGEFFNDLYFYDATRNRWFEGQLKGPKSEKKKRRRGRKEEPEGGSRPACGGAGTQGPVQLVKEVVAEDGTVVTIKQVLTAPGSAGQPRSEDEDSLEEAGSPAPGPCPRSNAMLAVKHGVLYVYGGMFEAGDRQVTLSDLHCLDLHRMEAWKALVEMDPETQEWLEETDSEEDSEEVEGAEGGVDDEDSGEESGAED

SEQ ID NO: 802657 - protein, 463 aa, Homo sapiens
MGKKGKKEKKGRGAEKTAAKMEKKVSKRSRKEETFLYNELYVYNTRKDTWTKVDIPSPPPRRCAHQAVVVPQGGGQLWVFGGEFASPNGEQFYHYKDLWVLHLATKTWEQVKSTGGPSGRSGHRMVAWKRQLILFGGFHESTRDYIYYNDVYAFNLDTFTWSKLSPSGTGPTPRSGCQMSVTPQGGIVVYGGYSKQRVKKDVDKGTRHSDMFLLKPEDGREDKWVWTRMNPSGVKPTPRSGFSVAMAPNHQTLFFGGVCDEEEEESLSGEFFNDLYFYDATRNRWFEGQLKGPKSEKKKRRRGRKEEPEGGSRPACGGAGTQGPVQLVKEVVAEDGTVVTIKQVLTAPGSAGQPRSEDEDSLEEAGSPAPGPCPRSNAMLAVKHGVLYVYGGMFEAGDRQVTLSDLHCLDLHRMEAWKALVEMDPETQEWLEETDSEEDSEEVEGAEGGVDDEDSGEESGAED

SEQ ID NO: 802658 - protein, 463 aa, Homo sapiens; identical to SEQ ID NO: 802657

SEQ ID NO: 802659 - protein, 552 aa, Homo sapiens; identical to SEQ ID NO: 802645

SEQ ID NO: 802660 - protein, 39 aa, Homo sapiens
MCVHSAFEETQEWLEETDSEEDSEEVEGAEGGVDDEDSG

SEQ ID NO: 802661 - protein, 1868 aa, Homo sapiens
QNQPYCRGLPDPQDIISQSLQSPSQQAAKSFYDRISFLIGSDSTHVIPGESPFNKSLASVIRGQVLTADGTPLIGVNVSFFHYPEYGYTITRQDGMFDLVANGGASLTLVFERSPFLTQYHTVWIPWNVFYVMDTLVMKKEENDIPSCDLSGFVRPNPIIVSSPLSTFFRSSPEDSPIIPETQVLHEETTIPGTDLKLSYLSSRAAGYKSVLKITMTQSIIPFNLMKVHLMVAVVGRLFQKWFPASPNLAYTFIWDKTDAYNQKVYGLSEAVVSVGYEYESCLDLTLWEKRTAILQGYELDASNMGGWTLDKHHVLDVQNGILYKGNGENQFISQQPPVVSSIMGNGRRRSISCPSCNGQADGNKLLAPVALACGIDGSLYVGDFNYVRRIFPSGNVTSVLELRNKDFRHSSNPAHRYYLATDPVTGDLYVSDTNTRRIYRPKSLTGAKDLTKNAEVVAGTGEQCLPFDEARCGDGGKAVEATLMSPKGMAVDKNGLIYFVDGTMIRKVDQNGIISTLLGSNDLTSARPLTCDTSMHISQVRLEWPTDLAINPMDNSIYVLDNNVVLQITENRQVRIAAGRPMHCQVPGVEYPVGKHAVQTTLESATAIAVSYSGVLYITETDEKKINRIRQVTTDGEISLVAGIPSECDCKNDANCDCYQSGDGYAKDAKLSAPSSLAASPDGTLYIADLGNIRIRAVSKNKPLLNSMNFYEVASPTDQELYIFDINGTHQYTVSLVTGDYLYNFSYSNDNDITAVTDSNGNTLRIRRDPNRMPVRVVSPDNQVIWLTIGTNGCLKSMTAQGLELVLFTYHGNSGLLATKSDETGWTTFFDYDSEGRLTNVTFPTGVVTNLHGDMDKAITVDIESSSREEDVSITSNLSSIDSFYTMVQDQLRNSYQIGYDGSLRIIYASGLDSHYQTEPHVLAGTANPTVAKRNMTLPGENGQNLVEWRFRKEQAQGKVNVFGRKLRVNGRNLLSVDFDRTTKTEKIYDDHRKFLLRIAYDTSGHPTLWLPSSKLMAVNVTYSSTGQIASIQRGTTSEKVDYDGQGRIVSRVFADGKTWSYTYLEKSMVLLLHSQRQYIFEYDMWDRLSAITMPSVARHTMQTIRSIGYYRNIYNPPESNASIITDYNEEGLLLQTAFLGTSRRVLFKYRRQTRLSEILYDSTRVSFTYDETAGVLKTVNLQSDGFICTIRYRQIGPLIDRQIFRFSEDGMVNARFDYSYDNSFRVTSMQGVINETPLPIDLYQFDDISGKVEQFGKFGVIYYDINQIISTAVMTYTKHFDAHGRIKEIQYEIFRSLMYWITIQYDNMGRVTKREIKIGPFANTTKYAYEYDVDGQLQTVYLNEKIMWRYNYDLNGNLHLLNPSNSARLTPLRYDLRDRITRLGDVQYRLDEDGFLRQRGTEIFEYSSKGLLTRVYSKGSGWTVIYRYDGLGRRVSSKTSLGQHLQFFYADLTYPTRITHVYNHSSSEITSLYYDLQGHLFAMEISSGDEFYIASDNTGTPLAVFSSNGLMLKQIQYTAYGEIYFDSNIDFQLVIGFHGGLYDPLTKLIHFGERDYDILAGRWTTPDIEIWKRIGKDPAPFNLYMFRNNNPASKIHDVKDYITDVNSWLVTFGFHLHNAIPGFPVPKFDLTEPSYELVKSQQWDDIPPIFGVQQQVARQAKAFLSLGKMAEVQVSRRRAGGAQSWLWFATVKSLIGKGVMLAVSQGRVQTNVLNIANEDCIKVAAVLNNAFYLENLHFTIEGKDTHYFIKTTTPESDLGTLRLTSGRKALENGINVTVSQSTTVVNGRTRRFADVEMQFGALALHVPLKDDPGRGEGGASWSRRGRARSPGRGPRTEACAKARKGGRLWTEARTECDAGSAATRST

SEQ ID NO: 802662 - protein, 943 aa, Homo sapiens
QNQPYCRGLPDPQDIISQSLQSPSQQAAKSFYDRISFLIGSDSTHVIPGESPFNKSLASVIRGQVLTADGTPLIGVNVSFFHYPEYGYTITRQDGMFDLVANGGASLTLVFERSPFLTQYHTVWIPWNVFYVMDTLVMKKEENDIPSCDLSGFVRPNPIIVSSPLSTFFRSSPEDSPIIPETQVLHEETTIPGTDLKLSYLSSRAAGYKSVLKITMTQSIIPFNLMKVHLMVAVVGRLFQKWFPASPNLAYTFIWDKTDAYNQKVYGLSEAVVSVGYEYESCLDLTLWEKRTAILQGYELDASNMGGWTLDKHHVLDVQNGILYKGNGENQFISQQPPVVSSIMGNGRRRSISCPSCNGQADGNKLLAPVALACGIDGSLYVGDFNYVRRIFPSGNVTSVLELRNKDFRHSSNPAHRYYLATDPVTGDLYVSDTNTRRIYRPKSLTGAKDLTKNAEVVAGTGEQCLPFDEARCGDGGKAVEATLMSPKGMAVDKNGLIYFVDGTMIRKVDQNGIISTLLGSNDLTSARPLTCDTSMHISQVRLEWPTDLAINPMDNSIYVLDNNVVLQITENRQVRIAAGRPMHCQVPGVEYPVGKHAVQTTLESATAIAVSYSGVLYITETDEKKINRIRQVTTDGEISLVAGIPSECDCKNDANCDCYQSGDGYAKDAKLSAPSSLAASPDGTLYIADLGNIRIRAVSKNKPLLNSMNFYEVASPTDQELYTPIFGVQQQVARQAKAFLSLGKMAEVQVSRRRAGGAQSWLWFATVKSLIGKGVMLAVSQGRVQTNVLNIANEDCIKVAAVLNNAFYLENLHFTIEGKDTHYFIKTTTPESDLGTLRLTSGRKALENGINVTVSQSTTVVNGRTRRFADVEMQFGALALHVPLKDDPGRGEGGASWSRRGRARSPGRGPRTEACAKARKGGRLWTEARTECDAGSAATRST

SEQ ID NO: 802663 - protein, 30 aa, Homo sapiens
MTSLPRKVTEACCTWKSSLSFENKGHVLKT

SEQ ID NO: 802664 - protein, 2004 aa, Homo sapiens
NVQDDKMEQTVLVPPGPDSFNFFTRESLAAIERRIAEEKAKNPKPDKKDDDENGPKPNSDLEAGKNLPFIYGDIPPEMVSEPLEDLDPYYINKKTFIVLNKGKAIFRFSATSALYILTPFNPLRKIAIKILVHSLFSMLIMCTILTNCVFMTMSNPPDWTKNVEYTFTGIYTFESLIKIIARGFCLEDFTFLRDPWNWLDFTVITFAYVTEFVDLGNVSALRTFRVLRALKTISVIPGLKTIVGALIQSVKKLSDVMILTVFCLSVFALIGLQLFMGNLRNKCIQWPPTNASLEEHSIEKNITVNYNGTLINETVFEFDWKSYIQDSRYHYFLEGFLDALLCGNSSDAGQCPEGYMCVKAGRNPNYGYTSFDTFSWAFLSLFRLMTQDFWENLYQLTLRAAGKTYMIFFVLVIFLGSFYLINLILAVVAMAYEEQNQATLEEAEQKEAEFQQMIEQLKKQQEAAQQAATATASEHSREPSAAGRLSDSSSEASKLSSKSAKERRNRRKKRKQKEQSGGEEKDEDEFQKSESEDSIRRKGFRFSIEGNRLTYEKRYSSPHQSLLSIRGSLFSPRRNSRTSLFSFRGRAKDVGSENDFADDEHSTFEDNESRRDSLFVPRRHGERRNSNLSQTSRSSRMLAVFPANGKMHSTVDCNGVVSLVGGPSVPTSPVGQLLPEGTTTETEMRKRRSSSFHVSMDFLEDPSQRQRAMSIASILTNTVEELEESRQKCPPCWYKFSNIFLIWDCSPYWLKVKHVVNLVVMDPFVDLAITICIVLNTLFMAMEHYPMTDHFNNVLTVGNLVFTGIFTAEMFLKIIAMDPYYYFQEGWNIFDGFIVTLSLVELGLANVEGLSVLRSFRLLRVFKLAKSWPTLNMLIKIIGNSVGALGNLTLVLAIIVFIFAVVGMQLFGKSYKDCVCKIASDCQLPRWHMNDFFHSFLIVFRVLCGEWIETMWDCMEVAGQAMCLTVFMMVMVIGNLVVLNLFLALLLSSFSADNLAATDDDNEMNNLQIAVDRMHKGVAYVKRKIYEFIQQSFIRKQKILDEIKPLDDLNNKKDSCMSNHTTEIGKDLDYLKDVNGTTSGIGTGSSVEKYIIDESDYMSFINNPSLTVTVPIAVGESDFENLNTEDFSSESDLEESKEKLNESSSSSEGSTVDIGAPVEEQPVVEPEETLEPEACFTEGCVQRFKCCQINVEEGRGKQWWNLRRTCFRIVEHNWFETFIVFMILLSSGALAFEDIYIDQRKTIKTMLEYADKVFTYIFILEMLLKWVAYGYQTYFTNAWCWLDFLIVDVSLVSLTANALGYSELGAIKSLRTLRALRPLRALSRFEGMRVVVNALLGAIPSIMNVLLVCLIFWLIFSIMGVNLFAGKFYHCINTTTGDRFDIEDVNNHTDCLKLIERNETARWKNVKVNFDNVGFGYLSLLQVATFKGWMDIMYAAVDSRNVELQPKYEESLYMYLYFVIFIIFGSFFTLNLFIGVIIDNFNQQKKKFGGQDIFMTEEQKKYYNAMKKLGSKKPQKPIPRPGNKFQGMVFDLVTRQVFDISIMILICLNMVTMMVETDDQSEYVTTILSRINLVFIVLFTGECVLKLISLRHYYFTIGWNIFDFVVVILSIVGMFLAELIEKYFVSPTLFRVIRLARIGRILRLIKGAKGIRTLLFALMMSLPALFNIGLLLFLVMFIYAIFGMSNFAYVKREVGIDDMFNFETFGNSMICLFQITTSAGWDGLLAPILNSKPPDCDPNKVNPGSSVKGDCGNPSVGIFFFVSYIIISFLVVVNMYIAVILENFSVATEESAEPLSEDDFEMFYEVWEKFDPDATQFMEFEKLSQFAAALEPPLNLPQPNKLQLIAMDLPMVSGDRIHCLDILFAFTKRVLGESGEMDALRIQMEERFMASNPSKVSYQPITTTLKRKQEEVSAVIIQRAYRRHLLKRTVKQASFTYNKNKIKGGANLLIKEDMIIDRINENSITEKTDLTMSTAACPPSYDRVTKPIVEKHEQEGKDEKAKGK

SEQ ID NO: 802665 - protein, 2004 aa, Homo sapiens; identical to SEQ ID NO: 802664

SEQ ID NO: 802666 - protein, 114 aa, Homo sapiens
MVKLGASAAEHQSHGSGLQPCKQPRAWEGSSPGHSASGASPQATVAQPGSPAFWAETTITLAVSSLRECRMLSQRPCTALIYRGKGSAGEVVAPGGAALECAASDSEFHALCIV

SEQ ID NO: 802667 - protein, 228 aa, Homo sapiens
QRAEDGKTELSLMRFSLAHPLWRPPGHSFKFLGHLWGRVQQDAAAWGATSARGPSTPGVLSNCTSPLPEAFLANLFVHPLLPPRDLSPTAPCPAAATASLLASISRIAQDPSSVSPGGTGGQKLAQLPELASAEMSLHVIYLHQLHQQQQQQEPWGEAAASILSRPCSSPSQPPSPDEEKPSWSSDGSSPASSPRQQWGTQKARNLFPGGFQVTTDTQKEPDRASCTD

SEQ ID NO: 802668 - protein, 228 aa, Homo sapiens; identical to SEQ ID NO: 802667

SEQ ID NO: 802669 - protein, 114 aa, Homo sapiens; identical to SEQ ID NO: 802666

SEQ ID NO: 802670 - protein, 626 aa, Homo sapiens
RLGTRLGVNSADLSRWASLPGPSMREAAFMYSTAVAIFLVILVAALQGSAPRESPLPYHIPLDPEGSLELSWNVSYTQEAIHFQLLVRRLKAGVLFGMSDRGELENADLVVLWTDGDTAYFADAWSDQKGQIHLDPQQDYQLLQVQRTPEGLTLLFKRPFGTCDPKDYLIEDGTVHLVYGILEEPFRSLEAINGSGLQMGLQRVQLLKPNIPEPELPSDACTMEVQAPNIQIPSQETTYWCYIKELPKGFSRHHIIKYEPIVTKGNEALVHHMEVFQCAPEMDSVPHFSGPCDSKMKPDRLNYCRHVLAAWALGAKAFYYPEEAGLAFGGPGSSRYLRLEVHYHNPLVIEGRNDSSGIRLYYTAKLRRFNAGIMELGLVYTPVMAIPPRETAFILTGYCTDKCTQLALPPSGIHIFASQLHTHLTGRKVVTVLVRDGREWEIVNQDNHYSPHFQEIRMLKKVVSVHPGDVLITSCTYNTEDRELATVGGFGILEEMCVNYVHYYPQTQLELCKSAVDAGFLQKYFHLINRFNNEDVCTCPQASVSQQFTSVPWNSFNRDVLKALYSFAPISMHCNKSSAVRFQGEWNLQPLPKVISTLEEPTPQCPTSQGRSPAGPTVVSIGGGKG

SEQ ID NO: 802671 - protein, 426 aa, Homo sapiens
  misc_feature (2)..(2): Xaa can be any naturally occurring amino acid
GXTIAGRGWCNRTRRLSRWASLPGPSMREAAFMYSTAVAIFLVILVAALQGSAPRESPLPYHIPLDPEGSLELSWNVSYTQEAIHFQLLVRRLKAGVLFGMSDRGELENADLVVLWTDGDTAYFADAWSDQKGQIHLDPQQDYQLLQVQRTPEGLTLLFKRPFGTCDPKDYLIEDGTVHLVYGILEEPFRSLEAINGSGLQMGLQRVQLLKPNIPEPELPSDACTMEVQAPNIQIPSQETTYWCYIKELPKGFSRHHIIKYEPIVTKGNEALVHHMEVFQCAPEMDSGGFGILEEMCVNYVHYYPQTQLELCKSAVDAGFLQKYFHLINRFNNEDVCTCPQASVSQQFTSVPWNSFNRDVLKALYSFAPISMHCNKSSAVRFQGEWNLQPLPKVISTLEEPTPQCPTSQGRSPAGPTVVSIGGGKG

SEQ ID NO: 802672 - protein, 629 aa, Homo sapiens
  misc_feature (2)..(2): Xaa can be any naturally occurring amino acid
GXTIAGRGWCNRTRRLSRWASLPGPSMREAAFMYSTAVAIFLVILVAALQGSAPRESPLPYHIPLDPEGSLELSWNVSYTQEAIHFQLLVRRLKAGVLFGMSDRGELENADLVVLWTDGDTAYFADAWSDQKGQIHLDPQQDYQLLQVQRTPEGLTLLFKRPFGTCDPKDYLIEDGTVHLVYGILEEPFRSLEAINGSGLQMGLQRVQLLKPNIPEPELPSDACTMEVQAPNIQIPSQETTYWCYIKELPKGFSRHHIIKYEPIVTKGNEALVHHMEVFQCAPEMDSVPHFSGPCDSKMKPDRLNYCRHVLAAWALGAKAFYYPEEAGLAFGGPGSSRYLRLEVHYHNPLVIEGRNDSSGIRLYYTAKLRRFNAGIMELGLVYTPVMAIPPRETAFILTGYCTDKCTQLALPPSGIHIFASQLHTHLTGRKVVTVLVRDGREWEIVNQDNHYSPHFQEIRMLKKVVSVHPGDVLITSCTYNTEDRELATVGGFGILEEMCVNYVHYYPQTQLELCKSAVDAGFLQKYFHLINRFNNEDVCTCPQASVSQQFTSVPWNSFNRDVLKALYSFAPISMHCNKSSAVRFQGEWNLQPLPKVISTLEEPTPQCPTSQGRSPAGPTVVSIGGGKG

SEQ ID NO: 802673 - protein, 648 aa, Homo sapiens
  misc_feature (2)..(2): Xaa can be any naturally occurring amino acid
GXTIAGRGWCNRTRRLSRWASLPGPSMREAAFMYSTAVAIFLVILVAALQGSAPRESPLPYHIPLDPEGSLELSWNVSYTQEAIHFQLLVRRLKAGVLFGMSDRGELENADLVVLWTDGDTAYFADAWSDQKGQIHLDPQQDYQLLQVQRTPEGLTLLFKRPFGTCDPKDYLIEDGTVHLVYGILEEPFRSLEAINGSGLQMGLQRVQLLKPNIPEPELPSDACTMEVQAPNIQIPSQETTYWCYIKELPKGFSRHHIIKYEPIVTKGNEALVHHMEVFQCAPEMDSVPHFSGPCDSKMKPDRLNYCRHVLAAWALGAKAFYYPEEAGLAFGGPGSSRYLRLEVHYHNPLVIEGRNDSSGIRLYYTAKLRRFNAGIMELGLVYTPVMAIPPRETAFILTGYCTDKCTQLALPPSGIHIFASQLHTHLTGRKVVTVLVRDGREWEIVNQDNHYSPHFQEIRMLKKVVSVHPGDVLITSCTYNTEDRELATVGGFGILEEMCVNYVHYYPQTQLELCKSAVDAGFLQKYFHLINRASSTQPAAAITHPPRCQERFNNEDVCTCPQASVSQQFTSVPWNSFNRDVLKALYSFAPISMHCNKSSAVRFQGEWNLQPLPKVISTLEEPTPQCPTSQGRSPAGPTVVSIGGGKG

SEQ ID NO: 802674 - protein, 82 aa, Homo sapiens
ARIRVFVRNTSEVVPGIRRRGMCQLFSFFLRKTMPLLVVRIFLGYLRGLALCFILSPDFFPVHLSLAISVYLISETSTRLIL

SEQ ID NO: 802675 - protein, 202 aa, Homo sapiens
WCHCAAARGRYHGGSDMGGRGADAGSSGGTGPTEGYSPPAASTRAAARAKARGGGRGGRRNTTPSVPSLRGAAPRSFHPPAAMSERLRPRKRRRNGNEEDNHLPPQTKRSSRNPVFQDSWDTESSGSDSGGSSSSSSSSINSPDRASGPEGSLSQTMAGSSPNTPQPVPEQSALCQGLYFHINQTLREAHFHSLQHRGRPLT

SEQ ID NO: 802676 - protein, 223 aa, Homo sapiens
WCHCAAARGRYHGGSDMGGRGADAGSSGGTGPTEGYSPPAASTRAAARAKARGGGRGGRRNTTPSVPSLRGAAPRSFHPPAAMSERLRPRKRRRNGNEEDNHLPPQTKRSSRNPVFQDSWDTETVPVMRNSKENRLRGNKAFCASSGSDSGGSSSSSSSSINSPDRASGPEGSLSQTMAGSSPNTPQPVPEQSALCQGLYFHINQTLREAHFHSLQHRGRPLT

SEQ ID NO: 802677 - protein, 223 aa, Homo sapiens; identical to SEQ ID NO: 802676

SEQ ID NO: 802678 - protein, 100 aa, Homo sapiens
  misc_feature (14)..(15): Xaa can be any naturally occurring amino acid
CARQPRLPTPSARXXVVLYLHSSGSDSGGSSSSSSSSINSPDRASGPEGSLSQTMAGSSPNTPQPVPEQSALCQGLYFHINQTLREAHFHSLQHRGRPLT

SEQ ID NO: 802679 - protein, 155 aa, Homo sapiens
GQIGKGSHSYIKCCHMEGSTIRKRRRNGNEEDNHLPPQTKRSSRNPVFQDSWDTETVPVMRNSKENRLRGNKAFCASSGSDSGGSSSSSSSSINSPDRASGPEGSLSQTMAGSSPNTPQPVPEQSALCQGLYFHINQTLREAHFHSLQHRGRPLT

SEQ ID NO: 802680 - protein, 174 aa, Homo sapiens
KSGGPGTREREREKREERQSAWGRKERGREGWVRRRERSAANPRRRAWSPSQNSSPSRSRSQGGGCRDRQPCMMHLRLFCILLAAVSGAEGWGLLRLRRGAGGSPVCTLPGRLLLLQSPYCAAIRQAARHKRVVTTDWGSESLAPDRLNEEAPDPGRGHTGLLNSWDWVTRYML

SEQ ID NO: 802681 - protein, 223 aa, Homo sapiens
MTEEVDFLGQDSDGGSEEVVLTPAELIERLEQAWMNEKFAPELLESKPEIVECVMEQLEHMEENLRRAKREDLKVSIHQMEMERIRYVLSSYLRCRLMKIEKFFPHVLEKEKTRPEGEPSSLSPEELAFAREFMANTESYLKNVALKHMPPNLQKVDLFRAVPKPDLDSYVFLRVRERQENILVEPDTDEQRDYVIDLEKGSQHLIRYKTIAPLVASGAVQLI

SEQ ID NO: 802682 - protein, 143 aa, Homo sapiens
GCGLLLGPPCKLHLLICAGSDSSFHPTAWGAAAATLGTGRRHTATGTFVRDFAGKHMALGSQRSSLKILLLACTLVEPVASIFRVESRGILVLENVRPKGSNTREKCCQTHNGHDGIENLHSLKPKEGVKWQWISALLGCALV

SEQ ID NO: 802683 - protein, 466 aa, Homo sapiens
FCGRKMAEVGEIIEGCRLPVLRRNQDNEDEWPLAEILSVKDISGRKLFYVHYIDFNKRLDEWVTHERLDLKKIQFPKKEAKTPTKNGLPGSRPGSPEREVKRKVEVVSPATPVPSETAPASVFPQNGAARRAVAAQPGRKRKSNCLGTDEDSQDSSDGIPSAPRMTGSLVSDRSHDDIVTRMKNIECIELGRHRLKPWYFSPYPQELTTLPVLYLCEFCLKYGRSLKCLQRHLTKCDLRHPPGNEIYRKGTISFFEIDGRKNKSYSQNLCLLAKCFLDHKTLYYDTDPFLFYVMTEYDCKGFHIVGYFSKEKESTEDYNVACILTLPPYQRRGYGKLLIEFSYELSKVEGKTGTPEKPLSDLGLLSYRSYWSQTILEILMGLKSESGERPQITINEISEITSIKKEDVISTLQYLNLINYYKGQYILTLSEDIVDGHERAMLKRLLRIDSKCLHFTPKDWSKRGKW

SEQ ID NO: 802684 - protein, 565 aa, Homo sapiens
  misc_feature (6)..(6): Xaa can be any naturally occurring amino acid
QAGTPXVLWDIVDHGARGKMAEVVSPVPGAGRREPGEVGRARGPPVADPGVALSPQGEIIEGCRLPVLRRNQDNEDEWPLAEILSVKDISGRKLFYVHYIDFNKRLDEWVTHERLDLKKIQFPKKEAKTPTKNGLPGSRPGSPEREVPASAQASGKTLPIPVQITLRFNLPKEREAIPGGEPDQPLSSSSCLQPNHRSTKRKVEVVSPATPVPSETAPASVFPQNGAARRAVAAQPGRKRKSNCLGTDEDSQDSSDGIPSAPRMTGSLVSDRSHDDIVTRMKNIECIELGRHRLKPWYFSPYPQELTTLPVLYLCEFCLKYGRSLKCLQRHLTKCDLRHPPGNEIYRKGTISFFEIDGRKNKSYSQNLCLLAKCFLDHKTLYYDTDPFLFYVMTEYDCKGFHIVGYFSKEKESTEDYNVACILTLPPYQRRGYGKLLIEFSYELSKVEGKTGTPEKPLSDLGLLSYRSYWSQTILEILMGLKSESGERPQITINEISEITSIKKEDVISTLQYLNLINYYKGQYILTLSEDIVDGHERAMLKRLLRIDSKCLHFTPKDWSKRGKW

SEQ ID NO: 802685 - protein, 461 aa, Homo sapiens
MAEVGEIIEGCRLPVLRRNQDNEDEWPLAEILSVKDISGRKLFYVHYIDFNKRLDEWVTHERLDLKKIQFPKKEAKTPTKNGLPGSRPGSPEREVKRKVEVVSPATPVPSETAPASVFPQNGAARRAVAAQPGRKRKSNCLGTDEDSQDSSDGIPSAPRMTGSLVSDRSHDDIVTRMKNIECIELGRHRLKPWYFSPYPQELTTLPVLYLCEFCLKYGRSLKCLQRHLTKCDLRHPPGNEIYRKGTISFFEIDGRKNKSYSQNLCLLAKCFLDHKTLYYDTDPFLFYVMTEYDCKGFHIVGYFSKEKESTEDYNVACILTLPPYQRRGYGKLLIEFSYELSKVEGKTGTPEKPLSDLGLLSYRSYWSQTILEILMGLKSESGERPQITINEISEITSIKKEDVISTLQYLNLINYYKGQYILTLSEDIVDGHERAMLKRLLRIDSKCLHFTPKDWSKRGKW

SEQ ID NO: 802686 - protein, 461 aa, Homo sapiens; identical to SEQ ID NO: 802685

SEQ ID NO: 802687 - protein, 390 aa, Homo sapiens
MAEVGEIIEGCRLPVLRRNQDNEDEWPLAEILSVKDISGRKLFYVHYIDFNKRLDEWVTHERLDLKKIQFPKKEAKTPTKNGLPGSRPGSPEREVKRKVEVVSPATPVPSETAPASVFPQNGAARRAVAAQPGRKRKSNCLGTDEDSQDSSDGIPSAPRMTGSLVSDRSHDDIVTRMKNIECIELGRHRLKPWYFSPYPQELTTLPVLYLCEFCLKYGRSLKCLQRHLTKCDLRHPPGNEIYRKGTISFFEIDGRKNKSYSQNLCLLAKCFLDHKTLYYDTDPFLFYVMTEYDCKGFHIVGYFSKEKESTEDYNVACILTLPPYQRRGYGKLLIEFSYELSKVEGKTGTPEKPLSDLGLLSYRSYWSQTILEILMGLKSESGERPQITIK

SEQ ID NO: 802688 - protein, 446 aa, Homo sapiens
MSKAPVYAILIALAEILSVKDISGRKLFYVHYIDFNKRLDEWVTHERLDLKKIQFPKKEAKTPTKNGLPGSRPGSPEREVKRKVEVVSPATPVPSETAPASVFPQNGAARRAVAAQPGRKRKSNCLGTDEDSQDSSDGIPSAPRMTGSLVSDRSHDDIVTRMKNIECIELGRHRLKPWYFSPYPQELTTLPVLYLCEFCLKYGRSLKCLQRHLTKCDLRHPPGNEIYRKGTISFFEIDGRKNKSYSQNLCLLAKCFLDHKTLYYDTDPFLFYVMTEYDCKGFHIVGYFSKEKESTEDYNVACILTLPPYQRRGYGKLLIEFSYELSKVEGKTGTPEKPLSDLGLLSYRSYWSQTILEILMGLKSESGERPQITINEISEITSIKKEDVISTLQYLNLINYYKGQYILTLSEDIVDGHERAMLKRLLRIDSKCLHFTPKDWSKRGKW

SEQ ID NO: 802689 - protein, 390 aa, Homo sapiens; identical to SEQ ID NO: 802687

SEQ ID NO: 802690 - protein, 499 aa, Homo sapiens
FDEGAWLLAAPRALAEILSVKDISGRKLFYVHYIDFNKRLDEWVTHERLDLKKIQFPKKEAKTPTKNGLPGSRPGSPEREVPASAQASGKTLPIPVQITLRFNLPKEREAIPGGEPDQPLSSSSCLQPNHRSTKRKVEVVSPATPVPSETAPASVFPQNGAARRAVAAQPGRKRKSNCLGTDEDSQDSSDGIPSAPRMTGSLVSDRSHDDIVTRMKNIECIELGRHRLKPWYFSPYPQELTTLPVLYLCEFCLKYGRSLKCLQRHLTKCDLRHPPGNEIYRKGTISFFEIDGRKNKSYSQNLCLLAKCFLDHKTLYYDTDPFLFYVMTEYDCKGFHIVGYFSKEKESTEDYNVACILTLPPYQRRGYGKLLIEFSYELSKVEGKTGTPEKPLSDLGLLSYRSYWSQTILEILMGLKSESGERPQITINEISEITSIKKEDVISTLQYLNLINYYKGQYILTLSEDIVDGHERAMLKRLLRIDSKCLHFTPKDWSKRGKW

SEQ ID NO: 802691 - protein, 336 aa, Homo sapiens
MAEVGEIIEGCRLPVLRRNQDSQDSSDGIPSAPRMTGSLVSDRSHDDIVTRMKNIECIELGRHRLKPWYFSPYPQELTTLPVLYLCEFCLKYGRSLKCLQRHLTKCDLRHPPGNEIYRKGTISFFEIDGRKNKSYSQNLCLLAKCFLDHKTLYYDTDPFLFYVMTEYDCKGFHIVGYFSKEKESTEDYNVACILTLPPYQRRGYGKLLIEFSYELSKVEGKTGTPEKPLSDLGLLSYRSYWSQTILEILMGLKSESGERPQITINEISEITSIKKEDVISTLQYLNLINYYKGQYILTLSEDIVDGHERAMLKRLLRIDSKCLHFTPKDWSKRGKW

SEQ ID NO: 802692 - protein, 333 aa, Homo sapiens
  misc_feature (1)..(1): Xaa can be any naturally occurring amino acid
XHSGPLPGLSSPLGTDEDSQDSSDGIPSAPRMTGSLVSDRSHDDIVTRMKNIECIELGRHRLKPWYFSPYPQELTTLPVLYLCEFCLKYGRSLKCLQRHLTKCDLRHPPGNEIYRKGTISFFEIDGRKNKSYSQNLCLLAKCFLDHKTLYYDTDPFLFYVMTEYDCKGFHIVGYFSKEKESTEDYNVACILTLPPYQRRGYGKLLIEFSYELSKVEGKTGTPEKPLSDLGLLSYRSYWSQTILEILMGLKSESGERPQITINEISEITSIKKEDVISTLQYLNLINYYKGQYILTLSEDIVDGHERAMLKRLLRIDSKCLHFTPKDWSKRGKW

SEQ ID NO: 802693 - protein, 508 aa, Homo sapiens
MAEVGEIIEGCRLPVLRRNQDNEDEWPLAEILSVKDISGRKLFYVHYIDFNKRLDEWVTHERLDLKKIQFPKKEAKTPTKNGLPGSRPGSPEREVKRKVEVVSPATPVPSETAPASVFPQNGAARRAVAAQPGRKRKSNCLGTDEDSQDSSDGIPSAPRMTGSLVSDRSHDDIVTRMKNIECIELGRHRLKPWYFSPYPQELTTLPVLYLCEFCLKYGRSLKCLQRHLTKCDLRHPPGNEIYRKGTISFFEIDGRKNKSYSQNLCLLAKCFLDHKTLYYDTDPFLFYVMTEYDCKGFHIVGYFSKEKESTEDYNVACILTLPPYQRRGYGKLLIEFSYELSKVEGKTGTPEKPLSDLGLLSYRSYWSQTILEILMGLKSESGERPQITINEISEITSIKKEDVISTLQYLNLINYYKVGRQAGETGVWDAECSPLWADHLLNPSPLPRASTSSHCQRTSWMAMSGPCSSGSCGSTPSVCTSLPRTGARGGSGDQTLPTAVPRRQQDWG

SEQ ID NO: 802694 - protein, 292 aa, Homo sapiens
IRHYGKMAEVGEIIEGCRLPVLRRNQDNEDEWPLAEILSVKDISGRKLFYVHYIDFNKRLDEWVTHERLDLKKIQFPKKEAKTPTKNGLPGSRPGSPEREVKRKVEVVSPATPVPSETAPASVFPQNGAARRAVAAQPGRKRKSNCLGTDEDSQDSSDGIPSAPRMTGSLVSDRSHDDIVTRMKNIECIELGRHRLKPWYFSPYPQELTTLPVLYLCEFCLKYGRSLKCLQRHLTKCDLRHPPGNEIYRKGTISFFEIDGRKNKSMTVRASTSWATSPRRKNQRKTTMWPAS

SEQ ID NO: 802695 - protein, 173 aa, Homo sapiens
MTEYDCKGFHIVGYFSKEKESTEDYNVACILTLPPYQRRGYGKLLIEFSYELSKVEGKTGTPEKPLSDLGLLSYRSYWSQTILEILMGLKSESGERPQITINEISEITSIKKEDVISTLQYLNLINYYKGQYILTLSEDIVDGHERAMLKRLLRIDSKCLHFTPKDWSKRGKW

SEQ ID NO: 802696 - protein, 144 aa, Homo sapiens [sequence omitted]

SEQ ID NO: 802697 - protein, 144 aa, Homo sapiens [sequence omitted]

SEQ ID NO: 802698 - protein, 328 aa, Homo sapiens
MAEVGEIIEGCRLPVLRRNQDNEDEWPLAEILSVKDISGRKLFYVHYIDFNKRLDEWVTHERLDLKKIQFPKKEAKTPTKNGLPGSRPGSPEREVKRKVEVVSPATPVPSETAPASVFPQNGAARRAVAAQPGRKRKSNCLGTDEDSQDSSDGIPSAPRMTGSLVSDRSHDDIVTRMKNIECIELGRHRLKPWYFSPYPQELTTLPVLYLCEFCLKYGRSLKCLQRHLTKCDLRHPPGNEIYRKGTISFFEIDGRKNKSYSQNLCLLAKCFLDHKTLYYDTDPFLFYVMTALMEYRQHHAMTGSLVSDRSHDDIVTRMKNIECIELGR

SEQ ID NO: 802699 - protein, 281 aa, Homo sapiens [sequence omitted]

SEQ ID NO: 802700 - protein, 312 aa, Homo sapiens
MAEVGEIIEGCRLPVLRRNQDNEDEWPLAEILSVKDISGRKLFYVHYIDFNKRLDEWVTHERLDLKKIQFPKKEAKTPTKNGLPGSRPGSPEREVPASAQASGKTLPIPVQITLRFNLPKEREAIPGGEPDQPLSSSSCLQPNHRSTKRKVEVVSPATPVPSETAPASVFPQNGAARRAVAAQPGRKRKSNCLGTDEDSQDSSDGIPSAPRMTGSLVSDRSHDDIVTRMKNIECIELGRHRLKPWYFSPYPLVPSTKASSGLRPTPRSAGHRPRPPLKQGPEGARQLCTVRRDPDGGALYRGLVIVKISFVK

SEQ ID NO: 802701 - protein, 91 aa, Homo sapiens
AHVTDSVDRHWLCTLWGFHLGLGLRLVTLRFPPSHRGSLAPRSWVAVSLKGPPLQGLREARAHRALGPGSDVSQRGRKWQWREGRWRRWGR

SEQ ID NO: 802702 - protein, 513 aa, Homo sapiens
MAEVGEIIEGCRLPVLRRNQDNEDEWPLAEILSVKDISGRKLFYVHYIDFNKRLDEWVTHERLDLKKIQFPKKEAKTPTKNGLPGSRPGSPEREVPASAQASGKTLPIPVQITLRFNLPKEREAIPGGEPDQPLSSSSCLQPNHRSTKRKVEVVSPATPVPSETAPASVFPQNGAARRAVAAQPGRKRKSNCLGTDEDSQDSSDGIPSAPRMTGSLVSDRSHDDIVTRMKNIECIELGRHRLKPWYFSPYPQELTTLPVLYLCEFCLKYGRSLKCLQRHLTKCDLRHPPGNEIYRKGTISFFEIDGRKNKSYSQNLCLLAKCFLDHKTLYYDTDPFLFYVMTEYDCKGFHIVGYFSKEKESTEDYNVACILTLPPYQRRGYGKLLIEFSYELSKVEGKTGTPEKPLSDLGLLSYRSYWSQTILEILMGLKSESGERPQITINEISEITSIKKEDVISTLQYLNLINYYKGQYILTLSEDIVDGHERAMLKRLLRIDSKCLHFTPKDWSKRGKW

SEQ ID NO: 802703 - protein, 552 aa, Homo sapiens
MAEVGKMAEVVSPVPGAGRREPGEVGRARGPPVADPGVALSPQGEIIEGCRLPVLRRNQDNEDEWPLAEILSVKDISGRKLFYVHYIDFNKRLDEWVTHERLDLKKIQFPKKEAKTPTKNGLPGSRPGSPEREVPASAQASGKTLPIPVQITLRFNLPKEREAIPGGEPDQPLSSSSCLQPNHRSTKRKVEVVSPATPVPSETAPASVFPQNGAARRAVAAQPGRKRKSNCLGTDEDSQDSSDGIPSAPRMTGSLVSDRSHDDIVTRMKNIECIELGRHRLKPWYFSPYPQELTTLPVLYLCEFCLKYGRSLKCLQRHLTKCDLRHPPGNEIYRKGTISFFEIDGRKNKSYSQNLCLLAKCFLDHKTLYYDTDPFLFYVMTEYDCKGFHIVGYFSKEKESTEDYNVACILTLPPYQRRGYGKLLIEFSYELSKVEGKTGTPEKPLSDLGLLSYRSYWSQTILEILMGLKSESGERPQITINEISEITSIKKEDVISTLQYLNLINYYKGQYILTLSEDIVDGHERAMLKRLLRIDSKCLHFTPKDWSKRGKW

SEQ ID NO: 802704 - protein, 461 aa, Homo sapiens; identical to SEQ ID NO: 802685

SEQ ID NO: 802705 - protein, 494 aa, Homo sapiens
MAEVVSPVPGAGRREPGEVGRARGPPVADPGVALSPQGEIIEGCRLPVLRRNQDNEDEWPLAEILSVKDISGRKLFYVHYIDFNKRLDEWVTHERLDLKKIQFPKKEAKTPTKNGLPGSRPGSPEREVKRKVEVVSPATPVPSETAPASVFPQNGAARRAVAAQPGRKRKSNCLGTDEDSQDSSDGIPSAPRMTGSLVSDRSHDDIVTRMKNIECIELGRHRLKPWYFSPYPQELTTLPVLYLCEFCLKYGRSLKCLQRHLTKCDLRHPPGNEIYRKGTISFFEIDGRKNKSYSQNLCLLAKCFLDHKTLYYDTDPFLFYVMTEYDCKGFHIVGYFSKEKESTEDYNVACILTLPPYQRRGYGKLLIEFSYELSKVEGKTGTPEKPLSDLGLLSYRSYWSQTILEILMGLKSESGERPQITINEISEITSIKKEDVISTLQYLNLINYYKGQYILTLSEDIVDGHERAMLKRLLRIDSKCLHFTPKDWSKRGKW

SEQ ID NO: 802706 - protein, 461 aa, Homo sapiens; identical to SEQ ID NO: 802685

SEQ ID NO: 802707 - protein, 461 aa, Homo sapiens; identical to SEQ ID NO: 802685

SEQ ID NO: 802708 - protein, 508 aa, Homo sapiens; identical to SEQ ID NO: 802693

SEQ ID NO: 802709 - protein, 454 aa, Homo sapiens
  misc_feature (7)..(7): Xaa can be any naturally occurring amino acid
LVSPGLXRTRAEPGHEDELALAEILSVKDISGRKLFYVHYIDFNKRLDEWVTHERLDLKKIQFPKKEAKTPTKNGLPGSRPGSPEREVKRKVEVVSPATPVPSETAPASVFPQNGAARRAVAAQPGRKRKSNCLGTDEDSQDSSDGIPSAPRMTGSLVSDRSHDDIVTRMKNIECIELGRHRLKPWYFSPYPQELTTLPVLYLCEFCLKYGRSLKCLQRHLTKCDLRHPPGNEIYRKGTISFFEIDGRKNKSYSQNLCLLAKCFLDHKTLYYDTDPFLFYVMTEYDCKGFHIVGYFSKEKESTEDYNVACILTLPPYQRRGYGKLLIEFSYELSKVEGKTGTPEKPLSDLGLLSYRSYWSQTILEILMGLKSESGERPQITINEISEITSIKKEDVISTLQYLNLINYYKGQYILTLSEDIVDGHERAMLKRLLRIDSKCLHFTPKDWSKRGKW

SEQ ID NO: 802710 - protein, 461 aa, Homo sapiens; identical to SEQ ID NO: 802685

SEQ ID NO: 802711 - protein, 144 aa, Homo sapiens [sequence omitted]

SEQ ID NO: 802712 - protein, 173 aa, Homo sapiens; identical to SEQ ID NO: 802695

SEQ ID NO: 802713 - protein, 91 aa, Homo sapiens; identical to SEQ ID NO: 802701

SEQ ID NO: 802714 - protein, 347 aa, Homo sapiens
MAEVGEIIEGCRLPVLRRNQDNEDEWPLAEILSVKDISGRKLFYVHYIDFNKRLDEWVTHERLDLKKIQFPKKEAKTPTKNGLPGSRPGSPEREVKRKVEVVSPATPVPSETAPASVFPQNGAARRAVAAQPGRKRKSNCLGTDEDSQDSSDGIPSAPRMTGSLVSDRSHDDIVTRMKNIECIELGRHRLKPWYFSPYPQELTTLPVLYLCEFCLKYGRSLKCLQRHLTKCDLRHPPGNEIYRKGTISFFEIDGRKNKSYSQNLCLLAKCFLDHKTLYYDTDPFLFYVMTEYDCKGFHIVGYFSKEKESTEDYNVACILTLPPYQRRGYGKLLIEFSEYVCCGQGVV

SEQ ID NO: 802715 - protein, 366 aa, Homo sapiens
MAEVGEIIEGCRLPVLRRNQDNEDEWPLAEILSVKDISGRKLFYVHYIDFNKRLDEWVTHERLDLKKIQFPKKEAKTPTKNGLPGSRPGSPEREVPASAQASGKTLPIPVQITLRFNLPKEREAIPGGEPDQPLSSSSCLQPNHRSTKRKVEVVSPATPVPSETAPASVFPQNGAARRAVAAQPGRKRKSNCLGTDEDSQDSSDGIPSAPRMTGSLVSDRSHDDIVTRMKNIECIELGRHRLKPWYFSPYPQELTTLPVLYLCEFCLKYGRSLKCLQRHLTKCDLRHPPGNEIYRKGPSLLGMRRRTRVSQNWFGQVPDLALLRTNIPLREKKRAPGFREQRTRGPAHRQRYTEAHPNHLGKPTTG

SEQ ID NO: 802716 - protein, 405 aa, Homo sapiens
MAEVGKMAEVVSPVPGAGRREPGEVGRARGPPVADPGVALSPQGEIIEGCRLPVLRRNQDNEDEWPLAEILSVKDISGRKLFYVHYIDFNKRLDEWVTHERLDLKKIQFPKKEAKTPTKNGLPGSRPGSPEREVPASAQASGKTLPIPVQITLRFNLPKEREAIPGGEPDQPLSSSSCLQPNHRSTKRKVEVVSPATPVPSETAPASVFPQNGAARRAVAAQPGRKRKSNCLGTDEDSQDSSDGIPSAPRMTGSLVSDRSHDDIVTRMKNIECIELGRHRLKPWYFSPYPQELTTLPVLYLCEFCLKYGRSLKCLQRHLTKCDLRHPPGNEIYRKGPSLLGMRRRTRVSQNWFGQVPDLALLRTNIPLREKKRAPGFREQRTRGPAHRQRYTEAHPNHLGKPTTG

SEQ ID NO: 802717 - protein, 430 aa, Homo sapiens
  misc_feature (389)..(389): Xaa can be any naturally occurring amino acid
  misc_feature (391)..(391): Xaa can be any naturally occurring amino acid
  misc_feature (393)..(396): Xaa can be any naturally occurring amino acid
  misc_feature (399)..(399): Xaa can be any naturally occurring amino acid
  misc_feature (405)..(405): Xaa can be any naturally occurring amino acid
  misc_feature (412)..(412): Xaa can be any naturally occurring amino acid
  misc_feature (422)..(422): Xaa can be any naturally occurring amino acid
MSGSGRKDFDVKHILRLRWKLFSHPSPSTGGPAGGGCLQQDGSGSFEHWGPSQSRLLKSQERSGVSTFWKKPSSSSSSSSSPSSSSSSFNPLNGTLLPVATRLQQGAPGQGTQQPARTLFYVESLEEEVVPGMDFPGPHEKGLVLQELKVEPDNSSQATGEGCGHRLSSTGHSMTPQSDLDSSSSEEFYQAVHHAEQTFRKMESYLKQQQLCDVILIVGNRKIPAHRLVLSSVSDYFAAMFTSDVCEAKQEEIKMEGIDPNALWDLVQFAYTGCLELKEDTIENLLAAACLLQLPQVVEVCCHFLMKLLHPSNCLGIRAFADAQGCIELMKVAHSYTMENIMEVIRNQEFLLLPAEELHKLLASDDVNVPDEETIFHALMMHSGSSHLXQXTXXXXQQXTKQTRXKKQNFKXNAKNQVKKAXKNQNSKKV

SEQ ID NO: 802718 - protein, 748 aa, Homo sapiens
MSGSGRKDFDVKHILRLRWKLFSHPSPSTGGPAGGGCLQQDGSGSFEHWGPSQSRLLKSQERSGVSTFWKKPSSSSSSSSSPSSSSSSFNPLNGTLLPVATRLQQGAPGQGTQQPARTLFYVESLEEEVVPGMDFPGPHEKGLVLQELKVEPDNSSQATGEGCGHRLSSTGHSMTPQSDLDSSSSEEFYQAVHHAEQTFRKMESYLKQQQLCDVILIVGNRKIPAHRLVLSSVSDYFAAMFTSDVCEAKQEEIKMEGIDPNALWDLVQFAYTGCLELKEDTIENLLAAACLLQLPQVVEVCCHFLMKLLHPSNCLGIRAFADAQGCIELMKVAHSYTMENIMEVIRNQEFLLLPAEELHKLLASDDVNVPDEETIFHALMMWVKYDMQSRCNDLSMLLAFIRLPLLPPQILADLENHALFKNDLECQKLILEAMKYHLLPERRTLMQSPRTKPRKSTVGTLYAVGGMDNNKGATTIEKYDLRTNLWIQAGMMNGRRLQFGVAVIDDKLFVIGGRDGLKTLNTVECYNPKTKTWTVLPPMSTHRHGLGVTVLEGPIYAVGGHDGWSYLNTVERWDPQSQQWTFVASMSIARSTVGVAALNGKLYSVGGRDGSSCLSSMEYYDPHTNKWNMCAPMCKRRGGVGVATCDGFLYAVGGHDAPASNHCSRLLDYVERYDPKTDTWTMVAPLSMPRDAVGVCLLGDRLYAVGGYDGQTYLNTMESYDPQTNEWTQMASLNIGRAGACVVVIKQP

SEQ ID NO: 802719 - protein, 450 aa, Homo sapiens
QRRRGGRSREAGKQWPCEREELPPPPAPRRPRPPGPRRRGPRTALEKTSPPLHPPLSHRAAPASSSCAAGSGGTRNGRPLPPPSAASSFSSSSSSSSFSASSSAPGRSGVSAAAGSGGDSRFFWAAALGHVVSGKVMSRRAPGSRLSSGGGGGGTKYPRSWNDWQPRTDSASADPDNLKYSSSRDRGGSSSYGLQPSNSAVVSRQRHDDTRVHADIQNDEKERSMSYSDESRLSNLLRRITREDDRDRRLATVKQLKEFIQQPENKLVLVKQLDNILAAVHDVLNESSKLLQELRQEGACCLGLLCASLSYEAEKIFKWIFSKFSSSAKDEVKLLYLCATYKALETVGEKKAFSSVMQLVMTSLQSILENVDTPELLCKCVKCILLVARCYPHIFSTNFRDTVDILVGWHIDHTQKPSLTQQVSGWLQSLEPFWVADLAFSTTLLGQFLE

SEQ ID NO: 802720 - protein, 444 aa, Homo sapiens
QRRRGGRSREAGKQWPCEREELPPPPAPRRPRPPGPRRRGPRTALEKTSPPLHPPLSHRAAPASSSCAAGSGGTRNGRPLPPPSAASSSSSFSASSSAPGRSGVSAAAGSGGDSRFFWAAALGHVVSGKVMSRRAPGSRLSSGGGGGGTKYPRSWNDWQPRTDSASADPDNLKYSSSRDRGGSSSYGLQPSNSAVVSRQRHDDTRVHADIQNDEKERSMSYSDESRLSNLLRRITREDDRDRRLATVKQLKEFIQQPENKLVLVKQLDNILAAVHDVLNESSKLLQELRQEGACCLGLLCASLSYEAEKIFKWIFSKFSSSAKDEVKLLYLCATYKALETVGEKKAFSSVMQLVMTSLQSILENVDTPELLCKCVKCILLVARCYPHIFSTNFRDTVDILVGWHIDHTQKPSLTQQVSGWLQSLEPFWVADLAFSTTLLGQFLE

SEQ ID NO: 802721 - protein, 352 aa, Homo sapiens
NSHGSVSRRLVMTGKPGTDSASADPDNLKYSSSRDRGGSSSYGLQPSNSAVVSRQRHDDTRVHADIQNDEKGGYSVNGGSGENTYGRKSLGQELRVNNVTSPEFTSVQHGSRALATKDMRKSQERSMSYSDESRLSNLLRRITREDDRDRRLATVKQLKEFIQQPENKLVLVKQLDNILAAVHDVLNESSKLLQELRQEGACCLGLLCASLSYEAEKIFKWIFSKFSSSAKDEVKLLYLCATYKALETVGEKKAFSSVMQLVMTSLQSILENVDTPELLCKCVKCILLVARCYPHIFSTNFRDTVDILVGWHIDHTQKPSLTQQVSGWLQSLEPFWVADLAFSTTLLGQFLE

SEQ ID NO: 802722 - protein, 488 aa, Homo sapiens
SGGAAGGAGRRGSSGRVSVRSCRHRLLLVVLVLRGPGDVGRARPWKRRRLPFIRLSLTAPLPPPRPALRAQAEPGTAVLFPRPPPPPPPPPSRLPPQPRAGAGCRRRPVRAAALGHVVSGKVMSRRAPGSRLSSGGGGGGTKYPRSWNDWQPRTDSASADPDNLKYSSSRDRGGSSSYGLQPSNSAVVSRQRHDDTRVHADIQNDEKGGYSVNGGSGENTYGRKSLGQELRVNNVTSPEFTSVQHGSRALATKDMRKSQERSMSYSDESRLSNLLRRITREDDRDRRLATVKQLKEFIQQPENKLVLVKQLDNILAAVHDVLNESSKLLQELRQEGACCLGLLCASLSYEAEKIFKWIFSKFSSSAKDEVKLLYLCATYKALETVGEKKAFSSVMQLVMTSLQSILENVDTPELLCKCVKCILLVARCYPHIFSTNFRDTVDILVGWHIDHTQKPSLTQQVSGWLQSLEPFWVADLAFSTTLLGQFLE

SEQ ID NO: 802723 - protein, 362 aa, Homo sapiens
MGTEATEQVSWGHYSGDEEDAYSAEPLPELCYKADVQAFSRAFQPSVSLTVAALGLAGNGLVLATHLAARRAARSPTSAHLLQLALADLLLALTLPFAAAGALQGWSLGSATCRTISGLYSASFHAGFLFLACISADRYVAIARALPAGPRPSTPGRAHLVSVIVWLLSLLLALPALLFSQDGQREGQRRCRLIFPEGLTQTVKGASAVAQVALGFALPLGVMVACYALLGRTLLAARGPERRRALRVVVALVAAFVVLQLPYSLALLLDTADLLAARERSCPASKRKDVALLVTSGLALARCGLNPVLYAFLGLRFRQDLRRLLRGGSCPSGPQPRRGCPRRPRLSSCSAPTETHSLSWDN

SEQ ID NO: 802724 - protein, 376 aa, Homo sapiens
MEEAPRERAYRGPTSSSSQPSRVSWGHYSGDEEDAYSAEPLPELCYKADVQAFSRAFQPSVSLTVAALGLAGNGLVLATHLAARRAARSPTSAHLLQLALADLLLALTLPFAAAGALQGWSLGSATCRTISGLYSASFHAGFLFLACISADRYVAIARALPAGPRPSTPGRAHLVSVIVWLLSLLLALPALLFSQDGQREGQRRCRLIFPEGLTQTVKGASAVAQVALGFALPLGVMVACYALLGRTLLAARGPERRRALRVVVALVAAFVVLQLPYSLALLLDTADLLAARERSCPASKRKDVALLVTSGLALARCGLNPVLYAFLGLRFRQDLRRLLRGGSCPSGPQPRRGCPRRPRLSSCSAPTETHSLSWDN

SEQ ID NO: 802725 - protein, 168 aa, Homo sapiens
MFQIPEFEPSEQEDSSSAERGLGPSPAGDGPSGSGKHHRQAPGLLWDASHQQEQPTSSSHHGGAGAVEIRSRHSSYPAGTEDDEGMGEEPSPFRGRSRSAPPNLWAAQRYGRELRRMSDEFVDSFKKGLPRPKSAGTATQMRQSSSWTRVFQSWWDRNLGRGSSAPSQ

SEQ ID NO: 802726 - protein, 159 aa, Homo sapiens
MPWGPCSLPNVNKARVCAAKKKQHKKPHHTKNKNTNTKHTKQGGGAEKIPRGGPHFASPTICAQEGPPREDALNNTHARRPRNTPREGGEHADAGETPGRERTPTRRRGGTPCGLQTTPQQRNKTPRGSNNKPRGERGASHAPHSSARQQRRSHVCEKC

SEQ ID NO: 802727 - protein, 31 aa, Homo sapiens
MGGSTSLRPMQDSASPSRGAVRSYRARQACA

SEQ ID NO: 802728 - protein, 168 aa, Homo sapiens; identical to SEQ ID NO: 802725

SEQ ID NO: 802729 - protein, 168 aa, Homo sapiens; identical to SEQ ID NO: 802725

SEQ ID NO: 802730 - protein, 73 aa, Homo sapiens
IQKHQPELGIDGEEEQGIQGGVGSCQPQGHSRWQRRHQPGSRHQARQVTLHVREGGHRSRPFDSRIAVSSSGC

SEQ ID NO: 802731 - protein, 125 aa, Homo sapiens
MPVTKLGRLVKDMKIKSLEEIYLFSLPIKESEIIDFFLGASLKDEVSKIMPVQKQTRAGQRTRFKAFVAIGDYNGHVGLGVKCSKEVATAIRGAIILAKLSIVPVRRGYWGNKIGKPHTVPCKVT

SEQ ID NO: 802732 - protein, 125 aa, Homo sapiens; identical to SEQ ID NO: 802731

SEQ ID NO: 802733 - protein, 74 aa, Homo sapiens
AHEVGTGGVSGCGAKVTGRGRSFPCPSSDPTRTGRLASSHLEYGRKYFPQAYAKRGSVLSPLEGGLTQIPFRCV

SEQ ID NO: 802734 - protein, 168 aa, Homo sapiens; identical to SEQ ID NO: 802725

SEQ ID NO: 802735 - protein, 159 aa, Homo sapiens; identical to SEQ ID NO: 802726

SEQ ID NO: 802736 - protein, 152 aa, Homo sapiens
RTQAKRVEGWLDKGRDTELRCSSLDSGFHQTFGTFQPQASTASQKLGAGAVEIRSRHSSYPAGTEDDEGMGEEPSPFRGRSRSAPPNLWAAQRYGRELRRMSDEFVDSFKKGLPRPKSAGTATQMRQSSSWTRVFQSWWDRNLGRGSSAPSQ

SEQ ID NO: 802737 - protein, 119 aa, Homo sapiens
LTQKPTRRECKARGAGAVEIRSRHSSYPAGTEDDEGMGEEPSPFRGRSRSAPPNLWAAQRYGRELRRMSDEFVDSFKKGLPRPKSAGTATQMRQSSSWTRVFQSWWDRNLGRGSSAPSQ

SEQ ID NO: 802738 - protein, 130 aa, Homo sapiens
MVCVCVCLTGHAGICSLDPTPGQSSWVPRILGRPGMLVFVLLAGTCALCRPGWSAVVRSRLTAAWNSWPQRILPLQPPKVLGLQALTIAPGPLILELRSHLLGARSPALAFPFRALGILSSRLRHGVPGI

SEQ ID NO: 802739 - protein, 168 aa, Homo sapiens; identical to SEQ ID NO: 802725

SEQ ID NO: 802740 - protein, 78 aa, Homo sapiens
VPTYSGTTYLLVGSELGQGKLRPLPVTFAPHPETPPVPTALGSHLEYGRKYFPQAYAKRGSVLSPLEGGLTQIPFRCV

SEQ ID NO: 802741 - protein, 136 aa, Homo sapiens
MFQIPEFEPSEQEDSSSAERGLGPSPAGDGPSGSGKHHRQAPGLLWDASHQQEQPTSSSHHGGAGAVEIRSRHSSYPAGTEDDEGMGEEPSPFRGRSRSAPPNLWAAQRYGRELRRMSDEFVDSFKVSASPQRART

SEQ ID NO: 802742 - protein, 125 aa, Homo sapiens
GQHLYPVNQFFFSMPVAGDSTIYIQASIAVIFQDGSKSFVIIKNRTEKQGVLKRREGGYRGVGDNSYTQHGQSLALHHFQQLWGYLLEWQVRWETGPLPRKRETFTNRDIGTLWAIRSPGNEGVL

SEQ ID NO: 802743 - protein, 232 aa, Homo sapiens
PRAPRSLPRPHAIPHLRPRPTQPQLGQTAPSPLPICNLQGDDDVISADLQSLQGPYLPLELGLEQLFQELAGEEEELNASQLQALLSIALEPARAHTSTPREIGLRTCEQLLQCFGTQHGQSLALHHFQQLWGYLLEWQAIFNKFDEDTSGTMNSYELRLALNAAGFHLNNQLTQTLTSRYRDSRLRVDFERFVSCVAHLTCIFCHCSQHLDGGEGVICLTHRQWMEVATFS

SEQ ID NO: 802744 - protein, 209 aa, Homo sapiens
PRAPRSLPRPHAIPHLRPRPTQPQLGQTAPSPLPICNLQGDDDVISADLQSLQGPYLPLELGLEQLFQELAGEEEELNASQLQALLSIALEPARAHTSTPREIGLRTCEQLLQCFGAIFNKFDEDTSGTMNSYELRLALNAAGFHLNNQLTQTLTSRYRDSRLRVDFERFVSCVAHLTCIFCHCSQHLDGGEGVICLTHRQWMEVATFS

SEQ ID NO: 802745 - protein, 119 aa, Homo sapiens
LSCLGGPIGSPLQGMEGSPDFILPAQAIFNKFDEDTSGTMNSYELRLALNAAGFHLNNQLTQTLTSRYRDSRLRVDFERFVSCVAHLTCIFCHCSQHLDGGEGVICLTHRQWMEVATFS

SEQ ID NO: 802746 - protein, 97 aa, Homo sapiens
LSCLGGPIGSPLQGMEGSPDFILPAQAIFNKFDEDTSGTMNSYELRLALNAAGFHLNNQLTQTLTSRYRDSRLRVDFERFVSCVAHLTCIFCEYHPG

SEQ ID NO: 802747 - protein, 166 aa, Homo sapiens
PGLHGPYLDPTRFLTWDPVPHSPSWGKQPPPHFPSVICREIDDVISADLQSLQGPYLPLELGLEQLFQELAGEAIFNKFDEDTSGTMNSYELRLALNAAGFHLNNQLTQTLTSRYRDSRLRVDFERFVSCVAHLTCIFCHCSQHLDGGEGVICLTHRQWMEVATFS

SEQ ID NO: 802748 - protein, 108 aa, Homo sapiens [sequence omitted]

SEQ ID NO: 802749 - protein, 549 aa, Homo sapiens
RSLAAGPEIKRGPPPAGHSALGNRDPAPDWRGRCAARWGAQGTEPGSCSPLAATSAGGAASGSWHLASPLRGEIGGYPAPAPGGKGTRGWGRPLAAAELPATGPVLLAAPAPATLGCPQLRPRQPETLPLEVPRLPDRTVRRQVGRAPPGAPEPRESLPGRPVPPPPRRPVARMRYADPSANRDLLGSRTLLFIFICAFALVTLLQQILYGRNYIKRYFEFYEGPFEYNSTRCLELRHEILEVKVLSMVKQSELFDRWKSLQMCKWAMNISEANQFKSTLSRCCNAPAFLFTTQKNTPLGTKLKYEVDTSGIYHINQEIFRMFPKDMPYYRSQFKKCAVVGNGGILKNSRCGREINSADFVFRCNLPPISEKYTMDVGVKTDVVTVNPSIITERFHKLEKWRRPFYRVLQVYENASVLLPAFYNTRNTDVSIRVKYVLDDFESPQAVYYFHPQYLVNVSRYWLSLGVRAKRISTGLILVTAALELCEEVHLFGFWAFPMNPSGLYITHHYYDNVKPRPGFHAMPSEIFNFLHLHSRGILRVHTGTCSCC

SEQ ID NO: 802750 - protein, 302 aa, Homo sapiens
MVKQSELFDRWKSLQMCKWAMNISEANQFKSTLSRCCNAPAFLFTTQKNTPLGTKLKYEVDTSGIYHINQEIFRMFPKDMPYYRSQFKKCAVVGNGGILKNSRCGREINSADFVFRCNLPPISEKYTMDVGVKTDVVTVNPSIITERFHKLEKWRRPFYRVLQVYENASVLLPAFYNTRNTDVSIRVKYVLDDFESPQAVYYFHPQYLVNVSRYWLSLGVRAKRISTGLILVTAALELCEEVHLFGFWAFPMNPSGLYITHHYYDNVKPRPGFHAMPSEIFNFLHLHSRGILRVHTGTCSCC

SEQ ID NO: 802751 - protein, 549 aa, Homo sapiens; identical to SEQ ID NO: 802749

SEQ ID NO: 802752 - protein, 360 aa, Homo sapiens
MNYTESSPLRESTAIGFTPELESIIPVPSNKTTCENWREIHHLVFHVANICFAVGLVIPTTLHLHMIFLRGMLTLGCTLYIVWATLYRCALDIMIWNSVFLGVNILHLSYLLYKKRPVKIEKELSGMYRRLFEPLRVPPDLFRRLTGQFCMIQTLKKGQTYAAEDKTSVDDRLSILLKGKMKVSYRGHFLHNIYPCAFIDSPEFRSTQMHKGEKFQVTIIADDNCRFLCWSRERLTYFLESEPFLYEIFRYLIGKDITNKLYSLNDPTLNDKKAKKLEHQLSLCTQISMLEMRNSIASSSDSDDGLHQFLRGTSSMSSLHVSSPHQRASAKMKPIEEGAEDDDDVFEPASPNTLKVHQLP

SEQ ID NO: 802753 - protein, 360 aa, Homo sapiens; identical to SEQ ID NO: 802752

SEQ ID NO: 802754 - protein, 397 aa, Homo sapiens
TVSGRRSGQAAPASPGPRPHRVPAPALCGGKPLGIFKMNYTESSPLRESTAIGFTPELESIIPVPSNKTTCENWREIHHLVFHVANICFAVGLVIPTTLHLHMIFLRGMLTLGCTLYIVWATLYRCALDIMIWNSVFLGVNILHLSYLLYKKRPVKIEKELSGMYRRLFEPLRVPPDLFRRLTGQFCMIQTLKKGQTYAAEDKTSVDDRLSILLKGKMKVSYRGHFLHNIYPCAFIDSPEFRSTQMHKGEKFQVTIIADDNCRFLCWSRERLTYFLESEPFLYEIFRYLIGKDITNKLYSLNDPTLNDKKAKKLEHQLSLCTQISMLEMRNSIASSSDSDDGLHQFLRGTSSMSSLHVSSPHQRASAKMKPIEEGAEDDDDVFEPASPNTLKVHQLP

SEQ ID NO: 802755 - protein, 397 aa, Homo sapiens; identical to SEQ ID NO: 802754

SEQ ID NO: 802756 - protein, 303 aa, Homo sapiens
QDHEGVLSIVKALDYESCEHYELKVSVQNEAPLQAAALRAERGQAKVRVHVQDTNEPPVFQENPLRTSLAEGAPPGTLVATFSARDPDTEQLQRLSYSKDYDPEDWLQVDAATGRIQTQHVLSPASPFLKGGWYRAIVLAQDDASQPRTATGTLSIEILEVNDHAPVLAPPPPGSLCSEPHQGPGLLLGATDEDLPPHGAPFHFQLSPRLPELGRNWSLSQVNVSHARLRPRHQVPEGLHRLSLLLRDSGQPPQQREQPLNVTVRGRRVAAGQAVGGKPTGPGLGQAPWWWRLARGEIGGWAR

SEQ ID NO: 802757 - protein, 368 aa, Homo sapiens
LKVQAFTMDRTPSLVLGSVRNEAPLQAAALRAERGQAKVRVHVQDTNEPPVFQENPLRTSLAEGAPPGTLVATFSARDPDTEQLQRLSYSKDYDPEDWLQVDAATGRIQTQHVLSPASPFLKGGWYRAIVLAQDDASQPRTATGTLSIEILEVNDHAPVLAPPPPGSLCSEPHQGPGLLLGATDEDLPPHGAPFHFQLSPRLPELGRNWSLSQVNVSHARLRPRHQVPEGLHRLSLLLRDSGQPPQQREQPLNVTVCRCGKDGVCLPGAAALLAGGTGLSLGALVIVLASALLLLVLVLLVALRARFWKQSRGKGLLHGPQDDLRDNVLNYDEQGGGEGGPGRLTTSASCVTRKAEPASGNRRHFREL

SEQ ID NO: 802758 - protein, 340 aa, Homo sapiens
QDHEGVLSIVKALDYESCEHYELKVSVQNEAPLQAAALRAERGQAKVRVHVQDTNEPPVFQENPLRTSLAEGAPPGTLVATFSARDPDTEQLQRLSYSKDYDPEDWLQVDAATGRIQTQHVLSPASPFLKGGWYRAIVLAQDDASQPRTATGTLSIEILEVNDHAPVLAPPPPGSLCSEPHQGPGLLLGATDEDLPPHGAPFHFQLSPRLPELGRNWSLSQVNVSHARLRPRHQVPEGLHRLSLLLRDSGQPPQQREQPLNVTVCRCGKDGVCLPGAAALLAGGTGLSLGALVIVLASALLLLVLVLLVALRARFWKQSRGKGLLHGPQDDLRDNVLNYR

SEQ ID NO: 802759 - protein, 235 aa, Homo sapiens
MWRGRAGALLRVWGFWPTGVPRRRPLSCDAASQAGSNYPRCWNCGGPWGPGREDRFFCPQCRALQAPDPTRDYFSLMDCNRSFRVDTAKLQHRYQQLQRLVHPDFFSQRSQTEKDFSEKHSTLVNDAYKTLLAPLSRGLYLLKLHGIEIPERTDYEMDRQFLIEIMEINEKLAEAESEAAMKEIESIVKAKQKEFTDNVSSAFEQDDFEEAKEILTKMRYFSNIEEKIKLKKIPL

SEQ ID NO: 802760 - protein, 150 aa, Homo sapiens
MWRGRAGALLRVWGFWPTGVPRRRPLSCDAASQAGSNYPRCWNCGGPWGPGREDRFFCPQCRALQAPDPTRDYFSLMDCNRSFRVDTAKLQHRYQQLQRLVHPDFFSQRSQTEKDFSEKHSTLVNDAYKTLLAPLSRGLYLLNRKNLLTM

SEQ ID NO: 802761 - protein, 235 aa, Homo sapiens; identical to SEQ ID NO: 802759

SEQ ID NO: 802762 - protein, 105 aa, Homo sapiens
MWRGRAGALLRVWGFWPTGVPRRRPLSCDAASQAGSNYPRCWNCGGPWGPGREDRFFCPQCRALQAPDPTRDYFSLMDCNRSFRVDTAKLQHRLKRTSQRSIRPW

SEQ ID NO: 802763 - protein, 126 aa, Homo sapiens
MWRGRAGALLRVWGFWPTGVPRRRPLSCDAASQAGSNYPRCWNCGGPWGPGREDRFFCPQCRALQAPDPTRDYFSLMDCNRSFRVDTAKLQHRYQQLQRLVHPDFFSQRSQPPKMPGLQARATTAG

SEQ ID NO: 802764 - protein, 534 aa, Homo sapiens [sequence omitted]

SEQ ID NO: 802765 - protein, 583 aa, Homo sapiens
MQAARVDYIAPWWVVWLHSVPHVGLRLQPVNSTFSPGDESYQESLLFLGLVAAVCLGLNLIFLVAYLVCACHCRRDDAVQTKQHHSCCITWTAVVAGLICCAAVGVGFYGNSETNDGAYQLMYSLDDANHTFSGIDALVSGTTQKMKVDLEQHLARLSEIFAARGDYLQTLKFIQQMAGSVVVQLSGLPVWREVTMELTKLSDQTGYVEYYRWLSYLLLFILDLVICLIACLGLAKRSKCLLASMLCCGALSLLLSWASLAADGAAAVATSDFCVAPDTFILNVTEGQISTEVTRYYLYCSQSGSSPFQQTLTTFQRALTTMQIQVAGLLQFAVPLFSTAEEDLLAIQLLLNSSESSLHQLTAMVDCRGLHKAKPVPFAPSSQGVLLLAILASASVPPSLVPHPATSSALFRASFFSAQHTDYLDALAGICYDGLQGLLYLGLFSFLAALAFSTMICAGPRAWKHFTTRNRDYDDIDDDDPFNPQAWRMAAHSPPRGQLHSFCSYSSGLGSQTSLQPPAQTISNAPVSEYMNQAMLFGRNPRYENVPLIGRASPPPTYSPSMRATYLSVADEHLRHYGNQFPA

SEQ ID NO: 802766 - protein, 534 aa, Homo sapiens [sequence omitted]

SEQ ID NO: 802767 - protein, 501 aa, Homo sapiens
MQAARVDYIAPWWVVWLHSVPHVGLRLQPVNSTFSPGDESYQESLLFLGLVAAVCLGLNLIFLVAYLVCACHCRRDDAVQTKQHHSCCITWTAVVAGLICCAAVGVGFYGNSETNDGAYQLMYSLDDANHTFSGIDALVSGTTQKMKVDLEQHLARLSEIFAARGDYLQTLKFIQQMAGSVVVQLSGLPVWREVTMELTKLSDQTGYVEYYRWLSYLLLFILDLVICLIACLGLAKRSKCLLASMLCCGALSLLLSWASLAADGAAAVATSDFCVAPDTFILNVTEGQISTEVTRYYLYCSQSGSSPFQQTLTTFQRALTTMQIQVAGLLQFAVPLFSTAEEDLLAIQLLLNSSESSLHQLTAMVDCRGLHKDYLDALAGICYDGLQGLLYLGLFSFLAALAFSTMICAGPRAWKHFTTSTCHQNMDSRVFSAPSEASTTEWGHRAAGTPCLTYINPCILYAINSLWYIRVTCREELCDVKVLLLKVSLLATRGLFLMHGN

SEQ ID NO: 802768 - protein, 534 aa, Homo sapiens [sequence omitted]

SEQ ID NO: 802769 - protein, 512 aa, Homo sapiens
SVVGQDRKSGSGCYLRWLLFLSLLFLGLVAAVCLGLNLIFLVAYLVCACHCRRDDAVQTKQHHSCCITWTAVVAGLICCAAVGVGFYGNSETNDGAYQLMYSLDDANHTFSGIDALVSGTTQKMKVDLEQHLARLSEIFAARGDYLQTLKFIQQMAGSVVVQLSGLPVWREVTMELTKLSDQTGYVEYYRWLSYLLLFILDLVICLIACLGLAKRSKCLLASMLCCGALSLLLSWASLAADGAAAVATSDFCVAPDTFILNVTEGQISTEVTRYYLYCSQSGSSPFQQTLTTFQRALTTMQIQVAGLLQFAVPLFSTAEEDLLAIQLLLNSSESSLHQLTAMVDCRGLHKDYLDALAGICYDGLQGLLYLGLFSFLAALAFSTMICAGPRAWKHFTTRNRDYDDIDDDDPFNPQAWRMAAHSPPRGQLHSFCSYSSGLGSQTSLQPPAQTISNAPVSEYMNQAMLFGRNPRYENVPLIGRASPPPTYSPSMRATYLSVADEHLRHYGNQFPA

SEQ ID NO: 802770 - protein, 213 aa, Homo sapiens
MYVYSWPPPKQGVWPPPPQLLTCTYLAAPLLLPPVQAHSFRSRPGSLHAGEWAAPREYHRFYGPAAPPEAAPPWWACPPAYATTLRRPCAAAGISGLSLQAPAAVAESWAPWPEGGSLQTELRWGRVERARGPPLQLPDFVRRELRRAYGTYPRADVRVTQRRGQFLLQATPRVLEPDHRVEWRVRRRPDSGDSSPAREAAERGRPRKSKGLS

SEQ ID NO: 802771 - protein, 244 aa, Homo sapiens
AAQSGSRRASAAAAGGMASTASEIIAFMVSISGWVLVSSTLPTDYWKVSTIDGTVITTATYWANLWKACVTDSTGVSNCKDFPSMLALDGYIQACRGLMIAAVSLGFFGSIFALFGMKCTKVGGSDKAKAKIACLAGIVFILSGLCSMTGCSLYANKITTEFFDPLFVEQKYELGAALFIGWAGASLCIIGGVIFCFSISDNNKTPRYTYNGATSVMSSRTKYHGGEDFKTTNPSKQFDKNAYV

SEQ ID NO: 802772 - protein, 226 aa, Homo sapiens
MSRAQIWALVSGVGGFGALVAATTSNEWKVTTRASSVITATWVYQGLWMNCAGNALGSFHCRPHFTIFKVAGYIQACRGLMIAAVSLGFFGSIFALFGMKCTKVGGSDKAKAKIACLAGIVFILSGLCSMTGCSLYANKITTEFFDPLFVEQKYELGAALFIGWAGASLCIIGGVIFCFSISDNNKTPRYTYNGATSVMSSRTKYHGGEDFKTTNPSKQFDKNAYV

SEQ ID NO: 802773 - protein, 218 aa, Homo sapiens
AAQSGSRRASAAAAGGMASTASEIIAFMVSISGWVLVSSTLPTDYWKVSTIDGTVITTATYWANLWKACVTDSTGVSNCKDFPSMLALDGYIQACRGLMIAAVSLGFFGSIFALFGMKCTKVGGSDKAKAKIACLAGIVFILSGLCSMTGCSLYANKITTEFFDPLFVEQKYELGAALFIGWAGASLCIIGGVIFCFSISDNNKTPRSGPQLSLPSGQ

SEQ ID NO: 802774 - protein, 218 aa, Homo sapiens; identical to SEQ ID NO: 802773

SEQ ID NO: 802775 - protein, 244 aa, Homo sapiens; identical to SEQ ID NO: 802771

SEQ ID NO: 802776 - protein, 207 aa, Homo sapiens
MSRAQIWALVSGVGGFGALVAATTSNEWKVTTRASSVITATWVYQGLWMNCAGYIQACRGLMIAAVSLGFFGSIFALFGMKCTKVGGSDKAKAKIACLAGIVFILSGLCSMTGCSLYANKITTEFFDPLFVEQKYELGAALFIGWAGASLCIIGGVIFCFSISDNNKTPRYTYNGATSVMSSRTKYHGGEDFKTTNPSKQFDKNAYV

SEQ ID NO: 802777 - protein, 171 aa, Homo sapiens
AAQSGSRRASAAAAGGMASTASEIIAFMVSISGWVLVSSTLPTDYWKVSTIDGTVITTATYWANLWKACVTDSTGVSNCKDFPSMLALDGYIQACRGLMIAAVSLGFFGSIFALFGMKCTKVGGSDKAKAKIACLAGIVFILSGLCSMTGCSLYANKITTEFFDPLFVEQK

SEQ ID NO: 802778 - protein, 227 aa, Homo sapiens [sequence omitted]

SEQ ID NO: 802779 - protein, 227 aa, Homo sapiens [sequence omitted]

SEQ ID NO: 802780 - protein, 172 aa, Homo sapiens
MTSGGGVGVNGGSMRPGGFLGAGQRLSRAMSRCVLEPRPPGKRWMVSGVGRRRRGSRSLASVRPLCPGSRVPPNCCSVFLTGLAWTHRQQQQHHHHHHHHHHHHHHHHHHQWLSPHCASWEPGSASRLHGHYRREQSHLSGSCGKRPRVDLTQAPHDWRGSICKDGALQCLR

SEQ ID NO: 802781 - protein, 196 aa, Homo sapiens
MTSGGGVGVNGGSMRPGGFLGAGQRLSRAMSRCVLEPRPPGKRWMVAGLGNPGLPGTRHSVGMAVLGQLARRLGVAESWTRDRHCAADLALAPLGDAQLVLLRPRRLMNANGRSVARAAELFGLTAEEVYLVHDELDKPLGRLALKLGGSARGHNGVRSCISCLNSNELLPLLLDRATDLILDHIRERSQGPSLGP

SEQ ID NO: 802782 - protein, 133 aa, Homo sapiens
MTSGGGVGVNGGSMRPGGFLGAGQRLSRAMSRCVLEPRPPGKRWMVAGLGNPGLPGTRHSVGMAVLGQLARRLGVAESWTRDRHCAADLALAPLGDAQLVLLRPRRLMNANGRSVARAGNAKAAGGYRAPGAP

SEQ ID NO: 802783 - protein, 190 aa, Homo sapiens
MTSGGGVGVNGGSMRPGGFLGAGQRLSRAMSRCVLEPRPPGKRWMVAGLGNPGLPGTRHSVGMAVLGQLARRLGVAESWTRAELFGLTAEEVYLVHDELDKPLGRLALKLGGSARGHNGVRSCISCLNSNAMPRLRVGIGRPAHPEAVQAHVLGCFSPAEQELLPLLLDRATDLILDHIRERSQGPSLGP

SEQ ID NO: 802784 - protein, 343 aa, Homo sapiens
MTSGGGVGVNGGSMRPGGFLGAGQRLSRAMSRCVLEPRPPGKRWMVSGVGRRRRGSRSLASVRPLCPGSRVPPNCCSVFLTGEFSARRAPNFLKLRSCTRAPCLPSLLEFSGVGFLGPFFAPLPHCSVALRFRSSALGPTGRCEIGGGESCWASVSWCRPQVAGLGNPGLPGTRHSVGMAVLGQLARRLGVAESWTRDRHCAADLALAPLGDAQLVLLRPRRLMNANGRSVARAAELFGLTAEEVYLVHDELDKPLGRLALKLGGSARGHNGVRSCISCLNSNAMPRLRVGIGRPAHPEAVQAHVLGCFSPAEQELLPLLLDRATDLILDHIRERSQGPSLGP

SEQ ID NO: 802785 - protein, 312 aa, Homo sapiens
MTSGGGVGVNGGSMRPGGFLGAGQRLSRAMSRCVLEPRPPGKRWMVSGVGRRRRGSRSLASVRPLCPGSRVPPNCCSVFLTGEFSARRAPNFLKLRSCTRAPCLPSLLEFSGVGFLGPFFAPLPHCSVALRFRSSALGPTGRCEIGGGESCWASVSWCRPQVAGLGNPGLPGTRHSVGMAVLGQLARRLGVAESWTRDRHCAADLALAPLGDAQLVLLRPRRLMNANGRSVARAAELFGLTAEEVYLVHDELDKPLGRLALKLGGSARGHNGVRSCISCLNSNELLPLLLDRATDLILDHIRERSQGPSLGP

SEQ ID NO: 802786 - protein, 437 aa, Homo sapiens
TPGTLQRQVRIPQMPAPPHPRTPLGSPAAYWKRVGHSACSASCGKGVWRPIFLCISRESGEELDERSCAAGARPPASPEPCHGTPCPPYWEAGEWTSCSRSCGPGTQHRQLQCRQEFGGGGSSVPPERCGHLPRPNITQSCQLRLCGHWEVGSPWSQCSVRCGRGQRSRQVRCVGNNGDEVSEQECASGPPQPPSREACDMGPCTTAWFHSDWSSKCSAECGTGIQRRSVVCLGSGAALGPGQGEAGAGTGQSCPTGSRPPDMRACSLGPCERTWRWYTGPWGECSSECGSGTQRRDIICVSKLGTEFNVTSPSNCSHLPRPPALQPCQGQACQDRWFSTPWSPCSRSCQGGTQTREVQCLSTNQTLSTRCPPQLRPSRKRPCNSQPCSQRPDDQCKDSSPHCPLVVQARLCVYPYYTATCCRSCAHVLERSPQDPS

SEQ ID NO: 802787 - protein, 240 aa, Homo sapiens
TPGTLQRQVRIPQMPAPPHPRTPLGSPAAYWKRVGHSACSASCGKGVWRPIFLCISRESGEELDERSCAAGARPPASPEPCHGTPCPPYWEAGEWTSCSRSCGPGTQHRQLQCRQEFGGGGSSVPPERCGHLPRPNITQSCQLRLCGHWEVGSPWSQCSVRCGRGQRSRQVRCVGNNGDEVSEQECASGPPQPPSREACDMGPCTTAWFHSDWSSKVSPEPPAISCILGNHAQDTSAFPA

SEQ ID NO: 802788 - protein, 437 aa, Homo sapiens; identical to SEQ ID NO: 802786

SEQ ID NO: 802789 - protein, 161 aa, Homo sapiens
LPSPIHDECSSECGSGTQRRDIICVSKLGTEFNVTSPSNCSHLPRPPALQPCQGQACQDRWFSTPWSPCSRSCQGGTQTREVQCLSTNQTLSTRCPPQLRPSRKRPCNSQPCSQRPDDQCKDSSPHCPLVVQARLCVYPYYTATCCRSCAHVLERSPQDPS

SEQ ID NO: 802790 - protein, 437 aa, Homo sapiens; identical to SEQ ID NO: 802786

SEQ ID NO: 802791 - protein, 451 aa, Homo sapiens
MREIVHIQIGQCGNQIGAKFWEMIGEEHGIDLAGSDRGASALQLERISVYYNEAYGRKYVPRAVLVDLEPGTMDSIRSSKLGALFQPDSFVHGNSGAGNNWAKGHYTEGAELIENVLEVVRHESESCDCLQGFQIVHSLGGGTGSGMGTLLMNKIREEYPDRIMNSFSVMPSPKVSDTVVEPYNAVLSIHQLIENADACFCIDNEALYDICFRTLKLTTPTYGDLNHLVSLTMSGITTSLRFPGQLNADLRKLAVNMVPFPRLHFFMPGFAPLTAQGSQQYRALSVAELTQQMFDARNTMAACDLRRGRYLTVACIFRGKMSTKEVDQQLLSVQTRNSSCFVEWIPNNVKVAVCDIPPRGLSMAATFIGNNTAIQEIFNRVSEHFSAMFKRKAFVHWYTSEGMDINEFGEAENNIHDLVSEYQQFQDAKAVLEEDEEVTEEAEMEPEDKGH

SEQ ID NO: 802792 - protein, 139 aa, Homo sapiens
SLSTRQFCPWYVFPEGSTRRRGGCFTGALLFSPFFPCWFLFLATGNSGAGNNWAKGHYTEGAELIENVLEVVRHESESCDCLQGFQIVHSLGGGTGSGMGTLLMNKIREEYPDRIMNSFSVMPSPKVSDTVVEPYNAVL

SEQ ID NO: 802793 - protein, 375 aa, Homo sapiens
MANASEPGGSGGGEAAALGLKLATLSLLLCVSLAGNVLFALLIVRERSLHRAPYYLLLDLCLADGLRALACLPAVMLAARRAAAAAGAPPGALGCKLLAFLAALFCFHAAFLLLGVGVTRYLAIAHHRFYAERLAGWPCAAMLVCAAWALALAAAFPPVLDGGGDDEDAPCALEQRPDGAPGALGFLLLLAVVVGATHLVYLRLLFFIHDRRKMRPARLVPAVSHDWTFHGPGATGQAAANWTAGFGRGPTPPALVGIRPAGPGRGARRLLVLEEFKTEKRLCKMFYAVTLLFLLLWGPYVVASYLRVLVRPGAVPQAYLTASVWLTFAQAGINPVVCFLFNRELRDCFRAQFPCCQSPRTTQATHPCDLKGIGL

SEQ ID NO: 802794 - protein, 375 aa, Homo sapiens; identical to SEQ ID NO: 802793

SEQ ID NO: 802795 - protein, 257 aa, Homo sapiens
MRTAFTPKTGAVPALIRQNGIRRLGYTYSLSDPILNQTQYSDEYTWKSHSKEDLIKTETSRGIKSHKSHLNEDIFLWTLPHCQQTGTLKNCLPWKIPASMKEVNKALSNQFISLTKRDFVDRSKAQKIKKSSHLSLEWKKLLPQPPDTEFRRNYQIPAKIPELQDFSFKYGCYSSLPVASQGLVPSVLHSYLRNQEHTKKQTTYQSDYDKTYPDFLMLLNSFTSSQVKEYLQSLSYKDRQIIDRFIRTHCDTNKKKK

SEQ ID NO: 802796 - protein, 295 aa, Homo sapiens
AASWGRMEQPGPRAPDPSLCHHNLQPTDDPNWDSYATTMRTAFTPKTGAVPALIRQNGIRRLGYTYSLSDPILNQTQYSDEYTWKSHSKEDLIKTETSRGIKSHKSHLNEDIFLWTLPHCQQTGTLKNCLPWKIPASMKEVNKALSNQFISLTKRDFVDRSKAQKIKKSSHLSLEWKKLLPQPPDTEFRRNYQIPAKIPELQDFSFKYGCYSSLPVASQGLVPSVLHSYLRNQEHTKKQTTYQSDYDKTYPDFLMLLNSFTSSQVKEYLQSLSYKDRQIIDRFIRTHCDTNKKKK

SEQ ID NO: 802797 - protein, 1720 aa, Homo sapiens
MLISKNMPWRRLQGISFGMYSAEELKKLSVKSITNPRYLDSLGNPSANGLYDLALGPADSKEVCSTCVQDFSNCSGHLGHIELPLTVYNPLLFDKLYLLLRGSCLNCHMLTCPRAVIHLLLCQLRVLEVGALQAVYELERILNRFLEENADPSASEIREELEQYTTEIVQNNLLGSQGAHVKNVCESKSKLIALFWKAHMNAKRCPHCKTGRSVVRKEHNSKLTITFPAMVHRTAGQKDSEPLGIEEAQIGKRGYLTPTSAREHLSALWKNEGFFLNYLFSGMDDDGMESRFNPSVFFLDFLVVPPSRYRPVSRLGDQMFTNGQTVNLQAVMKDVVLIRKLLALMAQEQKLPEEVATPTTDEEKDSLIAIDRSFLSTLPGQSLIDKLYNIWIRLQSHVNIVFDSEMDKLMMDKYPGIRQILEKKEGLFRKHMMGKRVDYAARSVICPDMYINTNEIGIPMVFATKLTYPQPVTPWNVQELRQAVINGPNVHPGASMVINEDGSRTALSAVDMTQREAVAKQLLTPATGAPKPQGTKIVCRHVKNGDILLLNRQPTLHRPSIQAHRARILPEEKVLRLHYANCKAYNADFDGDEMNAHFPQSELGRAEAYVLACTDQQYLVPKDGQPLAGLIQDHMVSGASMTTRGCFFTREHYMELVYRGLTDKVGRVKLLSPSILKPFPLWTGKQVVSTLLINIIPEDHIPLNLSGKAKITGKAWVKETPRSVPGFNPDSMCESQVIIREGELLCGVLDKAHYGSSAYGLVHCCYEIYGGETSGKVLTCLARLFTAYLQLYRGFTLGVEDILVKPKADVKRQRIIEESTHCGPQAVRAALNLPEAASYDEVRGKWQDAHLGKDQRDFNMIDLKFKEEVNHYSNEINKACMPFGLHRQFPENTLQLMVQSGAKGSTVNTMQISCLLGQIELEGRRPPLMASGKSLPCFEPYEFTPRAGGFVTGRFLTGIKPPEFFFHCMAGREGLVDTAVKTSRSGYLQRCIIKHLEGLVVQYDLTVRDSDGSVVQFLYGEDGLDIPKTQFLQPKQFPFLASNYEVIMKSQHLHEVLSRADPKKALHHFRAIKKWQSKHPNTLLRRGAFLSYSQKIQEAVKALKLESENRNGRSPGTQEMLRMWYELDEESRRKYQKKAAACPDPSLSVWRPDIYFASVSETFETKVDDYSQEWAAQTEKSYEKSELSLDRLRTLLQLKWQRSLCEPGEAVGLLAAQSIGEPSTQMTLNTFHFAGRGEMNVTLGIPRLREILMVASANIKTPMMSVPVLNTKKALKRVKSLKKQLTRVCLGEVLQKIDVQESFCMEEKQNKFQVYQLRFQFLPHAYYQQEKCLRPEDILRFMETRFFKLLMESIKKKNNKASAFRNVNTRRATQRDLDNAGELGRSRGEQEGDEEEEGHIVDAEAEEGDADASDAKRKEKQEEEVDYESEEEEEREGEENDDEDMQEERNPHREGARKTQEQDEEVGLGTEEDPSLPALLTQPRKPTHSQEPQGPEAMERRVQAVREIHPFIDDYQYDTEESLWCQVTVKLPLMKINFDMSSLVVSLAHGAVIYATKGITRCLLNETTNNKNEKELVLNTEGINLPELFKYAEVLDLRRLYSNDIHAIANTYGIEAALRVIEKEIKDVFAVYGIAVDPRHLSLVADYMCFEGVYKPLNRFGIRSNSSPLQQMTFETSFQFLKQATMLGSHDELRSPSACLVVGKVVRGGTGLFELKQPLR

SEQ ID NO: 802798 - protein, 1720 aa, Homo sapiens; identical to SEQ ID NO: 802797

SEQ ID NO: 802799 - protein, 846 aa, Homo sapiens
VSGELCIVGECRGRQSSQQLGLDGSPGLGVAAKLLSNSELQLLLLLENHQEMQPWLGDTGASPDPGALDLACSEVLLLPAEQEPPFPSPPLPPTLIRGCPGEVMGRRGLSRWCPYRCIIKHLEGLVVQYDLTVRDSDGSVVQFLYGEDGLDIPKTQFLQPKQFPFLASNYEVIMKSQHLHEVLSRADPKKALHHFRAIKKWQSKHPNTLLRRGAFLSYSQKIQEAVKALKLESENRNGRSPGTQEMLRMWYELDEESRRKYQKKAAACPDPSLSVWRPDIYFASVSETFETKVDDYSQEWAAQTEKSYEKSELSLDRLRTLLQLKWQRSLCEPGEAVGLLAAQSIGEPSTQMTLNTFHFAGRGEMNVTLGIPRLREILMVASANIKTPMMSVPVLNTKKALKRVKSLKKQLTRVCLGEVLQKIDVQESFCMEEKQNKFQVYQLRFQFLPHAYYQQEKCLRPEDILRFMETRFFKLLMESIKKKNNKASAFRNVNTRRATQRDLDNAGELGRSRGEQEGDEEEEGHIVDAEAEEGDADASDAKRKEKQEEEVDYESEEEEEREGEENDDEDMQEERNPHREGARKTQEQDEEVGLGTEEDPSLPALLTQPRKPTHSQEPQGPEAMERRVQAVREIHPFIDDYQYDTEESLWCQVTVKLPLMKINFDMSSLVVSLAHGAVIYATKGITRCLLNETTNNKNEKELVLNTEGINLPELFKYAEVLDLRRLYSNDIHAIANTYGIEAALRVIEKEIKDVFAVYGIAVDPRHLSLVADYMCFEGVYKPLNRFGIRSNSSPLQQMTFETSFQFLKQATMLGSHDELRSPSACLVVGKVVRGGTGLFELKQPLR

SEQ ID NO: 802800 - protein, 938 aa, Homo sapiens
MLISKNMPWRRLQGISFGMYSAEELKKLSVKSITNPRYLDSLGNPSANGLYDLALGPADSKEVCSTCVQDFSNCSGHLGHIELPLTVYNPLLFDKLYLLLRGSCLNCHMLTCPRAVIHLLLCQLRVLEVGALQAVYELERILNRFLEENADPSASEIREELEQYTTEIVQNNLLGSQGAHVKNVCESKSKLIALFWKAHMNAKRCPHCKTGRSVVRKEHNSKLTITFPAMVHRTAGQKDSEPLGIEEAQIGKRGYLTPTSAREHLSALWKNEGFFLNYLFSGMDDDGMESRFNPSVFFLDFLVVPPSRYRPVSRLGDQMFTNGQTVNLQAVMKDVVLIRKLLALMAQEQKLPEEVATPTTDEEKDSLIAIDRSFLSTLPGQSLIDKLYNIWIRLQSHVNIVFDSEMDKLMMDKYPGIRQILEKKEGLFRKHMMGKRVDYAARSVICPDMYINTNEIGIPMVFATKLTYPQPVTPWNVQELRQAVINGPNVHPGASMVINEDGSRTALSAVDMTQREAVAKQLLTPATGAPKPQGTKIVCRHVKNGDILLLNRQPTLHRPSIQAHRARILPEEKVLRLHYANCKAYNADFDGDEMNAHFPQSELGRAEAYVLACTDQQYLVPKDGQPLAGLIQDHMVSGASMTTRGCFFTREHYMELVYRGLTDKVGRVKLLSPSILKPFPLWTGKQVVSTLLINIIPEDHIPLNLSGKAKITGKAWVKETPRSVPGFNPDSMCESQVIIREGELLCGVLDKAHYGSSAYGLVHCCYEIYGGETSGKVLTCLARLFTAYLQLYRGFTLGVEDILVKPKADVKRQRIIEESTHCGPQAVRAALNLPEAASYDEVRGKWQDAHLGKDQRDFNMIDLKFKEEVNHYSNEINKACMPFGLHRQFPENTLQLMVQSGAKGSTVNTMQISCLLGQIELEGRSTPADGVWQVTALL

SEQ ID NO: 802801 - protein, 147 aa, Homo sapiens
MLISKNMPWRRLQGISFGMYSAEELKKLSVKSITNPRYLDSLGNPSANGLYDLALGPADSKEVCSTCVQDFSNCSGHLGHIELPLTVYNPLLFDKLYLLLRGSCLNCHMLTCPRAVIHLLLCQLRVLEVGALQAVYELERILNRVGG

SEQ ID NO: 802802 - protein, 1720 aa, Homo sapiens; identical to SEQ ID NO: 802797

SEQ ID NO: 802803 - protein, 156 aa, Homo sapiens
ERERPGGDTQAEGSRRPGPLNKSLPSSLQVLDLRRLYSNDIHAIANTYGIEAALRVIEKEIKDVFAVYGIAVDPRHLSLVADYMCFEGVYKPLNRFGIRSNSSPLQQMTFETSFQFLKQATMLGSHDELRSPSACLVVGKVVRGGTGLFELKQPLR

SEQ ID NO: 802804 - protein, 277 aa, Homo sapiens [sequence omitted]

SEQ ID NO: 802805 - protein, 296 aa, Homo sapiens
MRGITTITVNQSLLSPLNLEVDSNIQAVYTQEKEQIKTLNNKFASFTDQVWFLEQQNKVLETKWSLLQQHKMAGSNMDNMFGSYINNLRRLLEQEKLRLEAELGNMQGLVEDFRNKYEDEINKPTEMENEFVLIKKDVDETYMNNVELESHLEGPTVRSGDPGAAVPDLQHVCGAVHGQQPLLDMDSIITEVKRQYKEVANCSRAEAESTYQIKYVELQTLARKHRDDLRHTKTQISKMNRNISQLQAEIEGLQGQGASLEATIPDAEHRGELAVKDANAKLSKLEATLQRVSTRS

SEQ ID NO: 802806 - protein, 68 aa, Homo sapiens
GSGPGGVRRGQAGKDHVPSERGVGSNREVDLRGNQQGEGEARERSRASCFAPLVQEALDAGGSGSRLR

SEQ ID NO: 802807 - protein, 296 aa, Homo sapiens; identical to SEQ ID NO: 802805

SEQ ID NO: 802808 - protein, 66 aa, Homo sapiens
RPRVLPGGAAGAAEAAGGGGVVERRQYKRLGPSPRTCPSQNGGRERAEVTLKRLLYTGDITKKGLR

SEQ ID NO: 802809 - protein, 305 aa, Homo sapiens
MGHALCVCSRGTVIIDNKRYLFIQKLGEGGFSYVDLVEGLHDGHFYALKRILCHEQQDREEAQREADMHRLFNHPNILRLVAYCLRERGAKHEAWLLLPFFKRGTLWNEIERLKDKGNFLTEDQILWLLLGICRGLEAIHAKGYAHRDLKPTNILLGDEGQPVLMDLGSMNQACIHVEGSRQALTLQDWAAQRCTISYRAPELFSVQSHCVIDERTDVWSLGCVLYAMMFGEGPYDMVFQKGDSVALAVQNQLSIPQSPRHSSALRQLLNSMMTVDPHQRPHIPLLLSQLEALQPPAPGQHTTQI

SEQ ID NO: 802810 - protein, 305 aa, Homo sapiens; identical to SEQ ID NO: 802809

SEQ ID NO: 802811 - protein, 305 aa, Homo sapiens; identical to SEQ ID NO: 802809

SEQ ID NO: 802812 - protein, 238 aa, Homo sapiens [sequence omitted]

SEQ ID NO: 802813 - protein, 238 aa, Homo sapiens [sequence omitted]

SEQ ID NO: 802814 - protein, 386 aa, Homo sapiens
MGHALCVCSRGTVIIDNKRYLFIQKLGEGGFSYVDLVEGLHDGHFYALKRILCHEQQDREEAQREADMHRLFNHPNILRLVAYCLRERGAKHEAWLLLPFFKRGTLWNEIERLKDKGNFLTEDQILWLLLGICRGLEAIHAKGYAHRDLKPTNILLGDEGQPVLMDLGSMNQACIHVEGSRQALTLQDWAAQRCTISYRAPELFSVQSHCVIDERTDVWSLGCVLYAMMFGEGPYDMVFQKGDSVALAVQNQLSIPQSPRHSSALRQLLNSMMTVDPHQRPHIPLSWPTYYPNLKKQHVEKMAPCALERGSHPSLESPPIPSRTSLTLGGSGVRTIISVLHLFFCFLPSKSKTWARGLTEWGWVGVGKRETGGIWNMALSRTVELT

SEQ ID NO: 802815 - protein, 305 aa, Homo sapiens; identical to SEQ ID NO: 802809

SEQ ID NO: 802816 - protein, 305 aa, Homo sapiens; identical to SEQ ID NO: 802809

SEQ ID NO: 802817 - protein, 230 aa, Homo sapiens
GTRITKARNFWERGAKHEAWLLLPFFKRGTLWNEIERLKDKGNFLTEDQILWLLLGICRGLEAIHAKGYAHRDLKPTNILLGDEGQPVLMDLGSMNQACIHVEGSRQALTLQDWAAQRCTISYRAPELFSVQSHCVIDERTDVWSLGCVLYAMMFGEGPYDMVFQKGDSVALAVQNQLSIPQSPRHSSALRQLLNSMMTVDPHQRPHIPLLLSQLEALQPPAPGQHTTQI

SEQ ID NO: 802818 - protein, 113 aa, Homo sapiens
MGHALCVCSRGTVIIDNKRYLFIQKLGEGGFSYVDLVEGLHDGHFYALKRILCHEQQDREEAQREADMHRLFNHPNILRLVAYCLRERGAKHEAWLLLPFFKRLEAHQYIAWR

SEQ ID NO: 802819 - protein, 190 aa, Homo sapiens
MGHALCVCSRGTVIIDNKRYLFIQKLGEGGFSYVDLVEGLHDGHFYALKRILCHEQQDREEAQREADMHRLFNHPNILRLVAYCLRERGAKHEAWLLLPFFKRGTLWNEIERLKDKGNFLTEDQILWLLLGICRGLEAIHAKGYAHRDLKPTNILLGDEGQPVLMDLGSMSQSCIFSSAFFLQIWEQENV

SEQ ID NO: 802820 - protein, 305 aa, Homo sapiens; identical to SEQ ID NO: 802809

SEQ ID NO: 802821 - protein, 347 aa, Homo sapiens
MGHALCVCSRGTVIIDNKRYLFIQKLGEGGFSYVDLVEGLHDGHFYALKRILCHEQQDREEAQREADMHRLFNHPNILRLVAYCLRERGAKHEAWLLLPFFKRGTLWNEIERLKDKGNFLTEDQILWLLLGICRGLEAIHAKGYAHRDLKPTNILLGDEGQPVLMDLGSMNQACIHVEGSRQALTLQVKESPGSFSHLFPIPTPSGACPSWSHDHDLCPTFELLGSLFQDWAAQRCTISYRAPELFSVQSHCVIDERTDVWSLGCVLYAMMFGEGPYDMVFQKGDSVALAVQNQLSIPQSPRHSSALRQLLNSMMTVDPHQRPHIPLLLSQLEALQPPAPGQHTTQI

SEQ ID NO: 802822 - protein, 350 aa, Homo sapiens
MGHALCVCSRGTVIIDNKRYLFIQKLGEGFLLEPHLGKVSAKWEGHPTPHQEISLGPSHVGDDHGPLLTPLAHSGFSYVDLVEGLHDGHFYALKRILCHEQQDREEAQREADMHRLFNHPNILRLVAYCLRERGAKHEAWLLLPFFKRGTLWNEIERLKDKGNFLTEDQILWLLLGICRGLEAIHAKGYAHRDLKPTNILLGDEGQPVLMDLGSMNQACIHVEGSRQALTLQDWAAQRCTISYRAPELFSVQSHCVIDERTDVWSLGCVLYAMMFGEGPYDMVFQKGDSVALAVQNQLSIPQSPRHSSALRQLLNSMMTVDPHQRPHIPLLLSQLEALQPPAPGQHTTQI

SEQ ID NO: 802823 - protein, 169 aa, Homo sapiens
MRPGCCYHSSRDLKPTNILLGDEGQPVLMDLGSMNQACIHVEGSRQALTLQDWAAQRCTISYRAPELFSVQSHCVIDERTDVWSLGCVLYAMMFGEGPYDMVFQKGDSVALAVQNQLSIPQSPRHSSALRQLLNSMMTVDPHQRPHIPLLLSQLEALQPPAPGQHTTQI

SEQ ID NO: 802824 - protein, 321 aa, Homo sapiens
MGHALCVCSRGTVIIDNKRYLFIQKLGEGGFSYVDLVEGLHDGHFYALKRILCHEQQDREEAQREADMHRLFNHPNILRLVAYCLRERGAKHEAWLLLPFFKRGTLWNEIERLKDKGNFLTEDQILWLLLGICRGLEAIHAKGYAHRDLKPTNILLGDEGQPVLMDLGSMNQACIHVEGSRQALTLQDWAAQRCTISYRAPELFSVQSHCVIDERTDVWSLGCVLYAMMFGEGPYDMVFQKGDSVALAVQNQLSIPQSPRHSSALRQLLNSMMTVDPHQRPHIPLLLSQLEALQPPAPGQHTTQNLLIWIPTNSIRTFFTL

SEQ ID NO: 802825 - protein, 305 aa, Homo sapiens; identical to SEQ ID NO: 802809

SEQ ID NO: 802826 - protein, 282 aa, Homo sapiens
MGHALCVCSRGTVIIDNKRYLFIQKLGEGGFSYVDLVEGLHDGHFYALKRILCHEQQDREEAQREADMHRLFNHPNILRLVAYCLRERGAKHEAWLLLPFFKRGTLWNEIERLKDKGNFLTEDQILWLLLGICRGLEAIHAKGYAHRDLKPTNILLGDEGQPVLMDLGSMNQACIHVEGSRQALTLQDWAAQRCTISYRAPELFSVQSHCVIDERTDVWSLGCVLYAMMFGEGPYDMVFQKGDSVALAVQNQLSIPQSPRIFSQWGGVPESNEEPGTRIKGA

SEQ ID NO: 802827 - protein, 277 aa, Homo sapiens
QVQGRAARSLIFPKRRRSVAVAAVVGRPSAGHKPPPVGGSWCADRGGREARSEREAMQKSEGSGGTQLKNRATGNYDQRTSSSTQLKHRNAVQGSKSSLSTSSPESARKLHPRPSDKLNPKTINPFGEQSRVPSAFAAIYSKGGIPCRLVHGSVKHRLQWECPPESLSFDPLLITLAEGLRETKHPYTFVSKEGFRELLLVKGAPEKAIPLLPRLIPVLKAALVHSDDEVFERGLNALVQLSVVVGPSLNDHLKHLLTSGSLSIIKSKIPTYCSICC

SEQ ID NO: 802828 - protein, 221 aa, Homo sapiens
MQKSEGSGGTQLKNRATGNYDQRTSSSTQLKHRNAVQGSKSSLSTSSPESARKLHPRPSDKLNPKTINPFGEQSRVPSAFAAIYSKGGIPCRLVHGSVKHRLQWECPPESLSFDPLLITLAEGLRETKHPYTFVSKEGFRELLLVKGAPEKAIPLLPRLIPVLKAALVHSDDEVFERGLNALVQLSVVVGPSLNDHLKHLLTSGSLSIIKSKIPTYCSICC

SEQ ID NO: 802829 - protein, 269 aa, Homo sapiens
MWNPHIRRANCNLSLSLLQEQLFDVKEDRNLAIKFHPKLPLNWSEREAMQKSEGSGGTQLKNRATGNYDQRTSSSTQLKHRNAVQGSKSSLSTSSPESARKLHPRPSDKLNPKTINPFGEQSRVPSAFAAIYSKGGIPCRLVHGSVKHRLQWECPPESLSFDPLLITLAEGLRETKHPYTFVSKEGFRELLLVKGAPEKAIPLLPRLIPVLKAALVHSDDEVFERGLNALVQLSVVVGPSLNDHLKHLLTSGSLSIIKSKIPTYCSICC

SEQ ID NO: 802830 - protein, 243 aa, Homo sapiens
MWNPHIRRANCNLSLSLLQEQLFDVKEDRNLAIKFHPKLPLNWSEREAMQKSEGSGGTQLKNRATGNYDQRTSSSTQLKHRNAVQGSKSSLSTSSPESARKLHPRPSDKLNPKTINPGLRETKHPYTFVSKEGFRELLLVKGAPEKAIPLLPRLIPVLKAALVHSDDEVFERGLNALVQLSVVVGPSLNDHLKHLLTSLSKRLMDKKFKEPITSALQKLEQHGGSGSLSIIKSKIPTYCSICC

SEQ ID NO: 802831 - protein, 134 aa, Homo sapiens [sequence omitted]

SEQ ID NO: 802832 - protein, 123 aa, Homo sapiens
MQKSEGSGGTQLKNRATGNYDQRTSSSTQLKHRNAVQGSKSSLSTSSPESARKLHPRPSDKLNPKTINPVHSDDEVFERGLNALVQLSVVVGPSLNDHLKHLLTSGSLSIIKSKIPTYCSICC

SEQ ID NO: 802833 - protein, 277 aa, Homo sapiens; identical to SEQ ID NO: 802827

SEQ ID NO: 802834 - protein, 277 aa, Homo sapiens; identical to SEQ ID NO: 802827

SEQ ID NO: 802835 - protein, 123 aa, Homo sapiens; identical to SEQ ID NO: 802832

SEQ ID NO: 802836 - protein, 184 aa, Homo sapiens
MWNPHIRRANCNLSLSLLQEQLFDVKEDRNLAIKFHPKLPLNWSEREAMQKSEGSGGTQLKNRATGNYDQRTSSSTQLKHRNAVQGSKSSLSTSSPESARKLHPRPSDKLNPKTINPFGEQSRVPSAFAAIYSKGGIPCRLVHGSVKHRLQWECPPESLSFDPLLITLAEVNMPSLEYLSENKH

SEQ ID NO: 802837 - protein, 304 aa, Homo sapiens
QVQGRAARSLIFPKRRRSVAVAAVVGRPSAGHKPPPVGGSWCADRGGREARSEREAMQKSEGSGGTQLKNRATGNYDQRTSSSTQLKHRNAVQGSKSSLSTSSPESARKLHPRPSDKLNPKTINPFGEQSRVPSAFAAIYSKGGIPCRLVHGSVKHRLQWECPPESLSFDPLLITLAEGLRETKHPYTFVSKEGFRELLLVKGAPEKAIPLLPRLIPVLKAALVHSDDEVFERGLNALVQLSVVVGPSLNDHLKHLLTSLSKRLMDKKFKEPITSALQKLEQHGGSGSLSIIKSKIPTYCSICC

SEQ ID NO: 802838 - protein, 221 aa, Homo sapiens; identical to SEQ ID NO: 802828

SEQ ID NO: 802839 - protein, 221 aa, Homo sapiens; identical to SEQ ID NO: 802828

SEQ ID NO: 802840 - protein, 277 aa, Homo sapiens; identical to SEQ ID NO: 802827

SEQ ID NO: 802841 - protein, 232 aa, Homo sapiens
WYWSRNPYDWRSVAVAAVVGRPSAGHKPPPVGGSWCADRGGREARLLQEQLFDVKEDRNLAIKFHPKLPLNWSEREAMQKSEGSGGTQLKNRATGNYDQRTSSSTQLKHRNAVQGSKSSLSTSSPESARKLHPRPSDKLNPKTINPGLRETKHPYTFVSKEGFRELLLVKGAPEKAIPLLPRLIPVLKAALVHSDDEVFERGLNALVQLSVVVGPSLNDHLKHLLTSVLVSA

SEQ ID NO: 802842 - protein, 304 aa, Homo sapiens; identical to SEQ ID NO: 802837

SEQ ID NO: 802843 - protein, 594 aa, Homo sapiens
LRCHSAWTRFFGSRVHSGPAPASAPMDAAFLLVLGLLAQSLCLSLGVPGWRRPTTLYPWRRAPALSRVRRAWVIPPISVSENHKRLPYPLVQIKSDKQQLGSVIYSIQGPGVDEEPRGVFSIDKFTGKVFLNAMLDREKTDRFRLRAFALDLGGSTLEDPTDLEIVVVDQNDNRPAFLQEAFTGRVLEGAVPGTYVTRAEATDADDPETDNAALRFSILQQGSPELFSIDELTGEIRTVQVGLDREVVAVYNLTLQVADMSGDGLTATASAIITLDDINDNAPEFTRDEFFMEAIEAVSGVDVGRLEVEDRDLPGSPNWVARFTILEGDPDGQFTIRTDPKTNEGVLSIVKALDYESCEHYELKVSVQNEAPLQAAALRAERGQAKVRVHVQDTNEPPVFQENPLRTSLAEGAPPGTLVATFSARDPDTEQLQRLSYSKDYDPEDWLQVDAATGRIQTQHVLSPASPFLKGGWYRAIVLAQDDASQPRTATGTLSIEILEVNDHAPVLAPPPPGSLCSEQTSQALWRQGETAPRAFIQWAGPIRGWVTGSGSAGRTSQVRYLAGRTPELRGGEVVRDWGRMDAWSRGGHKKERA

SEQ ID NO: 802844 - protein, 839 aa, Homo sapiens
LRCHSAWTRFFGSRVHSGPAPASAPMDAAFLLVLGLLAQSLCLSLGVPGWRRPTTLYPWRRAPALSRVRRAWVIPPISVSENHKRLPYPLVQIKSDKQQLGSVIYSIQGPGVDEEPRGVFSIDKFTGKVFLNAMLDREKTDRFRLRAFALDLGGSTLEDPTDLEIVVVDQNDNRPAFLQEAFTGRVLEGAVPGTYVTRAEATDADDPETDNAALRFSILQQGSPELFSIDELTGEIRTVQVGLDREVVAVYNLTLQVADMSGDGLTATASAIITLDDINDNAPEFTRDEFFMEAIEAVSGVDVGRLEVEDRDLPGSPNWVARFTILEGDPDGQFTIRTDPKTNEGVLSIVKALDYESCEHYELKVSVQNEAPLQAAALRAERGQAKVRVHVQDTNEPPVFQENPLRTSLAEGAPPGTLVATFSARDPDTEQLQRLSYSKDYDPEDWLQVDAATGRIQTQHVLSPASPFLKGGWYRAIVLAQDDASQPRTATGTLSIEILEVNDHAPVLAPPPPGSLCSEPHQGPGLLLGATDEDLPPHGAPFHFQLSPRLPELGRNWSLSQVNVSHARLRPRHQVPEGLHRLSLLLRDSGQPPQQREQPLNVTVCRCGKDGVCLPGAAALLAGGTGLSLGALVIVLASALLLLVLVLLVALRARFWKQSRGKGLLHGPQDDLRDNVLNYDEQGGGEEDQDAYDISQLRHPTALSLPLGPPPLRRDAPQGRLHPQPPRVLPTSPLDIADFINDGLEAADSDPSVPPYDTALIYDYEGDGSVAGTLSSILSSQGDEDQDYDYLRDWGPRFARLADMYGHPCGLEYGARWDHQAREGLSPGALLPRHRGRTA

SEQ ID NO: 802845 - protein, 359 aa, Homo sapiens
MVKLFIGNLPREATEQEIRSLFEQYGKVLECDIIKNYGFVHIEDKTAAEDAIRNLHHYKLHGVNINVEASKNKSKASTKLHVGNISPTCTNQELRAKFEEYGPVIECDIVKDYAFVHMERAEDAVEAIRGLDNTEFQGKRMHVQLSTSRLRTAPGMGDQSGCYRCGKEGHWSKECPVDRTGRVADFTEQYNEQYGAVRTPYTMGYGESMYYNDAYGALDYYKRYRVRSYEAVAAAAAASAYNYAEQTMSHLPQVQSTTVTSHLNSTSVDPYDRHLLPNSGAAATSAAMAAAAATTSSYYGRDRSPLRRAAAMLPTVGEGYGYGPESELSQASAATRNSLYDMARYEREQYVDRARYSAF

SEQ ID NO: 802846 - protein, 359 aa, Homo sapiens; identical to SEQ ID NO: 802845

SEQ ID NO: 802847 - protein, 359 aa, Homo sapiens; identical to SEQ ID NO: 802845

SEQ ID NO: 802848 - protein, 359 aa, Homo sapiens; identical to SEQ ID NO: 802845

SEQ ID NO: 802849 - protein, 219 aa, Homo sapiens [sequence omitted]

SEQ ID NO: 802850 - protein, 67 aa, Homo sapiens
  misc_feature (4)..(4): Xaa can be any naturally occurring amino acid
  misc_feature (35)..(35): Xaa can be any naturally occurring amino acid
  misc_feature (37)..(37): Xaa can be any naturally occurring amino acid
HSIXGALGGHLGCKKCGAWLPVSKSTPKVSTAAIXKXRGGPPSCRIRHELVSYVSEENEDCKQWLFN

SEQ ID NO: 802851 - protein, 151 aa, Homo sapiens
MVKLFIGNLPREATEQEIRSLFEQYGKVLECDIIKNYGFVHIEDKTAAEDAIRNLHHYKLHGVNINVEASKNKSKASTKLHVGNISPTCTNQELRAKFEEYGPVIECDIVKDYAFVHMERAEDAVEAIRGLDNTEFQGELLWAWVVAPSGV

SEQ ID NO: 802852 - protein, 151 aa, Homo sapiens
MVKLFIGNLPREATEQEIRSLFEQYGKVLECDIIKNYGFVHIEDKTAAEDAIRNLHHYKLHGVNINVEASKNKSKASTKLHVGNISPTCTNQELRAKFEEIRSLFEQYGKVLECDIIKNYGSGTPLILLSLGVESFSLPTCSISFPFKMTM

SEQ ID NO: 802853 - protein, 67 aa, Homo sapiens; identical to SEQ ID NO: 802850
  misc_feature (4)..(4): Xaa can be any naturally occurring amino acid
  misc_feature (35)..(35): Xaa can be any naturally occurring amino acid
  misc_feature (37)..(37): Xaa can be any naturally occurring amino acid

SEQ ID NO: 802854 - protein, 359 aa, Homo sapiens; identical to SEQ ID NO: 802845

SEQ ID NO: 802855 - protein, 359 aa, Homo sapiens; identical to SEQ ID NO: 802845

SEQ ID NO: 802856 - protein, 359 aa, Homo sapiens; identical to SEQ ID NO: 802845

SEQ ID NO: 802857 - protein, 143 aa, Homo sapiens
MVKLFIGNLPREATEQEIRSLFEQYGKVLECDIIKNYGFVHIEDKTAAEDAIRNLHHYKLHGVNINVEASKNKSKASTKLHVGNISPTCTNQELRAKFEEYGPVIECDIVKDYAFVHMERAEDAVEAIRGLDNTEFQGRIIAD

SEQ ID NO: 802858 - protein, 67 aa, Homo sapiens; identical to SEQ ID NO: 802850
  misc_feature (4)..(4): Xaa can be any naturally occurring amino acid
  misc_feature (35)..(35): Xaa can be any naturally occurring amino acid
  misc_feature (37)..(37): Xaa can be any naturally occurring amino acid

SEQ ID NO: 802859 - protein, 67 aa, Homo sapiens; identical to SEQ ID NO: 802850
  misc_feature (4)..(4): Xaa can be any naturally occurring amino acid
  misc_feature (35)..(35): Xaa can be any naturally occurring amino acid
  misc_feature (37)..(37): Xaa can be any naturally occurring amino acid

SEQ ID NO: 802860 - protein, 67 aa, Homo sapiens; identical to SEQ ID NO: 802850
  misc_feature (4)..(4): Xaa can be any naturally occurring amino acid
  misc_feature (35)..(35): Xaa can be any naturally occurring amino acid
  misc_feature (37)..(37): Xaa can be any naturally occurring amino acid

SEQ ID NO: 802861 - protein, 307 aa, Homo sapiens
PLPVPAPSIDRSTKPPLDRSLAPFDREPFTLGKKPPFSDKPSIPAGRSLGEHLPKIQKPPLPPTTERHERSSPLPGKKPPVPKHGWGPDRRENDEDDVHQRPLPQPALLPMSSNTFPSRSTKPSPMNPLPSSHMPGAFSESNSSFPQSASLPPYFSQGPSNRPPIRAEGRNFPLPLPNKPRPPSPAEEENSLNEEWYVSYITRPEAEAALRKINQDGTFLVRDSSKKTTTNPYVLMVLYKDKVYNIQIRYQKESQVYLLGTGLRGKEDFLSVSDIIDYFRKMPLLLIDGKNRGSRYQCTLTHAAGYP

SEQ ID NO: 802862 - protein, 230 aa, Homo sapiens [sequence omitted]

SEQ ID NO: 802863 - protein, 292 aa, Homo sapiens
PLPVPAPSIDRSTKPPLDRSLAPFDREPFTLGKKPPFSDKPSIPAGRSLGEHLPKIQKPPLPPTTERHERSSPLPGKKPPVPKHGWGPDRRENDEDDVHQRPLPQPALLPMSSNTFPSRSTKPSPMNPLPSSHMPGAFSESNSSFPQSASLPPYFSQGPSNRPPIRAEGRNFPLPLPNKPRPPSPAEEENSLNEEWYVSYITRPEAEAALRKINQDGTFLVRDSSKKTTTNPYVLMVLYKDKVYNIQIRYQKESQVYLLGTGLRGKEVRISNFDIFPKSLFMPLCMPSWSDL

SEQ ID NO: 802864 - protein, 71 aa, Homo sapiens
FPPPPPSNDAMIELYPGLLVRLPKKTKFMCNSADYLIVSQNVKLHAWFDGNISHIYVFYTHVGKESVTANE

SEQ ID NO: 802865 - protein, 237 aa, Homo sapiens
PLPVPAPSIDRSTKPPLDRSLAPFDREPFTLGKKPPFSDKPSIPAGRSLGEHLPKIQKPPLPPTTERHERSSPLPGKKPPVPKHGWGPDRRENDEDDVHQRPLPQPALLPMSSNTFPSRSTKPSPMNPLPSSHMPGAFSESNSSFPQSASLPPYFSQGPSNRPPIRAEGRNFPLPLPNKPRPPSPAEEENSLNEEWYVSYITRPEAEAALRKINQDAILAERLKKHHLFSVCKYPLD

SEQ ID NO: 802866 - protein, 103 aa, Homo sapiens
TDRLNFPCTSSITTDIVRDSSKKTTTNPYVLMVLYKDKVYNIQIRYQKESQVYLLGTGLRGKEDFLSVSDIIDYFRKMPLLLIDGKNRGSRYQCTLTHAAGYP

SEQ ID NO: 802867 - protein, 190 aa, Homo sapiens
PLPVPAPSIDRSTKPPLDRSLAPFDREPFTLGKKPPFSDKPSIPAGRSLGEHLPKIQKPPLPPTTERHERSSPLPGKKPPVPKHGWGPDRRENDEDDVHQRPLPQPALLPMSSNTFPSRSTKPSPMNPLPSSHMPGAFSESNSSFPQSASLPPYFSQGPSNRPPIRAEGRNFPLPLPNKPRPPSPAEEEG

SEQ ID NO: 802868 - protein, 100 aa, Homo sapiens
GGSEKQGLARPPGLGRLRARLPPRPGHRIVWGTGPAAGLIPLFLPASIEGEYVPVEGDEVTYKMCPIPPKNQKFQAVEVVLTQLAPHTPHETWSGQVVGS

SEQ ID NO: 802869 - protein, 153 aa, Homo sapiens
MTSESTSPPVVPPLHSPKSPVWPTFPFHREGSRVWERGGVPPRDLPSPLPTKRTRTYSATARASAGPVFKGVCKQFSRSQGHGFITPENGSEDIFVHVSDIEGEYVPVEGDEVTYKMCPIPPKNQKFQAVEVVLTQLAPHTPHETWSGQVVGS

SEQ ID NO: 802870 - protein, 104 aa, Homo sapiens
RYPQGRHISNVAILSNSAHTIEVCEQSLLAFTLSERWNGLSANAPYYKQFLTKKVPDSRAEFGTRRELVSSFFFFFFLFFFFFFFFNSGEVGKSVHAELPRLSR

SEQ ID NO: 802871 - protein, 427 aa, Homo sapiens
MQIDSLNHIQDKNEKDDSQKDTSKKVQTISDCEKQALAQSEPGQLADSKEETPKIEKEDGLTSQPGNEQWKSSDTLPVYDTLMFCASRNTDRIHIYTKDGKQMSCNFIPLDIKLDLWEDLPASFQLKQYRSLILRFVREWSSLTAMKQRIIRKSGQLFCSPILALEEITKQQTKQNCTKRYITKEDVAVASMDKVKNVGGHVRLITKESRPRDPFTKKLLEDGACVPFLNPYTVQADLTVKPSTSKGYLQAVDNEGNPLCLRCQQPTCQTKQACKANSWDSRFCSLKCQEEFWIRSNNSYLRAKVFETEHGVCQLCNVNAQELFLRLRDAPKSQRKNLLYATWTSKLPLEQLNEMIRNPGEGHFWQVDHIKPVYGGGGQCSLDNLQTLCTVCHKERTARQAKERSQVRRQSLASKHGSDITRFLVKK

SEQ ID NO: 802872 - protein, 600 aa, Homo sapiens
MTSCDESKRFREENTVVSSDPTKTAARDIIDYESDVEPETKRLKLAASEDHCSPSEETPSQSKQIRTPLVESVQEAKAQLTTPAFPVEGWQCSLCTYINNSELPYCEMCETPQGSAVMQIDSLNHIQDKNEKDDSQKDTSKKVQTISDCEKQALAQSEPGQLADSKEETPKIEKEDGLTSQPGNEQWKSSDTLPVYDTLMFCASRNTDRIHIYTKDGKQMSCNFIPLDIKLDLWEDLPASFQLKQYRSLILRFVREWSSLTAMKQRIIRKSGQLFCSPILALEEITKQQTKQNCTKRYITKEDVAVASMDKVKNVGGHVRLITKESRPRDPFTKKLLEDGACVPFLNPYTVQADLTVKPSTSKGYLQAVDNEGNPLCLRCQQPTCQTKQACKANSWDSRFCSLKCQEEFWIRSNNSYLRAKVFETEHGVCQLCNVNAQELFLRLRDAPKSQRKNLLYATWTSKLPLEQLNEMIRNPGEGHFWQVDHIKPVYGGGGQCSLDNLQTLCTVCHKERTARQAKERSQVRRQSLASKHGSDITRFLERTKLHESHKVTGAEQGLQVSGLPDSAAPEGGAAHTNDQRRCQRMKQPLTEVQILSHSS

SEQ ID NO: 802873 - protein, 344 aa, Homo sapiens
RQNRIRKRSNLPRQSHFSMTGLCGYSAPDMRGLRLIMIPVELLLCYLLLHPVDATSYGKQTNVLMHFPLSLESQTPSSDPLSCQFLHPKSLPGFSHMAPLPKFLVSLALRNALEEAGCQADVWALQLQLYRQGGVNATQVLIQHLRGLQKGRSTERNVSVEALASALQLLAREQQSTGRVGRSLPTEDCENEKEQAVHNVVQLLPGVGTFYNLGTALYYATQNCLGKARERGRDGAIDLGYDLLMTMAGMSGGPMGLAISAALKPALRSGVQQLIQYYQDQKDANISQPETTKEGLRAISDVSDLEETTTLASFISEVVSSAPYWGWAIIKSYDLDPGAGSLEI

SEQ ID NO: 802874 - protein, 315 aa, Homo sapiens [sequence omitted]

SEQ ID NO: 802875 - protein, 697 aa, Homo sapiens
MACEIMPLQSSQEDERPLSPFYLSAHVPQVSNVSATGELLERTIRSAVEQHLFDVNNSGGQSSEDSESGTLSASSATSARQRRRQSKEQDEVRHGRDKGLINKENTPSGFNHLDDCILNTQEVEKVHKNTFGCAGERSKPKRQKSSTKLSELHDNQDGLVNMESLNSTRSHERTGPDDFEWMSDERKGNEKDGGHTQHFESPTMKIQEHPSLSDTKQQRNQDAGDQEESFVSEVPQSDLTALCDEKNWEEPIPAFSSWQRENSDSDEAHLSPQAGRLIRQLLDEDSDPMLSPRFYAYGQSRQYLDDTEVPPSPPNSHSFMRRRSSSLGSYDDEQEDLTPAQLTRRIQSLKKKIRKFEDRFEEEKKYRPSHSDKAANPEVLKWTNDLAKFRRQLKESKLKISEEDLTPRMRQRSNTLPKSFGSQLEKEDEKKQELVDKAIKPSVEATLESIQRKLQEKRAESSRPEDIKDMTKDQIANEKVALQKALLYYESIHGRPVTKNERQVMKPLYDRYRLVKQILSRANTIPIIGSPSSKRRSPLLQPIIEGETASFFKEIKEEEEGSEDDSNVKPDFMVTLKTDFSARCFLDQFEDDADGFISPMDDKIPSKCSQDTGLSNLHAASIPELLEHLQEMREEKKRIRKKLRDFEDNFFRQNGRNVQKEDRTPMAEEYSEYKHIKAKLRLLEVLISKRDTDSKSM

SEQ ID NO: 802876 - protein, 199 aa, Homo sapiens
SRTCYPGIPMLSPRFYAYGQSRQYLDDTEVPPSPPNSHSFMRRRSSSLGSYDDEQEDLTPAQLTRRIQSLKKKIRKFEDRFEEEKKYRPSHSDKAANPEVLKWTNDLAKFRRQLKESKLKISEEDLTPRMRQRSNTLPKSFGSQLEKEDEKKQELVDKAIKPSVEATLESIQRKLQEKRAESSRPEDIKDTRREVPARS

SEQ ID NO: 802877 - protein, 494 aa, Homo sapiens [sequence omitted]

SEQ ID NO: 802878 - protein, 180 aa, Homo sapiens
ESVPSSTQPIIGSPSSKRRSPLLQPIIEGETASFFKEIKEEEEGSEDDSNVKPDFMVTLKTDFSARCFLDQFEDDADGFISPMDDKIPSKCSQDTGLSNLHAASIPELLEHLQEMREEKKRIRKKLRDFEDNFFRQNGRNVQKEDRTPMAEEYSEYKHIKAKLRLLEVLISKRDTDSKSM

SEQ ID NO: 802879 - protein, 697 aa, Homo sapiens; identical to SEQ ID NO: 802875

SEQ ID NO: 802880 - protein, 697 aa, Homo sapiens; identical to SEQ ID NO: 802875

SEQ ID NO: 802881 - protein, 697 aa, Homo sapiens; identical to SEQ ID NO: 802875

SEQ ID NO: 802882 - protein, 579 aa, Homo sapiens [sequence omitted]

SEQ ID NO: 802883 - protein, 697 aa, Homo sapiens; identical to SEQ ID NO: 802875

SEQ ID NO: 802884 - protein, 669 aa, Homo sapiens
MACEIMPLQSSQEDERPLSPFYLSAHVPQVSNVSATGELLERTIRSAVEQHLFDVNNSGGQSSEDSESGTLSASSATSARQRRRQSKEQDEVRHGRDKGLINKENTPSGFNHLDDCILNTQEVEKVHKNTFGCAGERSKPKRQKSSTKLSELHDNQDGLVNMESLNSTRSHERTGPDDFEWMSDERKGNEKDGGHTQHFESPTMKIQEHPSLSDTKQQRNQDAGDQEESFVSEVPQSDLTALCDEKNWEEPIPAFSSWQRENSDSDEAHLSPQAGRLIRQLLDEDSDPMLSPRFYAYGQSRQYLDDTEVPPSPPNSHSFMRRRSSSLGSYDDEQEDLTPAQLTRRIQSLKKKIRKFEDRFEEEKKYRPSHSDKAANPEVLKWTNDLAKFRRQLKESKLKISEEDLTPRMRQRSNTLPKSFGSQLEKEDEKKQELVDKAIKPSVEATLESIQRKLQEKRAESSRPEDIKDMTKDQIANEKVALQKALLYYESIHGRPVTKNERQVMKPLYDRYRLVKQILSRANTIPIIEEEEGSEDDSNVKPDFMVTLKTDFSARCFLDQFEDDADGFISPMDDKIPSKCSQDTGLSNLHAASIPELLEHLQEMREEKKRIRKKLRDFEDNFFRQNGRNVQKEDRTPMAEEYSEYKHIKAKLRLLEVLISKRDTDSKSM

SEQ ID NO: 802885 - protein, 125 aa, Homo sapiens
MVTLKTDFSARCFLDQFEDDADGFISPMDDKIPSKCSQDTGLSNLHAASIPELLEHLQEMREEKKRIRKKLRDFEDNFFRQNGRNVQKEDRTPMAEEYSEYKHIKAKLRLLEVLISKRDTDSKSM

SEQ ID NO: 802886 - protein, 697 aa, Homo sapiens; identical to SEQ ID NO: 802875

SEQ ID NO: 802887 - protein, 697 aa, Homo sapiens; identical to SEQ ID NO: 802875

SEQ ID NO: 802888 - protein, 697 aa, Homo sapiens; identical to SEQ ID NO: 802875

SEQ ID NO: 802889 - protein, 647 aa, Homo sapiens
MACEIMPLQSSQEDERPLSPFYLSAHVPQVSNVSATGELLERTIRSAVEQHLFDVNNSGGQSSEDSESGTLSASSATSARQRRRQSKEQDEVRHGRDKGLINKENTPSGFNHLDDCILNTQEVEKVHKNTFGCAGERSKPKRQKSSTKLSELHDNQDGLVNMESLNSTRSHERTGPDDFEWMSDERKGNEKDGGHTQHFESPTMKIQEHPSLSDTKQQRNQDAGDQEESFVSEVPQSDLTALCDEKNWEEPIPAFSSWQRENSDSDEAHLSPQAGRLIRQLLDEDSDPMLSPRFYAYGQSRQYLDDTEVPPSPPNSHSFMRRRSSSLGSYDDEQEDLTPAQLTRRIQSLKKKIRKFEDRFEEEKKYRPSHSDKAANPEVLKWTNDLAKFRRQLKESKLKISEEDLTPRMRQRSNTLPKSFGSQLEKEDEKKQELVDKAIKPSVEATLESIQRKLQEKRAESSRPEDIKDMTKDQIANEKVALQKALLYYESIHGRPVTKNERQVMKPLYDRYRLVKQILSRANTIPIIGSPSSKRRSPLLQPIIEGETASFFKEIKEEEEGSEDDSNVKPDFMVTLKTDFSARCFLDQFEDDADGFISPMDDKIPSKCSQDTGLSNLHAASMYVILVVVVKCFGKNSSLKYYLSLCI

SEQ ID NO: 802890 - protein, 70 aa, Homo sapiens
MKNKEWASDFQGIEQKRLLSIRCVPSAVLDKKTYTQWSQRETSEVGAPVRSSSRNQIYLPPETNDEQAKP

SEQ ID NO: 802891 - protein, 292 aa, Homo sapiens
SRAPSATDAPGPSGGALPCRPVDRRPWPVDSRVSLLHPASLDMNVRRVESISAQLEEASSTGGFLYAQNSTKRSIKERLMKLLPCSAAKTSSPAIQNSVEDELEMATVRHRPEALELLEAQSKFTKKELQILYRGFKNECPSGVVNEETFKEIYSQFFPQGDSTTYAHFLFNAFDTDHNGAVSFEDFIKGLSILLRGTVQEKLNWAFNLYDINKDGYITKEEMLDIMKAIYDMMGKCTYPVLKEDAPRQHVETFFQKMDKNKDGVVTIDEFIESCQKDENIMRSMQLFENVI

SEQ ID NO: 802892 - protein, 258 aa, Homo sapiens
SRAPSATDAPGPSGGALPCRPVDRRPWPVDSRVSLLHPASLDMNVRRVESISAQLEEASSTGDSVEDELEMATVRHRPEALELLEAQSKFTKKELQILYRGFKNECPSGVVNEETFKEIYSQFFPQGDSTTYAHFLFNAFDTDHNGAVSFEDFIKGLSILLRGTVQEKLNWAFNLYDINKDGYITKEEMLDIMKAIYDMMGKCTYPVLKEDAPRQHVETFFQKMDKNKDGVVTIDEFIESCQKDENIMRSMQLFENVI

SEQ ID NO: 802893 - protein, 239 aa, Homo sapiens
MSMKVDYPWNFQIRAQPAILGFQPVRFSAENPVKCVQTSNLQNYSVEDELEMATVRHRPEALELLEAQSKFTKKELQILYRGFKNECPSGVVNEETFKEIYSQFFPQGDSTTYAHFLFNAFDTDHNGAVSFEDFIKGLSILLRGTVQEKLNWAFNLYDINKDGYITKEEMLDIMKAIYDMMGKCTYPVLKEDAPRQHVETFFQKMDKNKDGVVTIDEFIESCQKDENIMRSMQLFENVI

SEQ ID NO: 802894 - protein, 162 aa, Homo sapiens
MSGCRKRCKREILKFAQYLLRLLTGSLHTDSVEDELEMATVRHRPEALELLEAQSKFTKKELQILYRGFKNECPSGVVNEETFKEIYSQFFPQGDSTTYAHFLFNAFDTDHNGAVSFEDFIKGLSILLRGTVQEKLNWAFNLYDINKDGYITKEVRDASPTS

SEQ ID NO: 802895 - protein, 292 aa, Homo sapiens; identical to SEQ ID NO: 802891

SEQ ID NO: 802896 - protein, 188 aa, Homo sapiens
MATVRHRPEALELLEAQSKFTKKELQILYRGFKNECPSGVVNEETFKEIYSQFFPQGDSTTYAHFLFNAFDTDHNGAVSFEDFIKGLSILLRGTVQEKLNWAFNLYDINKDGYITKEEMLDIMKAIYDMMGKCTYPVLKEDAPRQHVETFFQKMDKNKDGVVTIDEFIESCQKDENIMRSMQLFENVI

SEQ ID NO: 802897 - protein, 157 aa, Homo sapiens
SRAPSATDAPGPSGGALPCRPVDRRPWPVDSRVSLLHPASLDMNVRRVESISAQLEEASSTGGFLYAQNSTKRSIKERLMKLLPCSAAKTSSPAIQNSVEDELEMATVRHRPEALELLEAQSKFTKKELQILYRGFKNVRTFFLTLPSHNSQRSIEK

SEQ ID NO: 802898 - protein, 116 aa, Homo sapiens
IRLERHTKTHARSVLKNAVAGDPQIMLPEHPQMNQACNQRENVAYPVFTSDTHIHPQAMRTFSLTFSAWIRGSFLISLPRGAVSYSSRNRQSDTRTRGNGGGCVWGLTRHLGLKTR

SEQ ID NO: 802899 - protein, 228 aa, Homo sapiens
MPRRGLVAGPDLEYFQRRYFTPAEVAQHNRPEDLWVSYLGRVYDLTSLAQEYKGNLLLKPIVEVAGQDISHWFDPKTRDIRKHIDPLTGCLRYCTPRGRFVHVPPQLPCSDWANDFGKPWWQGSYYEVGRLSAKTRSIRIINTLTSQEHTLEVGVLESIWEILHRYLPYNSHAASYTWKYEGKNLNMDFTLEENGIRDEEEEFDYLSMDGTLHTPAILLYFNDDLTEL

SEQ ID NO: 802900 - protein, 228 aa, Homo sapiens; identical to SEQ ID NO: 802899

SEQ ID NO: 802901 - protein, 228 aa, Homo sapiens; identical to SEQ ID NO: 802899

SEQ ID NO: 802902 - protein, 228 aa, Homo sapiens; identical to SEQ ID NO: 802899

SEQ ID NO: 802903 - protein, 93 aa, Homo sapiens
PLVGRSSSRDEHAGSGRSQLFSAGLSNQSFYCKAPYAAQSVMGAVVPPRPRRVPGSEWRSGKGACAKSRFWLRRNRRWAFSTTFGKIYKVYSI

SEQ ID NO: 802904 - protein, 344 aa, Homo sapiens
PNRPPPTPRSGPGLRRKPRRRRRRRRRRAGEEDGRSGFRLSPQHRTRRRERRGEREVDEGEATSLPGPCAAHVAGAAEDEDDEEQAVAAAPHAHKATANPPPGSAGRAAAIARDSQRHFWNIFGKNCRIQVILPSSGRLLEIILEAFWQELNLFLLLPVKPCLDLLVNWLHIYLNNQDSGTKAFCNVALHGPFYSACQAVFYTFVFRHKQLLSGNLKEGLQYLQSLNFERIVMSQLNPLKICLPSVVNFFAAITNKYQLVFCYTIIERNNRQMLPVIRSTTGGDSVQTCTNPLDTFVPFDPCVLKRSKKFIDPIYQVWEDMSAEEAFSWEHVLSDAATLLQSER

SEQ ID NO: 802905 - protein, 158 aa, Homo sapiens
PNRPPPTPRSGPGLRRKPRRRRRRRRRRAGEEDGRSGFRLSPQHRTRRRERRGEREVDEGEATSLPGPCAAHVAGAAEDEDDEEQAVAAAPHAHKATANPPPGSAGRAAAIARDSQRHFWNIFGKNCRIQVILPSSGRLLEIILEAFWQELNLFLLLL

SEQ ID NO: 802906 - protein, 347 aa, Homo sapiens
PNRPPPTPRSGPGLRRKPRRRRRRRRRRAGEEDGRSGFRLSPQHRTRRRERRGEREVDEGEATSLPGPCAAHVAGAAEDEDDEEQAVAAAPHAHKATANPPPGSAGRAAAIARDSQRHFWNIFGKNCRIQVILPSSGRLLEIILEAFWQELNLFLLLPVKPCLDLLVNWLHIYLNNQDSGTKAFCNVALHGPFYSACQAVFYTFVFRHKQLLSGNLKEGLQYLQSLNFERIVMSQLNPLKICLPSVVNFFAAITNKYQLVFCYTIIERNNRQMLPVIRSTTGGDSVQTCTNPLDTFVPFDPCVLKRFFNLLLSLGRHLLDRNTELEGLCQQNVIQAIRSSDRKLSIV

SEQ ID NO: 802907 - protein, 156 aa, Homo sapiens
PNRPPPTPRSGPGLRRKPRRRRRRRRRRAGEEDGRSGFRLSPQHRTRRRERRGEREVDEGEATSLPGPCAAHVAGAAEDEDDEEQAVAAAPHAHKATANPPPGSAGRAAAIARDSQRHFWNIFGKNCRIQVILPSSGRLLEIILEAFWQELNLFLL

SEQ ID NO: 802908 - protein, 158 aa, Homo sapiens; identical to SEQ ID NO: 802905

SEQ ID NO: 802909 - protein, 338 aa, Homo sapiens
PNRPPPTPRSGPGLRRKPRRRRRRRRRRAGEEDGRSGFRLSPQHRTRRRERRGEREVDEGEATSLPGPCAAHVAGAAEDEDDEEQAVAAAPHAHKATANPPPGSAGRAAAIARDSQRHFWNIFGKNCRIQVILPSSGRLLEIILEAFWQELNLFLLLPVKPCLDLLVNWLHIYLNNQDSGTKAFCNVALHGPFYSACQAVFYTFVFRHKQLLSGNLKEGLQYLQSLNFERIVMSQLNPLKICLPSVVNFFAAITNKYQLVFCYTIIERNNRQMLPVIRSTTGGDSVQTCTNPLDTFVPFDPCVLKRSKKFIDPIYQVWEDMSAEELQEFKKPMKKVSL

SEQ ID NO: 802910 - protein, 158 aa, Homo sapiens; identical to SEQ ID NO: 802905

SEQ ID NO: 802911 - protein, 83 aa, Homo sapiens
INDVGAPGDTPVHTGTHRCTHTCTCTHLHMHARTGACMHLWAVPEHRRGRWCAGGSVEAPLPPSKLGPQPPPATRVFAQMEWR

SEQ ID NO: 802912 - protein, 110 aa, Homo sapiens
ARGARCFRSLEKSFSGQCLPSAHSSNLISAVKPESCYLEGGGDPPGSGTKSDSVMVSEAPVVVSTQTRAAVEAVRAPTGTLVYCVIAAIRKVASSDGPIWGIKPVRWCQP

SEQ ID NO: 802913 - protein, 109 aa, Homo sapiens
MRALLPLLSAGATACVRDPWPDLSAPDNRKSLFRLKKKKKKKKACGRLSRTQEAQNWEKSLWLGLFQVSGSMGCSKPGLGSSEGWTSLELDRTLKTGFLVLITYMGYNE

SEQ ID NO: 802914 - protein, 204 aa, Homo sapiens
MGADGFVPLGTLLQLPQFRGFSAEDVQRVVDTNRKQRFALQLGDPSTGLLIRANQGHSLQVPKLELMPLETPQALPPMLVHGTFWKHWPSILLKGLSCQGRTHIHLAPGLPGDPGIISGMRSHCEIAVFIDGPLALADGIPFFRSANGVILTPGNTDGFLLPKYFKEALQLRPTRKPLSLAGDEETECQSSPKHSSRERRRIQQ

SEQ ID NO: 802915 - protein, 253 aa, Homo sapiens
MNFSGGGRQEAAGSRGRRAPRPREQDRDVQLSKALSYALRHGALKLGLPMGADGFVPLGTLLQLPQFRGFSAEDVQRVVDTNRKQRFALQLGDPSTGLLIRANQGHSLQVPKLELMPLETPQALPPMLVHGTFWKHWPSILLKGLSCQGRTHIHLAPGLPGDPGIISGMRSHCEIAVFIDGPLALADGIPFFRSANGVILTPGNTDGFLLPKYFKEALQLRPTRKPLSLAGDEETECQSSPKHSSRERRRIQQ

SEQ ID NO: 802916 - protein, 138 aa, Homo sapiens
MPLETPQALPPMLVHGTFWKHWPSILLKGLSCQGRTHIHLAPGLPGDPGIISGMRSHCEIAVFIDGPLALADGIPFFRSANGVILTPGNTDGFLLPKYFKEALQLRPTRKPLSLAGDEETECQSSPKHSSRERRRIQQ

SEQ ID NO: 802917 - protein, 138 aa, Homo sapiens; identical to SEQ ID NO: 802916

SEQ ID NO: 802918 - protein, 109 aa, Homo sapiens
MGGAQLGLYLLLGQAPARALQQQGHLRIHGLNQPPGPSGSAPSPKRKCPPPFHAAFHWRVRRGRGSWRFVPAAPTLPPGPSARRPCLPDHPAGRTSDLGCGARPPCAPG

SEQ ID NO: 802919 - protein, 138 aa, Homo sapiens; identical to SEQ ID NO: 802916

SEQ ID NO: 802920 - protein, 138 aa, Homo sapiens; identical to SEQ ID NO: 802916

SEQ ID NO: 802921 - protein, 136 aa, Homo sapiens
MPLETPQALPPMLVHGTFWKHWPSILLKGLSCQGRTHIHLAPGLPGDPGIISGMRSHCEIAVFIDGPLALADGIPFFRSANGVILTPGNTDGFLLPKYFKEALQLRPTRENHHPSPYSLFLKAVPFCPHLSPSFQP

SEQ ID NO: 802922 - protein, 160 aa, Homo sapiens
MPLETPQALPPMLVHGTFWKHWPSILLKGLSCQGRTHIHLAPGLPGDPGIISGMRSHCEIAVFIDGPLALAGELDKAGAALAFGEGMSHISGSVSNGIPFFRSANGVILTPGNTDGFLLPKYFKEALQLRPTRENHHPSPYSLFLKAVPFCPHLSPSFQP

SEQ ID NO: 802923 - protein, 122 aa, Homo sapiens
MPLETPQALPPMLVHGTFWKHWPSILLKGLSCQGRTHIHLAPGLPGDPGIISGMRSHCEIAVFIDGPLALAGNTDGFLLPKYFKEALQLRPTRKPLSLAGDEETECQSSPKHSSRERRRIQQ

SEQ ID NO: 802924 - protein, 61 aa, Homo sapiens
MPLETPQALPPMLVHGTFWKHWPSILLKGLSCQGRTHIHLAPGLPGDPGIISARQGSSRVY

SEQ ID NO: 802925 - protein, 253 aa, Homo sapiens; identical to SEQ ID NO: 802915

SEQ ID NO: 802926 - protein, 138 aa, Homo sapiens; identical to SEQ ID NO: 802916

SEQ ID NO: 802927 - protein, 288 aa, Homo sapiens
MGGAQLGLYLLLGQAPARALQQQGHLRIHGLNVLTMNFSGGGRQEAAGSRGRRAPRPREQDRDVQLSKALSYALRHGALKLGLPMGADGFVPLGTLLQLPQFRGFSAEDVQRVVDTNRKQRFALQLGDPSTGLLIRANQGHSLQVPKLELMPLETPQALPPMLVHGTFWKHWPSILLKGLSCQGRTHIHLAPGLPGDPGIISGMRSHCEIAVFIDGPLALADGIPFFRSANGVILTPGNTDGFLLPKYFKEALQLRPTRKPLSLAGDEETECQSSPKHSSRERRRIQQ

SEQ ID NO: 802928 - protein, 138 aa, Homo sapiens; identical to SEQ ID NO: 802916

SEQ ID NO: 802929 - protein, 136 aa, Homo sapiens; identical to SEQ ID NO: 802921

SEQ ID NO: 802930 - protein, 162 aa, Homo sapiens
MPLETPQALPPMLVHGTFWKHWPSILLKGLSCQGRTHIHLAPGLPGDPGIISGMRSHCEIAVFIDGPLALAGELDKAGAALAFGEGMSHISGSVSNGIPFFRSANGVILTPGNTDGFLLPKYFKEALQLRPTRKPLSLAGDEETECQSSPKHSSRERRRIQQ

SEQ ID NO: 802931 - protein, 82 aa, Homo sapiens
RIGGSAARPAAVEDPGGLSPPPRRFRPVRRHVGPASRTTLRGAPAIWGAGLGLPALLADGVTLGLNHELLWRREAGSSRVQG

SEQ ID NO: 802932 - protein, 125 aa, Homo sapiens
RIGGSAARPAAVEDPGGLSPPPRRFRPVRRHVGPASRTTLRGAPAIWGAGLGLPALLADGVTLGPRRAAVQGSVLCPAPWGLEAGASHGSWSPSKVTTLVWGHPMSGMEQHPCIPQPRTPVCLGC

SEQ ID NO: 802933 - protein, 140 aa, Homo sapiens
MAIKAHQAPATFPTPHSFLLPPSTPGMFPATPCCSPHLGCPPNSSLPLEMLCHSRLGSGSRSSLGLLEPLVLTPLNTSSLANSPLHPGLGYRWPAQVWGPASNTSTGRSLCRPWAARGPALPTAGALRRAGHEAGGCPPI

SEQ ID NO: 802934 - protein, 82 aa, Homo sapiens
PHKRRTGYRCARPGRGLVPADGTDEVTKPRPRRRGCQGLGNPPPPVPIPLSFGVSPQRTRQHSCSFLILKMDCTFWHLKWFL

SEQ ID NO: 802935 - protein, 82 aa, Homo sapiens; identical to SEQ ID NO: 802934

SEQ ID NO: 802936 - protein, 418 aa, Homo sapiens
MRLSAGPDAGPSGNSSPWWPLATGAGNTSREAEALGEGNGPPRDVRNEELAKLEIAVLAVTFAVAVLGNSSVLLALHRTPRKTSRMHLFIRHLSLADLAVAFFQVLPQMCWDITYRFRGPDWLCRVVKHLQVFGMFASAYMLVVMTADRYIAVCHPLKTLQQPARRSRLMIAAAWVLSFVLSTPQYFVFSMIEVNNVTKARDCWATFIQPWGSRAYVTWMTGGIFVAPVVILGTCYGFICYNIWCNVRGKTASRQSKGAEQAGVAFQKGFLLAPCVSSVKSISRAKIRTVKMTFVIVTAYIVCWAPFFIIQMWSVWDPMSVWTESENPTITITALLGSLNSCCNPWIYMFFSGHLLQDCVQSFPCCQNMKEKFNKEDTDSMSRRQTFYSNNRSPTNSTGMWKDSPKSSKSIKFIPVST

SEQ ID NO: 802937 - protein, 682 aa, Homo sapiens
GSGVCGGDPVVSSSYRSVGCSEQQKPASSDVVLPATMSYTGFVQGSETTLQSTYSDTSAQPTCDYGYGTWNSGTNRGYEGYGYGYGYGQDNTTNYGYGMATSHSWEMPSSDTNANTSASGSASADSVLSRINQRLDMVPHLETDMMQGGVYGSGGERYDSYESCDSRAVLSERDLYRSGYDYSELDPEMEMAYEGQYDAYRDQFRMRGNDTFGPRAQGWARDARSGRPMASGYGRMWEDPMGARGQCMSGASRLPSLFSQNIIPEYGMFQGMRGGGAFPGGSRFGFGFGNGMKQMRRTWKTWTTADFRTKKKKRKQGGSPDEPDSKATRTDCSDNSDSDNDEGTEGEATEGLEGTEAVEKGSRVDGEDEEGKEDGREEGKEDPEKGALTTQDENGQTKRKLQAGKKSQDKQKKRQRDRMVERIQFVCSLCKYRTFYEDEMASHLDSKFHKEHFKYVGTKLPKQTADFLQEYVTNKTKKTEELRKTVEDLDGLIQQIYRDQDLTQEIAMEHFVKKVEAAHCAACDLFIPMQFGIIQKHLKTMDHNRNRRLMMEQSKKSSLMVARSILNNKLISKKLERYLKGENPFTDSPEEEKEQEEAEGGALDEGAQGEAAGISEGAEGVPAQPPVPPEPAPGAVSPPPPPPPEEEEEGAVPLLGGALQRQIRGIPGLDVEDDEEGGGGAP

SEQ ID NO: 802938 - protein, 243 aa, Homo sapiens [sequence omitted]

SEQ ID NO: 802939 - protein, 394 aa, Homo sapiens
GSGVCGGDPVVSSSYRSVGCSEQQKPASSDVVLPATMSYTGFVQGSETTLQSTYSDTSAQPTCDYGYGTWNSGTNRGYEGYGYGYGYGQDNTTNYGYGMATSHSWEMPSSDTNANTSASGSASADSVLSRINQRLDMVPHLETDMMQGGVYGSGGERYDSYESCDSRAVLSERDLYRSGYDYSELDPEMEMAYEGQYDAYRDQFRMRGNDTFGPRAQGWARDARSGRPMASGYGRMWEDPMGARGQCMSGASRLPSLFSQNIIPEYGMFQGMRGGGAFPGGSRFGFGFGNGMKQMRRTWKTWTTADFRTKKKKRKQGGSPDEPDSKATRTDCSDNSDSDNDEGTEGEATEGLEGTEAVEKGSRVDGEDEEGKEDGREEGKEDPEKGEFSWGAWC

SEQ ID NO: 802940 - protein, 486 aa, Homo sapiens
GSGVCGGDPVVSSSYRSVGCSEQQKPASSDVVLPATMSYTGFVQGSETTLQSTYSDTSAQPTCDYGYGTWNSGTNRGYEGYGYGYGYGQDNTTNYGYGMATSHSWEMPSSDTNANTSASGSASADSVLSRINQRLDMVPHLETDMMQGGVYGSGGERYDSYESCDSRAVLSERDLYRSGYDYSELDPEMEMAYEGQYDAYRDQFRMRGNDTFGPRAQGWARDARSGRPMASGYGRMWEDPMGARGQCMSGASRLPSLFSQNIIPEYGMFQGMRGGGAFPGGSRFGFGFGNGMKQMRRTWKTWTTADFRTKKKKRKQGGSPDEPDSKATRTDCSDNSDSDNDEGTEGEATEGLEGTEAVEKGSRVDGEDEEGKEDGREEGKEDPEKGALTTQDENGQTKRKLQAGKKSQDKQKKRQRDRMVERIQFVCSLCKYRTFYEDEMASHLDSKFHKEHFKYVGTKLPKQTADFLQEYVTNKTASGGTGARHR

SEQ ID NO: 802941 - protein, 486 aa, Homo sapiens
GRVGRPTRRRSVGCSEQQKPASSDVVLPATMSYTGFVQGSETTLQSTYSDTSAQPTCDYGYGTWNSGTNRGKCHPVIAVLSLGVVLAVFLCHCPAWPRLGVGRGHVSGVTYSLTGGPHQNDQGPSSFSGYGSSLSVTEDTLVSVFVSVSVCLPSACPHHLSVSVSLTAGYEGYGYGYGYGQDNTTNYGYGMATSHSWEMPSSDTNANTSASGSASADSVLSRINQRLDMVPHLETDMMQGGVYGSGGERYDSYESCDSRAVLSERDLYRSGYDYSELDPEMEMAYEGQYDAYRDQFRMRGNDTFGPRAQGWARDARSGRPMASGYGRMWEDPMGARGQCMSGASRLPSLFSQNIIPEYGMFQGMRGGGAFPGGSRFGFGFGNGMKQMRRTWKTWTTADFRTKKKKRKQGGSPDEPDSKATRTDCSDNSDSDNDEGTEGEATEGLEGTEAVEKGSRVDGEDEEGKEDGREEGKEDPEKGEFSWGAWC

SEQ ID NO: 802942 - protein, 243 aa, Homo sapiens [sequence omitted]

SEQ ID NO: 802943 - protein, 243 aa, Homo sapiens [sequence omitted]

SEQ ID NO: 802944 - protein, 387 aa, Homo sapiens
LLGHSRGSSAASSTKKKKRKQGGSPDEPDSKATRTDCSDNSDSDNDEGTEGEATEGLEGTEAVEKGSRVDGEDEEGKEDGREEGKEDPEKGALTTQDENGQTKRKLQAGKKSQDKQKKRQRDRMVERIQFVCSLCKYRTFYEDEMASHLDSKFHKEHFKYVGTKLPKQTADFLQEYVTNKTKKTEELRKTVEDLDGLIQQIYRDQDLTQEIAMEHFVKKVEAAHCAACDLFIPMQFGIIQKHLKTMDHNRNRRLMMEQSKKSSLMVARSILNNKLISKKLERYLKGENPFTDSPEEEKEQEEAEGGALDEGAQGEAAGISEGAEGVPAQPPVPPEPAPGAVSPPPPPPPEEEEEGAVPLLGGALQRQIRGIPGLDVEDDEEGGGGAP

SEQ ID NO: 802945 - protein, 265 aa, Homo sapiens
GGGGVTNKLSISVQNNRSVRHINGGCVGRKVGCMQNWRLSEKAEHIPRHRMRRYFSQSEHEKKELRKTVEDLDGLIQQIYRDQDLTQEIAMEHFVKKVEAAHCAACDLFIPMQFGIIQKHLKTMDHNRNRRLMMEQSKKSSLMVARSILNNKLISKKLERYLKGENPFTDSPEEEKEQEEAEGGALDEGAQGEAAGISEGAEGVPAQPPVPPEPAPGAVSPPPPPPPEEEEEGAVPLLGGALQRQIRGIPGLDVEDDEEGGGGAP

SEQ ID NO: 802946 - protein, 179 aa, Homo sapiens
MDDPKLHGNEEVQAAHCAACDLFIPMQFGIIQKHLKTMDHNRNRRLMMEQSKKSSLMVARSILNNKLISKKLERYLKGENPFTDSPEEEKEQEEAEGGALDEGAQGEAAGISEGAEGVPAQPPVPPEPAPGAVSPPPPPPPEEEEEGAVPLLGGALQRQIRGIPGLDVEDDEEGGGGAP

SEQ ID NO: 802947 - protein, 119 aa, Homo sapiens
RDQFRMRGNDTFGPRAQGWARDARSGRPMASGYGRMWEDPMGARGQCMSGASRLPSLFSQNIIPEYGMFQGMRGGGAFPGGSRFGFGFGNGMKQMRRTWKTWTTADFRVSGGSLPLWEA

SEQ ID NO: 802948 - protein, 70 aa, Homo sapiens
APALALASSASDSCSCWTFLSLAGARPLGSPDKADPVAQIRTSGRGRDPPRGLGGGWPPPPLATAACSGP

SEQ ID NO: 802949 - protein, 422 aa, Homo sapiens
GSGVCGGDPVVSSSYRSVGCSEQQKPASSDVVLPATMSYTGFVQGSETTLQSTYSDTSAQPTCDYGYGTWNSGTNRGYEGYGYGYGYGQDNTTNYGYGMATSHSWEMPSSDTNANTSASGSASADSVLSRINQRLDMVPHLETDMMQGGVYGSGGERYDSYESCDSRAVLSERDLYRSGYDYSELDPEMEMAYEGQYDAYRDQFRMRGNDTFGPRAQGWARDARSGRPMASGYGRMWEDPMGARGQCMSGASRLPSLFSQNIIPEYGMFQGMRGGGAFPGGSRFGFGFGNGMKQMRRTWKTWTTADFRTKKKKRKQGGSPDEPDSKATRTDCSDNSDSDNDEGTEGEATEGLEGTEAVEKGSRVDGEDEEGKEDGREEGKEDPEKGALTTQDENGQTKRKLQAGKKSQDKQKKRQRDRMVER

SEQ ID NO: 802950 - protein, 676 aa, Homo sapiens
GRVGRPTRRRSVGCSEQQKPASSDVVLPATMSYTGFVQGSETTLQSTYSDTSAQPTCDYGYGTWNSGTNRGYEGYGYGYGYGQDNTTNYGYGMATSHSWEMPSSDTNANTSASGSASADSVLSRINQRLDMVPHLETDMMQGGVYGSGGERYDSYESCDSRAVLSERDLYRSGYDYSELDPEMEMAYEGQYDAYRDQFRMRGNDTFGPRAQGWARDARSGRPMASGYGRMWEDPMGARGQCMSGASRLPSLFSQNIIPEYGMFQGMRGGGAFPGGSRFGFGFGNGMKQMRRTWKTWTTADFRTKKKKRKQGGSPDEPDSKATRTDCSDNSDSDNDEGTEGEATEGLEGTEAVEKGSRVDGEDEEGKEDGREEGKEDPEKGALTTQDENGQTKRKLQAGKKSQDKQKKRQRDRMVERIQFVCSLCKYRTFYEDEMASHLDSKFHKEHFKYVGTKLPKQTADFLQEYVTNKTKKTEELRKTVEDLDGLIQQIYRDQDLTQEIAMEHFVKKVEAAHCAACDLFIPMQFGIIQKHLKTMDHNRNRRLMMEQSKKSSLMVARSILNNKLISKKLERYLKGENPFTDSPEEEKEQEEAEGGALDEGAQGEAAGISEGAEGVPAQPPVPPEPAPGAVSPPPPPPPEEEEEGAVPLLGGALQRQIRGIPGLDVEDDEEGGGGAP

SEQ ID NO: 802951 - protein, 243 aa, Homo sapiens [sequence omitted]

SEQ ID NO: 802952 - protein, 394 aa, Homo sapiens; identical to SEQ ID NO: 802939

SEQ ID NO: 802953 - protein, 381 aa, Homo sapiens
GSGVCGGDPVVSSSYRSVGCSEQQKPASSDVVLPATMSYTGFVQGSETTLQSTYSDTSAQPTCDYGYGTWNSGTNRGYEGYGYGYGYGQDNTTNYGYGMATSHSWEMPSSDTNANTSASGSASADSVLSRINQRLDMVPHLETDMMQGGVYGSGGERYDSYESCDSRAVLSERDLYRSGYDYSELDPEMEMAYEGQYDAYRDQFRMRGNDTFGPRAQGWARDARSGRPMASGYGRMWEDPMGARGQCMSGASRLPSLFSQNIIPEYGMFQGMRGGGAFPGGSRFGFGFGNGMKQMRRTWKTWTTADFRTKKKKRKQGGSPDEPDSKATRTDCSDNSDSDNDEGTEGEATEGLEGTEAVEKGSRVVSGSGWAFSVCRQGELA

SEQ ID NO: 802954 - protein, 243 aa, Homo sapiens [sequence omitted]

SEQ ID NO: 802955 - protein, 243 aa, Homo sapiens [sequence omitted]

SEQ ID NO: 802956 - protein, 243 aa, Homo sapiens [sequence omitted]

SEQ ID NO: 802957 - protein, 424 aa, Homo sapiens
RYQMSRELPQIPEGRCSTFSGPASGLRTPLCTSGPPGSRQGILPSGPHLGQVHTLLPSLGSEALQQLSSDSLPVAAAAVSGFSLLPVGRKSSSPVPYVAVTAACRLSGPFYSRPPGPSLSLCWDRTSEAREQGLFQGLCLGWVRRQHYPWDTCSLSPSFPSCGRIQFVCSLCKYRTFYEDEMASHLDSKFHKEHFKYVGTKLPKQTADFLQEYVTNKTKKTEELRKTVEDLDGLIQQIYRDQDLTQEIAMEHFVKKVEAAHCAACDLFIPMQFGIIQKHLKTMDHNRNRRLMMEQSKKSSLMVARSILNNKLISKKLERYLKGENPFTDSPEEEKEQEEAEGGALDEGAQGEAAGISEGAEGVPAQPPVPPEPAPGAVSPPPPPPPEEEEEGAVPLLGGALQRQIRGIPGLDVEDDEEGGGGAP

SEQ ID NO: 802958 - protein, 120 aa, Homo sapiens
GRVGRPTRRRSVGCSEQQKPASSDVVLPATMSYTGFVQGSETTLQSTYSDTSAQPTCDYGYGTWNSGTNRGKCHSCDCCPVPWGCPGCVSLPLPCLAKVGSGEGACFWGYLLLNRRPSSE

SEQ ID NO: 802959 - protein, 154 aa, Homo sapiens
LPHGGPQYSQQQAHQQEAGALPEGEALVRACPVPSLVPACAPSLQCPRPSPQGENPFTDSPEEEKEQEEAEGGALDEGAQGEAAGISEGAEGVPAQPPVPPEPAPGAVSPPPPPPPEEEEEGAVPLLGGALQRQIRGIPGLDVEDDEEGGGGAP

SEQ ID NO: 802960 - protein, 65 aa, Homo sapiens
RPVGGRLAGGARAVEGPVVADGGHQARGPHLAAVVDEEEQAEVDEVRGAHHHGQQQQEAQRAGGA

SEQ ID NO: 802961 - protein, 118 aa, Homo sapiens
MRGERRPLWEEESNAKGGVWKMKVPKDSTSTVWKELLLATIGEQFTDCAAADDEVIGVSVSVRDREDVVQVWNVNASLVGEATVLEKIYELLPHITFKAVFYKPHEEHHAFEGGRGKH

SEQ ID NO: 802962 - protein, 118 aa, Homo sapiens; identical to SEQ ID NO: 802961

SEQ ID NO: 802963 - protein, 280 aa, Homo sapiens
MALAVSRAAPTSVLTQGAGAPLRISPPHKPDLLGSPSRPPALGRCTQQGLLNSLRLRFPLSLLGYKQIPRGEKSRLTQPPAPLPWEATPRLPLEPTTGEHCLQSSLSLGKFRSHISLDPPRPGWTALVCLELGPSLGSCLRVGGLSSLFECSTRSRKRAVCSGQWFLGHCMVLASLQGPPSLAAASQPRAGPFCQLKAERPAALGWRRAEKPPGVVSVLLKVMLTPVSQAAGRVAVRSVVTGLHHCGLPPREQLCPTTASLQLLPSAWAGAEPGVWVGEA

SEQ ID NO: 802964 - protein, 476 aa, Homo sapiens
MQGISEHCAGSPASPSSGVDTGRFCHMTYPKPRLKDLLPRTRPLPQGDLKAFSPPCLSVPIHTLGTAPCSPAASQAGLCSCSPHPAWRPGQKDAEVAERADGLAGRADLLHGAGILLRQRQMMDCTWTLPGMRATWQPAPFLPWDQTPWRVSFSWSPVLLAWGGVWSGEAHPCAHVLRPPASPCPPRPRRGCGDSGSSGMAQRAQAGSNQSRGKCGRDGRCPPRSSPGAPEAAERVESAETRGPGKSWILSPSSMSEPRRGKARRSPGRRRHPHSSFPQASSPSSPSRRETIPQVQSSGVPGAMSPEQTLFSRSPRGLSHLGQSLCRTVKESEAQRGKTMPPGSHSPSGAGQGRTARKGPAREEIPSSDSSAKPSVYPHPHLTATRWGRHHCPFSKVRKQRLREVQQLLPQLLRCRTAVPGVPELSLPEPSAPALLSEPWPSQSKPGSGCSEALGLVNPSCLGPGPPPGGDPEGCS

SEQ ID NO: 802965 - protein, 450 aa, Homo sapiens
MTYPNQRLKDLLPRTRPLPQGDLKAFSPPCLSVPIHTLGTAPCSPAASQAGLCSCSPHPAWRPGQKDAEVAERADGLAGRADLLHGAGILLRQRQMMDCTWTLPGMRATWQPAPFLPWDQTPWRVSFSWSPVLLAWGGVWSGEAHPCAHVLRPPASPCPPRPRRGCGDSGSSGMAQRAQAGSNQSRGKCGRDGRCPPRSSPGAPEAAERVESAETRGPGKSWILSPSSMSEPRRGKARRSPGRRRHPHSSFPQASSPSSPSRRETIPQVQSSGVPGAMSPEQTLFSRSPRGLSHLGQSLCRTVKESEAQRGKTMPPGSHSPSGAGQGRTARKGPAREEIPSSDSSAKPSVYPHPHLTATRWGRHHCPFSKVRKQRLREVQQLLPQLLRCRTAVPGVPELSLPEPSAPALLSEPWPSQSKPGSGCSEALGLVNPSCLGPGPPPGGDPEGCS

SEQ ID NO: 802966 - protein, 497 aa, Homo sapiens
MSWEAGALGGWSPRCSGSCSWMQGISEHCAGSPASPSSGVDTGRFCHMTYPNQRLKDLLPRTRPLPQGDLKAFSPPCLSVPIHTLGTAPCSPAASQAGLCSCSPHPAWRPGQKDAEVAERADGLAGRADLLHGAGILLRQRQMMDCTWTLPGMRATWQPAPFLPWDQTPWRVSFSWSPVLLAWGGVWSGEAHPCAHVLRPPASPCPPRPRRGCGDSGSSGMAQRAQAGSNQSRGKCGRDGRCPPRSSPGAPEAAERVESAETRGPGKSWILSPSSMSEPRRGKARRSPGRRRHPHSSFPQASSPSSPSRRETIPQVQSSGVPGAMSPEQTLFSRSPRGLSHLGQSLCRTVKESEAQRGKTMPPGSHSPSGAGQGRTARKGPAREEIPSSDSSAKPSVYPHPHLTATRWGRHHCPFSKVRKQRLREVQQLLPQLLRCRTAVPGVPELSLPEPSAPALLSEPWPSQSKPGSGCSEALGLVNPSCLGPGPPPGGDPEGCS

SEQ ID NO: 802967 - protein, 1104 aa, Homo sapiens
MERSPGEGPSPSPMDQPSAPSDPTDQPPAAHAKPDPGSGGQPAGPGAAGEALAVLTSFGRRLLVLIPVYLAGAVGLSVGFVLFGLALYLGWRRVRDEKERSLRAARQLLDDEEQLTAKTLYMSHRELPAWVSFPDVEKAEWLNKIVAQVWPFLGQYMEKLLAETVAPAVRGSNPHLQTFTFTRVELGEKPLRIIGVKVHPGQRKEQILLDLNISYVGDVQIDVEVKKYFCKAGVKGMQLHGVLRVILEPLIGDLPFVGAVSMFFIRRPTLDINWTGMTNLLDIPGLSSLSDTMIMDSIAAFLVLPNRLLVPLVPDLQDVAQLRSPLPRGIIRIHLLAARGLSSKDKYVKGLIEGKSDPYALVRLGTQTFCSRVIDEELNPQWGETYEVMVHEVPGQEIEVEVFDKDPDKDDFLGRMKLDVGKVLQASVLDDWFPLQGGQGQVHLRLEWLSLLSDAEKLEQVLQWNWGVSSRPDPPSAAILVVYLDRAQDLPLKKGNKEPNPMVQLSIQDVTQESKAVYSTNCPVWEEAFRFFLQDPQSQELDVQVKDDSRALTLGALTLPLARLLTAPELILDQWFQLSSSGPNSRLYMKLVMRILYLDSSEICFPTVPGCPGAWDVDSENPQRGSSVDAPPRPCHTTPDSQFGTEHVLRIHVLEAQDLIAKDRFLGGLVKGKSDPYVKLKLAGRSFRSHVVREDLNPRWNEVFEVIVTSVPGQELEVEVFDKDLDKDDFLGRCKVRLTTVLNSGFLDEWLTLEDVPSGRLHLRLERLTPRPTAAELEEVLQVNSLIQTQKSAELAAALLSIYMERAEDLPLRKGTKHLSPYATLTVGDSSHKTKTISQTSAPVWDESASFLIRKPHTESLELQVRGEGTGVLGSLSLPLSELLVADQLCLDRWFTLSSGQGQVLLRAQLGILVSQHSGVEAHSHSYSHSSSSLSEEPELSGGPPHITSSAPELRQRLTHVDSPLEAPAGPLGQVKLTLWYYSEERKLVSIVHGCRSLRQNGRDPPDPYVSLLLLPDKNRGTKRRTSQKKRTLSPEFNERFEWELPLDEAQRRKLDVSVKSNSSFMSRERELLGKVQLDLAETDLSQGVARWYDLMDNKDKGSS

SEQ ID NO: 802968 - protein, 292 aa, Homo sapiens
MYVNMKSAVFLQAGTVGISGLRILYLDSSEICFPTVPGCPGAWDVDSENPQRGSSVDAPPRPCHTTPDSQFGTEHVLRIHVLEAQDLIAKDRFLGGLVKGKSDPYVKLKLAGRSFRSHVVREDLNPRWNEVFEVIVTSVPGQELEVEVFDKDLDKDDFLGRCKVRLTTVLNSGFLDEWLTLEDVPSGRLHLRLERLTPRPTAAELEEVLQVNSLIQTQKSAELAAALLSIYMERAEDLPLRKGTKHLSPYATLTVGDSSHKTKTISQTSAPVWDESASFLIRKPHTESLELQ

SEQ ID NO: 802969 - protein, 156 aa, Homo sapiens
MERSPGEGPSPSPMDQPSAPSDPTDQPPAAHAKPDPGSGGQPAGPGAAGEALAVLTSFGRRLLVLIPVYLAGAVGLSVGFVLFGLALYLGWRRVRDEKERSLRAARQLLDDEEQLTAKTLYMSHRELPAWVSDHPRSSVQHSPLPQPTLFPAQDRR

SEQ ID NO: 802970 - protein, 827 aa, Homo sapiens
VLEDPCNPYSSLSDTMIMDSIAAFLVLPNRLLVPLVPDLQDVAQLRSPLPRGIIRIHLLAARGLSSKDKYVKGLIEGKSDPYALVRLGTQTFCSRVIDEELNPQWGETYEVMVHEVPGQEIEVEVFDKDPDKDDFLGRMKLDVGKVLQASVLDDWFPLQGGQGQVHLRLEWLSLLSDAEKLEQVLQWNWGVSSRPDPPSAAILVVYLDRAQDLPLKKGNKEPNPMVQLSIQDVTQESKAVYSTNCPVWEEAFRFFLQDPQSQELDVQVKDDSRALTLGALTLPLARLLTAPELILDQWFQLSSSGPNSRLYMKLVMRILYLDSSEICFPTVPGCPGAWDVDSENPQRGSSVDAPPRPCHTTPDSQFGTEHVLRIHVLEAQDLIAKDRFLGGLVKGKSDPYVKLKLAGRSFRSHVVREDLNPRWNEVFEVIVTSVPGQELEVEVFDKDLDKDDFLGRCKVRLTTVLNSGFLDEWLTLEDVPSGRLHLRLERLTPRPTAAELEEVLQVNSLIQTQKSAELAAALLSIYMERAEDLPLRKGTKHLSPYATLTVGDSSHKTKTISQTSAPVWDESASFLIRKPHTESLELQVRGEGTGVLGSLSLPLSELLVADQLCLDRWFTLSSGQGQVLLRAQLGILVSQHSGVEAHSHSYSHSSSSLSEEPELSGGPPHITSSAPELRQRLTHVDSPLEAPAGPLGQVKLTLWYYSEERKLVSIVHGCRSLRQNGRDPPDPYVSLLLLPDKNRGTKRRTSQKKRTLSPEFNERFEWELPLDEAQRRKLDVSVKSNSSFMSRERELLGKVQLDLAETDLSQGVARWYDLMDNKDKGSS

SEQ ID NO: 802971 - protein, 1148 aa, Homo sapiens
MERSPGEGPSPSPMDQPSAPSDPTDQPPAAHAKPDPGSGGQPAGPGAAGEALAVLTSFGRRLLVLIPVYLAGAVGLSVGFVLFGLALYLGWRRVRDEKERSLRAARQLLDDEEQLTAKTLYMSHRELPAWVSFPDVEKAEWLNKIVAQVWPFLGQYMEKLLAETVAPAVRGSNPHLQTFTFTRVELGEKPLRIIGVKVHPGQRKEQILLDLNISYVGDVQIDVEVKKYFCKAGVKGMQLHGVLRVILEPLIGDLPFVGAVSMFFIRRPTLDINWTGMTNLLDIPGLSSLSDTMIMDSIAAFLVLPNRLLVPLVPDLQDVAQLRSPLPRGIIRIHLLAARGLSSKDKYVKGLIEGKSDPYALVRLGTQTFCSRVIDEELNPQWGETYEVMVHEVPGQEIEVEVFDKDPDKDDFLGRMKLDVGKVLQASVLDDWFPLQGGQGQVHLRLEWLSLLSDAEKLEQVLQWNWGVSSRPDPPSAAILVVYLDRAQDLPLKKGNKEPNPMVQLSIQDVTQESKAVYSTNCPVWEEAFRFFLQDPQSQELDVQVKDDSRALTLGALTLPLARLLTAPELILDQWFQLSSSGPNSRLYMKLVMRILYLDSSEICFPTVPGCPGAWDVDSENPQRGSSVDAPPRPCHTTPDSQFGTEHVLRIHVLEAQDLIAKDRFLGGLVKGKSDPYVKLKLAGRSFRSHVVREDLNPRWNEVFEVIVTSVPGQELEVEVFDKDLDKDDFLGRCKVRLTTVLNSGFLDEWLTLEDVPSGRLHLRLERLTPRPTAAELEEVGQETGGRKGPKVGQDELFSYAFKAHARTQGVSYHSPAPCAPPQVLQVNSLIQTQKSAELAAALLSIYMERAEDLPLRKGTKHLSPYATLTVGDSSHKTKTISQTSAPVWDESASFLIRKPHTESLELQVRGEGTGVLGSLSLPLSELLVADQLCLDRWFTLSSGQGQVLLRAQLGILVSQHSGVEAHSHSYSHSSSSLSEEPELSGGPPHITSSAPELRQRLTHVDSPLEAPAGPLGQVKLTLWYYSEERKLVSIVHGCRSLRQNGRDPPDPYVSLLLLPDKNRGTKRRTSQKKRTLSPEFNERFEWELPLDEAQRRKLDVSVKSNSSFMSRERELLGKVQLDLAETDLSQGVARWYDLMDNKDKGSS

SEQ ID NO: 802972 - protein, 1072 aa, Homo sapiens
MERSPGEGPSPSPMDQPSAPSDPTDQPPAAHAKPDPGSGGQPAGPGAAGEALAVLTSFGRRLLVLIPVYLAGAVGLSVGFVLFGLALYLGWRRVRDEKERSLRAARQLLDDEEQLTAKTLYMSHRELPAWVSFPDVEKAEWLNKIVAQVWPFLGQYMEKLLAETVAPAVRGSNPHLQTFTFTRVELGEKPLRIIGVKVHPGQRKEQILLDLNISYVGDVQIDVEVKKYFCKAGVKGMQLHGVLRVILEPLIGDLPFVGAVSMFFIRRPTLDINWTGMTNLLDIPGLSSLSDTMIMDSIAAFLVLPNRLLVPLVPDLQDVAQLRSPLPRGIIRIHLLAARGLSSKDKYVKGLIEGKSDPYALVRLGTQTFCSRVIDEELNPQWGETYEVMVHEVPGQEIEVEVFDKDPDKDDFLGRMKLDVGKVLQASVLDDWFPLQGGQGQVHLRLEWLSLLSDAEKLEQVLQWNWGVSSRPDPPSAAILVVYLDRAQDLPLKKGNKEPNPMVQLSIQDVTQESKAVYSTNCPVWEEAFRFFLQDPQSQELDVQVKDDSRALTLGALTLPLARLLTAPELILDQWFQLSSSGPNSRLYMKLVMRILYLDSSEICFPTVPGCPGAWDVDSENPQRGSSVDAPPRPCHTTPDSQFGTEHVLRIHVLEAQDLIAKDRFLGGLVKGKSDPYVKLKLAGRSFRSHVVREDLNPRWNEVFEVIVTSVPGQELEVEVFDKDLDKDDFLGRCKVRLTTVLNSGFLDEWLTLEDVPSGRLHLRLERLTPRPTAAELEELRKGTKHLSPYATLTVGDSSHKTKTISQTSAPVWDESASFLIRKPHTESLELQVRGEGTGVLGSLSLPLSELLVADQLCLDRWFTLSSGQGQVLLRAQLGILVSQHSGVEAHSHSYSHSSSSLSEEPELSGGPPHITSSAPELRQRLTHVDSPLEAPAGPLGQVKLTLWYYSEERKLVSIVHGCRSLRQNGRDPPDPYVSLLLLPDKNRGTKRRTSQKKRTLSPEFNERFEWELPLDEAQRRKLDVSVKSNSSFMSRERELLGKVQLDLAETDLSQGVARWYDLMDNKDKGSS

SEQ ID NO: 802973 - protein, 1092 aa, Homo sapiens [sequence omitted]

SEQ ID NO: 802974 - protein, 1104 aa, Homo sapiens; identical to SEQ ID NO: 802967

SEQ ID NO: 802975 - protein, 749 aa, Homo sapiens
MERSPGEGPSPSPMDQPSAPSDPTDQPPAAHAKPDPGSGGQPAGPGAAGEALAVLTSFGRRLLVLIPVYLAGAVGLSVGFVLFGLALYLGWRRVRDEKERSLRAARQLLDDEEQLTAKTLYMSHRELPAWVSFPDVEKAEWLNKIVAQVWPFLGQYMEKLLAETVAPAVRGSNPHLQTFTFTRVELGEKPLRIIGVKVHPGQRKEQILLDLNISYVGDVQIDVEVKKYFCKAGVKGMQLHGVLRVILEPLIGDLPFVGAVSMFFIRRPTLDINWTGMTNLLDIPGLSSLSDTMIMDSIAAFLVLPNRLLVPLVPDLQDVAQLRSPLPRGIIRIHLLAARGLSSKDKYVKGLIEGKSDPYALVRLGTQTFCSRVIDEELNPQWGETYEVMVHEVPGQEIEVEVFDKDPDKDDFLGRMKLDVGKVLQASVLDDWFPLQGGQGQVHLRLEWLSLLSDAEKLEQVLQWNWGVSSRPDPPSAAILVVYLDRAQDLPLKKGNKEPNPMVQLSIQDVTQESKAVYSTNCPVWEEAFRFFLQDPQSQELDVQVKDDSRALTLGAILVSQHSGVEAHSHSYSHSSSSLSEEPELSGGPPHITSSAPELRQRLTHVDSPLEAPAGPLGQVKLTLWYYSEERKLVSIVHGCRSLRQNGRDPPDPYVSLLLLPDKNRGTKRRTSQKKRTLSPEFNERFEWELPLDEAQRRKLDVSVKSNSSFMSRERELLGKVQLDLAETDLSQGVARWYDLMDNKDKGSS

SEQ ID NO: 802976 - protein, 392 aa, Homo sapiens
MESGLLGSHHLAFVLIFLFNRCKVRLTTVLNSGFLDEWLTLEDVPSGRLHLRLERLTPRPTAAELEEVLQVNSLIQTQKSAELAAALLSIYMERAEDLPLRKGTKHLSPYATLTVGDSSHKTKTISQTSAPVWDESASFLIRKPHTESLELQVRGEGTGVLGSLSLPLSELLVADQLCLDRWFTLSSGQGQVLLRAQLGILVSQHSGVEAHSHSYSHSSSSLSEEPELSGGPPHITSSAPELRQRLTHVDSPLEAPAGPLGQVKLTLWYYSEERKLVSIVHGCRSLRQNGRDPPDPYVSLLLLPDKNRGTKRRTSQKKRTLSPEFNERFEWELPLDEAQRRKLDVSVKSNSSFMSRERELLGKVQLDLAETDLSQGVARWYDLMDNKDKGSS

SEQ ID NO: 802977 - protein, 1104 aa, Homo sapiens; identical to SEQ ID NO: 802967

SEQ ID NO: 802978 - protein, 1104 aa, Homo sapiens; identical to SEQ ID NO: 802967

SEQ ID NO: 802979 - protein, 1104 aa, Homo sapiens; identical to SEQ ID NO: 802967

SEQ ID NO: 802980 - protein, 864 aa, Homo sapiens
MERSPGEGPSPSPMDQPSAPSDPTDQPPAAHAKPDPGSGGQPAGPGAAGEALAVLTSFGRRLLVLIPVYLAGAVGLSVGFVLFGLALYLGWRRVRDEKERSLRAARQLLDDEEQLTAKTLYMSHRELPAWVSFPDVEKAEWLNKIVAQVWPFLGQYMEKLLAETVAPAVRGSNPHLQTFTFTRVELGEKPLRIIGVKVHPGQRKEQILLDLNISYVGDVQIDVEVKKYFCKAGVKGMQLHGVLRVILEPLIGDLPFVGAVSMFFIRRPTLDINWTGMTNLLDIPGLSSLSDTMIMDSIAAFLVLPNRLLVPLVPDLQDVAQLRSPLPRGIIRIHLLAARGLSSKDKYVKGLIEGKSDPYALVRLGTQTFCSRVIDEELNPQWGETYEVMVHEVPGQEIEVEVFDKDPDKDDFLGRMKLDVGKVLQASVLDDWFPLQGGQGQVHLRLEWLSLLSDAEKLEQVLQWNWGVSSRPDPPSAAILVVYLDRAQDLPLKKGNKEPNPMVQLSIQDVTQESKAVYSTNCPVWEEAFRFFLQDPQSQELDVQVKDDSRALTLGALTLPLARLLTAPELILDQWFQLSSSGPNSRLYMKLVMRILYLDSSEICFPTVPGCPGAWDVDSENPQRGSSVDAPPRPCHTTPDSQFGTEHVLRIHVLEAQDLIAKDRFLGGLVKGKSDPYVKLKLAGRSFRSHVVREDLNPRWNEVFEVIVTSVPGQELEVEVFDKDLDKDDFLGRCKVRLTTVLNSGFLDEWLTLEDVPSGRLHLRLERLTPRPTAAELEEVLQVNSLIQTQKSAELAAALLSIYMERAEDLPLRKGTKHLSPYATLTVGDSSHKTKTISQTSAPVWDESASFLIRKPHTESLELQ

SEQ ID NO: 802981 - protein, 647 aa, Homo sapiens
MERSPGEGPSPSPMDQPSAPSDPTDQPPAAHAKPDPGSGGQPAGPGAAGEALAVLTSFGRRLLVLIPVYLAGAVGLSVGFVLFGLALYLGWRRVRDEKERSLRAARQLLDDEEQLTAKTLYMSHRELPAWVSFPDVEKAEWLNKIVAQVWPFLGQYMEKLLAETVAPAVRGSNPHLQTFTFTRVELGEKPLRIIGVKVHPGQRKEQILLDLNISYVGDVQIDVEVKKYFCKAGVKGMQLHGVLRVILEPLIGDLPFVGAVSMFFIRRPTLDINWTGMTNLLDIPGLSSLSDTMIMDSIAAFLVLPNRLLVPLVPDLQDVAQLRSPLPRGIIRIHLLAARGLSSKDKYVKGLIEGKSDPYALVRLGTQTFCSRVIDEELNPQWGETYEVMVHEVPGQEIEVEVFDKDPDKDDFLGRMKLDVGKVLQASVLDDWFPLQGGQGQVHLRLEWLSLLSDAEKLEQVLQWNWGVSSRPDPPSAAILVVYLDRAQDLPLKKGNKEPNPMVQLSIQDVTQESKAVYSTNCPVWEEAFRFFLQDPQSQELDVQVKDDSRALTLGALTLPLARLLTAPELILDQWFQLSSSGPNSRLYMKLVMRILYLDSSEICFPTVPGCPGAWDVDSENPQRGSSVDAPPRPWYRLLRGAVPGIQ

SEQ ID NO: 802982 - protein, 397 aa, Homo sapiens
MERSPGEGPSPSPMDQPSAPSDPTDQPPAAHAKPDPGSGGQPAGPGAAGEALAVLTSFGRRLLVLIPVYLAGAVGLSVGFVLFGLALYLGWRRVRDEKERSLRAARQLLDDEEQLTAKTLYMSHRELPAWVSFPDVEKAEWLNKIVAQVWPFLGQYMEKLLAETVAPAVRGSNPHLQTFTFTRVELGEKPLRIIGVKVHPGQRKEQILLDLNISYVGDVQIDVEVKKYFCKAGVKGMQLHGVLRVILEPLIGDLPFVGAVSMFFIRRPTLDINWTGMTNLLDIPGLSSLSDTMIMDSIAAFLVLPNRLLVPLVPDLQDVAQLRSPLPRGIIRIHLLAARGLSSKDKYVKGLIEGKSDPYALVRLGTQTFCSRVIDEELNPQWGETYEPIFLPKCLGC

SEQ ID NO: 802983 - protein, 1114 aa, Homo sapiens
MERSPGEGPSPSPMDQPSAPSDPTDQPPAAHAKPDPGSGGQPAGPGAAGEALAVLTSFGRRLLVLIPVYLAGAVGLSVGFVLFGLALYLGWRRVRDEKERSLRAARQLLDDEEQLTAKTLYMSHRELPAWVSFPDVEKAEWLNKIVAQVWPFLGQYMEKLLAETVAPAVRGSNPHLQTFTFTRVELGEKPLRIIGVKVHPGQRKEQILLDLNISYVGDVQIDVEVKKYFCKAGVKGMQLHGVLRVILEPLIGDLPFVGAVSMFFIRRPTLDINWTGMTNLLDIPGLSSLSDTMIMDSIAAFLVLPNRLLVPLVPDLQDVAQLRSPLPRGIIRIHLLAARGLSSKDKYVKGLIEGKSDPYALVRLGTQTFCSRVIDEELNPQWGETYEVMVHEVPGQEIEVEVFDKDPDKDDFLGRMKLDVGKVLQASVLDDWFPLQGGQGQVHLRLEWLSLLSDAEKLEQVLQWNWGVSSRPDPPSAAILVVYLDRAQDLPMVTSELYPPQLKKGNKEPNPMVQLSIQDVTQESKAVYSTNCPVWEEAFRFFLQDPQSQELDVQVKDDSRALTLGALTLPLARLLTAPELILDQWFQLSSSGPNSRLYMKLVMRILYLDSSEICFPTVPGCPGAWDVDSENPQRGSSVDAPPRPCHTTPDSQFGTEHVLRIHVLEAQDLIAKDRFLGGLVKGKSDPYVKLKLAGRSFRSHVVREDLNPRWNEVFEVIVTSVPGQELEVEVFDKDLDKDDFLGRCKVRLTTVLNSGFLDEWLTLEDVPSGRLHLRLERLTPRPTAAELEEVLQVNSLIQTQKSAELAAALLSIYMERAEDLPLRKGTKHLSPYATLTVGDSSHKTKTISQTSAPVWDESASFLIRKPHTESLELQVRGEGTGVLGSLSLPLSELLVADQLCLDRWFTLSSGQGQVLLRAQLGILVSQHSGVEAHSHSYSHSSSSLSEEPELSGGPPHITSSAPELRQRLTHVDSPLEAPAGPLGQVKLTLWYYSEERKLVSIVHGCRSLRQNGRDPPDPYVSLLLLPDKNRGTKRRTSQKKRTLSPEFNERFEWELPLDEAQRRKLDVSVKSNSSFMSRERELLGKVQLDLAETDLSQGVARWYDLMDNKDKGSS

SEQ ID NO: 802984 - protein, 830 aa, Homo sapiens
AGTGLECLGSGLSSLSDTMIMDSIAAFLVLPNRLLVPLVPDLQDVAQLRSPLPRGIIRIHLLAARGLSSKDKYVKGLIEGKSDPYALVRLGTQTFCSRVIDEELNPQWGETYEVMVHEVPGQEIEVEVFDKDPDKDDFLGRMKLDVGKVLQASVLDDWFPLQGGQGQVHLRLEWLSLLSDAEKLEQVLQWNWGVSSRPDPPSAAILVVYLDRAQDLPLKKGNKEPNPMVQLSIQDVTQESKAVYSTNCPVWEEAFRFFLQDPQSQELDVQVKDDSRALTLGALTLPLARLLTAPELILDQWFQLSSSGPNSRLYMKLVMRILYLDSSEICFPTVPGCPGAWDVDSENPQRGSSVDAPPRPCHTTPDSQFGTEHVLRIHVLEAQDLIAKDRFLGGLVKGKSDPYVKLKLAGRSFRSHVVREDLNPRWNEVFEVIVTSVPGQELEVEVFDKDLDKDDFLGRCKVRLTTVLNSGFLDEWLTLEDVPSGRLHLRLERLTPRPTAAELEEVLQVNSLIQTQKSAELAAALLSIYMERAEDLPLRKGTKHLSPYATLTVGDSSHKTKTISQTSAPVWDESASFLIRKPHTESLELQVRGEGTGVLGSLSLPLSELLVADQLCLDRWFTLSSGQGQVLLRAQLGILVSQHSGVEAHSHSYSHSSSSLSEEPELSGGPPHITSSAPELRQRLTHVDSPLEAPAGPLGQVKLTLWYYSEERKLVSIVHGCRSLRQNGRDPPDPYVSLLLLPDKNRGTKRRTSQKKRTLSPEFNERFEWELPLDEAQRRKLDVSVKSNSSFMSRERELLGKVQLDLAETDLSQGVARWYDLMDNKDKGSS

SEQ ID NO: 802985 - protein, 843 aa, Homo sapiens
MLDTKMHLTVDSVRERLPNSTVEPAPVSLHLTKVTSIAAFLVLPNRLLVPLVPDLQDVAQLRSPLPRGIIRIHLLAARGLSSKDKYVKGLIEGKSDPYALVRLGTQTFCSRVIDEELNPQWGETYEVMVHEVPGQEIEVEVFDKDPDKDDFLGRMKLDVGKVLQASVLDDWFPLQGGQGQVHLRLEWLSLLSDAEKLEQVLQWNWGVSSRPDPPSAAILVVYLDRAQDLPLKKGNKEPNPMVQLSIQDVTQESKAVYSTNCPVWEEAFRFFLQDPQSQELDVQVKDDSRALTLGALTLPLARLLTAPELILDQWFQLSSSGPNSRLYMKLVMRILYLDSSEICFPTVPGCPGAWDVDSENPQRGSSVDAPPRPCHTTPDSQFGTEHVLRIHVLEAQDLIAKDRFLGGLVKGKSDPYVKLKLAGRSFRSHVVREDLNPRWNEVFEVIVTSVPGQELEVEVFDKDLDKDDFLGRCKVRLTTVLNSGFLDEWLTLEDVPSGRLHLRLERLTPRPTAAELEEVLQVNSLIQTQKSAELAAALLSIYMERAEDLPLRKGTKHLSPYATLTVGDSSHKTKTISQTSAPVWDESASFLIRKPHTESLELQVRGEGTGVLGSLSLPLSELLVADQLCLDRWFTLSSGQGQVLLRAQLGILVSQHSGVEAHSHSYSHSSSSLSEEPELSGGPPHITSSAPELRQRLTHVDSPLEAPAGPLGQVKLTLWYYSEERKLVSIVHGCRSLRQNGRDPPDPYVSLLLLPDKNRGTKRRTSQKKRTLSPEFNERFEWELPLDEAQRRKLDVSVKSNSSFMSRERELLGKVQLDLAETDLSQGVARWYDLMDNKDKGSS

SEQ ID NO: 802986 - protein, 1132 aa, Homo sapiens
MERSPGEGPSPSPMDQPSAPSDPTDQPPAAHAKPDPGSGGQPAGPGAAGEALAVLTSFGRRLLVLIPVYLAGAVGLSVGFVLFGLALYLGWRRVRDEKERSLRAARQLLDDEEQLTAKTLYMSHRELPAWVSFPDVEKAEWLNKIVAQVWPFLGQYMEKLLAETVAPAVRGSNPHLQTFTFTRVELGEKPLRIIGVKVHPGQRKEQILLDLNISYVGDVQIDVEVKKYFCKAGVKGMQLHGVLRVILEPLIGDLPFVGAVSMFFIRRPTLDINWTGMTNLLDIPGLSSLSDTMIMDSIAAFLVLPNRLLVPLVPDLQDVAQLRSPLPRGIIRIHLLAARGLSSKDKYVKGLIEGKSDPYALVRLGTQTFCSRVIDEELNPQWGETYEVMVHEVPGQEIEVEVFDKDPDKDDFLGRMKLDVGKVLQASVLDDWFPLQGGQGQVHLRLEWLSLLSDAEKLEQVLQWNWGVSSRPDPPSAAILVVYLDRAQDLPLKKGNKEPNPMVQLSIQDVTQESKAVYSTNCPVWEEAFRFFLQDPQSQELDVQVKDDSRALTLGALTLPLARLLTAPELILDQWFQLSSSGPNSRLYMKLVMRILYLDSSEICFPTVPGCPGAWDVDSENPQRGSSVDAPPRPCHTTPDSQFGTEHVLRIHVLEAQDLIAKDRFLGGLVKGKSDPYVKLKLAGRSFRSHVVREDLNPRWNEVFEVIVTSVPGQELEVEVFDKDLDKDDFLGRCKVRLTTVLNSGFLDEWLTLEDVPSGRLHLRLERLTPRPTAAELEEVLQVNSLIQTQKSAELAAALLSIYMERAEDLPLRKGTKHLSPYATLTVGDSSHKTKTISQTSAPVWDESASFLIRKPHTESLELQVRGEGTGVLGSLSLPLSELLVADQLCLDRWFTLSSGQGQVLLRAQLGILVSQHSGVEAHSHSYSHSSSSLSEEPELSGGPPHITSSAPELRQRLTHVDSPLEAPAGPLGQVKLTLWYYSEERKLVSIVHGCRLRPHPSCPPDRLHPFPQVTISPTSSCCRSLRQNGRDPPDPYVSLLLLPDKNRGTKRRTSQKKRTLSPEFNERFEWELPLDEAQRRKLDVSVKSNSSFMSRERELLGKVQLDLAETDLSQGVARWYDLMDNKDKGSS

SEQ ID NO: 802987 - protein, 1094 aa, Homo sapiens
MERSPGEGPSPSPMDQPSAPSDPTDQPPAAHAKPDPGSGGQPAGPGAAGEALAVLTSFGRRLLVLIPVYLAGAVGLSVGFVLFGLALYLGWRRVRDEKERSLRAARQLLDDEEQLTAKTLYMSHRELPAWVSFPDVEKAEWLNKIVAQVWPFLGQYMEKLLAETVAPAVRGSNPHLQTFTFTRVELGEKPLRIIGVKVHPGQRKEQILLDLNISYVGDVQIDVEVKKYFCKAGVKGMQLHGVLRVILEPLIGDLPFVGAVSMFFIRRPTLDINWTGMTNLLDIPGLSSLSDTMIMDSIAAFLVLPNRLLVPLVPDLQDVAQLRSPLPRGIIRIHLLAARGLSSKDKYVKGLIEGKSDPYALVRLGTQTFCSRVIDEELNPQWGETYEVMVHEVPGQEIEVEVFDKDPDKDDFLGRMKLDVGKVLQASVLDDWFPLQGGQGQVHLRLEWLSLLSDAEKLEQVLQWNWGVSSRPDPPSAAILVVYLDRAQDLPLKKGNKEPNPMVQLSIQDVTQESKAVYSTNCPVWEEAFRFFLQDPQSQELDVQVKDDSRALTLGALTLPLARLLTAPELILDQWFQLSSSGPNSRLYMKLVMRILYLDSSEICFPTVPGCPGAWDVDSENPQRGSSVDAPPRPCHTTPDSQFGTEHVLRIHVLEAQDLIAKDRFLGGLVKGKSDPYVKLKLAGRSFRSHVVREDLNPRWNEVFEVIVTSVPGQELEVEVFDKDLDKDDFLGSESIGVYVKNRLGLFKAMESGLLGSHHLAFVLIFLFNRCKVRLTTVLNSGFLDEWLTLEDVPSGRLHLRLERLTPRPTAAELEEVLQVNSLIQTQKSAELAAALLSIYMERAEDLPLRKGTKHLSPYATLTVGDSSHKTKTISQTSAPVWDESASFLIRKPHTESLELQILVSQHSGVEAHSHSYSHSSSSLSEEPELSGGPPHITSSAPELRQRLTHVDSPLEAPAGPLGQVKLTLWYYSEERKLVSIVHGCRSLRQNGRDPPDPYVSLLLLPDKNRGTKRRTSQKKRTLSPEFNERFEWELPLDEAQRRKLDVSVKSNSSFMSRERELLGKVQLDLAETDLSQGVARWYDLMDNKDKGSS

SEQ ID NO: 802988 - protein, 1104 aa, Homo sapiens; identical to SEQ ID NO: 802967

SEQ ID NO: 802989 - protein, 1104 aa, Homo sapiens; identical to SEQ ID NO: 802967

SEQ ID NO: 802990 - protein, 303 aa, Homo sapiens
LRLTQYCLSQLRKGTKHLSPYATLTVGDSSHKTKTISQTSAPVWDESASFLIRKPHTESLELQVRGEGTGVLGSLSLPLSELLVADQLCLDRWFTLSSGQGQVLLRAQLGILVSQHSGVEAHSHSYSHSSSSLSEEPELSGGPPHITSSAPELRQRLTHVDSPLEAPAGPLGQVKLTLWYYSEERKLVSIVHGCRSLRQNGRDPPDPYVSLLLLPDKNRGTKRRTSQKKRTLSPEFNERFEWELPLDEAQRRKLDVSVKSNSSFMSRERELLGKVQLDLAETDLSQGVARWYDLMDNKDKGSS

SEQ ID NO: 802991 - protein, 1104 aa, Homo sapiens; identical to SEQ ID NO: 802967

SEQ ID NO: 802992 - protein, 143 aa, Homo sapiens
LLVLLRVGAESPIQTGLPFKKSKVHMVFPTTVVNSLSSAEHSNSSCTSFLLRSVFRMTRFPRTICSNSALKQVSLTALSSCLRLAPSPPQCDEPKARVQGQSLCPSALSPNRPIFGPLPDQREEPYVPFTARPLSFWAPGAGT

SEQ ID NO: 802993 - protein, 441 aa, Homo sapiens
MERSPGEGPSPSPMDQPSAPSDPTDQPPAAHAKPDPGSGGQPAGPGAAGEALAVLTSFGRRLLVLIPVYLAGAVGLSVGFVLFGLALYLGWRRVRDEKERSLRAARQLLDDEEQLTAKTLYMSHRELPAWVSFPDVEKAEWLNKIVAQVWPFLGQYMEKLLAETVAPAVRGSNPHLQTFTFTRVELGEKPLRIIGVKVHPGQRKEQILLDLNISYVGDVQIDVEVKKYFCKAGVKGMQLHGVLRVILEPLIGDLPFVGAVSMFFIRRPTLDINWTGMTNLLDIPGLSSLSDTMIMDSIAAFLVLPNRLLVPLVPDLQDVAQLRSPLPRGIIRIHLLAARGLSSKDKYVKGLIEGKSDPYALVRLGTQTFCSRVIDEELNPQWGETYEVMVHEVPGQEIEVEVFDKDPDKDDFLGRMKLDVGKVLQASVLDDPIFLPKCLGC

SEQ ID NO: 802994 - protein, 78 aa, Homo sapiens
MGKCEVGKTKAEKVWEDRRGTFLGKGFDFLFLPQLHGVLRVILEPLIGDLPFVGAVSMFFIRRPVRENNEGVWGSRRN

SEQ ID NO: 802995 - protein, 80 aa, Homo sapiens
LLLSHRRIHSDSRPFPCVECGKGFKRKTALEAHRWIHRSCSERRAWQQAVVGRSEPIPVLGGKDPPVHFRHFPDIFQECG

SEQ ID NO: 802996 - protein, 80 aa, Homo sapiens; identical to SEQ ID NO: 802995

SEQ ID NO: 802997 - protein, 80 aa, Homo sapiens; identical to SEQ ID NO: 802995

SEQ ID NO: 802998 - protein, 80 aa, Homo sapiens; identical to SEQ ID NO: 802995

SEQ ID NO: 802999 - protein, 80 aa, Homo sapiens; identical to SEQ ID NO: 802995

SEQ ID NO: 803000 - protein, 80 aa, Homo sapiens; identical to SEQ ID NO: 802995

SEQ ID NO: 803001 - protein, 188 aa, Homo sapiens
  misc_feature (24)..(24): Xaa can be any naturally occurring amino acid
  misc_feature (27)..(27): Xaa can be any naturally occurring amino acid
ASVEPYDSIRVALRGQKVIDTMDXLCXVLLNVEKSRWITLHFRCMGTVFHLSEKDPRGSETLHACCEQILNEKLREKARLYAGVVLNEMRSNAKSQTMVGFGPEDDHFVAELTYNYGVGDYKLGNDFMGITLASSQAVSNARKLEWPLTEVAEGVFETEAPGGYKFYLQNRSLPQSDPVLKVTLAVSD

SEQ ID NO: 803002 - protein, 298 aa, Homo sapiens
MAARRALHFVFKVGNRFQTARFYRDVLGMKVLRHEEFEEGCKAACNGPYDGKWSKTMVGFGPEDDHFVAELTYNYGVGDYKLGNDFMGITLASSQAVSNARKLEWPLTEVAEGVFETEAPGGYKFYLQNRSLPQSDPVLKVTLAVSDLQKSLNYWCNLLGMKIYEKDEEKQRALLGYADNQCKLELQGVKGGVDHAAAFGRIAFSCPQKELPDLEDLMKRENQKILTPLVSLDTPGKATVQVVILADPDGHEICFVGDEAFRELSKMDPEGSKLLDDAMAADKSDEWFAKHNKPKASG

SEQ ID NO: 803003 - protein, 307 aa, Homo sapiens
QAVLAPIPMMAARRALHFVFKVGNRFQTARFYRDVLGMKVLRHEEFEEGCKAACNGPYDGKWSKTMVGFGPEDDHFVAELTYNYGVGDYKLGNDFMGITLASSQAVSNARKLEWPLTEVAEGVFETEAPGGYKFYLQNRSLPQSDPVLKVTLAVSDLQKSLNYWCNLLGMKIYEKDEEKQRALLGYADNQCKLELQGVKGGVDHAAAFGRIAFSCPQKELPDLEDLMKRENQKILTPLVSLDTPGKATVQVVILADPDGHEICFVGDEAFRELSKMDPEGSKLLDDAMAADKSDEWFAKHNKPKASG

SEQ ID NO: 803004 - protein, 313 aa, Homo sapiens
MAARRALHFVFKVGNRFQTARFYRDVLGMKVESCSVARLECSGAISAHCSDYTRITEDSFSKPYDGKWSKTMVGFGPEDDHFVAELTYNYGVGDYKLGNDFMGITLASSQAVSNARKLEWPLTEVAEGVFETEAPGGYKFYLQNRSLPQSDPVLKVTLAVSDLQKSLNYWCNLLGMKIYEKDEEKQRALLGYADNQCKLELQGVKGGVDHAAAFGRIAFSCPQKELPDLEDLMKRENQKILTPLVSLDTPGKATVQVVILADPDGHEICFVGDEAFRELSKMDPEGSKLLDDAMAADKSDEWFAKHNKPKASG

SEQ ID NO: 803005 - protein, 289 aa, Homo sapiens
MRNLKKAAKLPVMGMIPCFLKSPLGSDYTRITEDSFSKPYDGKWSKTMVGFGPEDDHFVAELTYNYGVGDYKLGNDFMGITLASSQAVSNARKLEWPLTEVAEGVFETEAPGGYKFYLQNRSLPQSDPVLKVTLAVSDLQKSLNYWCNLLGMKIYEKDEEKQRALLGYADNQCKLELQGVKGGVDHAAAFGRIAFSCPQKELPDLEDLMKRENQKILTPLVSLDTPGKATVQVVILADPDGHEICFVGDEAFRELSKMDPEGSKLLDDAMAADKSDEWFAKHNKPKASG

SEQ ID NO: 803006 - protein, 188 aa, Homo sapiens
MAARRALHFVFKVGNRFQTARFYRDVLGMKVLRHEEFEEGCKAACNGPYDGKWSKTMVGFGPEDDHFVAELTYNYGVGDYKLGNDFMGITLASSQAVSNARKLEWPLTEVAEGVFETEAPGGYKFYLQNRSLPQSDPVLKVTLAVSDLQKSLNYWCNLLGMKIYEKDEEKQRALLGYADNQVSNLGEE

SEQ ID NO: 803007 - protein, 242 aa, Homo sapiens
MVGFGPEDDHFVAELTYNYGVGDYKLGNDFMGITLASSQAVSNARKLEWPLTEVAEGVFETEAPGGYKFYLQNRSLPQSDPVLKVTLAVSDLQKSLNYWCNLLGMKIYEKDEEKQRALLGYADNQCKLELQGVKGGVDHAAAFGRIAFSCPQKELPDLEDLMKRENQKILTPLVSLDTPGKATVQVVILADPDGHEICFVGDEAFRELSKMDPEGSKLLDDAMAADKSDEWFAKHNKPKASG

SEQ ID NO: 803008 - protein, 242 aa, Homo sapiens; identical to SEQ ID NO: 803007

SEQ ID NO: 803009 - protein, 138 aa, Homo sapiens [sequence omitted]

SEQ ID NO: 803010 - protein, 188 aa, Homo sapiens; identical to SEQ ID NO: 803006

SEQ ID NO: 803011 - protein, 240 aa, Homo sapiens
MAARRALHFVFKVGNRFQTARFYRDVLGMKVLRHEEFEEGCKAACNGPYDGKWSKTMVGFGPEDDHFVAELTYNYGVGDYKLGNDFMGITLASSQAVSNARKLEWPLTEVAEGVFETEAPGGYKFYLQNRSLPQSDPVLKVTLAVSDLQKSLNYWCNLLAKKKKKKKKFVGGAWARKSFLNHTSVGAGPELGDWATGLQGEPGRNGAASPIKTPGDRRSDNPWVGAPAYQGSDRIARRVG

SEQ ID NO: 803012 - protein, 240 aa, Homo sapiens
MRLTPFSLSTGNSFRYSRRLKKNIFGTAPALRVSEMSLRPSSRIFPCFSRNGLDFTIVITLAQPPVPGISFIVAKPRLFPGAGSAGCGLLERLFLSLLLGTGLRWCLAGLLPRSALLFHHLSGRTHHFHWAPPQRTDPAPRSRSQAWTTCSNGRTTNLAGLTSAAMFPETRAASRKRAVGHSDVTARGALRGLGCTVRVTAACGGNHGCSQSSALRIQSGKPLPDGAFLSGRPGDEGSAA

SEQ ID NO: 803013 - protein, 298 aa, Homo sapiens; identical to SEQ ID NO: 803002

SEQ ID NO: 803014 - protein, 298 aa, Homo sapiens; identical to SEQ ID NO: 803002

SEQ ID NO: 803015 - protein, 295 aa, Homo sapiens
MAARRALHFVFKVGNRFQTARFYRDVLGMKVLRHEEFEEGCKAACNGPYDGKWSKTMVGFGPEDDHFVAELTYNYGVGDYKLGNDFMGITLASSQAVSNARKLEWPLTEVAEGVFETEAPGGYKFYLQNRSLPQSDPVLKVTLAVSDLQKSLNYWCNLLGMKIYEKDEEKQRALLGYADNQCKLELQGVKGGVDHAAAFGRIAFSCPQKELPDLEDLMKRENQKILTPLVSLDTPGKATVQVVILADPDGHEICFVGDEAFRELSKMDPEGSKLLDDVNGRHDAEQASVIPAQHL

SEQ ID NO: 803016 - protein, 298 aa, Homo sapiens; identical to SEQ ID NO: 803002

SEQ ID NO: 803017 - protein, 242 aa, Homo sapiens; identical to SEQ ID NO: 803007

SEQ ID NO: 803018 - protein, 286 aa, Homo sapiens
MAARRALHFVFKVGNRFQTARFYRDVLGMKVLRHEEFEEGCKAACNGPYDGKWSKTMVGFGPEDDHFVAELTYNYGVGDYKLGNDFMGITLASSQAVSNARKLEWPLTEVAEGVFETEAPGGYKFYLQNRSLPQSDPVLKVTLAVSDLQKSLNYWCNLLGMKIYEKDEEKQRALLGYADNQCKLELQGVKGGVDHAAAFGRIAFSCPQKELPDLEDLMKRENQKILTPLVSLDTPGKATVQVVILADPDGHEICFVGDEAFRELSKMDPEGSKLLDDAALWCPGDK

SEQ ID NO: 803019 - protein, 407 aa, Homo sapiens
MAARRALHFVFKVGNRFQTARFYRDVLGMKVLRHEEFEEGCKAACNGPYDGKWSKTMVGFGPEDDHFVAELTYNYGVGDYKLGNDFMGITLASSQAVSNARKLEWPLTEVAEGVFETEAPGGYKFYLQNRSLPQSDPVLKVTLAVSDLQKSLNYWCNLLGMKIYEKDEEKQRALLGYADNQCKLELQGVKGGVDHAAAFGRIAFSCPQKELPDLEDLMKRENQKILTPLVSLDTPGKATVQVVILADPDGTMNNSALVGGMTHSRATFLRWIPEGRHSSACCTWQQIQRDEWLANTTKSLPYSVQGYRGTTVDGTQNRPLVISMAPCHHLLIGATCTLWFKRHRRTVIPGLRFLELVGCTPVSRGHGTGICALSCRRTSRDTFRELSCEQRSCTVNISTKTAQRSNH

SEQ ID NO: 803020 - protein, 147 aa, Homo sapiens
MAARRALHFVFKVGNRFQTARFYRDVLGMKVLRHEEFEEGCKAACNGPYDGKWSKTMVGFGPEDDHFVAELTYNYGVGDYKLGNDFMGITLASSQAVSNARKLEWPLTEVAEGVFETEAPGGYKFYLQNRSLPQSDPVLKVTLAVSD

SEQ ID NO: 803021 - protein, 83 aa, Homo sapiens
ALHFVFKVGNRFQTARFYRDVLGMKVQAGADRGWRARLEPAPEPALAEGGENGCVVNLSRRVSDLRPCAVFSFRSVASCRWGS

SEQ ID NO: 803022 - protein, 226 aa, Homo sapiens
MSFAESGWRSALRRRGPGTPGPVARPSYSSFTQGDSWGEGEVDEEEGCDQVARDLRAEFSAGAWSEPRKRSVLPPDGNGSPVLPDKRNGIFPAAAGSRAQPRRWPVQVLSILCSLLFAILLAFLLAIAYLIVKELHAENLKNEDDVDTGLLGFWTLLIISLTAGFSCCSFSWTVTYFDSFEPGMFPPTPLSPARFKKLTGHSFHMGYSMAILNGIVAALTVAWCLM

SEQ ID NO: 803023 - protein, 120 aa, Homo sapiens
RCSRRRGGGGEGERRGSEERVRSPYAPELHAENLKNEDDVDTGLLGFWTLLIISLTAGFSCCSFSWTVTYFDSFEPGMFPPTPLSPARFKKLTGHSFHMGYSMAILNGIVAALTVAWCLM

SEQ ID NO: 803024 - protein, 229 aa, Homo sapiens
MGEPGEECERSGEEGRRQIGSGPGPVARPSYSSFTQGDSWGEGEVDEEEGCDQVARDLRAEFSAGAWSEPRKRSVLPPDGNGSPVLPDKRNGIFPAAAGSRAQPRRWPVQVLSILCSLLFAILLAFLLAIAYLIVKELHAENLKNEDDVDTGLLGFWTLLIISLTAGFSCCSFSWTVTYFDSFEPGMFPPTPLSPARFKKLTGHSFHMGYSMAILNGIVAALTVAWCLM

SEQ ID NO: 803025 - protein, 134 aa, Homo sapiens
MSFAESGWRSALRRRGPGTPGPVARPSYSSFTQGDSWGEGEVDEEEGCDQVARDLRAEFSAGAWSEPRKRSVLPPDGNGSPVLPDKRNGIFPAAAGSRAQPRRWPVQVLSILCSLLFAILLAFLLAIAYLIVKD

SEQ ID NO: 803026 - protein, 149 aa, Homo sapiens
MSFAESGWRSALRRRGPGTPGPVARPSYSSFTQGDSWGEGEVDEEEGCDQVARDLRAEFSAGAWSEPRKRSVLPPDGNGSPVLPDKRNGIFPAAAGSRAQPRRWPVQVLSILCSLLFAILLAFLLAIAYLIVKAFSGLQMAWHLKPYNA

SEQ ID NO: 803027 - protein, 164 aa, Homo sapiens
MSFAESGWRSALRRRGPGTPGPVARPSYSSFTQGDSWGEGEVDEEEGCDQVARDLRAEFSAGAWSEPRKRSVLPPDGNGSPVLPDKRNGIFPAAAGSRAQPRRWPVQVLSILCSLLFAILLAFLLAIAYLIVKELHAENLKNEDDVDTGLLGIICISRKFSLML

SEQ ID NO: 803028 - protein, 120 aa, Homo sapiens; identical to SEQ ID NO: 803023

SEQ ID NO: 803029 - protein, 143 aa, Homo sapiens
VSQLPELRRSITVGGGAVGVCHLHPPRPSYVRPTNLRPPGVGWRGRGGTAGVKAKSTRRRDATKWPATCGRSSRLGRGQSPESARCSRRTGTGRPFCPISAMVSFPRPRAAEPSLGGGRSRSSLFSARCSSPFFSPSSSPSPT

SEQ ID NO: 803030 - protein, 166 aa, Homo sapiens
MGEPGEECERSGEEGRRQIGSGMCLRGRERALGPGVEKMRLWGCRGARSVGDAGVAEVSGRDEAPQGVDTRQPSASARFSLRAFLLPFPATALGSSSGRSAFRLSFGPAASFATRRPPLLSVVYPWALRPGGSGHCRGLAVADPGRGRWERLVLRGFRCVSRHVVC

SEQ ID NO: 803031 - protein, 156 aa, Homo sapiens
MSFAESGWRSALRRRGPGTPGPVARPSYSSFTQGDSWGEGEVDEEEGCDQVARDLRAEFSAGAWSEPRKRSVLPPDGNGSPVLPDKRNGIFPAAAGSRAQPRRWPVQVLSILCSLLFAILLAFLLAIAYLIVKELHAENLKNEDDVDTGLLAFLGQ

SEQ ID NO: 803032 - protein, 208 aa, Homo sapiens
MSFAESGWRSALRRRGPGTPGPVARPSYSSFTQGDSWGEGEVDEEEGCDQVARDLRAEFSAGAWSEPRKRSVLPPDGNGSPVLPDKRNGIFPAAAGSRAQPRRWPVQVLSILCSLLFAILLAFLLAIAYLIVKGFWTLLIISLTAGFSCCSFSWTVTYFDSFEPGMFPPTPLSPARFKKLTGHSFHMGYSMAILNGIVAALTVAWCLM

SEQ ID NO: 803033 - protein, 118 aa, Homo sapiens [sequence omitted]

SEQ ID NO: 803034 - protein, 236 aa, Homo sapiens
RYLWFWLFYYNIGNYYTGFISSPALTENDRDSQSPLRNPLLSTSRPLVFGKPNGDAVDYQKQLKQMIKDLAKEKDKTEKELPKMSQREFIQFCKTLYSMFHEDPEENDLYQAIATVTTLLLQIGEVGQRGSSSGSCSQECGEELRASAPSPEDSVFADTGKTPQDSQAFPEAAEGDWTVSLEHILASLLTEQSLVNFFEKPLDMKSKLENAKINQYNLKTFEMSHQSQSELKLSNL

SEQ ID NO: 803035 - protein, 146 aa, Homo sapiens
HWYRQGMREHMMSCYWEQPRPMASRHDPSRPYAEQYRIDARQFAHLFQLVSPWTCGAHTEILAERTFRLLDDNMDQLIEFKAFVSCLDIMYNGEMNEKIKLLYRLHIPPALTENDRDSQSPLRNPLLSTSRPLVFGKPNGDAVDYQ

SEQ ID NO: 803036 - protein, 1155 aa, Homo sapiens
KQDARGGGPAALEWGLIPGDAAKSLPVWACGGKVSLNVDGTVGRLVGALDAVLDSNARVAPFRILLQVPGSQVYSPIACGELLNGSDVYWAIATGATLEEINQHWDWLEQNLLHTLSVFDNKDDIASFVKGKVKALIAEETSSRLAEQEEEPEKFREALVKFEARFNFPEAEKLVTYYSCCCWKGRVPRQGWLYLSINHLCFYSFFLGKELKLVVPWVDIQKLERTSNVFLTDTIRITTQNKERDFSMFLNLDEVFKVMEQLADVTLRRLLDNEVFDLDPDLQEPSQITKRDLEARAQNEFFRAFFRLPRKEKLHAVVDCSLWTPFSRCHTAGRMFASDSYICFASREDGCCKIILPLREVVSIEKMEDTSLLPHPIIVSIRSKVAFQFIELRDRDSLVEALLARLKQVHANHPVHYDTSADDDMASLVFHSTSMCSDHRFGDLEMMSSQNSEESEKEKSPLMHPDALVTAFQQSGSQSPDSRMSREQIKISLWNDHFVEYGRTVCMFRTEKIRKLVAMGIPESLRGRLWLLFSDAVTDLASHPGYYGNLVEESLGKCCLVTEEIERDLHRSLPEHPAFQNETGIAALRRVLTAYAHRNPKIGYCQSMNILTSVLLLYTKEEEAFWLLVAVCERMLPDYFNHRVIGAQVDQSVFEELIKGHLPELAEHMNDLSALASVSLSWFLTLFLSIMPLESAVNVVDCFFYDGIKAIFQLGLAVLEANAEDLCSSKDDGQALMILSRFLDHIKNEDSPGPPVGSHHAFFSDDQEPYPVTDISDLIRDSYEKFGDQSVEQIEHLRYKHRIRVLQGHEDTTKQNVLRVVIPEVSILPEDLEELYDLFKREHMMSCYWEQPRPMASRHDPSRPYAEQYRIDARQFAHLFQLVSPWTCGAHTEILAERTFRLLDDNMDQLIEFKAFVSCLDIMYNGEMNEKIKLLYRLHIPPALTENDRDSQSPLRNPLLSTSRPLVFGKPNGDAVDYQKQLKQMIKDLAKEKDKTEKELPKMSQREFIQFCKTLYSMFHEDPEENDLYQAIATVTTLLLQIGEVGQRGSSSGSCSQECGEELRASAPSPEDSVFADTGKTPQDSQAFPEAAEGDWTVSLEHILASLLTEQSLVNFFEKPLDMKSKLENAKINQYNLKTFEMSHQSQSELKLSNL

SEQ ID NO: 803037 - protein, 1140 aa, Homo sapiens
KQDARGGGPAALEWGLIPGDAAKSLPVWACGGKVSLNVDGTVGRLVGALDAVLDSNARVAPFRILLQVPGSQVYSPIACGATLEEINQHWDWLEQNLLHTLSVFDNKDDIASFVKGKVKALIAEETSSRLAEQEEEPEKFREALVKFEARFNFPEAEKLVTYYSCCCWKGRVPRQGWLYLSINHLCFYSFFLGKELKLVVPWVDIQKLERTSNVFLTDTIRITTQNKERDFSMFLNLDEVFKVMEQLADVTLRRLLDNEVFDLDPDLQEPSQITKRDLEARAQNEFFRAFFRLPRKEKLHAVVDCSLWTPFSRCHTAGRMFASDSYICFASREDGCCKIILPLREVVSIEKMEDTSLLPHPIIVSIRSKVAFQFIELRDRDSLVEALLARLKQVHANHPVHYDTSADDDMASLVFHSTSMCSDHRFGDLEMMSSQNSEESEKEKSPLMHPDALVTAFQQSGSQSPDSRMSREQIKISLWNDHFVEYGRTVCMFRTEKIRKLVAMGIPESLRGRLWLLFSDAVTDLASHPGYYGNLVEESLGKCCLVTEEIERDLHRSLPEHPAFQNETGIAALRRVLTAYAHRNPKIGYCQSMNILTSVLLLYTKEEEAFWLLVAVCERMLPDYFNHRVIGAQVDQSVFEELIKGHLPELAEHMNDLSALASVSLSWFLTLFLSIMPLESAVNVVDCFFYDGIKAIFQLGLAVLEANAEDLCSSKDDGQALMILSRFLDHIKNEDSPGPPVGSHHAFFSDDQEPYPVTDISDLIRDSYEKFGDQSVEQIEHLRYKHRIRVLQGHEDTTKQNVLRVVIPEVSILPEDLEELYDLFKREHMMSCYWEQPRPMASRHDPSRPYAEQYRIDARQFAHLFQLVSPWTCGAHTEILAERTFRLLDDNMDQLIEFKAFVSCLDIMYNGEMNEKIKLLYRLHIPPALTENDRDSQSPLRNPLLSTSRPLVFGKPNGDAVDYQKQLKQMIKDLAKEKDKTEKELPKMSQREFIQFCKTLYSMFHEDPEENDLYQAIATVTTLLLQIGEVGQRGSSSGSCSQECGEELRASAPSPEDSVFADTGKTPQDSQAFPEAAEGDWTVSLEHILASLLTEQSLVNFFEKPLDMKSKLENAKINQYNLKTFEMSHQSQSELKLSNL

SEQ ID NO: 803038 - protein, 1019 aa, Homo sapiens
KQDARGGGPAALEWGLIPGDAAKSLPVWACGGKVSLNVDGTVGRLVGALDAVLDSNARVAPFRILLQVPGSQVYSPIACGELLNGSDVYWAIATGATLEEINQHWDWLEQNLLHTLSVFDNKDDIASFVKGKVKALIAEETSSRLAEQEEEPEKFREALVKFEARFNFPEAEKLVTYYSCCCWKGRVPRQGWLYLSINHLCFYSFFLGKELKLVVPWVDIQKLERTSNVFLTDTIRITTQNKERDFSMFLNLDEVFKVMEQLADVTLRRLLDNEVFDLDPDLQEPSQITKRDLEARAQNEFFRAFFRLPRKEKLHAVVDCSLWTPFSRCHTAGRMFASDSYICFASREDGCCKIILPLREVVSIEKMEDTSLLPHPIIVSIRSKVAFQFIELRDRDSLVEALLARLKQVHANHPVHYDTSADDDMASLVFHSTSMCSDHRFGDLEMMSSQNSEESEKEKSPLMHPDALVTAFQQSGSQSPDSRMSREQIKISLWNDHFVEYGRTVCMFRTEKIRKLVAMGIPESLRGRLWLLFSDAVTDLASHPGYYGNLVEESLGKCCLVTEEIERDLHRSLPEHPAFQNETGIAALRRVLTAYAHRNPKIGYCQSMNILTSVLLLYTKEEEAFWLLVAVCERMLPDYFNHRVIGAQVDQSVFEELIKGHLPELAEHMNDLSALASVSLSWFLTLFLSIMPLESAVNVVDCFFYDGIKAIFQLGLAVLEANAEDLCSSKDDGQALMILSRFLDHIKNEDSPGPPVGSHHAFFSDDQEPYPVTDISDLIRDSYEKFGDQSVEQIEHLRYKHRIRVLQGHEDTTKQNVLRVVIPEVSILPEDLEELYDLFKREHMMSCYWEQPRPMASRHDPSRPYAEQYRIDARQFAHLFQLVSPWTCGAHTEILAERTFRLLDDNMDQLIEFKAFVSCLDIMYNGEMNEKIKLLYRLHIPPALTENDRDSQSPLRNPLLSTSRPLVFGKPNGTYLFSLLLSPAYHCSGGRHQGCPHPSSCSSLVFSLRPMNYPQTHCL

SEQ ID NO: 803039 - protein, 171 aa, Homo sapiens [sequence omitted]

SEQ ID NO: 803040 - protein, 673 aa, Homo sapiens
VVPEFVVVVPEFVVVVSIEKMEDTSLLPHPIIVSIRSKVAFQFIELRDRDSLVEALLARLKQVHANHPVHYDTSADDDMASLVFHSTSMCSDHRFGDLEMMSSQNSEESEKEKSPLMHPDALVTAFQQSGSQSPDSRMSREQIKISLWNDHFVEYGRTVCMFRTEKIRKLVAMGIPESLRGRLWLLFSDAVTDLASHPGYYGNLVEESLGKCCLVTEEIERDLHRSLPEHPAFQNETGIAALRRVLTAYAHRNPKIGYCQSMNILTSVLLLYTKEEEAFWLLVAVCERMLPDYFNHRVIGAQVDQSVFEELIKGHLPELAEHMNDLSALASVSLSWFLTLFLSIMPLESAVNVVDCFFYDGIKAIFQLGLAVLEANAEDLCSSKDDGQALMILSRFLDHIKNEDSPGPPVGSHHAFFSDDQEPYPVTDISDLIRDSYEKFGDQSVEQIEHLRYKHRIRVLQGHEDTTKQNVLRVVIPEVSILPEDLEELYDLFKREHMMSCYWEQPRPMASRHDPSRPYAEQYRIDARQFAHLFQLVSPWTCGAHTEILAERTFRLLDDNMDQLIEFKAFVSCLDIMYNGEMNEKIKLLYRLHIPPALTENDRDSQSPLRNPLLSTSRPLVFGKPNGTYLFSLLLSPAYHCSGGRHQGCPHPSSCSSLVFSLRPMNYPQTHCL

SEQ ID NO: 803041 - protein, 300 aa, Homo sapiens
CVDGAEVCEDCATDDGRLMISEFLDHIKNEDSPGPPVGSHHAFFSDDQEPYPVTDISDLIRDSYEKFGDQSVEQIEHLRYKHRIRVLQGHEDTTKQNVLRVVIPEVSILPEDLEELYDLFKREHMMSCYWEQPRPMASRHDPSRPYAEQYRIDARQFAHLFQLVSPWTCGAHTEILAERTFRLLDDNMDQLIEFKAFVSCLDIMYNGEMNEKIKLLYRLHIPPALTENDRDSQSPLRNPLLSTSRPLVFGKPNGTYLFSLLLSPAYHCSGGRHQGCPHPSSCSSLVFSLRPMNYPQTHCL

SEQ ID NO: 803042 - protein, 1019 aa, Homo sapiens; identical to SEQ ID NO: 803038

SEQ ID NO: 803043 - protein, 70 aa, Homo sapiens
MNDLSALASVSLSWFLTLFLSIMPLESAVNVVDCFFYDGIKAIFQLGLAVLEANAEDLCSSKDDGQALMI

SEQ ID NO: 803044 - protein, 1076 aa, Homo sapiens
MTQLSHSPRQVCLSLKQRTLLGGLCTSVPPASCPLHPLPSHCWLTEQVTVISVCQALIAEETSSRLAEQEEEPEKFREALVKFEARFNFPEAEKLVTYYSCCCWKGRVPRQGWLYLSINHLCFYSFFLGKELKLVVPWVDIQKLERTSNVFLTDTIRITTQNKERDFSMFLNLDEVFKVMEQLADVTLRRLLDNEVFDLDPDLQEPSQITKRDLEARAQNEFFRAFFRLPRKEKLHAVVDCSLWTPFSRCHTAGRMFASDSYICFASREDGCCKIILPLREVVSIEKMEDTSLLPHPIIVSIRSKVAFQFIELRDRDSLVEALLARLKQVHANHPVHYDTSADDDMASLVFHSTSMCSDHRFGDLEMMSSQNSEESEKEKSPLMHPDALVTAFQQSGSQSPDSRMSREQIKISLWNDHFVEYGRTVCMFRTEKIRKLVAMGIPESLRGRLWLLFSDAVTDLASHPGYYGNLVEESLGKCCLVTEEIERDLHRSLPEHPAFQNETGIAALRRVLTAYAHRNPKIGYCQSMNILTSVLLLYTKEEEAFWLLVAVCERMLPDYFNHRVIGAQVDQSVFEELIKGHLPELAEHMNDLSALASVSLSWFLTLFLSIMPLESAVNVVDCFFYDGIKAIFQLGLAVLEANAEDLCSSKDDGQALMILSRFLDHIKNEDSPGPPVGSHHAFFSDDQEPYPVTDISDLIRDSYEKFGDQSVEQIEHLRYKHRIRVLQGHEDTTKQNVLRVVIPEVSILPEDLEELYDLFKREHMMSCYWEQPRPMASRHDPSRPYAEQYRIDARQFAHLFQLVSPWTCGAHTEILAERTFRLLDDNMDQLIEFKAFVSCLDIMYNGEMNEKIKLLYRLHIPPALTENDRDSQSPLRNPLLSTSRPLVFGKPNGDAVDYQKQLKQMIKDLAKEKDKTEKELPKMSQREFIQFCKTLYSMFHEDPEENDLYQAIATVTTLLLQIGEVGQRGSSSGSCSQECGEELRASAPSPEDSVFADTGKTPQDSQAFPEAAEGDWTVSLEHILASLLTEQSLVNFFEKPLDMKSKLENAKINQYNLKTFEMSHQSQSELKLSNL

SEQ ID NO: 803045 - protein, 138 aa, Homo sapiens [sequence omitted]

SEQ ID NO: 803046 - protein, 191 aa, Homo sapiens
MNILTSVLLLYTKEEEAFWLLVAVCERMLPDYFNHRVIGAQVDQSVFEELIKGHLPELAEHMNDLSALASVSLSWFLTLFLSIMPLESAVNVVDCFFYDGIKAIFQLGLAVLEANAEDLCSSKDDGQALMILSRFLDHIKNEDSPGPPVGSHHAFFSDDQEPYPVTDISDLIRDSYENLETRLERNRYRAR

SEQ ID NO: 803047 - protein, 59 aa, Homo sapiens
RYPDIFFFRPYAEQYRIDARQFAHLFQLVSPWTCGALVEVDKKGNDECPGTNRCRKKKM

SEQ ID NO: 803048 - protein, 412 aa, Homo sapiens
MNILTSVLLLYTKEEEAFWLLVAVCERMLPDYFNHRVIGAQVDQSVFEELIKGHLPELAEHMNDLSALASVSLSWFLTLFLSIMPLESAVNVVDCFFYDGIKAIFQLGLAVLEANAEDLCSSKDDGQALMILSRFLDHIKNEDSPGPPVGSHHAFFSDDQEPYPVTDISDLIRDSYEKFGDQSVEQIEHLRYKHRIRVLQGHEDTTKQNVLRVVIPEVSILPEDLEELYDLFKREHMMSCYWEQPRPMASRHDPSRPYAEQYRIDARQFAHLFQLVSPWTCGAHTEILAERTFRLLDDNMDQLIEFKAFVSCLDIMYNGEMNEKIKLLYRLHIPPALTENDRDSQSPLRNPLLSTSRPLVFGKPNGTYLFSLLLSPAYHCSGGRHQGCPHPSSCSSLVFSLRPMNYPQTHCL

SEQ ID NO: 803049 - protein, 979 aa, Homo sapiens
KQDARGGGPAALEWGLIPGDAAKSLPVWACGGKVSLNVDGTVGRLVGALDAVLDSNARVAPFRILLQVPGSQVYSPIACGELLNGSDVYWAIATGATLEEINQHWDWLEQNLLHTLSVFDNKDDIASFVKGKVKALIAEETSSRLAEQEEEPEKFREALVKFEARFNFPEAEKLVTYYSCCCWKGRVPRQGWLYLSINHLCFYSFFLGKELKLVVPWVDIQKLERTSNVFLTDTIRITTQNKERDFSMFLNLDEVFKVMEQLADVTLRRLLDNEVFDLDPDLQEPSQITKRDLEARAQNEFFRAFFRLPRKEKLHAVVDCSLWTPFSRCHTAGRMFASDSYICFASREDGCCKIILPLREVVSIEKMEDTSLLPHPIIVSIRSKVAFQFIELRDRDSLVEALLARLKQVHANHPVHYDTSADDDMASLVFHSTSMCSDHRFGDLEMMSSQNSEESEKEKSPLMHPDALVTAFQQSGSQSPDSRMSREQIKISLWNDHFVEYGRTVCMFRTEKIRKLVAMGIPESLRGRLWLLFSDAVTDLASHPGYYGNLVEESLGKCCLVTEEIERDLHRSLPEHPAFQNETGIAALRRVLTAYAHRNPKIGYCQSMNILTSVLLLYTKEEEAFWLLVAVCERMLPDYFNHRVIGAQVDQSVFEELIKGHLPELAEHMNDLSALASVSLSWFLTLFLSIMPLESAVNVVDCFFYDGIKAIFQLGLAVLEANAEDLCSSKDDGQALMILSRFLDHIKNEDSPGPPVGSHHAFFSDDQEPYPVTDISDLIRDSYEKFGDQSVEQIEHLRYKHRIRVLQGHEDTTKQNVLRVVIPEVSILPEDLEELYDLFKREHMMSCYWEQPRPMASRHDPSRPYAEQYRIDARQFAHLFQLVSPWTCGAHTEILAERTFRLLDDNMDQLIEFKAFVSCLDIMYNGEMNEKIKLLYRLHIPPALTENDRDSQSPLRNPLLSTSRPLVFGKPNGDAVDYQ

SEQ ID NO: 803050 - protein, 657 aa, Homo sapiens
KQDARGGGPAALEWGLIPGDAAKSLPVWACGGKVSLNVDGTVGRLVGALDAVLDSNARVAPFRILLQVPGSQVYSPIACGELLNGSDVYWAIATGATLEEINQHWDWLEQNLLHTLSVFDNKDDIASFVKGKVKALIAEETSSRLAEQEEEPEKFREALVKFEARFNFPEAEKLVTYYSCCCWKGRVPRQGWLYLSINHLCFYSFFLGKELKLVVPWVDIQKLERTSNVFLTDTIRITTQNKERDFSMFLNLDEVFKVMEQLADVTLRRLLDNEVFDLDPDLQEPSQITKRDLEARAQNEFFRAFFRLPRKEKLHAVVDCSLWTPFSRCHTAGRMFASDSYICFASREDGCCKIILPLREVVSIEKMEDTSLLPHPIIVSIRSKVAFQFIELRDRDSLVEALLARLKQVHANHPVHYDTSADDDMASLVFHSTSMCSDHRFGDLEMMSSQNSEESEKEKSPLMHPDALVTAFQQSGSQSPDSRMSREQIKISLWNDHFVEYGRTVCMFRTEKIRKLVAMGIPESLRGRLWLLFSDAVTDLASHPGYYGNLVEESLGKCCLVTEEIERDLHRSLPEHPAFQNETGIAALRRVLTAYAHRNPKIGYCQVKGVCSGAQRVFSWCLMLSFPGFHLHSQSSGPECCRVKALYSVPFRKESIK

SEQ ID NO: 803051 - protein, 98 aa, Homo sapiens
PYAEQYRIDARQFAHLFQLVSPWTCGAHTEILAERTFRLLDDNMDQLIEFKAFVSCLGMPLWDFAVMCFGVWVCEQNTKWIFGAGRCTWCNTFVTGLT

SEQ ID NO: 803052 - protein, 239 aa, Homo sapiens
RPGRLQWGRAAMGPGRRKQVRQSWGADRPKGILAWPDSQECGPAQESPSPPELRERGGSKARPAGQREARPGRPRGSGGDPRAGQVAGSAEGSGSRGTARGEGAARAALTLGDPAEAQDVLGPDGVQRQQLLLRDRCPDAVVGRVVGRLPPRLQAVQDAAAAFFFSSLPATSPPGPSRRRRGRSLRVRPAHRSAAKMAAASTARDDGKCNLFTCNSTSRNLPYLHAQRFVILTNYNKLH

SEQ ID NO: 803053 - protein, 187 aa, Homo sapiens
RPGRLQWGRAAMGPGRRKQVRQSWGADRPKGILAWPDSQECGPAQESPSPPELRERGGSKARPAGQREARPGRPRGSGGDPRAGQVAGSAEGSGSRGTARGEGAARAALTLGDPAEAQDVLGPDGVQRQQLLLRDRCPDAVVGRVVGRLPPRLQAVQDAAARLLLLLLASHQPPRAQPPTPRPQPSG

SEQ ID NO: 803054 - protein, 101 aa, Homo sapiens
CSMDVTVSTESSCNRSRACSGLRLYSGSDQTGEEDGGQVVGERTRRSHDQESSRQCVGLCFVKQQRALKLERAKALRRADRGKKILNANVSSRLPVFRVSY

SEQ ID NO: 803055 - protein, 68 aa, Homo sapiens
TRMKLGLTMHTSLFSWVSFSKETSATSSPPAILSPTSPLSRITSTCSRPATCSNEGRQKHFSRFGNKA

SEQ ID NO: 803056 - protein, 866 aa, Homo sapiens
MPAVSLPPKENALFKRILRCYEHKQYRNGLKFCKQILSNPKFAEHGETLAMKGLTLNCLGKKEEAYELVRRGLRNDLKSHVCWHVYGLLQRSDKKYDEAIKCYRNALKWDKDNLQILRDLSLLQIQMRDLEGYRETRYQLLQLRPAQRASWIGYAIAYHLLEDYEMAAKILEEFRKTQQTSPDKVDYEYSELLLYQNQVLREAGLYREALEHLCTYEKQICDKLAVEETKGELLLQLCRLEDAADVYRGLQERNPENWAYYKGLEKALKPANMLERLKIYEEAWTKYPRGLVPRRLPLNFLSGEKFKECLDKFLRMNFSKGCPPVFNTLRSLYKDKEKVAIIEELVVGYETSLKSCRLFNPNDDGKEEPPTTLLWVQYYLAQHYDKIGQPSIALEYINTAIESTPTLIELFLVKAKIYKHAGNIKEAARWMDEAQALDTADRFINSKCAKYMLKANLIKEAEEMCSKFTREGTSAVENLNEMQCMWFQTECAQAYKAMNKFGEALKKCHEIERHFIEITDDQFDFHTYCMRKITLRSYVDLLKLEDVLRQHPFYFKAARIAIEIYLKLHDNPLTDENKEHEADTANMSDKELKKLRNKQRRAQKKAQIEEEKKNAEKEKQQRNQKKKKDDDDEEIGGPKEELIPEKLAKVETPLEEAIKFLTPLKNLVKNKIETHLFAFEIYFRKEKFLLMLQSVKRAFAIDSSHPWLHECMIRLFNTAVCESKDLSDTVRTVLKQEMNRLFGATNPKNFNETFLKRNSDSLPHRLSAAKMVYYLDPSSQKRAIELATTLDESLTNRNLQTCMEVLEALYDGSLGDCKEAAEIYRANCHKLFPYALAFMPPGYEEDMKITVNGDSSAEAEELANEI

SEQ ID NO: 803057 - protein, 866 aa, Homo sapiens; identical to SEQ ID NO: 803056

SEQ ID NO: 803058 - protein, 866 aa, Homo sapiens; identical to SEQ ID NO: 803056

SEQ ID NO: 803059 - protein, 866 aa, Homo sapiens; identical to SEQ ID NO: 803056

SEQ ID NO: 803060 - protein, 866 aa, Homo sapiens; identical to SEQ ID NO: 803056

SEQ ID NO: 803061 - protein, 898 aa, Homo sapiens
MPAVSLPPKENALFKRILRCYEHKQYRNGLKFCKQILSNPKFAEHGETLAMKGLTLNCLGKKEEAYELVRRGLRNDLKSHVCWHVYGLLQRSDKKYDEAIKCYRNALKWDKDNLQILRDLSLLQIQMRDLEGYRETRYQLLQLRPAQRASWIGYAIAYHLLEDYEMAAKILEEFRKTQQTSPDKVDYEYSELLLYQNQVLREAGLYREALEHLCTYEKQICDKLAVEETKGELLLQLCRLEDAADVYRGLQERNPENWAYYKGLEKALKPANMLERLKIYEEAWTKYPRGLVPRRLPLNFLSGEKFKECLDKFLRMNFSKGCPPVFNTLRSLYKDKEKVAIIEELVVGYETSLKSCRLFNPNAFSYIFYKCGRGSDDLPKNMQHFCCRSVRWGVDDGKEEPPTTLLWVQYYLAQHYDKIGQPSIALEYINTAIESTPTLIELFLVKAKIYKHAGNIKEAARWMDEAQALDTADRFINSKCAKYMLKANLIKEAEEMCSKFTREGTSAVENLNEMQCMWFQTECAQAYKAMNKFGEALKKCHEIERHFIEITDDQFDFHTYCMRKITLRSYVDLLKLEDVLRQHPFYFKAARIAIEIYLKLHDNPLTDENKEHEADTANMSDKELKKLRNKQRRAQKKAQIEEEKKNAEKEKQQRNQKKKKDDDDEEIGGPKEELIPEKLAKVETPLEEAIKFLTPLKNLVKNKIETHLFAFEIYFRKEKFLLMLQSVKRAFAIDSSHPWLHECMIRLFNTAVCESKDLSDTVRTVLKQEMNRLFGATNPKNFNETFLKRNSDSLPHRLSAAKMVYYLDPSSQKRAIELATTLDESLTNRNLQTCMEVLEALYDGSLGDCKEAAEIYRANCHKLFPYALAFMPPGYEEDMKITVNGDSSAEAEELANEI

SEQ ID NO: 803062 - protein, 919 aa, Homo sapiens
MEAPEYLDLDEIDFSDDISYSVTSLKTIPELCRRCDTQNEDRSVSSSSWNCGISTLITNTQKPTGIADVYSKFRPVKRVSPLKHQPETLENNESDDQKNQKVVEYQKGGESDLGPQPQELGPGDGVGGPPGKSSEPSTSLGELEHYDLDMDEILDVPYIKSSQQLASFTKVTSEKRILGLCTTINGLSGKACSTGSSESSSSNMAPFCVLSPVKSPHLRKASAVIHDQHKLSTEETEISPPLVKCGSAYEPENQSKDFLNKTFSDPHGRKVEKTTPDCQLRAFHLQSSAAESKPEEQVSGLNRTSSQGPEERSEYLKKVKSILNIVKEGQISLLPHLAADNLDKIHDENGNNLLHIAASQGHAECLQHLTSLMGEDCLNERNTEKLTPAGLAIKNGQLECVRWMVSETEAIAELSCSKDFPSLIHYAGCYGQEKILLWLLQFMQEQGISLDEVDQDGNSAVHVASQHGYLGCIQTLVEYGANVTMQNHAGEKPSQSAERQGHTLCSRYLVVVETCMSLASQVVKLTKQLKEQTVERVTLQNQLQQFLEAQKSEGKSLPSSPSSPSSPASRKSQWKSPDADDDSVAKSKPGVQEGIQVLGSLSASSRARPKAKDEDSDKILRQLLGKEISENVCTQEKLSLEFQDAQASSRNSKKIPLEKRELKLARLRQLMQRSLSESDTDSNNSEDPKTTPVRKADRPRPQPIVESVESMDSAESLHLMIKKHTLASGGRRFPFSIKASKSLDGHSPSPTSESSEPDLESQYPGSGSIPPNQPSGDPQQPSPDSTAAQKVATSPKSALKSPSSKRRTSQNLKLRVTFEEPVVQMEQPSLELNGEKDKDKGRTLQRTSTSNESGDQLKRPFGAFRSIMETLSGNQNNNNNYQAANQLKTSTLPLTSLGRKTDAKGNPASSASKGKNKAA

SEQ ID NO: 803063 - protein, 435 aa, Homo sapiens [sequence omitted]

SEQ ID NO: 803064 - protein, 559 aa, Homo sapiens
MKLTLVMTYLIQSHHSRRSQNCAEDVIRKTKTDQNGQLECVRWMVSETEAIAELSCSKDFPSLIHYAGCYGQEKILLWLLQFMQEQGISLDEVDQDGNSAVHVASQHGYLGCIQTLVEYGANVTMQNHAGEKPSQSAERQGHTLCSRYLVVVETCMSLASQVVKLTKQLKEQTVERVTLQNQLQQFLEAQKSEGKSLPSSPSSPSSPASRKSQWKSPDADDDSVAKSKPGVQEGIQVLGSLSASSRARPKAKDEDSDKILRQLLGKEISENVCTQEKLSLEFQDAQASSRNSKKIPLEKRELKLARLRQLMQRSLSESDTDSNNSEDPKTTPVRKADRPRPQPIVESVESMDSAESLHLMIKKHTLASGGRRFPFSIKASKSLDGHSPSPTSESSEPDLESQYPGSGSIPPNQPSGDPQQPSPDSTAAQKVATSPKSALKSPSSKRRTSQNLKLRVTFEEPVVQMEQPSLELNGEKDKDKGRTLQRTSTSNESGDQLKRPFGAFRSIMETLSGNQNNNNNYQAANQLKTSTLPLTSLGRKTDAKGNPASSASKGKNKAA

SEQ ID NO: 803065 - protein, 969 aa, Homo sapiens
MEAPEYLDLDEIDFSDDISYSVTSLKTIPELCRRCDTQNEDRSVSSSSWNCGISTLITNTQKPTGIADVYSKFRPVKRVSPLKHQPETLENNESDDQKNQKVVEYQKGGESDLGPQPQELGPGDGVGGPPGKSSEPSTSLGELEHYDLDMDEILDVPYIKSSQQLASFTKVTSEKRILGLCTTINGLSGKACSTGSSESSSSNMAPFCVLSPVKSPHLRKASAVIHDQHKLSTEETEISPPLVKCGSAYEPENQSKDFLNKTFSDPHGRKVEKTTPDCQLRAFHLQSSAAESKPEEQVSGLNRTSSQGPEERSEYLKKVKSILNIVKEGQISLLPHLAADNLDKIHDENGNNLLHIAASQGHAECLQHLTSLMGEDCLNERNTEKLTPAGLAIKNGQLECVRWMVSETEAIAELSCSKDFPSLIHYAGCYGQEKILLWLLQFMQEQGISLDEVDQDGNSAVHVASQHGYLGCIQTLVEYGANVTMQNHAGEKPSQSAERQGHTLCSRYLVVVETCMSLASQVVKLTKQLKEQTVERVTLQNQLQQFLEAQKSEGKSLPSSPSSPSSPASRKSQWKSPDADDDSVAKSKPGVQEGIQVLGSLSASSRARPKAKDEDSDKILRQLLGKEISENVCTQEKLSLEFQDAQASSRNSKKIPLEKRELKLARLRQLMQRSLSESDTDSNNSEDPKTTPVRKADRPRPQPIVESVESMDSAESLHLMIKKHTLASGGRRFPFSIKASKSLDGHSPSPTSESSEPDLESQYPGSGSIPPNQPSGDPQQPSPDSTAAQKVATSPKSALKSPSSKRRTSQNLKLRVTFEEPVVQMEQPSLELNGEKDKDKGRTLQRTSTSNESGDQLKRPFGAFRSIMETLSGNQNNNNNYQAANQLKTSTLPLTSLGRKTDAKGNPASSASKGKNKAEMYSSCINLSSNMLIEEHLCNDTRHNDINRKMKKSYSIKHIAEPESKELFL

SEQ ID NO: 803066 - protein, 947 aa, Homo sapiens [sequence omitted]

SEQ ID NO: 803067 - protein, 221 aa, Homo sapiens
MASSTSLPAPGSRPKKPLGKMADWFRQTLLKKPKKRPNSPESTSSDASQPTSQDSPLPPSLSSVTSPSLPPTHASDSGSSRWSKDYDVCVCHSEEDLVAAQDLVSYLEGSTASLRCFLQLRDATPGGAIVSELCQALSSSHCRVLLITPGFLQDPWCKYQMLQALTEAPGAEGCTIPLLSGLSRAAYPPELRFMYYVDGRGPDGGFRQVKEAVMRYLQTLS

SEQ ID NO: 803068 - protein, 221 aa, Homo sapiens; identical to SEQ ID NO: 803067

SEQ ID NO: 803069 - protein, 221 aa, Homo sapiens; identical to SEQ ID NO: 803067

SEQ ID NO: 803070 - protein, 221 aa, Homo sapiens; identical to SEQ ID NO: 803067

SEQ ID NO: 803071 - protein, 235 aa, Homo sapiens
MASSTSLPAPGSRPKKPLGKMADWFRQTLLKKPKKRPNSPESTSSDASQPTSQDSPLPPSLSSVTSPSLPPTHASDSGSSRWSKDYDVCVCHSEEDLVAAQDLVSYLEGSTASLRCFLQLRDATPGGAIVSELCQALSSSHCRVLLITPGFLQDPWCKYQMLQALTEAPGAEGCTIPLLSGLSRAAYPPELRFMYYVDGRGPDGGFRQVKEAVMRCKLLQEGEGERDSATVSDLL

SEQ ID NO: 803072 - protein, 221 aa, Homo sapiens; identical to SEQ ID NO: 803067

SEQ ID NO: 803073 - protein, 102 aa, Homo sapiens
MGERVRIKFGDFDIEDSDSCHFNYLRIYNGIGVSRTEIGKYCGLGLQMNHSIESKGNEITLLFMSGIHVSGRGFLASYSVIDKQGNFHLLQWFLQFVISNNK

SEQ ID NO: 803074 - protein, 605 aa, Homo sapiens
MASRAVVRARRCPQCPQVRAAAAAPAWAALPLSRSLPPCSNSSSFSMPLFLLLLLVLLLLLEDAGAQQGDGCGHTVLGPESGTLTSINYPQTYPNSTVCEWEIRVKMGERVRIKFGDFDIEDSDSCHFNYLRIYNGIGVSRTEIGKYCGLGLQMNHSIESKGNEITLLFMSGIHVSGRGFLASYSVIDKQDLITCLDTASNFLEPEFSKYCPAGCLLPFAEISGTIPHGYRDSSPLCMAGVHAGVVSNTLGGQISVVISKGIPYYESSLANNVTSVVGHLSTSLFTFKTSGCYGTLGMESGVIADPQITASSVLEWTDHTGQENSWKPKKARLKKPGPPWAAFATDEYQWLQIDLNKEKKITGIITTGSTMVEHNYYVSAYRILYSDDGQKWTVYREPGVEQDKIFQGNKDYHQDVRNNFLPPIIARFIRVNPTQWQQKIAMKMELLGCQFIPKGRPPKLTQPPPPRNSNDLKNTTAPPKIAKGRAPKFTQPLQPRSSNEFPAQTEQTTASPDIRNTTVTPNVTKDVALAAVLVPVLVMVLTTLILILVCAWHWRNRKKKTEGTYDLPYWDRAGNSRGLCISFLSEGCRSPTGGSSEKRVILWPR

SEQ ID NO: 803075 - protein, 686 aa, Homo sapiens
MPLVRGVRSPRAMTGFVHARPRPGSKSGKPRFLERGAARECAGVVEHGAAMSRECGAECAAECPGGGSCQSWIRRSRSAPVTRACSSPGPSRSSEAREELRRHLVGLIERSRVVIFSKSYCPHSTRVKELFSSLGVECNVLELDQVDDGARVQEVLSEITNQKTVPNIFVNKVHVGGCDQTFQAYQSGLLQKLLQEDLAYDYDLIIIGGGSGGLSCAKEAAILGKKVMVLDFVVPSPQGTSWGLGGTCVNVGCIPKKLMHQAALLGQALCDSRKFGWEYNQQVRHNWETMTKAIQNHISSLNWGYRLSLREKAVAYVNSYGEFVEHHKIKATNKKGQETYYTAAQFVIATGERPRYLGIQGDKEYCITSDDLFSLPYCPGKTLVVGASYVALECAGFLAGFGLDVTVMVRSILLRGFDQEMAEKVGSYMEQHGVKFLRKFIPVMVQQLEKGSPGKLKVLAKSTEGTETIEGVYNTVLLAIGRDSCTRKIGLEKIGVKINEKSGKIPVNDVEQTNVPYVYAVGDILEDKPELTPVAIQSGKLLAQRLFGASLEKCDYINVPTTVFTPLEYGCCGLSEEKAIEVYKKENLEIYHTLFWPLEWTVAGRENNTCYAKIICNKFDHDRVIGFHILGPNAGEVTQGFAAAMKCGLTKQLLDDTIGIHPTCGEVFTTLEITKSSGLDITQKGC

SEQ ID NO: 803076 - protein, 459 aa, Homo sapiens
MVLDFVVPSPQGTSWGLGGTCVNVGCIPKKLMHQAALLGQALCDSRKFGWEYNQQVRHNWETMTKAIQNHISSLNWGYRLSLREKAVAYVNSYGEFVEHHKIKATNKKGQETYYTAAQFVIATGERPRYLGIQGDKEYCITSDDLFSLPYCPGKTLVVGASYVALECAGFLAGFGLDVTVMVRSILLRGFDQEMAEKVGSYMEQHGVKFLRKFIPVMVQQLEKGSPGKLKVLAKSTEGTETIEGVYNTVLLAIGRDSCTRKIGLEKIGVKINEKSGKIPVNDVEQTNVPYVYAVGDILEDKPELTPVAIQSGKLLAQRLFGASLEKCDYINVPTTVFTPLEYGCCGLSEEKAIEVYKKENLEIYHTLFWPLEWTVAGRENNTCYAKIICNKFDHDRVIGFHILGPNAGEVTQGFAAAMKCGLTKQLLDDTIGIHPTCGEVFTTLEITKSSGLDITQKGC

SEQ ID NO: 803077 - protein, 436 aa, Homo sapiens
MSGIHVSGRGFLASYSVIDKQDLITCLDTASNFLEPEFSKYCPAGCLLPFAEISGTIPHGYRDSSPLCMAGVHAGVVSNTLGGQISVVISKGIPYYESSLANNVTSVVGHLSTSLFTFKTSGCYGTLGMESGVIADPQITASSVLEWTDHTGQENSWKPKKARLKKPGPPWAAFATDEYQWLQIDLNKEKKITGIITTGSTMVEHNYYVSAYRILYSDDGQKWTVYREPGVEQDKIFQGNKDYHQDVRNNFLPPIIARFIRVNPTQWQQKIAMKMELLGCQFIPKGRPPKLTQPPPPRNSNDLKNTTAPPKIAKGRAPKFTQPLQPRSSNEFPAQTEQTTASPDIRNTTVTPNVTKDVALAAVLVPVLVMVLTTLILILVCAWHWRNRKKKTEGTYDLPYWDRAGNSRGLCISFLSEGCRSPTGGSSEKRVILWPR

SEQ ID NO: 803078 - protein, 683 aa, Homo sapiens
ARVVRVASEGSVRRPSGPVPAPQPPAFRFVSRPGRARSESETLERSPPQSPGPGKAGDAPNRRSGHVRGARVLSPPGRRARLSSPGPSRSSEAREELRRHLVGLIERSRVVIFSKSYCPHSTRVKELFSSLGVECNVLELDQVDDGARVQEVLSEITNQKTVPNIFVNKVHVGGCDQTFQAYQSGLLQKLLQEDLAYDYDLIIIGGGSGGLSCAKEAAILGKKVMVLDFVVPSPQGTSWGLGGTCVNVGCIPKKLMHQAALLGQALCDSRKFGWEYNQQVRHNWETMTKAIQNHISSLNWGYRLSLREKAVAYVNSYGEFVEHHKIKATNKKGQETYYTAAQFVIATGERPRYLGIQGDKEYCITSDDLFSLPYCPGKTLVVGASYVALECAGFLAGFGLDVTVMVRSILLRGFDQEMAEKVGSYMEQHGVKFLRKFIPVMVQQLEKGSPGKLKVLAKSTEGTETIEGVYNTVLLAIGRDSCTRKIGLEKIGVKINEKSGKIPVNDVEQTNVPYVYAVGDILEDKPELTPVAIQSGKLLAQRLFGASLEKCDYINVPTTVFTPLEYGCCGLSEEKAIEVYKKENLEIYHTLFWPLEWTVAGRENNTCYAKIICNKFDHDRVIGFHILGPNAGEVTQGFAAAMKCGLTKQLLDDTIGIHPTCGEVFTTLEITKSSGLDITQKGC

SEQ ID NO: 803079 - protein, 683 aa, Homo sapiens; identical to SEQ ID NO: 803078

SEQ ID NO: 803080 - protein, 642 aa, Homo sapiens
MASRAVVRARRCPQCPQVRAAAAAPAWAALPLSRSLPPCSNSSSFSMPLFLLLLLVLLLLLEDAGAQQGDGCGHTVLGPESGTLTSINYPQTYPNSTVCEWEIRVKMGERVRIKFGDFDIEDSDSCHFNYLRIYNGIGVSRTEIGKYCGLGLQMNHSIESKGNEITLLFMSGIHVSGRGFLASYSVIDKQDLITCLDTASNFLEPEFSKYCPAGCLLPFAEISGTIPHGYRDSSPLCMAGVHAGVVSNTLGGQISVVISKGIPYYESSLANNVTSVVGHLSTSLFTFKTSGCYGTLGMESGVIADPQITASSVLEWTDHTGQENSWKPKKARLKKPGPPWAAFATDEYQWLQIDLNKEKKITGIITTGSTMVEHNYYVSAYRILYSDDGQKWTVYREPGVEQDKIFQGNKDYHQDVRNNFLPPIIARFIRVNPTQWQQKIAMKMELLGCQFIPKGRPPKLTQPPPPRNSNDLKNTTAPPKIAKGRAPKFTQPLQPRSSNEFPAQTEQTTASPDIRNTTVTPNVTKDVALAAVLVPVLVMVLTTLILILVCAWHWRNRKKKTEGTYDLPYWDRAGWWKGMKQFLPAKAVDHEETPVRYSSSEVNHLSPREVTTVLQADSAEYAQPLVGGIVGTLHQRSTFKPE

SEQ ID NO: 803081 - protein, 513 aa, Homo sapiens
MASRAVVRARRCPQCPQVRAAAAAPAWAALPLSRSLPPCSNSSSFSMPLFLLLLLVLLLLLEDAGAQQGDGCGHTVLGPESGTLTSINYPQTYPNSTVCEWEIRVKMGERVRIKFGDFDIEDSDSCHFNYLRIYNGIGVSRTEIGKYCGLGLQMNHSIESKGNEITLLFMSGIHVSGRGFLASYSVIDKQDLITCLDTASNFLEPEFSKYCPAGCLLPFAEISGTIPHGYRDSSPLCMAGVHAGVVSNTLGGQISVVISKGIPYYESSLANNVTSVVGHLSTSLFTFKTSGCYGTLGMESGVIADPQITASSVLEWTDHTGQENSWKPKKARLKKPGPPWAAFATDEYQWLQIDLNKEKKITGIPKQVVKLEALQELNVAFNSLTDLPGCDSFSSLSVLIIDHNSVSHPSADFFQSCQKMRSIKAGDNPFQCTCELGEFVKNIDQVSSEVLEGWPDSYKCDYPESYRGTLLKDFHMSELSCNITLLIVTIVATMLVLAVTVTSLCSYLDLPWY

SEQ ID NO: 803082 - protein, 1150 aa, Homo sapiens
MHPPETTTKMASVRFMVTPTKIDDIPGLSDTSPDLSSRSSSRVRFSSRESVPETSRSEPMSEMSGATTSLATVALDPPSDRTSHPQDVIEDLSQNSITGEHSQLLDDGHKKARNAYLNNSNYEEGDEYFDKNLALFEEEMDTRPKVSSLLNRMANYTNLTQGAKEHEEAENITEGKKKPTKTPQMGTFMGVYLPCLQNIFGVILFLRLTWVVGTAGVLQAFAIVLICCCCTMLTAISMSAIATNGVVPAGGSYFMISRALGPEFGGAVGLCFYLGTTFAAAMYILGAIEIFLVYIVPRAAIFHSDDALKESAAMLNNMRVYGTAFLVLMVLVVFIGVRYVNKFASLFLACVIVSILAIYAGAIKSSFAPPHFPVCMLGNRTLSSRHIDVCSKTKEINNMTVPSKLWGFFCNSSQFFNATCDEYFVHNNVTSIQGIPGLASGIITENLWSNYLPKGEIIEKPSAKSSDVLGSLNHEYVLVDITTSFTLLVGIFFPSVTGIMAGSNRSGDLKDAQKSIPIGTILAILTTSFVYLSNVVLFGACIEGVVLRDKFGDAVKGNLVVGTLSWPSPWVIVIGSFFSTCGAGLQSLTGAPRLLQAIAKDNIIPFLRVFGHSKANGEPTWALLLTAAIAELGILIASLDLVAPILSMFFLMCYLFVNLACALQTLLRTPNWRPRFRYYHWALSFMGMSICLALMFISSWYYAIVAMVIAGMIYKYIEYQGAEKEWGDGIRGLSLSAARFALLRLEEGPPHTKNWRPQLLVLLKLDEDLHVKHPRLLTFASQLKAGKGLTIVGSVIVGNFLENYGEALAAEQTIKHLMEAEKVKGFCQLVVAAKLREGISHLIQSCGLGGMKHNTVVMGWPNGWRQSEDARAWKTFIGTVRVTTAAHLALLVAKNISFFPSNVEQFSEGNIDVWWIVHDGGMLMLLPFLLKQHKVWRKCSIRIFTVAQLEDNSIQMKKDLATFLYHLRIEAEVEVVEMHDSDISAYTYERTLMMEQRSQMLRHMRLSKTERDREAQLVKDRNSMLRLTSIGSDEDEETETYQEKVHMTWTKDKYMASRGQKAKSMEGFQDLLNMRPDQSNVRRMHTAVKLNEVIVNKSHEAKLVLLNMPGPPRNPEGDENYMEFLEVLTEGLERVLLVRGGGSEVITIYS

SEQ ID NO: 803083 - protein, 1150 aa, Homo sapiens; identical to SEQ ID NO: 803082

SEQ ID NO: 803084 - protein, 1159 aa, Homo sapiens
ARWTRSPRAAAAGRGFRAPAGRFRPLTAPPGFSSQGLSDTSPDLSSRSSSRVRFSSRESVPETSRSEPMSEMSGATTSLATVALDPPSDRTSHPQDVIEDLSQNSITGEHSQLLDDGHKKARNAYLNNSNYEEGDEYFDKNLALFEEEMDTRPKVSSLLNRMANYTNLTQGAKEHEEAENITEGKKKPTKTPQMGTFMGVYLPCLQNIFGVILFLRLTWVVGTAGVLQAFAIVLICCCCTMLTAISMSAIATNGVVPAGGSYFMISRALGPEFGGAVGLCFYLGTTFAAAMYILGAIEIFLVYIVPRAAIFHSDDALKESAAMLNNMRVYGTAFLVLMVLVVFIGVRYVNKFASLFLACVIVSILAIYAGAIKSSFAPPHFPVCMLGNRTLSSRHIDVCSKTKEINNMTVPSKLWGFFCNSSQFFNATCDEYFVHNNVTSIQGIPGLASGIITENLWSNYLPKGEIIEKPSAKSSDVLGSLNHEYVLVDITTSFTLLVGIFFPSVTGIMAGSNRSGDLKDAQKSIPIGTILAILTTSFVYLSNVVLFGACIEGVVLRDKFGDAVKGNLVVGTLSWPSPWVIVIGSFFSTCGAGLQSLTGAPRLLQAIAKDNIIPFLRVFGHSKANGEPTWALLLTAAIAELGILIASLDLVAPILSMFFLMCYLFVNLACALQTLLRTPNWRPRFRYYHWALSFMGMSICLALMFISSWYYAIVAMVIAGMIYKYIEYQGAEKEWGDGIRGLSLSAARFALLRLEEGPPHTKNWRPQLLVLLKLDEDLHVKHPRLLTFASQLKAGKGLTIVGSVIVGNFLENYGEALAAEQTIKHLMEAEKVKGFCQLVVAAKLREGISHLIQSCGLGGMKHNTVVMGWPNGWRQSEDARAWKTFIGTVRVTTAAHLALLVAKNISFFPSNVEQFSEGNIDVWWIVHDGGMLMLLPFLLKQHKVWRKCSIRIFTVAQLEDNSIQMKKDLATFLYHLRIEAEVEVVEMHDSDISAYTYERTLMMEQRSQMLRHMRLSKTERDREAQLVKDRNSMLRLTSIGSDEDEETETYQEKVHMTWTKDKYMASRGQKAKSMEGFQDLLNMRPDQSNVRRMHTAVKLNEVIVNKSHEAKLVLLNMPGPPRNPEGDENYMEFLEVLTEGLERVLLVRGGGSEVITIYS

SEQ ID NO: 803085 - protein, 463 aa, Homo sapiens [sequence omitted]

SEQ ID NO: 803086 - protein, 1025 aa, Homo sapiens
ARWTRSPRAAAAGRGFRAPAGRFRPLTAPPGFSSQGLSDTSPDLSSRSSSRVRFSSRESVPETSRSEPMSEMSGATTSLATVALDPPSDRTSHPQDVIEDLSQNSITGEHSQLLDDGHKKARNAYLNNSNYEEGDEYFDKNLALFEEEMDTRPKVSSLLNRMANYTNLTQGAKEHEEAENITEGKKKPTKTPQMGTFMGVYLPCLQNIFGVILFLRLTWVVGTAGVLQAFAIVLICCCCTMLTAISMSAIATNGVVPAGGSYFMISRALGPEFGGAVGLCFYLGTTFAAAMYILGAIEIFLVYIVPRAAIFHSDDALKESAAMLNNMRVYGTAFLVLMVLVVFIGVRYVNKFASLFLACVIVSILAIYAGAIKSSFAPPHFPVCMLGNRTLSSRHIDVCSKTKEINNMTVPSKLWGFFCNSSQFFNATCDEYFVHNNVTSIQGIPGLASGIITENLWSNYLPKGEIIEKPSAKSSDVLGSLNHEYVLVDITTSFTLLVGIFFPSVTGIMAGSNRSGDLKDAQKSIPIGTILAILTTSFVYLSNVVLFGACIEGVVLRDKFGDAVKGNLVVGTLSWPSPWVIVIGSFFSTCGAGLQSLTGAPRLLQAIAKDNIIPFLRVFGHSKANGEPTWALLLTAAIAELGILIASLDLVAPILSMFFLMCYLFVNLACALQTLLRTPNWRPRFRYYHWALSFMGMSICLALMFISSWYYAIVAMVIAGMIYKYIEYQGAEKEWGDGIRGLSLSAARFALLRLEEGPPHTKNWRPQLLVLLKLDEDLHVKHPRLLTFASQLKAGKGLTIVGSVIVGNFLENYGEALAAEQTIKHLMEAEKVKGFCQLVVAAKLREGISHLIQSCGLGGMKHNTVVMGWPNGWRQSEDARAWKTFIGTVRVTTAAHLALLVAKNISFFPSNVEQFSEGNIDVWWIVHDGGMLMLLPFLLKQHKVWRKCSIRIFTVAQLEDNSIQMKKDLATFLYHLRIEAEVEVVEMVRKLSLRYKRFIPPFLSLSSLNLFWFGKFFRSKCGLIP

SEQ ID NO: 803087 - protein, 1116 aa, Homo sapiens
LEGSLNTERAKYYLTITMPHFTVTKVEDPEEGAAASISQEPSLADIKARIQDSDEPDLSQNSITGEHSQLLDDGHKKARNAYLNNSNYEEGDEYFDKNLALFEEEMDTRPKVSSLLNRMANYTNLTQGAKEHEEAENITEGKKKPTKTPQMGTFMGVYLPCLQNIFGVILFLRLTWVVGTAGVLQAFAIVLICCCCTMLTAISMSAIATNGVVPAGGSYFMISRALGPEFGGAVGLCFYLGTTFAAAMYILGAIEIFLVYIVPRAAIFHSDDALKESAAMLNNMRVYGTAFLVLMVLVVFIGVRYVNKFASLFLACVIVSILAIYAGAIKSSFAPPHFPVCMLGNRTLSSRHIDVCSKTKEINNMTVPSKLWGFFCNSSQFFNATCDEYFVHNNVTSIQGIPGLASGIITENLWSNYLPKGEIIEKPSAKSSDVLGSLNHEYVLVDITTSFTLLVGIFFPSVTGIMAGSNRSGDLKDAQKSIPIGTILAILTTSFVYLSNVVLFGACIEGVVLRDKFGDAVKGNLVVGTLSWPSPWVIVIGSFFSTCGAGLQSLTGAPRLLQAIAKDNIIPFLRVFGHSKANGEPTWALLLTAAIAELGILIASLDLVAPILSMFFLMCYLFVNLACALQTLLRTPNWRPRFRYYHWALSFMGMSICLALMFISSWYYAIVAMVIAGMIYKYIEYQGAEKEWGDGIRGLSLSAARFALLRLEEGPPHTKNWRPQLLVLLKLDEDLHVKHPRLLTFASQLKAGKGLTIVGSVIVGNFLENYGEALAAEQTIKHLMEAEKVKGFCQLVVAAKLREGISHLIQSCGLGGMKHNTVVMGWPNGWRQSEDARAWKTFIGTVRVTTAAHLALLVAKNISFFPSNVEQFSEGNIDVWWIVHDGGMLMLLPFLLKQHKVWRKCSIRIFTVAQLEDNSIQMKKDLATFLYHLRIEAEVEVVEMHDSDISAYTYERTLMMEQRSQMLRHMRLSKTERDREAQLVKDRNSMLRLTSIGSDEDEETETYQEKVHMTWTKDKYMASRGQKAKSMEGFQDLLNMRPDQSNVRRMHTAVKLNEVIVNKSHEAKLVLLNMPGPPRNPEGDENYMEFLEVLTEGLERVLLVRGGGSEVITIYS

SEQ ID NO: 803088 - protein, 1116 aa, Homo sapiens; identical to SEQ ID NO: 803087

SEQ ID NO: 803089 - protein, 1088 aa, Homo sapiens
MSGATTSLATVALDPPSDRTSHPQDVIEDLSQNSITGEHSQLLDDGHKKARNAYLNNSNYEEGDEYFDKNLALFEEEMDTRPKVSSLLNRMANYTNLTQGAKEHEEAENITEGKKKPTKTPQMGTFMGVYLPCLQNIFGVILFLRLTWVVGTAGVLQAFAIVLICCCCTMLTAISMSAIATNGVVPAGGSYFMISRALGPEFGGAVGLCFYLGTTFAAAMYILGAIEIFLVYIVPRAAIFHSDDALKESAAMLNNMRVYGTAFLVLMVLVVFIGVRYVNKFASLFLACVIVSILAIYAGAIKSSFAPPHFPVCMLGNRTLSSRHIDVCSKTKEINNMTVPSKLWGFFCNSSQFFNATCDEYFVHNNVTSIQGIPGLASGIITENLWSNYLPKGEIIEKPSAKSSDVLGSLNHEYVLVDITTSFTLLVGIFFPSVTGIMAGSNRSGDLKDAQKSIPIGTILAILTTSFVYLSNVVLFGACIEGVVLRDKFGDAVKGNLVVGTLSWPSPWVIVIGSFFSTCGAGLQSLTGAPRLLQAIAKDNIIPFLRVFGHSKANGEPTWALLLTAAIAELGILIASLDLVAPILSMFFLMCYLFVNLACALQTLLRTPNWRPRFRYYHWALSFMGMSICLALMFISSWYYAIVAMVIAGMIYKYIEYQGAEKEWGDGIRGLSLSAARFALLRLEEGPPHTKNWRPQLLVLLKLDEDLHVKHPRLLTFASQLKAGKGLTIVGSVIVGNFLENYGEALAAEQTIKHLMEAEKVKGFCQLVVAAKLREGISHLIQSCGLGGMKHNTVVMGWPNGWRQSEDARAWKTFIGTVRVTTAAHLALLVAKNISFFPSNVEQFSEGNIDVWWIVHDGGMLMLLPFLLKQHKVWRKCSIRIFTVAQLEDNSIQMKKDLATFLYHLRIEAEVEVVEMHDSDISAYTYERTLMMEQRSQMLRHMRLSKTERDREAQLVKDRNSMLRLTSIGSDEDEETETYQEKVHMTWTKDKYMASRGQKAKSMEGFQDLLNMRPDQSNVRRMHTAVKLNEVIVNKSHEAKLVLLNMPGPPRNPEGDENYMEFLEVLTEGLERVLLVRGGGSEVITIYS

SEQ ID NO: 803090 - protein, 112 aa, Homo sapiens
SLLDLSPYFFSLRVCMLGNRTLSSRHIDVCSKTKEINNMTVPSKLWGFFCNSSQFFNATCDEYFVHNNVTSIQGIPGLASGIITGKLGSYWTSFFLFFGENRPCHLRFLYCP

SEQ ID NO: 803091 - protein, 181 aa, Homo sapiens
KAAAAASAAGPGGLVAGKEEKKKAGGGVLNRLKARRQAPHHAADDGVGAAVTEQELLALDTIRPEHVLRLSRVTENYLCKPEDNIYSIDFTRFKIRDLETGTVLFEIAKPCVSDQEEDEEEGGGDVDISAGRFVRYQFTPAFLRLRTVGATVEFTVGDKPVSNFRMIERHYFREHLLKNFD

SEQ ID NO: 803092 - protein, 122 aa, Homo sapiens
AAAPTPASGTLTAGRFALLGIAVAAVVAGPEALVFHHRRHGRREGPLGPTTPLGARGRPRRSAGARGGRGGERSLARGPVGGDGGRVPKPCVWAGASHSCALSAPFHSLLKQRRTTINSIKK

SEQ ID NO: 803093 - protein, 122 aa, Homo sapiens
MEDTPLVISKQKTEVVCGVPTQVVCTAFSSHILVVVTQFGKMGTLVSLEPSSVASDVSKPVLTTKVLLGQDEPLIHVFAKNLVAFVSQEAGNRAVLLAVAVKDKSMEGLKALREVIRVCQVW

SEQ ID NO: 803094 - protein, 122 aa, Homo sapiens; identical to SEQ ID NO: 803093

SEQ ID NO: 803095 - protein, 115 aa, Homo sapiens
GTAFSSHILGGVPTQVVCTAFSSHILVVVTQFGKMGTLVSLEPSSVASDVSKPVLTTKVLLGQDEPLIHVFAKNLVAFVSQEAGNRAVLLAVAVKDKSMEGLKALREVIRVCQVW

SEQ ID NO: 803096 - protein, 122 aa, Homo sapiens; identical to SEQ ID NO: 803093

SEQ ID NO: 803097 - protein, 88 aa, Homo sapiens
YPRASPGGCVPSSPAGLGTACRGGPGPRLQGRGGGEAEGREATARPGSVNVQVDPLTQKAPGAVSMGGPAPASVLFFYGQGLALPPGL

SEQ ID NO: 803098 - protein, 122 aa, Homo sapiens; identical to SEQ ID NO: 803093

SEQ ID NO: 803099 - protein, 122 aa, Homo sapiens; identical to SEQ ID NO: 803093

SEQ ID NO: 803100 - protein, 238 aa, Homo sapiens
MAADGQCSLPASWRPVTLTHVEYPAGDLSGHLLAYLSLSPVFVIVGFVTLIIFKRELHTISFLGGLALNEGVNWLIKNVIQEPRPCGGPHTAVGTKYGMPSSHSQFMWFFSVYSFLFLYLRMHQTNNARFLDLLWRHVLSLGLLAVAFLVSYSRVYLLYHTWSQVLYGGIAGGLMAIAWFIFTQEVLTPLFPRIAAWPVSEFFLIRDTSLIPNVLWFEYTVTRAEARNRQRKLGTKLQ

SEQ ID NO: 803101 - protein, 195 aa, Homo sapiens
MAADGQCSLPASWRPVTLTHVEYPAGDLSGHLLAYLSLSPVFVIVGFVTLIIFKRELHTISFLGGLALNEGVNWLIKNVIQEPRPCGGPHTAVGTKYGMPSSHSQFMWFFSVYSFLFLYLRMHQTNNARFLDLLWRHVLSLGLLAVAFLVSYSRPVSEFFLIRDTSLIPNVLWFEYTVTRAEARNRQRKLGTKLQ

SEQ ID NO: 803102 - protein, 238 aa, Homo sapiens; identical to SEQ ID NO: 803100

SEQ ID NO: 803103 - protein, 175 aa, Homo sapiens
MNKVDQRAEPAPQPGPWGACCLGAVARDPRCAAASPWLGRKCPRHGHLGVGWRRRARASGLGARNSRWREKYTLFIFWFCQRQAGFWSWKNLLSGGCPVNRGLPVSFPGPSPYAQRADCLSLGRGGLGARRRGAYPTPSLPPLPFQNLGQCFPVWGQGPERARVWRLLSLCSTPY

SEQ ID NO: 803104 - protein, 238 aa, Homo sapiens; identical to SEQ ID NO: 803100

SEQ ID NO: 803105 - protein, 238 aa, Homo sapiens; identical to SEQ ID NO: 803100

SEQ ID NO: 803106 - protein, 175 aa, Homo sapiens; identical to SEQ ID NO: 803103

SEQ ID NO: 803107 - protein, 342 aa, Homo sapiens [sequence omitted]

SEQ ID NO: 803108 - protein, 342 aa, Homo sapiens [sequence omitted]

SEQ ID NO: 803109 - protein, 131 aa, Homo sapiens
MSSSGTLSNYYVDSLIGHEGDEVFAARFGPPGPGAQGRPAGVADGPAATAAEFASCSFAPRSAVFSASVGGRGGGPPGSCPRTSCKCYCFLLINADLIKWSPDAGPKHCVPAFSASLQNITLRIFLLYPWE

SEQ ID NO: 803110 - protein, 342 aa, Homo sapiens [sequence omitted]

SEQ ID NO: 803111 - protein, 342 aa, Homo sapiens [sequence omitted]

SEQ ID NO: 803112 - protein, 1003 aa, Homo sapiens
MNGGNESSGADRAGGPVATSVPIGWQRCVREGAVLYISPSGTELSSLEQTRSYLLSDGTCKCGLECPLNVPKVFNFDPLAPVTPGGAGVGPASEEDMTKLCNHRRKAVAMATLYRSMETTCSHSSPGEGASPQMFHTVSPGPPSARPPCRVPPTTPLNGGPGSLPPEPPSVSQAFPTLAGPGGLFPPRLADPVPSGGSSSPRFLPRGNAPSPAPPPPPAISLNAPSYNWGAALRSSLVPSDLGSPPAPHASSSPPSDPPLFHCSDALTPPPLPPSNNLPAHPGPASQPPVSSATMHLPLVLGPLGGAPTVEGPGAPPFLASSLLSAAAKAQHPPLPPPSTLQGRRPRAQAPSASHSSSLRPSQRRPRRPPTVFRLLEGRGPQTPRRSRPRAPAPVPQPFSLPEPSQPILPSVLSLLGLPTPGPSHSDGSFNLLGSDAHLPPPPTLSSGSPPQPRHPIQPSLPGTTSGSLSSVPGAPAPPAASKAPVVPSPVLQSPSEGLGMGAGPACPLPPLAGGEAFPFPSPEQGLALSGAGFPGMLGALPLPLSLGQPPPSPLLNHSLFGVLTGGGGQPPPEPLLPPPGGPGPPLAPGEPEGPSLLVASLLPPPPSDLLPPPSAPPSNLLASFLPLLALGPTAGDGEGSAEGAGGPSGEPFSGLGDLSPLLFPPLSAPPTLIALNSALLAATLDPPSGTPPQPCVLSAPQPGPPTSSVTTATTDPGASSLGKAPSNSGRPPQLLSPLLGASLLGDLSSLTSSPGALPSLLQPPGPLLSGQLGLQLLPGGGAPPPLSEASSPLACLLQSLQIPPEQPEAPCLPPESPASALEPEPARPPLSALAPPHGSPDPPVPELLTGRGSGKRGRRGGGGLRGINGEARPARGRKPGSRREPGRLALKWGTRGGFNGQMERSPRRTHHWQHNGELAEGGAEPKDPPPPGPHSEDLKVPPGVVRKSRRGRRRKYNPTRNSNSSRQDITLEPSPTARAAVPLPPRARPGRPAKNKRRKLAP

SEQ ID NO: 803113 - protein, 1003 aa, Homo sapiens; identical to SEQ ID NO: 803112

SEQ ID NO: 803114 - protein, 1003 aa, Homo sapiens; identical to SEQ ID NO: 803112

SEQ ID NO: 803115 - protein, 221 aa, Homo sapiens
SISGMVRGWVVPACYMSLQQIPPEQPEAPCLPPESPASALEPEPARPPLSALAPPHGSPDPPVPELLTGRGSGKRGRRGGGGLRGINGEARPARGRKPGSRREPGRLALKWGTRGGFNGQMERSPRRTHHWQHNGELAEGGAEPKDPPPPGPHSEDLKVPPGVVRKSRRGRRRKYNPTRNSNSSRQDITLEPSPTARAAVPLPPRARPGRPAKNKRRKLAP

SEQ ID NO: 803116 - protein, 588 aa, Homo sapiens
  misc_feature (569)..(569): Xaa can be any naturally occurring amino acid
MNGGNESSGADRAGGPVATSVPIGWQRCVREGAVLYISPSGTELSSLEQTRSYLLSDGTCKCGLECPLNVPKVFNFDPLAPVTPGGAGVGPASEEDMTKLCNHRRKAVAMATLYRSMETTCSHSSPGEGASPQMFHTVSPGPPSARPPCRVPPTTPLNGGPGSLPPEPPSVSQAFPTLAGPGGLFPPRLADPVPSGGSSSPRFLPRGNAPSPAPPPPPAISLNAPSYNWGAALRSSLVPSDLGSPPAPHASSSPPSDPPLFHCSDALTPPPLPPSNNLPAHPGPASQPPVSSATMHLPLVLGPLGGAPTVEGPGAPPFLASSLLSAAAKAQHPPLPPPSTLQGRRPRAQAPSASHSSSLRPSQRRPRRPPTVFRLLEGRGPQTPRRSRPRAPAPVPQPFSLPEPSQPILPSVLSLLGLPTPGPSHSDGSFNLLGSDAHLPPPPTLSSGSPPQPRHPIQPSLPGTTSGSLSSVPGAPAPPAASKAPVVPSPVLQSPSEGLGMGAGPACPLPPLAGGEAFPFPSPEQGLALSGAGFPGMLGALPLPLSLGQPPPSPLLNHSLFGVLTGERXSLSLYPQRLSPSQRLRLVC

SEQ ID NO: 803117 - protein, 175 aa, Homo sapiens
RYPMPSSSGKESSKSMTVKSLTGQFPEFYYVPPIPFSPMESLRARPTLFQKPYKLEVDNINVNFMGKPLYVKHEPLRTHQNIRHHNNRCSNCKPGQQVDDFTLWTVFPKMSEQDSPLDEGMHALIQWGAALRSSLVPSDLGSPPAPHASSSPPSDPPLFHWMQVMGILLDHLSIS

SEQ ID NO: 803118 - protein, 917 aa, Homo sapiens
EFTSDGAEEDMTKLCNHRRKAVAMATLYRSMETTCSHSSPGEGASPQMFHTVSPGPPSARPPCRVPPTTPLNGGPGSLPPEPPSVSQAFPTLAGPGGLFPPRLADPVPSGGSSSPRFLPRGNAPSPAPPPPPAISLNAPSYNWGAALRSSLVPSDLGSPPAPHASSSPPSDPPLFHCSDALTPPPLPPSNNLPAHPGPASQPPVSSATMHLPLVLGPLGGAPTVEGPGAPPFLASSLLSAAAKAQHPPLPPPSTLQGRRPRAQAPSASHSSSLRPSQRRPRRPPTVFRLLEGRGPQTPRRSRPRAPAPVPQPFSLPEPSQPILPSVLSLLGLPTPGPSHSDGSFNLLGSDAHLPPPPTLSSGSPPQPRHPIQPSLPGTTSGSLSSVPGAPAPPAASKAPVVPSPVLQSPSEGLGMGAGPACPLPPLAGGEAFPFPSPEQGLALSGAGFPGMLGALPLPLSLGQPPPSPLLNHSLFGVLTGGGGQPPPEPLLPPPGGPGPPLAPGEPEGPSLLVASLLPPPPSDLLPPPSAPPSNLLASFLPLLALGPTAGDGEGSAEGAGGPSGEPFSGLGDLSPLLFPPLSAPPTLIALNSALLAATLDPPSGTPPQPCVLSAPQPGPPTSSVTTATTDPGASSLGKAPSNSGRPPQLLSPLLGASLLGDLSSLTSSPGALPSLLQPPGPLLSGQLGLQLLPGGGAPPPLSEASSPLACLLQSLQIPPEQPEAPCLPPESPASALEPEPARPPLSALAPPHGSPDPPVPELLTGRGSGKRGRRGGGGLRGINGEARPARGRKPGSRREPGRLALKWGTRGGFNGQMERSPRRTHHWQHNGELAEGGAEPKDPPPPGPHSEDLKVPPGVVRKSRRGRRRKYNPTRNSNSSRQDITLEPSPTARAAVPLPPRARPGRPAKNKRRKLAP

SEQ ID NO: 803119 - protein, 1003 aa, Homo sapiens; identical to SEQ ID NO: 803112

SEQ ID NO: 803120 - protein, 1003 aa, Homo sapiens; identical to SEQ ID NO: 803112

SEQ ID NO: 803121 - protein, 266 aa, Homo sapiens
TPDYNFSTGDLSSLTSSPGALPSLLQPPGPLLSGQLGLQLLPGGGAPPPLSEASSPLACLLQSLQIPPEQPEAPCLPPESPASALEPEPARPPLSALAPPHGSPDPPVPELLTGRGSGKRGRRGGGGLRGINGEARPARGRKPGSRREPGRLALKWGTRGGFNGQMERSPRRTHHWQHNGELAEGGAEPKDPPPPGPHSEDLKVPPGVVRKSRRGRRRKYNPTRNSNSSRQDITLEPSPTARAAVPLPPRARPGRPAKNKRRKLAP

SEQ ID NO: 803122 - protein, 106 aa, Homo sapiens
MEGGLALHMPKNWARLSWSQGAEVLTLWSLGTGLGKDGCRLSQQIPEIFIGACLTLLRIFLLRGCWAVLLFRVGQTPDSPISLLALQVWAKLVAPALDWTPQCLQR

SEQ ID NO: 803123 - protein, 541 aa, Homo sapiens
DLDFPELEHIFPNLHHQLFKPLEPHPDFDLSSSSSGISPDNRDFYQRSDSSSESHCATGLSKSTVYFTALRRTSMHSSLNTSPNQQPDTNLAHVGAHSFATENIIGGSEQCFEQLQPEYSSQEESQHADLPSIFSIEARDSSQGMKNQNYPSEEHTEILQNKKKIVHFQLSIGNLSSVYSSSDEANVFDQLNVQHSTPCGSNSSECSTKHQLESRKESMGFEELSKRGVVTMLQSQGLIEDNKNETCRVLDINPQVEETDSRLCVRTVEMGTSIQAPYSLTTQNEKYFENSAETDIPKITKKLSQLGESELFASSGSFSLQSSIPVWETETGHGIMEEPELTLISTTDTSIAEMDFANLTLEEKSENEAKCFFQVSVFLPLVSATEASDYPAVSELSIEKPRTASTETPRRLTPVPGSLQEAFIKRKKSFMERSHQRQKEIRNKIHVSENSQIKTVKEKPSISSSVSRLKGVNKVRASFPEDRKTTQALRHQRGLRLYNQLAEVKQQKEEKTKQEAYAQNRARAKEFHKKTLEKLRAKNTC

SEQ ID NO: 803124 - protein, 571 aa, Homo sapiens
DLDFPELEHIFPNLHHQLFKPLEPHPDFDLSSSSSGISPDNRDFYQRSDSSSESHCATGLSKSTVYFTALRRTSMHSSLNTSPNQQPDTNLAHVGAHSFATENIIGGSEQCFEQLQPEYSSQEESQHADLPSIFSIEARDSSQGMKNQNYPSEEHTEILQNKKKIVHFQLSIGNLSSVYSSSDEANVFDQLNVQHSTPCGSNSSECSTKHQLESRKESMGFEELSKRGVVTMLQSQGLIEDNKNETCRVLDINPQVEETDSRLCVRTVEMGTSIQAPYSLTTQNEKYFENSAETDIPKITKKLSQLGESELFASSGSFSLQSSIPVWETETGHGIMEEPELTLISTTDTSIAEMDFANLTLEEKSENEAKCFFQVSVFLPLVSATEASDYPAVSELSIEKPRTASTETPRRLTPVPGSLQEAFIKRKKSFMERSHQRQKEIRNKIHVSENSQIKTVKEKPSISSSVSRLKGVNKVRASFPEDRKTTQALRHQRGLRLYNQLAEVKQQKEEKTKQEAYAQNRARAKEFHKVSITEGEGLNFSSMKYTTETQIFIPSTENTRETSSQKYMLTF

SEQ ID NO: 803125 - protein, 125 aa, Homo sapiens [sequence omitted]

SEQ ID NO: 803126 - protein, 200 aa, Homo sapiens
MEKLGPQLSSGAWNQGPLPSRDPNAPVLPGPPGSPNSPTYLGRRHHPERRDLGLGAWVARIVRGWRERGRGVGPGRLGWPSIPPPCSPHSPIPRTAEQGEAGLEAIAGALQPQLVVHLCVDVLQRWQRRAVWVAVVPAHQGQAPQEQALVDLGTEAQLSGHRGLNGSSELMWLASPERIPAVYQAWGHSDDQDRPCPHRH

SEQ ID NO: 803127 - protein, 552 aa, Homo sapiens
MHCERFLCILRIIGTTLFGVSLLLGITAAYIVGYQFIQTDNYYFSFGLYGAFLASHLIIQSLFAFLEHRKMKKSLETPIKLNKTVALCIAAYQEDPDYLRKCLQSVKRLTYPGIKVVMVIDGNSEDDLYMMDIFSEVMGRDKSATYIWKNNFHEKGPGETDESHKESSQHVTQLVLSNKSICIMQKWGGKREVMYTAFRALGRSVDYVQVCDSDTMLDPASSVEMVKVLEEDPMVGGVGGDVQILNKYDSWISFLSSVRYWMAFNIERACQSYFGCVQCISGPLGMYRNSLLHEFVEDWYNQEFMGNQCSFGDDRHLTNRVLSLGYATKYTARSKCLTETPIEYLRWLNQQTRWSKSYFREWLYNAMWFHKHHLWMTYEAIITGFFPFFLIATVIQLFYRGKIWNILLFLLTVQLVGLIKSSFASCLRGNIVMVFMSLYSVLYMSSLLPAKMFAIATINKAGWGTSGRKTIVVNFIGLIPVSVWFTILLGGVIFTIYKESKRPFSESKQTVLIVGTLLYACYWVMLLTLYVVLINKCGRRKKGQQYDMVLDV

SEQ ID NO: 803128 - protein, 161 aa, Homo sapiens
PVWVTERDFLSKKKKKRPGAVAYACNPSTLGAQGGQITRSQAGLEVLTSVIHSPQPKCCDYRPEPLRPALILRFPGRRWLKAETLMPWASHWIPVLCFTPSYQKGGIWMSGGPSGKAQIPGDFPERLDPPKSAPRPRSPSFSSGTQRPTPQMGELVTSSGP

SEQ ID NO: 803129 - protein, 661 aa, Homo sapiens
MEGAAAPVAGDRPDLGLGAPGSPREAVAGATAALEPRKPHGVKRHHHKHNLKHRYELQETLGKGTYGKVKRATERFSGRVVAIKSIRKDKIKDEQDMVHIRREIEIMSSLNHPHIISIYEVFENKDKIVIIMEYASKGELYDYISERRRLSERETRHFFRQIVSAVHYCHKNGVVHRDLKLENILLDDNCNIKIADFGLSNLYQKDKFLQTFCGSPLYASPEIVNGRPYRGPEVDSWALGVLLYTLVYGTMPFDGFDHKNLIRQISSGEYREPTQPSDARGLIRWMLMVNPDRRATIEDIANHWWVNWGYKSSVCDCDALHDSESPLLARIIDWHHRSTGLQADTEAKMKGLAKPTTSEVMLERQRSLKKSKKENDFAQSGQDAVPESPSKLSSKRPKGILKKRSNSEHRSHSTGFIEGVVGPALPSTFKMEQDLCRTGVLLPSSPEAEVPGKLSPKQSATMPKKGILKKTQQRESGYYSSPERSESSELLDSNDVMGSSIPSPSPPDPARVTSHSLSCRRKGILKHSSKYSAGTMDPALVSPEMPTLESLSEPGVPAEGLSRSYSRPSSVISDDSVLSSDSFDLLDLQENRPARQRIRSCVSAENFLQIQDFEGLQNRPRPQYLKRYRNRLADSSFSLLTDMDDVTQVYKQALEICSKLN

SEQ ID NO: 803130 - protein, 198 aa, Homo sapiens
MEGAAAPVAGDRPDLGLGAPGSPREAVAGATAALEPRKPHGVKRHHHKHNLKHRYELQETLGKGTYGKVKRATERFSGRVVAIKSIRKDKIKDEQDMVHIRREIEIMSSLNHPHIISIYEVFENKDKIVIIMEYASKGELYDYISERRRLSERETRHFFRQIVSAVHYCHKNGVVHRDLKLENIPAERIRLLLFPRAQ

SEQ ID NO: 803131 - protein, 565 aa, Homo sapiens
MVHIRREIEIMSSLNHPHIISIYEVFENKDKIVIIMEYASKGELYDYISERRRLSERETRHFFRQIVSAVHYCHKNGVVHRDLKLENILLDDNCNIKIADFGLSNLYQKDKFLQTFCGSPLYASPEIVNGRPYRGPEVDSWALGVLLYTLVYGTMPFDGFDHKNLIRQISSGEYREPTQPSDARGLIRWMLMVNPDRRATIEDIANHWWVNWGYKSSVCDCDALHDSESPLLARIIDWHHRSTGLQADTEAKMKGLAKPTTSEVMLERQRSLKKSKKENDFAQSGQDAVPESPSKLSSKRPKGILKKRSNSEHRSHSTGFIEGVVGPALPSTFKMEQDLCRTGVLLPSSPEAEVPGKLSPKQSATMPKKGILKKTQQRESGYYSSPERSESSELLDSNDVMGSSIPSPSPPDPARVTSHSLSCRRKGILKHSSKYSAGTMDPALVSPEMPTLESLSEPGVPAEGLSRSYSRPSSVISDDSVLSSDSFDLLDLQENRPARQRIRSCVSAENFLQIQDFEGLQNRPRPQYLKRYRNRLADSSFSLLTDMDDVTQVYKQALEICSKLN

SEQ ID NO: 803132 - protein, 197 aa, Homo sapiens
MVHIRREIEIMSSLNHPHIISIYEVFENKDKIVIIMEYASKGELYDYISERRRLSERETRHFFRQIVSAVHYCHKNGVVHRDLKLENILLDDNCNIKIADFGLSNLYQKDKFLQTFCGSPLYASPEIVNGRPYRGPEVDSWALGVLLYTLVYGTMPFDGFDHKNLIRQISSGEYREPTQPSDPPESSWKERCIIEQD

SEQ ID NO: 803133 - protein, 565 aa, Homo sapiens; identical to SEQ ID NO: 803131

SEQ ID NO: 803134 - protein, 565 aa, Homo sapiens; identical to SEQ ID NO: 803131

SEQ ID NO: 803135 - protein, 334 aa, Homo sapiens
MLALAKILLISTLFYSLLSGSHGKENQDINTTQNIAEVFKTMENKPISLESEANLNSDKENITTSNLKASHSPPLNLPNNSHGITDFSSNSSAEHSLGSLKPTSTISTSPPLIHSFVSKVPWNAPIADEDLLPISAHPNATPALSSENFTWSLVNDTVKTPDNSSITVSILSSEPTSPSVTPLIVEPSGWLTTNSDSFTGFTPYQEKTTLQPTLKFTNNSKLFPNTSDPQKENRNTGIVFGAILGAILGVSLLTLVGYLLCGKRKTDSFSHRRLYDDRNEPVLRLDNAPEPYDVSFGNSSYYNPTLNDSAMPESEENARDGIPMDDIPPLRTSV

SEQ ID NO: 803136 - protein, 449 aa, Homo sapiens
LTAEKQVSQVPGRSVTQARYSQPHLILFPWHPPAQCDIVTLNPSVFSNARQIPFRQDNCDISVPDCKYLLSLKLLLLAIVSFSFFICKMGIIQSILATSRDCYSFKKKPIPKKPTMLALAKILLISTLFYSLLSGSHGKENQDINTTQNIAEVFKTMENKPISLESEANLNSDKENITTSNLKASHSPPLNLPNNSHGITDFSSNSSAEHSLGSLKPTSTISTSPPLIHSFVSKVPWNAPIADEDLLPISAHPNATPALSSENFTWSLVNDTVKTPDNSSITVSILSSEPTSPSVTPLIVEPSGWLTTNSDSFTGFTPYQEKTTLQPTLKFTNNSKLFPNTSDPQKENRNTGIVFGAILGAILGVSLLTLVGYLLCGKRKTDSFSHRRLYDDRNEPVLRLDNAPEPYDVSFGNSSYYNPTLNDSAMPESEENARDGIPMDDIPPLRTSV

SEQ ID NO: 803137 - protein, 357 aa, Homo sapiens
LTAEKQVSQVPGRSVTQARYSQPHLILFPWHPPAQCDIVTLNPSVFSNARQIPFRQDNCDISVPDCKYLLSLKLLLLAIVSFSFFICKMGIIQSILATSRDCYSFKKKPIPKKPTMLALAKILLISTLFYSLLSGSHGKENQDINTTQNIAEVFKTMENKPISLESEANLNSDKENITTSNLKASHSPPLNLPNNSHGITDFSSNSSAEHSLGSLKPTSTISTSPPLIHSFVSKVPWNAPIADEDLLPISAHPNATPALSSENFTWSLVNDTVKTPDNSSITVSILSSEPTSPSVTPLIVEPSGWLTTNSDSFTGFTPYQEKTTLQPTLKFTNNSKLFPNTSDPQKGSAIRQCTGTL

SEQ ID NO: 803138 - protein, 144 aa, Homo sapiens
MSLDLSLALRANLVTLEGIVTQPPPSAGPSPGLQARWFVTLHLCLHKEDSCRLVGLGSPTQVVLPHLLRSQAAPGQEHKGGLVGDQPLRGTCGATAASAHSSPPTFPRPRIMYPSLLTGHRTRHWLGQHWSHFGRCPTAGAGSG

SEQ ID NO: 803139 - protein, 214 aa, Homo sapiens
MAWASGFLCSLAGRFSRSPGCGQAVGVAGGPKPPLHVGQGSLGEIRPDVAQQRQPVGKAPPGLGDHLSQDADAGGDHLSLDADAGVVPAGRSGAEGPDADPVLPVEVGDLAVLLDLGAEEGPGLQNPVLLGGAQLSGKRLGPSSRHWAARSFRNLRSRPEIKCQGSVTSDGWHQNVGKCTRRRVPGTVCPPTVAWGRRPRPGHSFAARSCRRGK

SEQ ID NO: 803140 - protein, 1838 aa, Homo sapiens
RRKPNEFLGGCRMGDSKVKVAVRIRPMNRRETDLHTKCVVDVDANKVILNPVNTNLSKGDARGQPKVFAYDHCFWSMDESVKEKYAGQDIVFKCLGENILQNAFDGYNACIFAYGQTGSGKSYTMMGTADQPGLIPRLCSGLFERTQKEENEEQSFKVEVSYMEIYNEKVRDLLDPKGSRQTLKVREHSVLGPYVDGLSKLAVTSYKDIESLMSEGNKSRTVAATNMNEESSRSHAVFKITLTHTLYDVKSGTSGEKVGKLSLVDLAGSERATKTGAAGDRLKEGSNINKSLTTLGLVISALADQSAGKNKNKFVPYRDSVLTWLLKDSLGGNSKTAMVATVSPAADNYDETLSTLRYADRAKHIVNHAVVNEDPNARIIRDLREEVEKLREQLTKAEAMKSPELKDRLEESEKLIQEMTVTWEEKLRKTEEIAQERQKQLESLGISLQSSGIKVGDDKCFLVNLNADPALNELLVYYLKEHTLIGSANSQDIQLCGMGILPEHCIIDITSEGQVMLTPQKNTRTFVNGSSVSSPIQLHHGDRILWGNNHFFRLNLPKKKKKAEREDEDQDPSMKNENSSEQLDVDGDSSSEVSSEVNFNYEYAQMEVTMKALGSNDPMQSILNSLEQQHEEEKRSALERQRLMYEHELEQLRRRLSPEKQNCRSMDRFSFHSPSAQQRLRQWAEEREATLNNSLMRLREQIVKANLLVREANYIAEELDKRTEYKVTLQIPASSLDANRKRGSLLSEPAIQVRRKGKGKQIWSLEKLDNRLLDMRDLYQEWKECEEDNPVIRSYFKRADPFYDEQENLSLIGVANVFLESLFYDVKLQYAVPIINQKGEVAGRLHVEVMRLSGDVGERIAGGDEVAEVPFEKETQENKLVCMVKILQATGLPQHLSHFVFCKYSFWDQQEPVIVAPEVDTSSSSVSKEPHCMVVFDHCNEFSVNITEDFIEHLSEGALAIEVYGHKINDPRKNPALWDLGIIQAKTRSLRDRWSEVTRKLEFWVQILEQNENGEYCPVEVISAKDVPTGGIFQLRQGQSRRVQVEVKSVQESGTLPLMEECILSVGIGCVKVRPLRAPRTHETFHEEEEDMDSYQDRDLERLRRKWLNALTKRQEYLDQQLQKLVSKRDKTEDDADREAQLLEMRLTLTEERNAVMVPSAGSGIPGAPAEWTPVPGMETHIPVIFLDLNADDFSSQDNLDDPEAGGWDATLTGEEEEEFFELQIVKQHDGEVKAEASWDSAVHGCPQLSRGTPVDERLFLIVRVTVQLSHPADMQLVLRKRICVNVHGRQGFAQSLLKKMSHRSSIPGCGVTFEIVSNIPEDAQGVEEREALARMAANVENPASADSEAYIEKYLRSVLAVENLLTLDRLRQEVAVKEQLTGKGKLSRRSISSPNVNRLSGSRQDLIPSYSLGSNKGRWESQQDVSQTTVSRGIAPAPALSVSPQNNHSPDPGLSNLAASYLNPVKSFVPQMPKLLKSLFPVRDEKRGKRPSPLAHQPVPRIMVQSASPDIRVTRMEEAQPEMGPDVLVQTMGAPALKICDKPAKVPSPPPVIAVTAVTPAPEAQDGPPSPLSEASSGYFSHSVSTATLSDALGPGLDAAAPPGSMPTAPEAEPEAPISHPPPPTAVPAEEPPGPQQLVSPGRERPDLEAPAPGSPFRVRRVRASELRSFSRMLAGDPGCSPGAEGNAPAPGAGGQALASDSEEADEVPEWLREGEFVTVGAHKTGVVRYVGPADFQEGTWVGVELDLPSGKNDGSIGGKQYFRCNPGYGLLVRPSRVRRATGPVRRRSTGLRLGAPEARRSATLSGSATNLASLTAALAKADRSHKNPENRKSWAS

SEQ ID NO: 803141 - protein, 1501 aa, Homo sapiens
MVATVSPAADNYDETLSTLRYADRAKHIVNHAVVNEDPNARIIRDLREEVEKLREQLTKAEAMKSPELKDRLEESEKLIQEMTVTWEEKLRKTEEIAQERQKQLESLGISLQSSGIKVGDDKCFLVNLNADPALNELLVYYLKEHTLIGSANSQDIQLCGMGILPEHCIIDITSEGQVMLTPQKNTRTFVNGSSVSSPIQLHHGDRILWGNNHFFRLNLPKKKKKAEREDEDQDPSMKNENSSEQLDVDGDSSSEVSSEVNFNYEYAQMEVTMKALGSNDPMQSILNSLEQQHEEEKRSALERQRLMYEHELEQLRRRLSPEKQNCRSMDRFSFHSPSAQQRLRQWAEEREATLNNSLMRLREQIVKANLLVREANYIAEELDKRTEYKVTLQIPASSLDANRKRGSLLSEPAIQVRRKGKGKQIWSLEKLDNRLLDMRDLYQEWKECEEDNPVIRSYFKRADPFYDEQENLSLIGVANVFLESLFYDVKLQYAVPIINQKGEVAGRLHVEVMRLSGDVGERIAGGDEVAEVPFEKETQENKLVCMVKILQATGLPQHLSHFVFCKYSFWDQQEPVIVAPEVDTSSSSVSKEPHCMVVFDHCNEFSVNITEDFIEHLSEGALAIEVYGHKINDPRKNPALWDLGIIQAKTRSLRDRWSEVTRKLEFWVQILEQNENGEYCPVEVISAKDVPTGGIFQLRQGQSRRVQVEVKSVQESGTLPLMEECILSVGIGCVKVRPLRAPRTHETFHEEEEDMDSYQDRDLERLRRKWLNALTKRQEYLDQQLQKLVSKRDKTEDDADREAQLLEMRLTLTEERNAVMVPSAGSGIPGAPAEWTPVPGMETHIPVIFLDLNADDFSSQDNLDDPEAGGWDATLTGEEEEEFFELQIVKQHDGEVKAEASWDSAVHGCPQLSRGTPVDERLFLIVRVTVQLSHPADMQLVLRKRICVNVHGRQGFAQSLLKKMSHRSSIPGCGVTFEIVSNIPEDAQGVEEREALARMAANVENPASADSEAYIEKYLRSVLAVENLLTLDRLRQEVAVKEQLTGKGKLSRRSISSPNVNRLSGSRQDLIPSYSLGSNKGRWESQQDVSQTTVSRGIAPAPALSVSPQNNHSPDPGLSNLAASYLNPVKSFVPQMPKLLKSLFPVRDEKRGKRPSPLAHQPVPRIMVQSASPDIRVTRMEEAQPEMGPDVLVQTMGAPALKICDKPAKVPSPPPVIAVTAVTPAPEAQDGPPSPLSEASSGYFSHSVSTATLSDALGPGLDAAAPPGSMPTAPEAEPEAPISHPPPPTAVPAEEPPGPQQLVSPGRERPDLEAPAPGSPFRVRRVRASELRSFSRMLAGDPGCSPGAEGNAPAPGAGGQALASDSEEADEVPEWLREGEFVTVGAHKTGVVRYVGPADFQEGTWVGVELDLPSGKNDGSIGGKQYFRCNPGYGLLVRPSRVRRATGPVRRRSTGLRLGAPEARRSATLSGSATNLASLTAALAKADRSHKNPENRKSWAS

SEQ ID NO: 803142 - protein, 1838 aa, Homo sapiens; identical to SEQ ID NO: 803140

SEQ ID NO: 803143 - protein, 366 aa, Homo sapiens [sequence omitted]

SEQ ID NO: 803144 - protein, 1838 aa, Homo sapiens; identical to SEQ ID NO: 803140

SEQ ID NO: 803145 - protein, 1838 aa, Homo sapiens; identical to SEQ ID NO: 803140

SEQ ID NO: 803146 - protein, 369 aa, Homo sapiens
RRKPNEFLGGCRMGDSKVKVAVRIRPMNRRETDLHTKCVVDVDANKVILNPVNTNLSKGDARGQPKVFAYDHCFWSMDESVKEKYAGQDIVFKCLGENILQNAFDGYNACIFAYGQTGSGKSYTMMGTADQPGLIPRLCSGLFERTQKEENEEQSFKVEVSYMEIYNEKVRDLLDPKGSRQTLKVREHSVLGPYVDGLSKLAVTSYKDIESLMSEGNKSRTVAATNMNEESSRSHAVFKITLTHTLYDVKSGTSGEKVGKLSLVDLAGSERATKTGAAGDRLKEGSNINKSLTTLGLVISALADQSAGKNKNKFVPYRDSVLTWLLKVSLFFFPSWHTFGGWQEGRKKSRLLIPFPGIISSIGVQMYNY

SEQ ID NO: 803147 - protein, 1762 aa, Homo sapiens
MDESVKEKYAGQDIVFKCLGENILQNAFDGYNACIFAYGQTGSGKSYTMMGTADQPGLIPRLCSGLFERTQKEENEEQSFKVEVSYMEIYNEKVRDLLDPKGSRQTLKVREHSVLGPYVDGLSKLAVTSYKDIESLMSEGNKSRTVAATNMNEESSRSHAVFKITLTHTLYDVKSGTSGEKVGKLSLVDLAGSERATKTGAAGDRLKEGSNINKSLTTLGLVISALADQSAGKNKNKFVPYRDSVLTWLLKDSLGGNSKTAMVATVSPAADNYDETLSTLRYADRAKHIVNHAVVNEDPNARIIRDLREEVEKLREQLTKAEAMKSPELKDRLEESEKLIQEMTVTWEEKLRKTEEIAQERQKQLESLGISLQSSGIKVGDDKCFLVNLNADPALNELLVYYLKEHTLIGSANSQDIQLCGMGILPEHCIIDITSEGQVMLTPQKNTRTFVNGSSVSSPIQLHHGDRILWGNNHFFRLNLPKKKKKAEREDEDQDPSMKNENSSEQLDVDGDSSSEVSSEVNFNYEYAQMEVTMKALGSNDPMQSILNSLEQQHEEEKRSALERQRLMYEHELEQLRRRLSPEKQNCRSMDRFSFHSPSAQQRLRQWAEEREATLNNSLMRLREQIVKANLLVREANYIAEELDKRTEYKVTLQIPASSLDANRKRGSLLSEPAIQVRRKGKGKQIWSLEKLDNRLLDMRDLYQEWKECEEDNPVIRSYFKRADPFYDEQENLSLIGVANVFLESLFYDVKLQYAVPIINQKGEVAGRLHVEVMRLSGDVGERIAGGDEVAEVPFEKETQENKLVCMVKILQATGLPQHLSHFVFCKYSFWDQQEPVIVAPEVDTSSSSVSKEPHCMVVFDHCNEFSVNITEDFIEHLSEGALAIEVYGHKINDPRKNPALWDLGIIQAKTRSLRDRWSEVTRKLEFWVQILEQNENGEYCPVEVISAKDVPTGGIFQLRQGQSRRVQVEVKSVQESGTLPLMEECILSVGIGCVKVRPLRAPRTHETFHEEEEDMDSYQDRDLERLRRKWLNALTKRQEYLDQQLQKLVSKRDKTEDDADREAQLLEMRLTLTEERNAVMVPSAGSGIPGAPAEWTPVPGMETHIPVIFLDLNADDFSSQDNLDDPEAGGWDATLTGEEEEEFFELQIVKQHDGEVKAEASWDSAVHGCPQLSRGTPVDERLFLIVRVTVQLSHPADMQLVLRKRICVNVHGRQGFAQSLLKKMSHRSSIPGCGVTFEIVSNIPEDAQGVEEREALARMAANVENPASADSEAYIEKYLRSVLAVENLLTLDRLRQEVAVKEQLTGKGKLSRRSISSPNVNRLSGSRQDLIPSYSLGSNKGRWESQQDVSQTTVSRGIAPAPALSVSPQNNHSPDPGLSNLAASYLNPVKSFVPQMPKLLKSLFPVRDEKRGKRPSPLAHQPVPRIMVQSASPDIRVTRMEEAQPEMGPDVLVQTMGAPALKICDKPAKVPSPPPVIAVTAVTPAPEAQDGPPSPLSEASSGYFSHSVSTATLSDALGPGLDAAAPPGSMPTAPEAEPEAPISHPPPPTAVPAEEPPGPQQLVSPGRERPDLEAPAPGSPFRVRRVRASELRSFSRMLAGDPGCSPGAEGNAPAPGAGGQALASDSEEADEVPEWLREGEFVTVGAHKTGVVRYVGPADFQEGTWVGVELDLPSGKNDGSIGGKQYFRCNPGYGLLVRPSRVRRATGPVRRRSTGLRLGAPEARRSATLSGSATNLASLTAALAKADRSHKNPENRKSWAS

SEQ ID NO: 803148 - protein, 710 aa, Homo sapiens
DSRVIHLLALYAQLLEMRLTLTEECNAVMVPSAGSGIPVAPAECPPVPGMETHIPVIFLDLNADDFSSQDNLDDPEAGGWDATLTGEEEEEFFELQIVKQHDGEVKAEASWDSAVHGCPQLSRGTPVDERLFLIVRVTVQLSHPADMQLVLRKRICVNVHGRQGFAQSLLKKMSHRSSIPGCGVTFEIVSNIPEDAQGVEEREALARMAANVENPASADSEAYIEKYLRSVLAVENLLTLDRLRQEVAVKEQLTGKGKLSRRSISSPNVNRLSGSRQDLIPSYSLGSNKGRWESQQDVSQTTVSRGIAPAPALSVSPQNNHSPDPGLSNLAASYLNPVKSFVPQMPKLLKSLFPVRDEKRGKRPSPLAHQPVPRIMVQSASPDIRVTRMEEAQPEMGPDVLVQTMGAPALKICDKPAKVPSPPPVIAVTAVTPAPEAQDGPPSPLSEASSGYFSHSVSTATLSDALGPGLDAAAPPGSMPTAPEAEPEAPISHPPPPTAVPAEEPPGPQQLVSPGRERPDLEAPAPGSPFRVRRVRASELRSFSRMLAGDPGCSPGAEGNAPAPGAGGQALASDSEEADEVPEWLREGEFVTVGAHKTGVVRYVGPADFQEGTWVGVELDLPSGKNDGSIGGKQYFRCNPGYGLLVRPSRVRRATGPVRRRSTGLRLGAPEARRSATLSGSATNLASLTAALAKADRSHKNPENRKSWAS

SEQ ID NO: 803149 - protein, 1838 aa, Homo sapiens; identical to SEQ ID NO: 803140

SEQ ID NO: 803150 - protein, 1838 aa, Homo sapiens; identical to SEQ ID NO: 803140

SEQ ID NO: 803151 - protein, 461 aa, Homo sapiens
RRKPNEFLGGCRMGDSKVKVAVRIRPMNRRETDLHTKCVVDVDANKVILNPVNTNLSKGDARGQPKVFAYDHCFWSMDESVKEKYAGQDIVFKCLGENILQNAFDGYNACIFAYGQTGSGKSYTMMGTADQPGLIPRLCSGLFERTQKEENEEQSFKVEVSYMEIYNEKVRDLLDPKGSRQTLKVREHSVLGPYVDGLSKLAVTSYKDIESLMSEGNKSRTVAATNMNEESSRSHAVFKITLTHTLYDVKSGTSGEKVGKLSLVDLAGSERATKTGAAGDRLKEGSNINKSLTTLGLVISALADQSAGKNKNKFVPYRDSVLTWLLKDSLGGNSKTAMVATVSPAADNYDETLSTLRYADRAKHIVNHAVVNEDPNARIIRDLREEVEKLREQLTKAEAMKSPELKDRLEESEKLIQEMTVTWEEKLRKTEEIAQDDQNSSRVLEYLFSLRSFDDPPEYLT

SEQ ID NO: 803152 - protein, 71 aa, Homo sapiens
RRQGPRGRRGGGATRSRKPRRGPRGVGKRSPRPQPQRAWAASGAAPGECVRGASGCRVTCFGRGHSPEEHA

SEQ ID NO: 803153 - protein, 206 aa, Homo sapiens [sequence omitted]

SEQ ID NO: 803154 - protein, 206 aa, Homo sapiens [sequence omitted]

SEQ ID NO: 803155 - protein, 121 aa, Homo sapiens [sequence omitted]

SEQ ID NO: 803156 - protein, 207 aa, Homo sapiens
MKSSGHREWGVGKPGTPGDRAREGGSGPDPAPARGASSGAALRGQNVAVAETRRGRPNATLGPSPLQRPRPVTCPRFASHPEAGARAEPAAMSGEPGQTSVAPPPEEVEPGSGVRIVVEYCEPCGFEATYLELASAVKEQYPGIEIESRLGGTGAFEIEINGQLVFSKLENGGFPYEKDVSIYSVGRTSWSPYPNSASSCHSTPLAH

SEQ ID NO: 803157 - protein, 121 aa, Homo sapiens [sequence omitted]

SEQ ID NO: 803158 - protein, 206 aa, Homo sapiens [sequence omitted]

SEQ ID NO: 803159 - protein, 133 aa, Homo sapiens
  misc_feature (14)..(14): Xaa can be any naturally occurring amino acid
GNWILTPPPYALHXDSSEIPGEPGQTSVAPPPEEVEPGSGVRIVVEYCEPCGFEATYLELASAVKEQYPGIEIESRLGGTGAFEIEINGQLVFSKLENGGFPYEKDLIEAIRRASNGETLEKITNSRPPCVIL

SEQ ID NO: 803160 - protein, 105 aa, Homo sapiens
  misc_feature (3)..(3): Xaa can be any naturally occurring amino acid
GVXYRRPSALRGSAVGGGVCEPCGFEATYLELASAVKEQYPGIEIESRLGGTGAFEIEINGQLVFSKLENGGFPYEKDLIEAIRRASNGETLEKITNSRPPCVIL

SEQ ID NO: 803161 - protein, 447 aa, Homo sapiens
MLLDAGPQYPAIGVTTFGASRHHSAGDVAERDVGLGINPFADGMGAFKLNPSSHELASAGQTAFTSQAPGYAAAAALGHHHHPGHVGSYSSAAFNSTRDFLFRNRGFGDAAAAASAQHSLFAASAGGFGGPHGHTDAAGHLLFPGLHEQAAGHASPNVVNGQMRLGFSGDMYPRPEQYGQVTSPRSEHYAAPQLHGYGPMNVNMAAHHGAGAFFRYMRQPIKQELICKWIEPEQLANPKKSCNKTFSTMHELVTHVTVEHVGGPEQSNHICFWEECPREGKPFKAKYKLVNHIRVHTGEKPFPCPFPGCGKVFARSENLKIHKRTHTGEKPFKCEFEGCDRRFANSSDRKKHMHVHTSDKPYLCKMCDKSYTHPSSLRKHMKVHESSSQGSQPSPAASSGYESSTPPTIVSPSTDNPTTSSLSPSSSAVHHTAGHSALSSNFNEWYV

SEQ ID NO: 803162 - protein, 447 aa, Homo sapiens; identical to SEQ ID NO: 803161

SEQ ID NO: 803163 - protein, 74 aa, Homo sapiens
RVCLRKHMKVHESSSQGSQPSPAASSGYESSTPPTIVSPSTDNPTTSSLSPSSSAVHHTAGHSALSSNFNEWYV

SEQ ID NO: 803164 - protein, 447 aa, Homo sapiens; identical to SEQ ID NO: 803161

SEQ ID NO: 803165 - protein, 144 aa, Homo sapiens
MRCDRHKVNPFGADSRLQSQAPDSGEKPFKCEFEGCDRRFANSSDRKKHMHVHTSDKPYLCKMCDKSYTHPSSLRKHMKVHESSSQGSQPSPAASSGYESSTPPTIVSPSTDNPTTSSLSPSSSAVHHTAGHSALSSNFNEWYV

SEQ ID NO: 803166 - protein, 103 aa, Homo sapiens
MLGIWTLLPLVLTSVARLSSKSVNAQVTDINSKGLELRKTVTTVETQNLEGLHHDGQFCHKPCPPDVNMESSRNAHSPATPSAKRKDPDLTWGGFVFFFCQFH

SEQ ID NO: 803167 - protein, 149 aa, Homo sapiens
MLGIWTLLPLVLTSVARLSSKSVNAQVTDINSKGLELRKTVTTVETQNLEGLHHDGQFCHKPCPPGERKARDCTVNGDEPDCVPCQEGKEYTDKAHFSSKCRRCRLCDEGHDVNMESSRNAHSPATPSAKRKDPDLTWGGFVFFFCQFH

SEQ ID NO: 803168 - protein, 149 aa, Homo sapiens; identical to SEQ ID NO: 803167

SEQ ID NO: 803169 - protein, 335 aa, Homo sapiens
MLGIWTLLPLVLTSVARLSSKSVNAQVTDINSKGLELRKTVTTVETQNLEGLHHDGQFCHKPCPPGERKARDCTVNGDEPDCVPCQEGKEYTDKAHFSSKCRRCRLCDEGHGLEVEINCTRTQNTKCRCKPNFFCNSTVCEHCDPCTKCEHGIIKECTLTSNTKCKEEGSRSNLGWLCLLLLPIPLIVWVKRKEVQKTCRKHRKENQGSHESPTLNPETVAINLSDVDLSKYITTIAGVMTLSQVKGFVRKNGVNEAKIDEIKNDNVQDTAEQKVQLLRNWHQLHGKKEAYDTLIKDLKKANLCTLAEKIQTIILKDITSDSENSNFRNEIQSLV

SEQ ID NO: 803170 - protein, 314 aa, Homo sapiens
MLGIWTLLPLVLTSVARLSSKSVNAQVTDINSKGLELRKTVTTVETQNLEGLHHDGQFCHKPCPPGERKARDCTVNGDEPDCVPCQEGKEYTDKAHFSSKCRRCRLCDEGHGLEVEINCTRTQNTKCRCKPNFFCNSTVCEHCDPCTKCEHGIIKECTLTSNTKCKEEVKRKEVQKTCRKHRKENQGSHESPTLNPETVAINLSDVDLSKYITTIAGVMTLSQVKGFVRKNGVNEAKIDEIKNDNVQDTAEQKVQLLRNWHQLHGKKEAYDTLIKDLKKANLCTLAEKIQTIILKDITSDSENSNFRNEIQSLV

SEQ ID NO: 803171 - protein, 314 aa, Homo sapiens; identical to SEQ ID NO: 803170

SEQ ID NO: 803172 - protein, 132 aa, Homo sapiens
MLGIWTLLPLVLTSVARLSSKSVNAQVTDINSKGLELRKTVTTVETQNLEGLHHDGQFCHKPCPPGERKARDCTVNGDEPDCVPCQEGKEYTDKAHFSSKCRRCRLCDEGHDVNMESSRNAHSPATPSAKRK

SEQ ID NO: 803173 - protein, 220 aa, Homo sapiens
MLGIWTLLPLVLTSVARLSSKSVNAQVTDINSKGLELRKTVTTVETQNLEGLHHDGQFCHKPCPPGERKARDCTVNGDEPDCVPCQEGKEYTDKAHFSSKCRRCRLCDEGHGLEVEINCTRTQNTKCRCKPNFFCNSTVCEHCDPCTKCEHGIIKECTLTSNTKCKEEGSRSNLGWLCLLLLPIPLIVWVKRKEVQKTCRKHRKENQGSHESPTLNPMLT

SEQ ID NO: 803174 - protein, 392 aa, Homo sapiens
TRAPGSGGLLREALETGSRGLLGPSLRPGCSERWRTCFSWALMRSADPAGQAGQLRRSSETTALHVEVLTSVARLSSKSVNAQVTDINSKGLELRKTVTTVETQNLEGLHHDGQFCHKPCPPGERKARDCTVNGDEPDCVPCQEGKEYTDKAHFSSKCRRCRLCDEGHGLEVEINCTRTQNTKCRCKPNFFCNSTVCEHCDPCTKCEHGIIKECTLTSNTKCKEEGSRSNLGWLCLLLLPIPLIVWVKRKEVQKTCRKHRKENQGSHESPTLNPETVAINLSDVDLSKYITTIAGVMTLSQVKGFVRKNGVNEAKIDEIKNDNVQDTAEQKVQLLRNWHQLHGKKEAYDTLIKDLKKANLCTLAEKIQTIILKDITSDSENSNFRNEIQSLV

SEQ ID NO: 803175 - protein, 188 aa, Homo sapiens
RKGHVSEAPEAVAAGTMLLPNILLTGTPGVGKTTLGKELASKSGLKYINVGDLAREEQLYDGYDEEYDCPILDEDRVVDELDNQMREGGVIVDYHGCDFFPERWFHIVFVLRTDTNVLYERLETRGYNEKKLTDNIQCEIFQVLYEEATASYKEEIVHQLPSNKPEELENNVDQILKWIEQWIKDHNS

SEQ ID NO: 803176 - protein, 188 aa, Homo sapiens; identical to SEQ ID NO: 803175

SEQ ID NO: 803177 - protein, 172 aa, Homo sapiens
MLLPNILLTGTPGVGKTTLGKELASKSGLKYINVGDLAREEQLYDGYDEEYDCPILDEDRVVDELDNQMREGGVIVDYHGCDFFPERWFHIVFVLRTDTNVLYERLETRGYNEKKLTDNIQCEIFQVLYEEATASYKEEIVHQLPSNKPEELENNVDQILKWIEQWIKDHNS

SEQ ID NO: 803178 - protein, 188 aa, Homo sapiens; identical to SEQ ID NO: 803175

SEQ ID NO: 803179 - protein, 188 aa, Homo sapiens; identical to SEQ ID NO: 803175

SEQ ID NO: 803180 - protein, 153 aa, Homo sapiens
RKGHVSEAPEAVAAGTMLLPNILLTGTPGVGKTTLGKELASKSGLKYINVGDLAREEQLYDGYDEEYDCPILDEDRVVDELDNQMREGGVIVDYHGCDFFPERWFHIVFVLRTDTNVLYERLETRFFKFFMKKPQHPTRKKSCISCPVINQKS

SEQ ID NO: 803181 - protein, 172 aa, Homo sapiens; identical to SEQ ID NO: 803177

SEQ ID NO: 803182 - protein, 170 aa, Homo sapiens
RKGHVSEAPEAVAAGTMLLPNILLTGTPGVGKTTLGKELASYDGYDEEYDCPILDEDRVVDELDNQMREGGVIVDYHGCDFFPERWFHIVFVLRTDTNVLYERLETRGYNEKKLTDNIQCEIFQVLYEEATASYKEEIVHQLPSNKPEELENNVDQILKWIEQWIKDHNS

SEQ ID NO: 803183 - protein, 173 aa, Homo sapiens
RKGHVSEAPEAVAAGTMLLPNILLTGTPGVGKTTLGKELASKSGLKYINVGDLAREEQLYDGYDEEYDCPILDEDRVVDELDNQMREGGVIVVFVLRTDTNVLYERLETRGYNEKKLTDNIQCEIFQVLYEEATASYKEEIVHQLPSNKPEELENNVDQILKWIEQWIKDHNS

SEQ ID NO: 803184 - protein, 230 aa, Homo sapiens
MRTGTLSVSFELRPQSARETYPFRGRTTTPSSLGGSRACAIRHRPPFVSSPGTQFGTAWRQRGLRGKLLPSAEPQKRWIGPRGAFPRPYLFPPCVMDTVLGGRSPHLERPPTVCRHPVGRRPEAIQLPGTALPRVAPLPSQSSRILGFLRSLDATRARCLGDRPRAPAPPLPAKGPAPPGRGLVPLCTSRLALWFRGGLGFGLRPAAAAAGPLRGGPESCVRHAWLPAFL

SEQ ID NO: 803185 - protein, 48 aa, Homo sapiens
MVLVITHPCHFSRVGSQWPREAEIREPRAGPPQPLFVSGQPCRLSPTE

SEQ ID NO: 803186 - protein, 48 aa, Homo sapiens; identical to SEQ ID NO: 803185

SEQ ID NO: 803187 - protein, 451 aa, Homo sapiens
MVMGITDVDDKIIKRANEMNISPASLASLYEEDFKQDMAALKVLPPTVYLRVTENIPQIISFIEGIIARGNAYSTAKGNVYFDLKSRGDKYGKLVGVVPGPVGEPADSDKRHASDFALWKAAKPQEVFWASPWGPGRPGWHIECSAIASMVFGSQLDIHSGGIDLAFPHHENEIAQCEVFHQCEQWGNYFLHSGHLHAKGKEEKMSKSLKNYITIKDFLKTFSPDVFRFFCLRSSYRSAIDYSDSAMLQAQQLLLGLGSFLEDARAYMKGQLACGSVREAMLWERLSSTKRAVKAALADDFDTPRVVDAILGLAHHGNGQLRASLKEPEGPRSPAVFGAIISYFEQFFETVGISLANQQYVSGDGSEATLHGVVDELVRFRQKVRQFALAMPEATGDARRQQLLERQPLLEACDTLRRGLTAHGINIKDRSSTTSTWELLDQRTKDQKSAG

SEQ ID NO: 803188 - protein, 451 aa, Homo sapiens; identical to SEQ ID NO: 803187

SEQ ID NO: 803189 - protein, 449 aa, Homo sapiens
MSQRNGVRSLRNIFTEMNISPASLASLYEEDFKQDMAALKVLPPTVYLRVTENIPQIISFIEGIIARGNAYSTAKGNVYFDLKSRGDKYGKLVGVVPGPVGEPADSDKRHASDFALWKAAKPQEVFWASPWGPGRPGWHIECSAIASMVFGSQLDIHSGGIDLAFPHHENEIAQCEVFHQCEQWGNYFLHSGHLHAKGKEEKMSKSLKNYITIKDFLKTFSPDVFRFFCLRSSYRSAIDYSDSAMLQAQQLLLGLGSFLEDARAYMKGQLACGSVREAMLWERLSSTKRAVKAALADDFDTPRVVDAILGLAHHGNGQLRASLKEPEGPRSPAVFGAIISYFEQFFETVGISLANQQYVSGDGSEATLHGVVDELVRFRQKVRQFALAMPEATGDARRQQLLERQPLLEACDTLRRGLTAHGINIKDRSSTTSTWELLDQRTKDQKSAG

SEQ ID NO: 803190 - protein, 603 aa, Homo sapiens
MLRTTRGPGLGPPLLQAALGLGRAGWHWPAGRAASGGRGRAWLQPTGRETGVQVYNSLTGRKEPLIVAHAEAASWYSCGPTVYDHAHLGHACSYVRFDIIRRILTKVFGCSIVMVMGITDVDDKIIKRANEMNISPASLASLYEEDFKQDMAALKVLPPTVYLRVTENIPQIISFIEGIIARGNAYSTAKGNVYFDLKSRGDKYGKLVGVVPGPVGEPADSDKRHASDFALWKAAKPQEVFWASPWGPGRPGWHIECSAIASMVFGSQLDIHSGGIDLAFPHHENEIAQCEVFHQCEQWGNYFLHSGHLHAKGKEEKMSKSLKNYITIKDFLKTFSPDVFRFFCLRSSYRSAIDYSDSAMLQAQQLLLGLGSFLEDARAYMKGQLACGSVREAMLWERLSSTKRAVKAALADDFDTPRVVDAILGLAHHGNGQLRASLKEPEGPRSPAVFGAIISYFEQFFETVGISLANQQLQTLVRRTRDESISATECRQLCTHVYVQRLSECAEVTGTYVSGDGSEATLHGVVDELVRFRQKVRQFALAMPEATGDARRQQLLERQPLLEACDTLRRGLTAHGINIKDRSSTTSTWELLDQRTKDQKSAG

SEQ ID NO: 803191 - protein, 539 aa, Homo sapiens
MLRTTRGPGLGPPLLQAALGLGRAGWHWPAGRAASGGRGRAWLQPTGRETGVQVYNSLTGRKEPLIVAHAEAASWYSCGPTVYDHAHLGHACSYVRFDIIRRILTKVFGCSIVMVMGITDVDDKIIKRANEMNISPASLASLYEEDFKQDMAALKVLPPTVYLRVTENIPQIISFIEGIIARGNAYSTAKGNVYFDLKSRGDKYGKLVGVVPGPVGEPADSDKRHASDFALWKAAKPQEVFWASPWGPGRPGWHIECSAIASMVFGSQLDIHSGGIDLAFPHHENEIAQCEVFHQCEQWGNYFLHSGHLHAKGKEEKMSKSLKNYITIKDFLKTFSPDVFRFFCLRSSYRSAIDYSDSAMLQAQQLLLGLGSFLEDARAYMKGQLACGSVREAMLWERLSSTKRAVKAALADDFDTPRVVDAILGLAIISYFEQFFETVGISLANQQYVSGDGSEATLHGVVDELVRFRQKVRQFALAMPEATGDARRQQLLERQPLLEACDTLRRGLTAHGINIKDRSSTTSTWELLDQRTKDQKSAG

SEQ ID NO: 803192 - protein, 247 aa, Homo sapiens
MSKSLKNYITIKDFLKTFSPDVFRFFCLRSSYRSAIDYSDSAMLQAQQLLLGLGSFLEDARAYMKGQLACGSVREAMLWERLSSTKRAVKAALADDFDTPRVVDAILGLAHHGNGQLRASLKEPEGPRSPAVFGAIISYFEQFFETVGISLANQQYVSGDGSEATLHGVVDELVRFRQKVRQFALAMPEATGDARRQQLLERQPLLEACDTLRRGLTAHGINIKDRSSTTSTWELLDQRTKDQKSAG

SEQ ID NO: 803193 - protein, 387 aa, Homo sapiens
MLRTTRGPGLGPPLLQAALGLGRAGWHWPAGRAASGGRGRAWLQPTGRETGVQVYNSLTGRKEPLIVAHAEAASWYSCGPTVYDHAHLGHACSYVRFDIIRRILTKVFGCSIVMVMGITDVDDKIIKRANEMNISPASLASLYEEDFKQDMAALKVLPPTVYLRVTENIPQIISFIEGIIARGNAYSTAKGNVYFDLKSRGDKYGKLVGVVPGPVGEPADSDKRHASDFALWKAAKPQEVFWASPWGPGRPGWHIECSAIASMVFGSQLDIHSGGIDLAFPHHENEIAQCEVFHQCEQWGNYFLHSGHLHAKGKEEKMSKSLKNYITIKDFLKTFSPDVFRFFCLRSSYRSAIDYSDSAMLQAQQLLLGLGSFLEDARAYMKGQLGC

SEQ ID NO: 803194 - protein, 215 aa, Homo sapiens [sequence omitted]

SEQ ID NO: 803195 - protein, 262 aa, Homo sapiens
MLHNFLLLRNSSLWEYDLEKVPRLEPPASLPGEGLVWGPPGESGAPSAVTVLSSSLRLSSTKRAVKAALADDFDTPRVVDAILGLAHHGNGQLRASLKEPEGPRSPAVFGAIISYFEQFFETVGISLANQQLQTLVRRTRDESISATECRQLCTHVYVQRLSECAEVTGTYVSGDGSEATLHGVVDELVRFRQKVRQFALAMPEATGDARRQQLLERQPLLEACDTLRRGLTAHGINIKDRSSTTSTWELLDQRTKDQKSAG

SEQ ID NO: 803196 - protein, 128 aa, Homo sapiens
MLHNFLLLRNSSLWEYDLEKVPRLEPPASLPGEGLVWGPPGESGAPSAVTVLSSSLRLSSTKRAVKAALADDFDTPRVVDAILGLAHHGNGQLRASLKVAQRTGGLAVLLPGAWVGSSGGFFSCRLGG

SEQ ID NO: 803197 - protein, 223 aa, Homo sapiens
MLHNFLLLRNSSLWEYDLEKVPRLEPPASLPGEGLVWGPPGESGAPSAVTVLSSSLRLSSTKRAVKAALADDFDTPRVVDAILGLAHHGNGQLRASLKEPEGPRSPAVFGAIISYFEQFFETVGISLANQQYVSGDGSEATLHGVVDELVRFRQKVRQFALAMPEATGDARRQQLLERQPLLEACDTLRRGLTAHGINIKDRSSTTSTWELLDQRTKDQKSAG

SEQ ID NO: 803198 - protein, 564 aa, Homo sapiens
MLRTTRGPGLGPPLLQAALGLGRAGWHWPAGRAASGGRGRAWLQPTGRETGVQVYNSLTGRKEPLIVAHAEAASWYSCGPTVYDHAHLGHACSYVRFDIIRRILTKVFGCSIVMVMGITDVDDKIIKRANEMNISPASLASLYEEDFKQDMAALKVLPPTVYLRVTENIPQIISFIEGIIARGNAYSTAKGNVYFDLKSRGDKYGKLVGVVPGPVGEPADSDKRHASDFALWKAAKPQEVFWASPWGPGRPGWHIECSAIASMVFGSQLDIHSGGIDLAFPHHENEIAQCEVFHQCEQWGNYFLHSGHLHAKGKEEKMSKSLKNYITIKDFLKTFSPDVFRFFCLRSSYRSAIDYSDSAMLQAQQLLLGLGSFLEDARAYMKGQLACGSVREAMLWERLSSTKRAVKAALADDFDTPRVVDAILGLAHHGNGQLRASLKEPEGPRSPAVFGAIISYFEQFFETVGISLANQQYVSGDGSEATLHGVVDELVRFRQKVRQFALAMPEATGDARRQQLLERQPLLEACDTLRRGLTAHGINIKDRSSTTSTWELLDQRTKDQKSAG

SEQ ID NO: 803199 - protein, 258 aa, Homo sapiens
AVPARRSFDDMLRTTRGPGLGPPLLQAALGLGRAGWHWPAGRAASGGRGRAWLQPTGRETGVQVYNSLTGRKEPLIVAHAEAASWYSCGPTVYDHAHLGHACSYVRFDIIRRILTKVFGCSIVMVMGITDVDDKIIKRANEMNISPASLASLYEEDFKQDMAALKVLPPTVYLRVTENIPQIISFIEGIIARGNAYSTAKGNVYFDLKSRGDKYGKLVGVVPGPVGEPADSDEASMPVTYLPLWQVRPKYTQGRGDTW

SEQ ID NO: 803200 - protein, 134 aa, Homo sapiens
MLRTTRGPGLGPPLLQAALGLGRAGWHWPAGRAASGGRGRAWLQPTGRETGVQVYNSLTGRKEPLIVAHAEAASWYSCGPTVYDHAHLGHACSYVRFDIIRRITLYITAPTLVLTIVFLHMNPRPLPNPCQTSN

SEQ ID NO: 803201 - protein, 482 aa, Homo sapiens
MLRTTRGPGLGPPLLQAALGLGRAGWHWPAGRAASGGRGRAWLQPTGRETGVQVYNSLTGRKEPLIVAHAEAASWYSCGPTVYDHAHLGHACSYVRFDIIRRILTKVFGCSIVMVMGITDVDDKIIKRANEMNISPASLASLYEEDFKQDMAALKVLPPTVYLRVTENIPQIISFIEGIIARGNAYSTAKGNVYFDLKSRGDKYGKLVGVVPGPVGEPADSDKRHASDFALWKAAKPQEVFWASPWGPGRPGWHIECSAIASMVFGSQLDIHSGGIDLAFPHHENEIAQCEVFHQCEQWGNYFLHSGHLHAKGKEEKMSKSLKNYITIKDFLKTFSPDVFRFFCLRSSYRSAIDYSDSAMLQAQQLLLGLGSFLEDARAYMKGQLACGSVREAMLWERLSSTKRAVKAALADDFDTPRVVDAILGLAHHGNGQLRASLKEPEGPRSPAVFGAIISYFEQFFETVGISLANQQLANSRAQNQR

SEQ ID NO: 803202 - protein, 581 aa, Homo sapiens
MLRTTRGPGLGPPLLQAALGLGRAGWHWPAGRAASGGRGRAWLQPTGRETGVQVYNSLTGRKEPLIVAHAEAASWYSCGPTVYDHAHLGHACSYVRFDIIRRILTKVFGCSIVMVMGITDVDDKIIKRANEAMSQRNGVRSLRNIFTEMNISPASLASLYEEDFKQDMAALKVLPPTVYLRVTENIPQIISFIEGIIARGNAYSTAKGNVYFDLKSRGDKYGKLVGVVPGPVGEPADSDKRHASDFALWKAAKPQEVFWASPWGPGRPGWHIECSAIASMVFGSQLDIHSGGIDLAFPHHENEIAQCEVFHQCEQWGNYFLHSGHLHAKGKEEKMSKSLKNYITIKDFLKTFSPDVFRFFCLRSSYRSAIDYSDSAMLQAQQLLLGLGSFLEDARAYMKGQLACGSVREAMLWERLSSTKRAVKAALADDFDTPRVVDAILGLAHHGNGQLRASLKEPEGPRSPAVFGAIISYFEQFFETVGISLANQQYVSGDGSEATLHGVVDELVRFRQKVRQFALAMPEATGDARRQQLLERQPLLEACDTLRRGLTAHGINIKDRSSTTSTWELLDQRTKDQKSAG

SEQ ID NO: 803203 - protein, 564 aa, Homo sapiens; identical to SEQ ID NO: 803198

SEQ ID NO: 803204 - protein, 569 aa, Homo sapiens
MLRTTRGPGLGPPLLQAALGLGRAGWHWPAGRAASGGRGRAWLQPTGRETGVQVYNSLTGRKEPLIVAHAEAASWYSCGPTVYDHAHLGHACSYVRFDIIRRILTKVFGCSIVMVMGITDVDDKIIKRANEMNISPASLASLYEEDFKQDMAALKVLPPTVYLRVTENIPQIISFIEGIIARGNAYSTAKGNVYFDLKSRGDKYGKLVGVVPGPVGEPADSDKRHASDFALWKAAKPQEVFWASPWGPGRPGWHIECSAIASMVFGSQLDIHSGGIDLAFPHHENEIAQCEVFHQCEQWGNYFLHSGHLHAKGKEEKMSKSLKNYITIKDFLKTFSPDVFRFFCLRSSYRSAIDYSDSAMLQAQQLLLGLGSFLEDARAYMKGQLACGSVREAMLWERLSSTKRAVKAALADDFDTPRVVDAILGLAHHGNGQLRASLKEPEGPRSPAVFGAIISYFEQFFETVGISLANQQYVSGDGSEATLHGVVDELVRFRQKVRQFALAMPEATGDARRQQLLERQPLLEACDTLRRGLTAHGINIKDRSSTTSTWELLDRTTTPMLLRVKAFVA

SEQ ID NO: 803205 - protein, 538 aa, Homo sapiens
MLRTTRGPGLGPPLLQAALGLGRAGWHWPAGRAASGGRGRAWLQPTGRETGVQVYNSLTGRKEPLIVAHAEAASWYSCGPTVYDHAHLGHACSYVRFDIIRRILTKVFGCSIVMVMGITDVDDKIIKRANEMNISPASLASLYEEDFKQDMAALKVLPPTVYLRVTENIPQIISFIEGIIARGNAYSTAKGNVYFDLKSRGDKYGKLVGVVPGPVGEPADSDKRHASDFALWKAAKPQEVFWASPWGPGRPGWHIECSAIASMVFGSQLDIHSGGIDLAFPHHENEIAQCEVFHQCEQWGNYFLHSGHLHAKGKEEKMSKSLKNYITIKDFLKTFSPDVFRFFCLRSSYRSAIDYSDSAMLQAQQLLLGLGSFLEDARAYMKGQLACGSVREAMLWERLSSTKRAVKAALADDFDTPRVVDAILGLAHHGNGQLRASLKATLHGVVDELVRFRQKVRQFALAMPEATGDARRQQPDCPRHQHQGQKQYNIHVGTAGSKDKRPKISGLRMEHSHEPAHDKTHPCFSGSRLYVKASCRGC

SEQ ID NO: 803206 - protein, 386 aa, Homo sapiens
MLRTTRGPGLGPPLLQAALGLGRAGWHWPAGRAASGGRGRAWLQPTGRETGVQVYNSLTGRKEPLIVAHAEAASWYSCGPTVYDHAHLGHACSYVRFDIIRRILTKVFGCSIVMVMGITDVDDKIIKRANEMNISPASLASLYEEDFKQDMAALKVLPPTVYLRVTENIPQIISFIEGIIARGNAYSTAKGNVYFDLKSRGDKYGKLVGVVPGPVGEPADSDKRHASDFALWKAAKPQEVFWASPWGPGRPGWHIECSAIASMVFGSQLDIHSGGIDLAFPHHENEIAQCEVFHQCEQWGNYFLHSGHLHAKGKEEKMSKSLKNYITIKDFLKTFSPDVFRFFCLRSSYRSAIDYSDSAMLQAQQLLLGLGSFLEDARAYMKGQLS

SEQ ID NO: 803207 - protein, 398 aa, Homo sapiens
MLRTTRGPGLGPPLLQAALGLGRAGWHWPAGRAASGGRGRAWLQPTGRETGVQVYNSLTGRKEPLIVAHAEAASWYSCGPTVYDHAHLGHACSYVRFDIIRRILTKVFGCSIVMVMGITDVDDKIIKRANEMNISPASLASLYEEDFKQDMAALKVLPPTVYLRVTENIPQIISFIEGIIARGNAYSTAKGNVYFDLKSRGDKYGKLVGVVPGPVGEPADSDKRHASDFALWKAAKPQEVFWASPWGPGRPGWHIECSAIASMVFGSQLDIHSGGIDLAFPHHENEIAQCEVFHQCEQWGNYFLHSGHLHAKGKEEKMSKSLKNYITIKDFLKTFSPDVFRFFCLRSSYRSAIDYSDSAMLQAQQLLLGLGSFLEDARAYMKGQLACGSVREAMLWER

SEQ ID NO: 803208 - protein, 388 aa, Homo sapiens
MLRTTRGPGLGPPLLQAALGLGRAGWHWPAGRAASGGRGRAWLQPTGRETGVQVYNSLTGRKEPLIVAHAEAASWYSCGPTVYDHAHLGHACSYVRFDIIRRILTKVFGCSIVMVMGITDVDDKIIKRANEMNISPASLASLYEEDFKQDMAALKVLPPTVYLRVTENIPQIISFIEGIIARGNAYSTAKGNVYFDLKSRGDKYGKLVGVVPGPVGEPADSDKRHASDFALWKAAKPQEVFWASPWGPGRPGWHIECSAIASMVFGSQLDIHSGGIDLAFPHHENEIAQCEVFHQCEQWGNYFLHSGHLHAKGKEEKMSKSLKNYITIKDFLKTFSPDVFRFFCLRSSYRSGEPSTRGVDSPPSSETVILTGLKTAKCRPENKQNLVE

SEQ ID NO: 803209 - protein, 142 aa, Homo sapiens
GTASVTISSSSAIDYSDSAMLQAQQLLLGLGSFLEDARAYMKGQLACGSVREAMLWERLSSTKRAVKAALADDFDTPRVVDAILGLAHHGNGQLRASLKEPEGPRSPAVFGAIISYFEQFFETVGISLANQQLANSRAQNQR

SEQ ID NO: 803210 - protein, 101 aa, Homo sapiens
ALPVTFSRGEGRGGDSVRAAGVWTAGEAQTLLGVFGTWRQSLLGGTARPLGNAGERPASLKTRPGPNGPRDRNLRDHGTQQLPQLAPQPLTLRPRPTEQYK

SEQ ID NO: 803211 - protein, 505 aa, Homo sapiens
TGPPSCQRCIWLGPGPWRPLGPCAEPRRPGRPGLRHFRGPSAAGPGGATRPGGGEQRKGLNRRSLEPPPGRGLPPPQLGRAGLAAPCCRLRPLQGREGAGRAEMRRRLRLRRDALLTLLLGASLGLLLYAQRDGAAPTASAPRGRGRAAPRPTPGPRAFQLPDAGAAPPAYEGDTPAPPTPTGPFDFARYLRAKDQRRFPLLINQPHKCRGDGAPGGRPDLLIAVKSVAEDFERRQAVRQTWGAEGRVQGALVRRVFLLGVPRGAGSGGADEVGEGARTHWRALLRAESLAYADILLWAFDDTFFNLTLKEIHFLAWASAFCPDVRFVFKGDADVFVNVGNLLEFLAPRDPAQDLLAGDVIVHARPIRTRASKYYIPEAVYGLPAYPAYAGGGGFVLSGATLHRLAGACAQVELFPIDDVFLGMCLQRLRLTPEPHPAFRTFGIPQPSAAPHLSTFDPCFYRELVVVHGLSAADIWLMWRLLHGPHGPACAHPQPVAAGPFQWDS

SEQ ID NO: 803212 - protein, 75 aa, Homo sapiens
LPVSLPGPGSQSWAGAEAAGELATWVNFLSLQAAGPGGATRPGGGEQRKGLNRRSLEPPPGRGLPPPQLGRAGLA

SEQ ID NO: 803213 - protein, 190 aa, Homo sapiens
GIPARAPRPTYPAAPGKKMAGSVADSDAVVKLDDGHLNNSLSSPVQADVYFPRLIVPFCGHIKGGMRPGKKVLVMGIVDLNPESFAISLTCGDSEDPPADVAIELKAVFTDRQLLRNSCISGERGEEQSAIPYFPFIPDQPFRVEILCEHPRFRVFVDGHQLFDFYHRIQTLSAIDTIKINGDLQITKLG

SEQ ID NO: 803214 - protein, 190 aa, Homo sapiens; identical to SEQ ID NO: 803213

SEQ ID NO: 803215 - protein, 200 aa, Homo sapiens
GIPARAPRPTYPAAPGKKMAGSVADSDAVVKLDDGHLNNSLSSPVQADVYFPRLIVPFCGHIKGGMRPGKKVLVMGIVDLNPESFAISLTCGDSEDPPADVAIELKAVFTDRQLLRNSCISGERGEEQSAIPYFPFIPDQPFRLEFLLAPRFECCDDTLLIYIDSTYRMHLVMDLRYSLLINTYSMVRPTITWLRVLQLD

SEQ ID NO: 803216 - protein, 90 aa, Homo sapiens
MTLQTREATHPRPWHRKARAERTDGCCPGLGQEGAHANASCRISAFGWQKADKGRAKPHQEAKGGPRSLSFYFPRQRHSEACLEKSIPRL

SEQ ID NO: 803217 - protein, 267 aa, Homo sapiens
MGPPLAPRPAHVPGEAGPRRTRESRPGAVSFADVAVYFSPEEWECLRPAQRALYRDVMRETFGHLGALGFSVPKPAFISWVEGEVEAWSPEAQDPDGESSAAFSRGQGQEAGSRDGNEEKERLKKCPKQKEVAHEVAVKEWWPSVACPEFCNPRQSPMNPWLKDTLTRRLPHSCPDCGRNFSYPSLLASHQRVHSGERPFSCGQCQARFSQRRYLLQHQFIHTGEKPYPCPDCGRRFRQRGSLAIHRRAHTGEKPYACSDCKSRFTY

SEQ ID NO: 803218 - protein, 182 aa, Homo sapiens
TQVNNSIKPLRERICVSMQEKKIKMKQTLIRSQFACTYKDDYMISKDNWNNVNLASKPLCVLYMENDLSEGVNPSVGRSTIGTSFGNVHLDRSKNEKVSRKSTSQTGNKSSKRKQVDLDGENILCDNRNEPPQHKNAKIPKKSNDSQNRLYGKLAKVAKSNKCTAKDKLISGQAKLTQFFRL

SEQ ID NO: 803219 - protein, 182 aa, Homo sapiens; identical to SEQ ID NO: 803218

SEQ ID NO: 803220 - protein, 182 aa, Homo sapiens; identical to SEQ ID NO: 803218

SEQ ID NO: 803221 - protein, 96 aa, Homo sapiens
QLYLLLPMRTLTETGSHSVTQEYSGTIIAQRKLELLGLSDALASASQVPGTTAGKKQILEEAHLLHTAHRLEIDVVSFARSQRRVPKALSFNPHFN

SEQ ID NO: 803222 - protein, 168 aa, Homo sapiens
PPTHTDVPARVLVRARHLRSRDRAAGPYAVDQAERGARRPCQAVELVTETFDVVKRVQDDHVVATQAPFHGGSQSSTQCLLTGRIAVHRWVLCAQDSCVVHHVHRAALGSQRHAQLFSTPALAAVRQPAKHHERHPLRERPLATALRQLPGCTRLRPWDAVTCLRLKI

SEQ ID NO: 803223 - protein, 688 aa, Homo sapiens
  misc_feature (64)..(64): Xaa can be any naturally occurring amino acid
MAGMKTASGDYIDSSWELRVFVGEEDPEAESVTLRVTGESHIGGVLLKIVEQINRKQDWVMTHXLYLGRAKTQGTTQRRPRVGALWPFGPKENAPQTFGENQTLGTKYGILADARLFFGPQHRPVILRLPNRRALRLRASFSQPLFQAVAAICRLLSIRHPEELSLLRAPEKKEKKKKEKEPEEELYDLSKVVLAGGVAPALFRGMPAHFSDSAQTEACYHMLSRPQPPPDPLLLQRLPRPSSLSDKTQLHSRWLDSSRCLMQQGIKAGDALWLRFKYYSFFDLDPKTDPVRLTQLYEQARWDLLLEEIDCTEEEMMVFAALQYHINKLSQSGEVGEPAGTDPGLDDLDVALSNLEVKLEGSAPTDVLDSLTTIPELKDHLRIFRPRKLTLKGYRQHWVVFKETTLSYYKSQDEAPGDPIQQLNLKGCEVVPDVNVSGQKFCIKLLVPSPEGMSEIYLRCQDEQQYARWMAGCRLASKGRTMADSSYTSEVQAILAFLSLQRTGSGGPGNHPHGPDASAEGLNPYGLVAPRFQRKFKAKQLTPRILEAHQNVAQLSLAEAQLRFIQAWQSLPDFGISYVMVRFKGSRKDEILGIANNRLIRIDLAVGDVVKTWRFSNMRQWNVNWDIRQVAIEFDEHINVAFSCVSASCRIVHEYIGGYIFLSTRERARGEELDEDLFLQLTGGHEAF

SEQ ID NO: 803224 - protein, 699 aa, Homo sapiens
MAGMKTASGDYIDSSWELRVFVGEEDPEAESVTLRVTGESHIGGVLLKIVEQINRKQDWSDHAIWWEQKRQWLLQTHWTLDKYGILADARLFFGPQHRPVILRLPNRRALRLRASFSQPLFQAVAAICRLLSIRHPEELSLLRAPEKKEKKKKEKEPEEELYDLSKVVLAGGVAPALFRGMPAHFSDSAQTEACYHMLSRPQPPPDPLLLQRLPRPSSLSDKTQLHSRWLDSSRCLMQQGIKAGDALWLRFKYYSFFDLDPKTDPVRLTQLYEQARWDLLLEEIDCTEEEMMVFAALQYHINKLSQSGEVGEPAGTDPGLDDLDVALSNLEVKLEGSAPTDVLDSLTTIPELKDHLRIFRPRKLTLKGYRQHWVVFKETTLSYYKSQDEAPGDPIQQLNLKGCEVVPDVNVSGQKFCIKLLVPSPEGMSEIYLRCQDVSEGWAGARAGQELGQGQGLRSIKLGYTVPLTPLAQEQQYARWMAGCRLASKGRTMADSSYTSEVQAILAFLSLQRTGSGGPGNHPHGPDASAEGLNPYGLVAPRFQRKFKAKQLTPRILEAHQNVAQLSLAEAQLRFIQAWQSLPDFGISYVMVRFKGSRKDEILGIANNRLIRIDLAVGDVVKTWRFSNMRQWNVNWDIRQVAIEFDEHINVAFSCVSASCRIVHEYIGGYIFLSTRERARGEELDEDLFLQLTGGHEAF

SEQ ID NO: 803225 - protein, 663 aa, Homo sapiens
MAGMKTASGDYIDSSWELRVFVGEEDPEAESVTLRVTGESHIGGVLLKIVEQINRKQDWSDHAIWWEQKRQWLLQTHWTLDKYGILADARLFFGPQHRPVILRLPNRRALRLRASFSQPLFQAVAAICRLLSIRHPEELSLLRAPEKKEKKKKEKEPEEELYDLSKVVLAGGVAPALFRGMPAHFSDSAQTEACYHMLSRPQPPPDPLLLQRLPRPSSLSDKTQLHSRWLDSSRCLMQQGIKAGDALWLRFKYYSFFDLDPKTDPVRLTQLYEQARWDLLLEEIDCTEEEMMVFAALQYHINKLSQSGEVGEPAGTDPGLDDLDVALSNLEVKLEGSAPTDVLDSLTTIPELKDHLRIFRPRKLTLKGYRQHWVVFKETTLSYYKSQDEAPGDPIQQLNLKGCEVVPDVNVSGQKFCIKLLVPSPEGMSEIYLRCQDEQQYARWMAGCRLASKGRTMADSSYTSEVQAILAFLSLQRTGSGGPGNHPHGPDASAEGLNPYGLVAPRFQRKFKAKQLTPRILEAHQNVAQLSLAEAQLRFIQAWQSLPDFGISYVMVRFKGSRKDEILGIANNRLIRIDLAVGDVVKTWRFSNMRQWNVNWDIRQVAIEFDEHINVAFSCVSASCRIVHEYIGGYIFLSTRERARGEELDEDLFLQLTGGHEAF

SEQ ID NO: 803226 - protein, 619 aa, Homo sapiens
MAGMKTASGDYIDSSWELRVFVGEEDPEAESVTLRVTGESHIGGVLLKIVEQINRKQDWSDHAIWWEQKRQWLLQTHWTLDKYGILADARLFFGPQHRPVILRLPNRRALRLRASFSQPLFQAVAAICRLLSIRHPEELSLLRAPEKKEKKKKEKEPEEELYDLSKVVLAGGVAPALFRGMPAHFSDSAQTEACYHMLSRPQPPPDPLLLQRLPRPSSLSDKTQLHSRWLDSSRCLMQQGIKAGDALWLRFKYYSFFDLDPKTDPVRLTQLYEQARWDLLLEEIDCTEEEMMVFAALQYHINKLSQSGEVGEPAGTDPGLDDLDVALSNLEVKLEGSAPTDVLDSLTTIPELKDHLRIFRPRKLTLKGYRQHWVVFKETTLSYYKSQDEAPGDPIQQLNLKGCEVVPDVNVSGQKFCIKLLVPSPEGMSEIYLRCQDEQQYARWMAGCRLASKGRTMADSSYTSEVQAILAFLSLQRTGSGGPGNHPHGPDASAEGLNPYGLVAPRFQRKFKAKQLTPRILEAHQNVAQLSLAEAQLRFIQAWQSLPDFGISYVMVRFKGSRKDEILGIANNRLIRIDLAVGDVVKTWRFIFLSTRERARGEELDEDLFLQLTGGHEAF

SEQ ID NO: 803227 - protein, 169 aa, Homo sapiens
RRYLQDLSEQSWQPVTSMVPQLTPRILEAHQNVAQLSLAEAQLRFIQAWQSLPDFGISYVMVRFKGSRKDEILGIANNRLIRIDLAVGDVVKTWRFSNMRQWNVNWDIRQVAIEFDEHINVAFSCVSASCRIVHEYIGGYIFLSTRERARGEELDEDLFLQLTGGHEAF

SEQ ID NO: 803228 - protein, 751 aa, Homo sapiens
MAGMKTASGDYIDSSWELRVFVGEEDPEAESVTLRVTGESHIGGVLLKIVEQINRKQDWSDHAIWWEQKRQWLLQTHWTLDKYGILADARLFFGPQHRPVILRLPNRRALRLRASFSQPLFQAVAAICRLLSIRHPEELSLLRAPEKKEKKKKEKEPEEELYDLSKVVLAGGVAPALFRGMPAHFSDSAQTEACYHMLSRPQPPPDPLLLQRLPRPSSLSDKTQLHSRWLDSSRCLMQQGIKAGDALWLRFKYYSFFDLDPKTDPVRLTQLYEQARWDLLLEEIDCTEEEMMVFAALQYHINKLSQSGEVGEPAGTDPGLDDLDVALSNLEVKLEGSAPTDVLDSLTTIPELKDHLRIFRPRKLTLKGYRQHWVVFKETTLSYYKSQDEAPGDPIQQLNLKGCEVVPDVNVSGQKFCIKLLVPSPEGMSEIYLRCQDEQQYARWMAGCRLASKGRTMADSSYTSEVQAILAFLSLQRTGSGGPGNHPHGPDASAEGLNPYGLVAPRFQRKFKAKQLTPRILEAHQNVAQLSLAEAQLRFIQAWQSLPDFGISYVMVRFKGSRKDEILGIANNRLIRIDLAVGDVVKTWRFSNMRQWNVNWDIRQVAIEFDEHINVAFSCVSASCRIVHEYIGGYIFLSTRERARGEELDEDLFLLLTTLSQPLPSPHPQGLTAPHPLQAGTQLGISPAVTDFVQAKDLAGPDAVPSPRPGMGVGVPELMWCPLSLSEWLRLIPLTYLQSPSTQGRPDVATG

SEQ ID NO: 803229 - protein, 663 aa, Homo sapiens; identical to SEQ ID NO: 803225

SEQ ID NO: 803230 - protein, 462 aa, Homo sapiens
RAAPSSSPYECLPRPSSLSDKTQLHSRWLDSSRCLMQQGIKAGDALWLRFKYYSFFDLDPKTDPVRLTQLYEQARWDLLLEEIDCTEEEMMVFAALQYHINKLSQSGEVGEPAGTDPGLDDLDVALSNLEVKLEGSAPTDVLDSLTTIPELKDHLRIFRPRKLTLKGYRQHWVVFKETTLSYYKSQDEAPGDPIQQLNLKGCEVVPDVNVSGQKFCIKLLVPSPEGMSEIYLRCQDEQQYARWMAGCRLASKGRTMADSSYTSEVQAILAFLSLQRTGSGGPGNHPHGPDASAEGLNPYGLVAPRFQRKFKAKQLTPRILEAHQNVAQLSLAEAQLRFIQAWQSLPDFGISYVMVRFKGSRKDEILGIANNRLIRIDLAVGDVVKTWRFSNMRQWNVNWDIRQVAIEFDEHINVAFSCVSASCRIVHEYIGGYIFLSTRERARGEELDEDLFLQLTGGHEAF

SEQ ID NO: 803231 - protein, 337 aa, Homo sapiens
TIYERSRAGGVAPTDVLDSLTTIPELKDHLRIFRPRKLTLKGYRQHWVVFKETTLSYYKSQDEAPGDPIQQLNLKGCEVVPDVNVSGQKFCIKLLVPSPEGMSEIYLRCQDEQQYARWMAGCRLASKGRTMADSSYTSEVQAILAFLSLQRTGSGGPGNHPHGPDASAEGLNPYGLVAPRFQRKFKAKQLTPRILEAHQNVAQLSLAEAQLRFIQAWQSLPDFGISYVMVRFKGSRKDEILGIANNRLIRIDLAVGDVVKTWRFSNMRQWNVNWDIRQVAIEFDEHINVAFSCVSASCRIVHEYIGGYIFLSTRERARGEELDEDLFLQLTGGHEAF

SEQ ID NO: 803232 - protein, 152 aa, Homo sapiens
MVPQLTPRILEAHQNVAQLSLAEAQLRFIQAWQSLPDFGISYVMVRFKGSRKDEILGIANNRLIRIDLAVGDVVKTWRFSNMRQWNVNWDIRQVAIEFDEHINVAFSCVSASCRIVHEYIGGYIFLSTRERARGEELDEDLFLQLTGGHEAF

SEQ ID NO: 803233 - protein, 476 aa, Homo sapiens
MAGMKTASGDYIDSSWELRVFVGEEDPEAESVTLRVTGESHIGGVLLKIVEQINRKQDWSDHAIWWEQKRQWLLQTHWTLDKYGILADARLFFGPQHRPVILRLPNRRALRLRASFSQPLFQAVAAICRLLSIRHPEELSLLRAPEKKEKKKKEKEPEEELYDLSKVVLAGGVAPALFRGMPAHFSDSAQTEACYHMLSRPQPPPDPLLLQRLPRPSSLSDKTQLHSRWLDSSRCLMQQGIKAGDALWLRFKYYSFFDLDPKTDPVRLTQLYEQARWDLLLEEIDCTEEEMMVFAALQYHINKLSQSGEVGEPAGTDPGLDDLDVALSNLEVKLEGSAPTDVLDSLTTIPELKDHLRIFRPRKLTLKGYRQHWVVFKETTLSYYKSQDEAPGDPIQQLNLKGCEVVPDVNVSGQKFCIKLLVPSPEGMSEIYLRCQDEQQYARWNGWLPLASAVQGRRQFTARGRQSGHMVPYLSS

SEQ ID NO: 803234 - protein, 895 aa, Homo sapiens
RHCGGRAPSLGAGTRGGAKRGPLPPRAPMYAFYSLLIYIFYSLFRRDGGAAAAAEPGDPAQRARKPRGRRRPDLPAPELWTELTGLAASSEPEDGSEGAAEGRAAAVSLEEALLRLAEFLSVQLGAEESCGGPADLGQSGEVPSLLTVTSQLLALLAWLRSPRGRQALLQGTQPAPRVRPPSPDGSTSQEESPSHFTAVPGEPLGDETQGQQPLQLEEDQRAWQRLEQLILGQLEELKQQLEQQEEELGRLRLGVGATDSEKRVQHLTLENEALKQSLSLMRDLLLHWGPGPPIRAPQEEAEALLELQGRLQEAQDTTEALRAQLGVQEVQLQGLQGALQQLQQETEQNCRRELQQMHGQLAGLRARMASLRQGCGDLRGLVSTFTQSCQGSLSEARGQVSWALGALSSGGPGTQLPEGQQGPPAGCPGRLPELKGNIRVLCRLRPGTSSSLVSVEPGPGGTVTTCYRGRHRRFRLDWVFPPDASQEEVFRELEPAVLSCLRGYSVCIFTYGQTGTGKTYSMEGPPEDPGIVPRALQSLFREMGAGRQHRVTLSMVEIYNEAVRDLLAPGPPERLAVRQGPEGQGGIQVAGLTHWDVPNLETLHQMLKLGRSNRATAATAMNQRSSRSHALVTLTLRAASPPRAPGTAGTTAVPEPCGVSRAPEARPSPMSGSLAPLGTLHLVDLAGSERARKAGAAGPPRGDPDGARRLREAQTINRSLLALGGVMAALRAHRPHVPFRDSQLTRLLQPALGPGTTAVLLLQVGAGAGQVCACRSPPTRARPPAPLARRSPRGRRISGRQSAPSSSPTEWVKWSWGQPGAAGSRAPPGRLLPSAPTLRSPGPPAPLRRPLAVLHAPVPTTARARLSRPQRACPSSPGSRPCPWGLRPGLCWQRR

SEQ ID NO: 803235 - protein, 850 aa, Homo sapiens
NSGASCGGPATLGQSGEVPSLLTVTSQLLALLAWLRSPRGRQALLQGTQPAPRVRPPSPDGSTSQEESPSHFTAVPGEPLGDETQGQQPLQLEEDQRAWQRLEQLILGQVRSLEPEGIAGWDARKRRSTLSLFTSPQLEELKQQLEQQEEELGRLRLGVVRLQGDLAGPGMEGVLQVSAEVSSPPGGDGLREKGSASDSGERGPEAEPESHAGPPAALGPRAPHQGSAGGGEALLELQGRLQEAQDTTEALRAQLGVQEVQLQGLQGALQQLQQETEQNCRRELQQMHGQLAGKGWGVGLMGGPGGWAFPSNRLPSPGLRARMASLRQGCGDLRGLVSTFTQSCQGSLSEARGQVSWALGALSSGGPGTQLPEGQQGPPAGCPGRLPELKGNIRVLCRLRPGTSSSLVSVEPGPGGTVTTCYRGRHRRFRLDWVFPPDASQEEVFRELEPAVLSCLRGYSVCIFTYGQTGTGKTYSMEGPPEDPGIVPRALQSLFREMGAGRQHRVTLSMVEIYNEAVRDLLAPGPPERLAVRQGPEGQGGIQVAGLTHWDVPNLETLHQMLKLGRSNRATAATAMNQRSSRSHALVTLTLRAASPPRAPGTAGTTAVPEPCGVSRAPEARPSPMSGSLAPLGTLHLVDLAGSERARKAGAAGPPRGDPDGARRLREAQTINRSLLALGGVMAALRAHRPHVPFRDSQLTRLLQPALGPGTTAVLLLQVGAGAGQVCACRSPPTRARPPAPLARRSPRGRRISGRQSAPSSSPTEWVKWSWGQPGAAGSRAPPGRLLPSAPTLRSPGPPAPLRRPLAVLHAPVPTTARARLSRPQRACPSSPGSRPCPWGLRPGLCWQRR

SEQ ID NO: 803236 - protein, 819 aa, Homo sapiens
RHCGGRAPSLGAGTRGGAKRGPLPPRAPMYAFYSLLIYIFYSLFRRDGGAAAAAEPGDPAQRARKPRGRRRPDLPAPELWTELTGLAASSEPEDGSEGAAEGRAAAVSLEEALLRLAEFLSVQLGAEESCGGPADLGQSGEVPSLLTVTSQLLALLAWLRSPRGRQALLQGTQPAPRVRPPSPDGSTSQEESPSHFTAVPGEPLGDETQGQQPLQLEEDQRAWQRLEQLILGQLEELKQQLEQQEEELGRLRLGVGATDSEKRVQHLTLENEALKQSLSLMRDLLLHWGPGPPIRAPQEEAEALLELQGRLQEAQDTTEALRAQLGVQEVQLQGLQGALQQLQQETEQNCRRELQQMHGQLAGLRARMASLRQGCGDLRGLVSTFTQSCQGSLSEARGQVSWALGALSSGGPGTQLPEGQQGPPAGCPGRLPELKGNIRVLCRLRPGTSSSLVSVEPGPGGTVTTCYRGRHRRFRLDWVFPPDASQEEVFRELEPAVLSCLRGYSVCIFTYGQTGTGKTYSMEGPPEDPGIVPRALQSLFREMGAGRQHRVTLSMVEIYNEAVRDLLAPGPPERLAVRQGPEGQGGIQVAGLTHWDVPNLETLHQMLKLGRSNRATAATAMNQRSSRSHALVTLTLRAASPPRAPGTAGTLHLVDLAGSERARKAGAAGPPRGDPDGARRLREAQTINRSLLALGGVMAALRAHRPHVPFRDSQLTRLLQPALGPGTTAVLLLQISTRPEDLGETVCSLKFADRVGQVELGPARRRRVPRSSGTPSSLSTDTPLTGTPCTPTPSPGSPPCPSPDNGSGSALAPAEGLPL

SEQ ID NO: 803237 - protein, 848 aa, Homo sapiens
RHCGGRAPSLGAGTRGGAKRGPLPPRAPMYAFYSLLIYIFYSLFRRDGGAAAAAEPGDPAQRARKPRGRRRPDLPAPELWTELTGLAASSEPEDGSEGAAEGRAAAVSLEEALLRLAEFLSVQLGAEESCGGPADLGQSGEVPSLLTVTSQLLALLAWLRSPRGRQALLQGTQPAPRVRPPSPDGSTSQEESPSHFTAVPGEPLGDETQGQQPLQLEEDQRAWQRLEQLILGQLEELKQQLEQQEEELGRLRLGVGATDSEKRVQHLTLENEALKQSLSLMRDLLLHWGPGPPIRAPQEEAEALLELQGRLQEAQDTTEALRAQLGVQEVQLQGLQGALQQLQQETEQNCRRELQQMHGQLAGLRARMASLRQGCGDLRGLVSTFTQSCQGSLSEARGQVSWALGALSSGGPGTQLPEGQQGPPAGCPGRLPELKGNIRVLCRLRPGTSSSLVSVEPGPGGTVTTCYRGRHRRFRLDWVFPPDASQEEVFRELEPAVLSCLRGYSVCIFTYGQTGTGKTYSMEGPPEDPGIVPRALQSLFREMGAGRQHRVTLSMVEIYNEAVRDLLAPGPPERLAVRQGPEGQGGIQVAGLTHWDVPNLETLHQMLKLGRSNRATAATAMNQRSSRSHALVTLTLRAASPPRAPGTAGTTAVPEPCGVSRAPEARPSPMSGSLAPLGTLHLVDLAGSERARKAGAAGPPRGDPDGARRLREAQTINRSLLALGGVMAALRAHRPHVPFRDSQLTRLLQPALGPGTTAVLLLQISTRPEDLGETVCSLKFADRVGQVELGPARRRRVPRSSGTPSSLSTDTPLTGTPCTPTPSPGSPPCPSPDNGSGSALAPAEGLPL

SEQ ID NO: 803238 - protein, 819 aa, Homo sapiens; identical to SEQ ID NO: 803236

SEQ ID NO: 803239 - protein, 819 aa, Homo sapiens; identical to SEQ ID NO: 803236

SEQ ID NO: 803240 - protein, 489 aa, Homo sapiens
RHCGGRAPSLGAGTRGGAKRGPLPPRAPMYAFYSLLIYIFYSLFRRDGGAAAAAEPGDPAQRARKPRGRRRPDLPAPELWTELTGLAASSEPEDGSEGAAEGRAAAVSLEEALLRLAEFLSVQLGAEESCGGPADLGQSGEVPSLLTVTSQLLALLAWLRSPRGRQALLQGTQPAPRVRPPSPDGSTSQEESPSHFTAVPGEPLGDETQGQQPLQLEEDQRAWQRLEQLILGQLEELKQQLEQQEEELGRLRLGVGATDSEKRVQHLTLENEALKQSLSLMRDLLLHWGPGPPIRAPQEEAEALLELQGRLQEAQDTTEALRAQLGVQEVQLQGLQGALQQLQQETEQNCRRELQQMHGQLAGKGWGVGLMGGPGGWAFPSNRLPSPGLRARMASLRQGCGDLRGLVSTFTQSCQGSLSEARGQVSWALGALSSGGPGTQLPEGQQGPPAGCPGRLPELKGNIRVLCRLRPGTSCFAAECRKNRHDRPG

SEQ ID NO: 803241 - protein, 389 aa, Homo sapiens
RHCGGRAPSLGAGTRGGAKRGPLPPRAPMYAFYSLLIYIFYSLFRRDGGAAAAAEPGDPAQRARKPRGRRRPDLPAPELWTELTGLAASSEPEDGSEGAAEGRAAAVSLEEALLRLAEFLSVQLGAEESCGGPADLGQSGEVPSLLTVTSQLLALLAWLRSPRGRQALLQGTQPAPRVRPPSPDGSTSQEESPSHFTAVPGEPLGDETQGQQPLQLEEDQRAWQRLEQLILGQVRSLEPEGIAGWDARKRRSTLSLFTSPQLEELKQQLEQQEEELGRLRLGVVRLQGDLAGPGMEGVLQVSAEVSSPPGGDGLREKGSASDSGERGPEAEPESHAGPPAALGPRAPHQGSAGGGGGIARAPGPASGGPRHHRSPPSPGGHGAQGSMAQ

SEQ ID NO: 803242 - protein, 920 aa, Homo sapiens
RHCGGRAPSLGAGTRGGAKRGPLPPRAPMYAFYSLLIYIFYSLFRRDGGAAAAAEPGDPAQRARKPRGRRRPDLPAPELWTELTGLAASSEPEDGSEGAAEGRAAAVSLEEALLRLAEFLSVQLGAEESCGGPADLGQSGEVPSLLTVTSQLLALLAWLRSPRGRQALLQGTQPAPRVRPPSPDGSTSQEESPSHFTAVPGEPLGDETQGQQPLQLEEDQRAWQRLEQLILGQLEELKQQLEQQEEELGRLRLGVGATDSEKRVQHLTLENEALKQSLSLMRDLLLHWGPGPPIRAPQEEAEALLELQGRLQEAQDTTEALRAQLGVQEVQLQGLQGALQQLQQETEQNCRRELQQMHGQLAGKGWGVGLMGGPGGWAFPSNRLPSPGLRARMASLRQGCGDLRGLVSTFTQSCQGSLSEARGQVSWALGALSSGGPGTQLPEGQQGPPAGCPGRLPELKGNIRVLCRLRPGTSSSLVSVEPGPGGTVTTCYRGRHRRFRLDWVFPPDASQEEVFRELEPAVLSCLRGYSVCIFTYGQTGTGKTYSMEGPPEDPGIVPRALQSLFREMGAGRQHRVTLSMVEIYNEAVRDLLAPGPPERLAVRQGPEGQGGIQVAGLTHWDVPNLETLHQMLKLGRSNRATAATAMNQRSSRSHALVTLTLRAASPPRAPGTAGTTAVPEPCGVSRAPEARPSPMSGSLAPLGTLHLVDLAGSERARKAGAAGPPRGDPDGARRLREAQTINRSLLALGGVMAALRAHRPHVPFRDSQLTRLLQPALGPGTTAVLLLQVGAGAGQVCACRSPPTRARPPAPLARRSPRGRRISGRQSAPSSSPTEWVKWSWGQPGAAGSRAPPGRLLPSAPTLRSPGPPAPLRRPLAVLHAPVPTTARARLSRPQRACPSSPGSRPCPWGLRPGLCWQRR

SEQ ID NO: 803243 - protein, 421 aa, Homo sapiens
MLLLKRLLVSSANGVFRELEPAVLSCLRGYSVCIFTYGQTGTGKTYSMEGPPEDPGIVPRALQSLFREMGAGRQHRVTLSMVEIYNEAVRDLLAPGPPERLAVRQGPEGQGGIQVAGLTHWDVPNLETLHQMLKLGRSNRATAATAMNQRSSRSHALVTLTLRAASPPRAPGTAGTTAVPEPCGVSRAPEARPSPMSGSLAPLGTLHLVDLAGSERARKAGAAGPPRGDPDGARRLREAQTINRSLLALGGVMAALRAHRPHVPFRDSQLTRLLQPALGPGTTAVLLLQVGAGAGQVCACRSPPTRARPPAPLARRSPRGRRISGRQSAPSSSPTEWVKWSWGQPGAAGSRAPPGRLLPSAPTLRSPGPPAPLRRPLAVLHAPVPTTARARLSRPQRACPSSPGSRPCPWGLRPGLCWQRR

SEQ ID NO: 803244 - protein, 866 aa, Homo sapiens
RHCGGRAPSLGAGTRGGAKRGPLPPRAPMYAFYSLLIYIFYSLFRRDGGAAAAAEPGDPAQRARKPRGRRRPDLPAPELWTELTGLAASSEPEDGSEGAAEGRAAAVSLEEALLRLAEFLSVQLGAEESCGGPADLGQSGEVPSLLTVTSQLLALLAWLRSPRGRQALLQGTQPAPRVRPPSPDGSTSQEESPSHFTAVPGEPLGDETQGQQPLQLEEDQRAWQRLEQLILGQLEELKQQLEQQEEELGRLRLGVGATDSEKRVQHLTLENEALKQSLSLMRDLLLHWGPGPPIRAPQEEAEALLELQGRLQEAQDTTEALRAQLGVQEVQLQGLQGALQQLQQETEQNCRRELQQMHGQLAGLRARMASLRQGCGDLRGLVSTFTQSCQGSLSEARGQVSWALGALSSGGPGTQLPEGQQGPPAGCPGRLPELKGNIRVLCRLRPGTSSSLVSVEPGPGGTVTTCYRGRHRRFRLDWVFPPDASQEEVFRELEPAVLSCLRGYSVCIFTYGQTGTGKTYSMEGPPEDPGIVPRALQSLFREMGAGRQHRVTLSMVEIYNEAVRDLLAPGPPERLAVRQGPEGQGGIQVAGLTHWDVPNLETLHQMLKLGRSNRATAATAMNQRSSRSHALVTLTLRAASPPRAPGTAGTLHLVDLAGSERARKAGAAGPPRGDPDGARRLREAQTINRSLLALGGVMAALRAHRPHVPFRDSQLTRLLQPALGPGTTAVLLLQVGAGAGQVCACRSPPTRARPPAPLARRSPRGRRISGRQSAPSSSPTEWVKWSWGQPGAAGSRAPPGRLLPSAPTLRSPGPPAPLRRPLAVLHAPVPTTARARLSRPQRACPSSPGSRPCPWGLRPGLCWQRR

SEQ ID NO: 803245 - protein, 269 aa, Homo sapiens
DASPTRRIYNEAVRDLLAPGPPERLAVRQGPEGQGGIQVAGLTHWDVPNLETLHQMLKLGRSNRATAATAMNQRSSRSHALVTLTLRAASPPRAPGTAGTLHLVDLAGSERARKAGAAGPPRGDPDGARRLREAQTINRSLLALGGVMAALRAHRPHVPFRDSQLTRLLQPALGPGTTAVLLLQISTRPEDLGETVCSLKFADRVGQVELGPARRRRVPRSSGTPSSLSTDTPLTGTPCTPTPSPGSPPCPSPDNGSGSALAPAEGLPL

SEQ ID NO: 803246 - protein, 819 aa, Homo sapiens; identical to SEQ ID NO: 803236

SEQ ID NO: 803247 - protein, 85 aa, Homo sapiens
KRVQHLTLENEALKQSLSLMRDLLLHWGPGPPIRAPQVLCSRAAAVPAAWGSCTPGMQPQGPSLLRTSRDGLCRAAPSGRLMPMG

SEQ ID NO: 803248 - protein, 96 aa, Homo sapiens
CSEWGYGGPNRDGSGRGGSWVLTQVVGARPELGNLEPQGSRWNPQDLLIAQGAPSVSEVPRNKATGRIITPTDSTAIRTPARAKDPITAGALERVR

SEQ ID NO: 803249 - protein, 126 aa, Homo sapiens
LTWLQGEPTSQWPQRRSWQDWVMLGRGRCPQRSGGTEEPPPPNSCRHCSWRCWVPGPQERLQDVHSPASQLQAPAGQGRGGDIDEMCGAAVAAEMEDTLDVGASEPGDVALSAEFRTQGDPQPSSH

SEQ ID NO: 803250 - protein, 212 aa, Homo sapiens
GRSWRGWFGVGAVGSRQINMESIFHEKQEGSLCAQHCLNNLLQGEYFSPVELSSIAHQLDEEERMRMAEGGVTSEDYRTFLQQPSGNMDDSGFFSIQVISNALKVWGLELILFNSPEYQRLRIDPINERSFICNYKEHWFTVRKLGKQWFNLNSLLTGPELISDKCTVAVPLAQDPALQPFCVCSLVKFICCYYTHRPSCLVVRKAGLPKHC

SEQ ID NO: 803251 - protein, 325 aa, Homo sapiens
GRSWRGWFGVGAVGSRQINMESIFHEKQPSGNMDDSGFFSIQVISNALKVWGLELILFNSPEYQRLRIDPINERSFICNYKEHWFTVRKLGKQWFNLNSLLTGPELISDTYLALFLAQLQQEGYSIFVVKGDLPDCEADQLLQMIRVQQMHRPKLIGEELAQLKEQRVHKTDLERVLEANDGSGMLDEDEEDLQRALALSRQEIDMEDEEADLRRAIQLSMQGSSRNISQDMTQTSGTNLTSEELRKRREAYFEKQQQKQQQQQQQQQQGDLSGQSSHPCERPATSSGALGSDLGDAMSEEDMLQAAVTMSLETVRNDLKTEGKK

SEQ ID NO: 803252 - protein, 391 aa, Homo sapiens
GRSWRGWFGVGAVGSRQINMESIFHEKQEGSLCAQHCLNNLLQGEYFSPVELSSIAHQLDEEERMRMAEGGVTSEDYRTFLQVISNALKVWGLELILFNSPEYQRLRIDPINERSFICNYKEHWFTVRKLGKQWFNLNSLLTGPELISDTYLALFLAQLQQEGYSIFVVKGDLPDCEADQLLQMIRVQQMHRPKLIGEELAQLKEQSPKQTGRCEAMWGRCSKKGLRRACKSNVVKGDLGLRAGPHLGRRNMRETKSVFLLRPPALYLFFLSFSRTKNSTRDGRDESPDRTAGTTAPEQTSTATQRRETGTRRSEPAHSEEPRREQGTPRARATRKRRGAQEEEGGGREGRDEERAREQRAGGEGDRGGEGRRASASTRREKTADQSRTDD

SEQ ID NO: 803253 - protein, 148 aa, Homo sapiens
GRSWRGWFGVGAVGSRQINMESIFHEKQEGSLCAQHCLNNLLQGEYFSPVELSSIAHQLDEEERMRMAEGGVTSEDYRTFLQQPSGNMDDSGFFSIQVISNALKVWGLELILFNSPEYQRLRIDPILSYFTFVMSMSICPVAFLAPQC

SEQ ID NO: 803254 - protein, 273 aa, Homo sapiens
MTVVFSLFRNERSFICNYKEHWFTVRKLGKQWFNLNSLLTGPELISDTYLALFLAQLQQEGYSIFVVKGDLPDCEADQLLQMIRVQQMHRPKLIGEELAQLKEQRVHKTDLERVLEANDGSGMLDEDEEDLQRALALSRQEIDMEDEEADLRRAIQLSMQGSSRNISQDMTQTSGTNLTSEELRKRREAYFEKQQQKQQQQQQQQQKQQQQQQQQQQGDLSGQSSHPCERPATSSGALGSDLGDAMSEEDMLQAAVTMSLETVRNDLKTEGKK

SEQ ID NO: 803255 - protein, 402 aa, Homo sapiens
GRSWRGWFGVGAVGSRQINMESIFHEKQEGSLCAQHCLNNLLQGEYFSPVELSSIAHQLDEEERMRMAEGGVTSEDYRTFLQQPSGNMDDSGFFSIQVISNALKVWGLELILFNSPEYQRLRIDPINERSFICNYKEHWFTVRKLGKQWFNLNSLLTGPELISDTYLALFLAQLQQEGYSIFVVKGDLPDCEADQLLQMIRVQQMHRPKLIGEELAQLKEQRVHKTDLERVLEANDGSGMLDEDEEDLQRALALSRQEIDMEDEEADLRRAIQLSMQGSSRNISQDMTQTSGTNLTSEELRKRREAYFEKQQQKQQQQQQQQQQQQQQQQQQQQQKQQQQQQQQQQGDLSGQSSHPCERPATSSGALGSDLGDAMSEEDMLQAAVTMSLETVRNDLKTEGKK

SEQ ID NO: 803256 - protein, 257 aa, Homo sapiens
MTVVFSLFRNERSFICNYKEHWFTVRKLGKQTYLALFLAQLQQEGYSIFVVKGDLPDCEADQLLQMIRVQQMHRPKLIGEELAQLKEQRVHKTDLERVLEANDGSGMLDEDEEDLQRALALSRQEIDMEDEEADLRRAIQLSMQGSSRNISQDMTQTSGTNLTSEELRKRREAYFEKQQQKQQQQQQQQQKQQQQQQQQQQGDLSGQSSHPCERPATSSGALGSDLGDAMSEEDMLQAAVTMSLETVRNDLKTEGKK

SEQ ID NO: 803257 - protein, 405 aa, Homo sapiens
GRSWRGWFGVGAVGSRQINMESIFHEKQEGSLCAQHCLNNLLQGEYFSPVELSSIAHQLDEEERMRMAEGGVTSEDYRTFLQQPSGNMDDSGFFSIQVISNALKVWGLELILFNSPEYQRLRIDPINERSFICNYKEHWFTVRKLGKQWFNLNSLLTGPELISDTYLALFLAQLQQEGYSIFVVKGDLPDCEADQLLQMIRVQQMHRPKLIGEELAQLKEQRVHKTDLERVLEANDGSGMLDEDEEDLQRALALSRQEIDMEDEEADLRRAIQLSMQGSSRNISQDMTQTSGTNLTSEELRKRREAYFEKQQQKQQQQQQQQQQQQQQQQQQQQQKQQQQQQQQQQGDLSGQSSHPCERPATSSGALGSDLGKACSPFIMFATFTLYLTYELHVIFALHYSSFPL

SEQ ID NO: 803258 - protein, 380 aa, Homo sapiens
GRSWRGWFGVGAVGSRQINMESIFHEKQEGSLCAQHCLNNLLQGEYFSPVELSSIAHQLDEEERMRMAEGGVTSEDYRTFLQQPSGNMDDSGFFSIQVISNALKVWGLELILFNSPEYQRLRIDPINERSFICNYKEHWFTVRKLGKQWFNLNSLLTGPELISDTYLALFLAQLQQEGYSIFVVKGDLPDCEADQLLQMIRVQQMHRPKLIGEELAQLKEQRVHKTDLERVLEANDGSGMLDEDEEDLQRALALSRQEIDMEDEEADLRRAIQLSMQGSSRNISQDMTQTSGTNLTSEELRKRREAYFEKQQQKQQQQQQQQQQGDLSGQSSHPCERPATSSGALGSDLGDAMSEEDMLQAAVTMSLETVRNDLKTEGKK

SEQ ID NO: 803259 - protein, 335 aa, Homo sapiens
GRSWRGWFGVGAVGSRQINMESIFHEKQEGSLCAQHCLNNLLQGEYFSPVELSSIAHQLDEEERMRMAEGGVTSEDYRTFLQQPSGNMDDSGFFSIQVISNALKVWGLELILFNSPEYQRLRIDPINERSFICNYKEHWFTVRKLGKQWFNLNSLLTGPELISDTYLALFLAQLQQEGYSIFVVKGDLPDCEADQLLQMIRVQQMHRPKLIGEELAQLKEQRVHKTDLERVLEANDGSGMLDEDEEDLQRALALSRQEIDMEDEEADLRRAIQLSMQGSSRNISQDMTQTSGTNLTSEELRKRREAYFEKAAAKAATAAAAAAAGGPIRTEFTSM

SEQ ID NO: 803260 - protein, 390 aa, Homo sapiens
GRSWRGWFGVGAVGSRQINMESIFHEKQEGSLCAQHCLNNLLQGEYFSPVELSSIAHQLDEEERMRMAEGGVTSEDYRTFLQQPSGNMDDSGFFSIQVISNALKVWGLELILFNSPEYQRLRIDPINERSFICNYKEHWFTVRKLGKQWFNLNSLLTGPELISDTYLALFLAQLQQEGYSIFVVKGDLPDCEADQLLQMIRVQQMHRPKLIGEELAQLKEQRVHKTDLERVLEANDGSGMLDEDEEDLQRALALSRQEIDMEDEEADLRRAIQLSMQGSSRNISQDMTQTSGTNLTSEELRKRREAYFEKQQQKQQQQQQQQQKQQQQQQQQQQGDLSGQSSHPCERPATSSGALGSDLGDAMSEEDMLQAAVTMSLETVRNDLKTEGKK

SEQ ID NO: 803261 - protein, 356 aa, Homo sapiens
PSFTRNTRQEGSLCAQHCLNNLLQGEYFSPVELSSIAHQLDEEERMRMAEGGVTSEDYRTFLQVISNALKVWGLELILFNSPEYQRLRIDPINERSFICNYKEHWFTVRKLGKQWFNLNSLLTGPELISDTYLALFLAQLQQEGYSIFVVKGDLPDCEADQLLQMIRVQQMHRPKLIGEELAQLKEQRVHKTDLERVLEANDGSGMLDEDEEDLQRALALSRQEIDMEDEEADLRRAIQLSMQGSSRNISQDMTQTSGTNLTSEELRKRREAYFEKQQQKQQQQQQQQQKQQQQQQQQQQGDLSGQSSHPCERPATSSGALGSDLGDAMSEEDMLQAAVTMSLETVRNDLKTEGKK

SEQ ID NO: 803262 - protein, 212 aa, Homo sapiens; identical to SEQ ID NO: 803250

SEQ ID NO: 803263 - protein, 183 aa, Homo sapiens
RGFRFYVRHTEKVQDGTLCQPGAPDICVAGRCLSPGCDGILGSGRRPDGCGVCGGDDSTCRLVSGNLTDRGGPLGYQKILWIPAGALRLQIAQLRPSSNYLALRGPGGRSIINGNWAVDPPGSYRAGGTVFRYNRPPREEGKGESLSAEGPNTQPVDVYMIFQEENPGVFYQYVISSPPPILE

SEQ ID NO: 803264 - protein, 76 aa, Homo sapiens
SYSPRLLQSQATLRHRVPGFQRSPDPVCPTESGQSQRGSARPGGKVNPSRRLKPTGGRPPGPLGRLRQEDRVSPGD

SEQ ID NO: 803265 - protein, 173 aa, Homo sapiens
GWWDWAQVPTASSASARTFWSPPPDRDPGGPSPFFRRGVGASRTLGSSRPSGSPFTVQDLSCTLALTPCFPGLSMAGYQLWSPWTPLDESFQWLRHTTPTPSSKHPFKASPCFPHTPSDLEVQLCFQEVTLVLDSPFLESGRWSFTTLPKLVLNSWTQAMPWPRPPKVLGLQR

SEQ ID NO: 803266 - protein, 251 aa, Homo sapiens
GWWDWAQVPTASSASARTFWSPPPDRDPGGPSPFFRRGVGASRTLGSSRPSGSPFTVQDLSCTLALTPCFPGLSMAGYQLWSPWTPLDESFQWLRHTTPTPSSKHPFKASPCFPHTPSDLEVQLCFQEVTLVLDSPFLESGVSPKLPCHTSELRTMNNKGLVRKPQPIRLSGVDSVFGRVITAQPPKWTGTFRVSDKSAFCKIISREHQWPIGLKEPQIQMTVTMCKQMLRSILLLYATYKKCTFALQHSK

SEQ ID NO: 803267 - protein, 70 aa, Homo sapiens
PSARHSPDPGVKSGICAVNIWPRSCPPRLGCPSQGKDMRRALSQSGRFCGCRHCGAWVCRRGRFSGGRDR

SEQ ID NO: 803268 - protein, 875 aa, Homo sapiens
MERAGPSFGQQRQQQQPQQQKQQQRDQDSVEAWLDDHWDFTFSYFVRKATREMVNAWFAERVHTIPVCKEGIRGHTESCSCPLQQSPRADNSVPGTPTRKISASEFDRPLRPIVVKDSEGTVSFLSDSEKKEQMPLTPPRFDHDEGDQCSRLLELVKDISSHLDVTALCHKIFLHIHGLISADRYSLFLVCEDSSNDKFLISRLFDVAEGSTLEEVSNNCIRLEWNKGIVGHVAALGEPLNIKDAYEDPRFNAEVDQITGYKTQSILCMPIKNHREEVVGVAQAINKKSGNGGTFTEKDEKDFAAYLAFCGIVLHNAQLYETSLLENKRNQVLLDLASLIFEEQQSLEVILKKIAATIISFMQVQKCTIFIVDEDCSDSFSSVFHMECEELEKSSDTLTREHDANKINYMYAQYVKNTMEPLNIPDVSKDKRFPWTTENTGNVNQQCIRSLLCTPIKNGKKNKVIGVCQLVNKMEENTGKVKPFNRNDEQFLEAFVIFCGLGIQNTQMYEAVERAMAKQMVTLEVLSYHASAAEEETRELQSLAAAVVPSAQTLKITDFSFSDFELSDLETALCTIRMFTDLNLVQNFQMKHEVLCRWILSVKKNYRKNVAYHNWRHAFNTAQCMFAALKAGKIQNKLTDLEILALLIAALSHDLDHRGVNNSYIQRSEHPLAQLYCHSIMEHHHFDQCLMILNSPGNQILSGLSIEEYKTTLKIIKQAILATDLALYIKRRGEFFELIRKNQFNLEDPHQKELFLAMLMTACDLSAITKPWPIQQRIAELVATEFFDQGDRERKELNIEPTDLMNREKKNKIPSMQVGFIDAICLQLYEALTHVSEDCFPLLDGCRKNRQKWQALAEQQEKMLINGESGQAKRN

SEQ ID NO: 803269 - protein, 948 aa, Homo sapiens
DKKSGAESAWRAGAPKPEELMHSRGAWTPGRAPLQKESVPRCRLLWAAAVGQRVLPLGREVTHAGSDGRGAARRFDCPRSHFAWRAGRGSCRVASPGGRRSAGRAGGDGRRRGGRGREGAGSESPTSPHLTCARCCPYGASWSPGSAEFENELPTFAMLPFGDKTREMVNAWFAERVHTIPVCKEGIRGHTESCSCPLQQSPRADNSVPGTPTRKISASEFDRPLRPIVVKDSEGTVSFLSDSEKKEQMPLTPPRFDHDEGDQCSRLLELVKDISSHLDVTALCHKIFLHIHGLISADRYSLFLVCEDSSNDKFLISRLFDVAEGSTLEEVSNNCIRLEWNKGIVGHVAALGEPLNIKDAYEDPRFNAEVDQITGYKTQSILCMPIKNHREEVVGVAQAINKKSGNGGTFTEKDEKDFAAYLAFCGIVLHNAQLYETSLLENKRNQVLLDLASLIFEEQQSLEVILKKIAATIISFMQVQKCTIFIVDEDCSDSFSSVFHMECEELEKSSDTLTREHDANKINYMYAQYVKNTMEPLNIPDVSKDKRFPWTTENTGNVNQQCIRSLLCTPIKNGKKNKVIGVCQLVNKMEENTGKVKPFNRNDEQFLEAFVIFCGLGIQNTQMYEAVERAMAKQMVTLEVLSYHASAAEEETRELQSLAAAVVPSAQTLKITDFSFSDFELSDLETALCTIRMFTDLNLVQNFQMKHEVLCRWILSVKKNYRKNVAYHNWRHAFNTAQCMFAALKAGKIQNKLTDLEILALLIAALSHDLDHRGVNNSYIQRSEHPLAQLYCHSIMEHHHFDQCLMILNSPGNQILSGLSIEEYKTTLKIIKQAILATDLALYIKRRGEFFELIRKNQFNLEDPHQKELFLAMLMTACDLSAITKPWPIQQRIAELVATEFFDQGDRERKELNIEPTDLMNREKKNKIPSMQVGFIDAICLQLYEVFI

SEQ ID NO: 803270 - protein, 612 aa, Homo sapiens
DKKSGAESAWRAGAPKPEELMHSRGAWTPGRAPLQKESVPRCRLLWAAAVGQRVLPLGREVTHAGSDGRGAARRFDCPRSHFAWRAGRGSCRVASPGGRRSAGRAGGDGRRRGGRGREGAGSESPTSPHLTCARCCPYGASWSPGSAEFENELPTFAMLPFGDKTREMVNAWFAERVHTIPVCKEGIRGHTESCSCPLQQSPRADNSVPGTPTRKISASEFDRPLRPIVVKDSEGTVSFLSDSEKKEQMPLTPPRFDHDEGDQCSRLLELVKDISSHLDVTALCHKIFLHIHGLISADRYSLFLVCEDSSNDKFLISRLFDVAEGSTLEEVSNNCIRLEWNKGIVGHVAALGEPLNIKDAYEDPRFNAEVDQITGYKTQSILCMPIKNHREEVVGVAQAINKKSGNGGTFTEKDEKDFAAYLAFCGIVLHNAQLYETSLLENKRNQVLLDLASLIFEEQQSLEVILKKIAATIISFMQVQKCTIFIVDEDCSDSFSSVFHMECEELEKSSDTLTREHDANKINYMYAQYVKNTMEPLNIPDVSKDKRFPWTTENTGNVNQQCIRSLLCTPIKNGKKNKVIGKTFPLTYTLNLFLKMYSQLYFFLSNVKNKMF

SEQ ID NO: 803271 - protein, 643 aa, Homo sapiens
DKKSGAESAWRAGAPKPEELMHSRGAWTPGRAPLQKESVPRCRLLWAAAVGQRVLPLGREVTHAGSDGRGAARRFDCPRSHFAWRAGRGSCRVASPGGRRSAGRAGGDGRRRGGRGREGAGSESPTSPHLTCARCCPYGASWSPGSAEFENELPTFAMLPFGDKTREMVNAWFAERVHTIPVCKEGIRGHTESCSCPLQQSPRADNSVPGTPTRKISASEFDRPLRPIVVKDSEGTVSFLSDSEKKEQMPLTPPRFDHDEGDQCSRLLELVKDISSHLDVTALCHKIFLHIHGLISADRYSLFLVCEDSSNDKFLISRLFDVAEGSTLEEVSNNCIRLEWNKGIVGHVAALGEPLNIKDAYEDPRFNAEVDQITGYKTQSILCMPIKNHREEVVGVAQAINKKSGNGGTFTEKDEKDFAAYLAFCGIVLHNAQLYETSLLENKRNQVLLDLASLIFEEQQSLEVILKKIAATIISFMQVQKCTIFIVDEDCSDSFSSVFHMECEELEKSSDTLTREHDANKINYMYAQYVKNTMEPLNIPDVSKDKRFPWTTENTGNVNQQCIRSLLCTPIKNGKKNKVIGVCQLVNKMEENTGKVKPFNRNDEQFLEAFVIFCGLGIQNTQMYEAVERAMAKQMVTLEVGEV

SEQ ID NO: 803272 - protein, 875 aa, Homo sapiens; identical to SEQ ID NO: 803268

SEQ ID NO: 803273 - protein, 990 aa, Homo sapiens
DKKSGAESAWRAGAPKPEELMHSRGAWTPGRAPLQKESVPRCRLLWAAAVGQRVLPLGREVTHAGSDGRGAARRFDCPRSHFAWRAGRGSCRVASPGGRRSAGRAGGDGRRRGGRGREGAGSESPTSPHLTCARCCPYGASWSPGSAEFENELPTFAMLPFGDKTREMVNAWFAERVHTIPVCKEGIRGHTESCSCPLQQSPRADNSVPGTPTRKISASEFDRPLRPIVVKDSEGTVSFLSDSEKKEQMPLTPPRFDHDEGDQCSRLLELVKDISSHLDVTALCHKIFLHIHGLISADRYSLFLVCEDSSNDKFLISRLFDVAEGSTLEEVSNNCIRLEWNKGIVGHVAALGEPLNIKDAYEDPRFNAEVDQITGYKTQSILCMPIKNHREEVVGVAQAINKKSGNGGTFTEKDEKDFAAYLAFCGIVLHNAQLYETSLLENKRNQVLLDLASLIFEEQQSLEVILKKIAATIISFMQVQKCTIFIVDEDCSDSFSSVFHMECEELEKSSDTLTREHDANKINYMYAQYVKNTMEPLNIPDVSKDKRFPWTTENTGNVNQQCIRSLLCTPIKNGKKNKVIGVCQLVNKMEENTGKVKPFNRNDEQFLEAFVIFCGLGIQNTQMYEAVERAMAKQMVTLEVLSYHASAAEEETRELQSLAAAVVPSAQTLKITDFSFSDFELSDLETALCTIRMFTDLNLVQNFQMKHEVLCRWILSVKKNYRKNVAYHNWRHAFNTAQCMFAALKAGKIQNKLTDLEILALLIAALSHDLDHRGVNNSYIQRSEHPLAQLYCHSIMEHHHFDQCLMILNSPGNQILSGLSIEEYKTTLKIIKQAILATDLALYIKRRGEFFELIRKNQFNLEDPHQKELFLAMLMTACDLSAITKPWPIQQRIAELVATEFFDQGDRERKELNIEPTDLMNREKKNKIPSMQVGFIDAICLQLYEALTHVSEDCFPLLDGCRKNRQKWQALAEQQEKMLINGESGQAKRN

SEQ ID NO: 803274 - protein, 402 aa, Homo sapiens
MEENTGKVKPFNRNDEQFLEAFVIFCGLGIQNTQMYEAVERAMAKQMVTLEVLSYHASAAEEETRELQSLAAAVVPSAQTLKITDFSFSDFELSDLETALCTIRMFTDLNLVQNFQMKHEVLCRWILSVKKNYRKNVAYHNWRHAFNTAQCMFAALKAGKIQNKLTDLEILALLIAALSHDLDHRGVNNSYIQRSEHPLAQLYCHSIMEHHHFDQCLMILNSPGNQILSGLSIEEYKTTLKIIKQAILATDLALYIKRRGEFFELIRKNQFNLEDPHQKELFLAMLMTACDLSAITKPWPIQQRIAELVATEFFDQGDRERKELNIEPTDLMNREKKNKIPSMQVGFIDAICLQLYEALTHVSEDCFPLLDGCRKNRQKWQALAEQQEKMLINGESGQAKRN

SEQ ID NO: 803275 - protein, 172 aa, Homo sapiens
LNLTCAVASGPPRAHPCPGSAFPRCMLGSSPTCVGLYSDDFLLVILLAKLSLNILPKIFLLGAAAHACDANTLGGRGGRAAWGQKFKTSLGNLEPGPKTADPRTSHGVNCVGPVILTRLPMDFPPPLRQQDQPLSYLLLLLRLLNAKTTRRKTFMMIYLINSEYIFSSLGYS

SEQ ID NO: 803276 - protein, 180 aa, Homo sapiens
MMRHHTIYGRDDGGKGACLRGTVGTRQPGQPCPHPPGGQPCAESHLLFRKKISRPTRMRNRRMPTKAPAMTPVGRRHREPSERRSELLICLQPCPAFPLPQEPGPKTADPRTSHGVNCVGPVILTRLPMDFPPPLRQQDQPLSYLLLLLRLLNAKTTRRKTFMMIYLINSEYIFSSLGYS

SEQ ID NO: 803277 - protein, 116 aa, Homo sapiens
MTERPELQTSLGITSAERVLAMRLAEQVRMWGCPGTTSQKRRRGAEMWGCRRCPPATLLQGPKPQCNKARGPRDTAATLLLVTQVASDRATEGQLAALGFPCHFPLAGKWRQPDSL

SEQ ID NO: 803278 - protein, 391 aa, Homo sapiens
MDRGEFQQDSVLKQLEVLKEEEKEFQNLKDPTNGYYSVNTFKEHHSTPTISLSSCQPDLRPAGKQRVPTGMSFTNIYSTLSGQGRLYDYGQRFVLGMGSSSIELCEREFQRGSLSDSSSFLDTQCDSSVSSSGKQDGYVQFDKASKASASSSHHSQSSSQNSDPSRPLQRRMQLTSKDHTPRVGTGQGRGQGTFWLSRDEGYFAEDTRIGHFQDSLPAPLPLPSFEALIKHKSGSPGAVCQRWAGGETEQRLRLSALCLVLDTRVPGPFLEAPLPPALPTGTSGSYNSAFMKLRSTLWSLCGLYPSLTRSSTYPCACAPIQPWGEGDDVFPALSCPRNPGSPLLLIAHTLEADKPEMALAKGASLSPGWPGAHPQFVWCFVSILLQFCPWT

SEQ ID NO: 803279 - protein, 993 aa, Homo sapiens
MKPFQLDLLFVCFFLFSQELGLQKRGCCLVLGYMAKDKFRRMNEGQVYSFSQQPQDQVVVSGQPVTLLCAIPEYDGFVLWIKDGLALGVGRDLSSYPQYLVVGNHLSGEHHLKILRAELQDDAVYECQAIQAAIRSRPARLTVLVPPDDPVILGGPVISLRAGDPLNLTCHADNAKPAASIIWLRKGEVINGATYSKTLLRDGKRESIVSTLFISPGDVENGQSIVCRATNKAIPGGKETSVTIDIQHPPLVNLSVEPQPVLEDNVVTFHCSAKANPAVTQYRWAKRGQIIKEASGEVYRTTVDYTYFSEPVSCEVTNALGSTNLSRTVDVYFGPRMTTEPQSLLVDLGSDAIFSCAWTGNPSLTIVWMKRGSGVVLSNEKTLTLKSVRQEDAGKYVCRAVVPRVGAGEREVTLTVNGPPIISSTQTQHALHGEKGQIKCFIRSTPPPDRIAWSWKENVLESGTSGRYTVETISTEEGVISTLTISNIVRADFQTIYNCTAWNSFGSDTEIIRLKEQGSEMKSGAGLEAESVPMAVIIGVAVGAGVAFLVLMATIVAFCCARSQRNLKGVVSAKNDIRVEIVHKEPASGREGEEHSTIKQLMMDRGEFQQDSVLKQLEVLKEEEKEFQNLKDPTNGYYSVNTFKEHHSTPTISLSSCQPDLRPAGKQRVPTGMSFTNIYSTLSGQGRLYDYGQRFVLGMGSSSIELCEREFQRGSLSDSSSFLDTQCDSSVSSSGKQDGYVQFDKASKASASSSHHSQSSSQNSDPSRPLQRRMQLTSKDHTPRVGTGQGRGQGTFWLSRDEGYFAEDTRIGHFQDSLPAPLPLPSFEALIKHKSGSPGAVCQRWAGGETEQRLRLSALCLVLDTRVPGPFLEAPLPPALPTGTSGSYNSAFMKLRSTLWSLCGLYPSLTRSSTYPCACAPIQPWGEGDDVFPALSCPRNPGSPLLLIAHTLEADKPEMALAKGASLSPGWPGAHPQFVWCFVSILLQFCPWT

SEQ ID NO: 803280 - protein, 149 aa, Homo sapiens
VVGEHPAILAAASWWRREPACLRVRVCAKFSGSTPRSPRRPPPPSLRPPSPQCLGTCWRQSQGCCMRGRRGDRMTINIQEHMAINVCPGPIRPIRQISDYFPRGPGPEGGGGGGGEGSEHVVAPWGLGPCLQAYPLVAQQRPEEWVARR

SEQ ID NO: 803281 - protein, 400 aa, Homo sapiens
MRGRRGDRMTINIQEHMAINVCPGPIRPIRQISDYFPRGPGPEGGGGGGGEAPAHLVPLALAPPAALLGATTPEDGAEVDSYDSDDATALGTLEFDLLYDRASCTLHCSILRAKGLKPMDFNGLADPYVKLHLLPGACKANKLKTKTQRNTLNPVWNEDLTYSGITDDDITHKVLRIAVCDEDKLSHNEFIGEIRVPLRRLKPSQKKHFNICLERQVPLASPSSMSAALRGISCYLKELEQAEQGQGLLEERGRILLSLSYSSRRRGLLVGILRCAHLAAMDVNGYSDPYVKTYLRPDVDKKSKHKTCVKKKTLNPEFNEEFFYEIELSTLATKTLEVTVWDYDIGKSNDFIGGVSLGPGARGEARKHWSDCLQQPDAALERWHTLTSELPPAAGALSSA

SEQ ID NO: 803282 - protein, 400 aa, Homo sapiens; identical to SEQ ID NO: 803281

SEQ ID NO: 803283 - protein, 400 aa, Homo sapiens; identical to SEQ ID NO: 803281

SEQ ID NO: 803284 - protein, 400 aa, Homo sapiens; identical to SEQ ID NO: 803281

SEQ ID NO: 803285 - protein, 450 aa, Homo sapiens
SQWWAARVISPFVSSGCSTPRSPRRPPPPSLRPPSPQCLGTCWRQSQGCCMRGRRGDRMTINIQEHMAINVCPGPIRPIRQISDYFPRGPGPEGGGGGGGEAPAHLVPLALAPPAALLGATTPEDGAEVDSYDSDDATALGTLEFDLLYDRASCTLHCSILRAKGLKPMDFNGLADPYVKLHLLPGACKANKLKTKTQRNTLNPVWNEDLTYSGITDDDITHKVLRIAVCDEDKLSHNEFIGEIRVPLRRLKPSQKKHFNICLERQVPLASPSSMSAALRGISCYLKELEQAEQGQGLLEERGRILLSLSYSSRRRGLLVGILRCAHLAAMDVNGYSDPYVKTYLRPDVDKKSKHKTCVKKKTLNPEFNEEFFYEIELSTLATKTLEVTVWDYDIGKSNDFIGGVSLGPGARGEARKHWSDCLQQPDAALERWHTLTSELPPAAGALSSA

SEQ ID NO: 803286 - protein, 465 aa, Homo sapiens
LLPQIVRLPSLARETPRSPAGDSRRPPAPVNLSTPRSPRRPPPPSLRPPSPQCLGTCWRQSQGCCMRGRRGDRMTINIQEHMAINVCPGPIRPIRQISDYFPRGPGPEGGGGGGGEAPAHLVPLALAPPAALLGATTPEDGAEVDSYDSDDATALGTLEFDLLYDRASCTLHCSILRAKGLKPMDFNGLADPYVKLHLLPGACKANKLKTKTQRNTLNPVWNEDLTYSGITDDDITHKVLRIAVCDEDKLSHNEFIGEIRVPLRRLKPSQKKHFNICLERQVPLASPSSMSAALRGISCYLKELEQAEQGQGLLEERGRILLSLSYSSRRRGLLVGILRCAHLAAMDVNGYSDPYVKTYLRPDVDKKSKHKTCVKKKTLNPEFNEEFFYEIELSTLATKTLEVTVWDYDIGKSNDFIGGVSLGPGARGEARKHWSDCLQQPDAALERWHTLTSELPPAAGALSSA

SEQ ID NO: 803287 - protein, 69 aa, Homo sapiens
GLWYGPEFLGILDSALSSPAAAAQPAPAVPPVPGHLLEAEAGAGGWAGRGREGAGKRASLCALRGCSAL

SEQ ID NO: 803288 - protein, 400 aa, Homo sapiens; identical to SEQ ID NO: 803281

SEQ ID NO: 803289 - protein, 400 aa, Homo sapiens; identical to SEQ ID NO: 803281

SEQ ID NO: 803290 - protein, 448 aa, Homo sapiens
SPHFLGAPSLSARTASTPRSPRRPPPPSLRPPSPQCLGTCWRQSQGCCMRGRRGDRMTINIQEHMAINVCPGPIRPIRQISDYFPRGPGPEGGGGGGGEAPAHLVPLALAPPAALLGATTPEDGAEVDSYDSDDATALGTLEFDLLYDRASCTLHCSILRAKGLKPMDFNGLADPYVKLHLLPGACKANKLKTKTQRNTLNPVWNEDLTYSGITDDDITHKVLRIAVCDEDKLSHNEFIGEIRVPLRRLKPSQKKHFNICLERQVPLASPSSMSAALRGISCYLKELEQAEQGQGLLEERGRILLSLSYSSRRRGLLVGILRCAHLAAMDVNGYSDPYVKTYLRPDVDKKSKHKTCVKKKTLNPEFNEEFFYEIELSTLATKTLEVTVWDYDIGKSNDFIGGVSLGPGARGEARKHWSDCLQQPDAALERWHTLTSELPPAAGALSSA

SEQ ID NO: 803291 - protein, 282 aa, Homo sapiens
MDFNGLADPYVKLHLLPGACKANKLKTKTQRNTLNPVWNEDLTYSGITDDDITHKVLRIAVCDEDKLSHNEFIGEIRVPLRRLKPSQKKHFNICLERQVPLASPSSMSAALRGISCYLKELEQAEQGQGLLEERGRILLSLSYSSRRRGLLVGILRCAHLAAMDVNGYSDPYVKTYLRPDVDKKSKHKTCVKKKTLNPEFNEEFFYEIELSTLATKTLEVTVWDYDIGKSNDFIGGVSLGPGARGEARKHWSDCLQQPDAALERWHTLTSELPPAAGALSSA

SEQ ID NO: 803292 - protein, 98 aa, Homo sapiens
TQRDLGGDRGRACDGSGLSASAGLGKMLRPALPWLYLGLCSLLVGEAEAPSPVDPLERSRPYAVLRGQNLVLMGTIFSILLVTVILMAFCVYKPIRRR

SEQ ID NO: 803293 - protein, 113 aa, Homo sapiens
RRETWEETEAGLATEVASLLLQGWGRCCVQRYRGCTLASAASWWGRQRPRAPWIRWSGAGRTRCCEGRTWIKLFIEVLIRRDGCGVVCSSTFRGEVLLSQNSGESEMPNDVHK

SEQ ID NO: 803294 - protein, 98 aa, Homo sapiens; identical to SEQ ID NO: 803292

SEQ ID NO: 803295 - protein, 113 aa, Homo sapiens; identical to SEQ ID NO: 803293

SEQ ID NO: 803296 - protein, 102 aa, Homo sapiens
TQRDLGGDRGRACDGSGLSASAGLGKMLRPALPWLYLGLCSLLVGEAEAPSPVDPLERSRPYAVLRGQNLESLSPRLECNGAISARCNLRVWGSSDSPASAP

SEQ ID NO: 803297 - protein, 98 aa, Homo sapiens; identical to SEQ ID NO: 803292

SEQ ID NO: 803298 - protein, 319 aa, Homo sapiens
MGQGLWRVVRNQQLQQEGYSEQGYLTREQSRRMAASNISNTNHRKQVQGGIDIYHLLKARKSKEQEGFINLEMLPPELSFTILSYLNATDLCLASCVWQDLANDELLWQGLCKSTWGHCSIYNKNPPLGFSFRKLYMQLDEGSLTFNANPDEGVNYFMSKGILDDSPKEIAKFIFCTRTLNWKKLRIYLDERRDVLDDLVTLHNFRNQFLPNALREFFRHIHAPEERGEYLETLITKFSHRFCACNPDLMRELGLSPDAVYVLCYSLILLSIDLTSPHVKNKMSKREFIRNTRRAAQNISEDFVGHLYDNIYLIGHVAA

SEQ ID NO: 803299 - protein, 319 aa, Homo sapiens; identical to SEQ ID NO: 803298

SEQ ID NO: 803300 - protein, 358 aa, Homo sapiens
MGQGLWRVVRNQQLQQEGYSEQGYLTREQSRRMAASNISNTNHRKQVQGGIDIYHLLKARKSKEQEGFINLEMLPPELSFTILSYLNATDLCLASCVWQDLANDELLWQGLCKSTWGHCSIYNKNPPLGFSFRKLYMQLDEGSLTFNANPDEPQGTRFSKGHRSCHGYGYQAPQQLLAVAHGVGETSAQFVGVNYFMSKGILDDSPKEIAKFIFCTRTLNWKKLRIYLDERRDVLDDLVTLHNFRNQFLPNALREFFRHIHAPEERGEYLETLITKFSHRFCACNPDLMRELGLSPDAVYVLCYSLILLSIDLTSPHVKNKMSKREFIRNTRRAAQNISEDFVGHLYDNIYLIGHVAA

SEQ ID NO: 803301 - protein, 146 aa, Homo sapiens
MGQGLWRVVRNQQLQQEGYSEQGYLTREQSRRMAASNISNTNHRKQVQGGIDIYHLLKARKSKEQEGFINLEMLPPELSFTILSYLNATDLCLASCVWQDLANDELLWQGLCKSTWGHCSIYNKNPPLGFSFRKLYMQLDEGSLTE

SEQ ID NO: 803302 - protein, 319 aa, Homo sapiens; identical to SEQ ID NO: 803298

SEQ ID NO: 803303 - protein, 278 aa, Homo sapiens
MGQGLWRVVRNQQLQQEGYSEQGYLTREQSRRMAASNISNTNHRKQVQGGIDIYHLLKDLANDELLWQGLCKSTWGHCSIYNKNPPLGFSFRKLYMQLDEGSLTFNANPDEGVNYFMSKGILDDSPKEIAKFIFCTRTLNWKKLRIYLDERRDVLDDLVTLHNFRNQFLPNALREFFRHIHAPEERGEYLETLITKFSHRFCACNPDLMRELGLSPDAVYVLCYSLILLSIDLTSPHVKNKMSKREFIRNTRRAAQNISEDFVGHLYDNIYLIGHVAA

SEQ ID NO: 803304 - protein, 174 aa, Homo sapiens
GHSSPPGVSVRTAERGDLRPIPGAPCRLLGAHQAATSKEAGFKGPARQGEENGAYATIHSHQSPASRNQSLQPGACAQKRFSRRPFVFGIVGSCPPRTTARPSKLGASLCSRIPRCRFHTAFKTPVKSDSAESLLNGQSTSNLQLRSFSDLDGQSGSCYEVRNKESIANRKQQK

SEQ ID NO: 803305 - protein, 370 aa, Homo sapiens
MSASAATGVFVLSLSAIPVTYVFNHLAAQHDSWTIVGVAALILFLVALLARVLVKRKPPRDPLFYVYAVFGFTSVVNLIIGLEQDGIIDGFMTHYLREGEPYLNTAYGHMICYWDGSAHYLMYLVMVAAIAWEETYRTIGLYWVGSIIMSVVVFVPGNIVGKYGTRICPAFFLSIPYTCLPVWAGFRIYNQPSENYNYPSKVIQEAQAKDLLRRPFDLMLVVCLLLATGFCLFRGLIALDCPSELCRLYTQFQEPYLKDPAAYPKIQMLAYMFYSVPYFVTALYGLVVPGCSWMPDITLIHAGGLAQAQFSHIGASLHARTAYVYRVPEEAKILFLALNIAYGVLPQLLAYRCIYKPEFFIKTKAEEKVE

SEQ ID NO: 803306 - protein, 279 aa, Homo sapiens
MTHYLREGEPYLNTAYGHMICYWDGSAHYLMYLVMVAAIAWEETYRTIGLYWVGSIIMSVVVFVPGNIVGKYGTRICPAFFLSIPYTCLPVWAGFRIYNQPSENYNYPSKVIQEAQAKDLLRRPFDLMLVVCLLLATGFCLFRGLIALDCPSELCRLYTQFQEPYLKDPAAYPKIQMLAYMFYSVPYFVTALYGLVVPGCSWMPDITLIHAGGLAQAQFSHIGASLHARTAYVYRVPEEAKILFLALNIAYGVLPQLLAYRCIYKPEFFIKTKAEEKVE

SEQ ID NO: 803307 - protein, 145 aa, Homo sapiens
MSASAATGVFVLSLSAIPVTYVFNHLAAQHDSWTIVGVAALILFLVALLARVLVKRKPPRDPLFYVYAVFGFTSVVNLIIGLEQDGIIDGFMTHYLREGEPYLNTAYGHMICYWDGSAHYLMYLVMVAAIAWECWHICSILFLTL

SEQ ID NO: 803308 - protein, 312 aa, Homo sapiens
MSASAATGVFVLSLSAIPVTYVFNHLAAQHDSWTIVGVAALILFLVALLARVLVKRKPPRDPLFYVYAVFGFTSVVNLIIGLEQDGIIDGFMTHYLREGEPYLNTAYGHMICYWDGSAHYLMYLVMVAAIAWEETYRTIGLYWVGSIIMSVVVFVPGNIVGKYGTRICPAFFLSIPYTCLPVWAGFRIYNQPSENYNYPSKVIQEAQAKDLLRRPFDLMLVVCLLLATGFCLFRGLIALDCPSELCRLYTQFQEPYLKDPAAYPKIQMLAYMFYSVPYFVTALYGLVVPGCSWMPDITLIHAGGLAQPAAML

SEQ ID NO: 803309 - protein, 370 aa, Homo sapiens; identical to SEQ ID NO: 803305

SEQ ID NO: 803310 - protein, 175 aa, Homo sapiens
MSASAATGVFVLSLSAIPVTYVFNHLAAQHDSWTIVGVAALILFLVALLARVLVKRKPPRDPLFYVYAVFGFTSVVNLIIGLEQDGIIDGFMTHYLREGEPYLNTAYGHMICYWDGSAHYLMYLVMVAAIAWEETYRTIGLYWVGSIIMSVVVFVPGNIVGYSRSPSERPAEKTI

SEQ ID NO: 803311 - protein, 188 aa, Homo sapiens
MSASAATGVFVLSLSAIPVTYVFNHLAAQHDSWTIVGVAALILFLVALLARVLVKRKPPRDPLFYVYAVFGFTSVVNLIIGLEQDGIIDGFMTHYLREGEPYLNTAYGHMICYWDGSAHYLMYLVMVAAIAWEETYRTIGLYWVGSIIMSVVVFVPGNIVDAGIYVLFCSLLCDCTVWLSGSWMFLDA

SEQ ID NO: 803312 - protein, 132 aa, Homo sapiens
PGTNVFILIVTTSLFWSLQFLDYCRGCCPHPVPGSTAGSCPRQKKTTPGPTVLWYVSTKGNLLYLINNTILSASVTYSSLVVNTLSPLVTVAASVGVFQDNLALASGYCLSGSGLHPLPGGIPVESYCQARQ

SEQ ID NO: 803313 - protein, 255 aa, Homo sapiens
MSASKWRGALATEGYPVLLPSHSVKPCTCSFPQITIIFKAHHECTDQKVYQAVTDDLPAAFVDGTTSGGDSDAKSLRIVERESGHYVEMHARYIGTTVFVRQVGRYLTLAIRMPEDLAMSYEESQDLQLCVNGCPLSERIDDGQGQVSAILGHSLPRTSLVQAWPGYTLETANTQCHEKMPVKDIYFQSCVFDLLTTGDANFTAAAHSALEDVEALHPRKERWHIFPSSGNGTPRGGSDLSVSLGLTCLILIVFL

SEQ ID NO: 803314 - protein, 437 aa, Homo sapiens
MGLRAAPSSAAAAAAEVEQRRRPGLCPPPLELLLLLLFSLGLLHAGDCQQPAQCRIQKCTTDFVSLTSHLNSAVDGFDSEFCKALRAYAGCTQRTSKACRGNLVYHSAVLGISDLMSQRNCSKDGPTSSTNPEVTHDPCNYHSHAGAREHRRGDQNPPSYLFCGLFGDPHLRTFKDNFQTCKVEGAWPLIDNNYLSVQVTNVPVVPGSSATATNKITIIFKAHHECTDQKVYQAVTDDLPAAFVDGTTSGGDSDAKSLRIVERESGHYVEMHARYIGTTVFVRQVGRYLTLAIRMPEDLAMSYEESQDLQLCVNGCPLSERIDDGQGQVSAILGHSLPRTSLVQAWPGYTLETANTQCHEKMPVKDIYFQSCVFDLLTTGDANFTAAAHSALEDVEALHPRKERWHIFPSSGNGTPRGGSDLSVSLGLTCLILIVFL

SEQ ID NO: 803315 - protein, 437 aa, Homo sapiens; identical to SEQ ID NO: 803314

SEQ ID NO: 803316 - protein, 563 aa, Homo sapiens
PGRRWVVARAGPASWRSTPAEPTLAGAGVPARSGLVSAVAHGLCVFSSAPFPACRLRPPRCPCAPLLPPRTGCAGCALLAAAVVAPHLLHGPEEGRRGSEARPPAHAAATGPDPPSPEPTRPAWTGMGLRAAPSSAAAAAAEVEQRRRPGLCPPPLELLLLLLFSLGLLHAGDCQQPAQCRIQKCTTDFVSLTSHLNSAVDGFDSEFCKALRAYAGCTQRTSKACRGNLVYHSAVLGISDLMSQRNCSKDGPTSSTNPEVTHDPCNYHSHAGAREHRRGDQNPPSYLFCGLFGDPHLRTFKDNFQTCKVEGAWPLIDNNYLSVQVTNVPVVPGSSATATNKITIIFKAHHECTDQKVYQAVTDDLPAAFVDGTTSGGDSDAKSLRIVERESGHYVEMHARYIGTTVFVRQVGRYLTLAIRMPEDLAMSYEESQDLQLCVNGCPLSERIDDGQGQVSAILGHSLPRTSLVQAWPGYTLETANTQCHEKMPVKDIYFQSCVFDLLTTGDANFTAAAHSALEDVEALHPRKERWHIFPSSGNGTPRGGSDLSVSLGLTCLILIVFL

SEQ ID NO: 803317 - protein, 253 aa, Homo sapiens
MGLRAAPSSAAAAAAEVEQRRRPGLCPPPLELLLLLLFSLGLLHAGDCQQPAQCRIQKCTTDFVSLTSHLNSAVDGFDSEFCKALRAYAGCTQRTSKACRGNLVYHSAVLGISDLMSQRNCSKDGPTSSTNPEVTHDPCNYHSHAGAREHRRGDQNPPSYLFCGLFGDPHLRTFKDNFQTCKVEGAWPLIDNNYLSVQVTNVPVVPGSSATATNKVMSWLPDGEICVKSNQHPAGYTNKHSTKPEWMPSPSLE

SEQ ID NO: 803318 - protein, 437 aa, Homo sapiens; identical to SEQ ID NO: 803314

SEQ ID NO: 803319 - protein, 437 aa, Homo sapiens; identical to SEQ ID NO: 803314

SEQ ID NO: 803320 - protein, 69 aa, Homo sapiens
LSSLPVLPRSSPDGVGSNVKAHRSMETHLNIAHCCFPRFGLPITRALHAYPSTSYYGSSDLDYYYWPIH

SEQ ID NO: 803321 - protein, 171 aa, Homo sapiens
MGLRAAPSSAAAAAAEVEQRRRPGLCPPPLELLLLLLFSLGLLHAGDCQQPAQCRIQKCTTDFVSLTSHLNSAVDGFDSEFCKALRAYAGCTQRTSKACRGNLVYHSAVLGISDLMSQRNCSKDGPTSSTNPEVTHDPCNYHSHAGSSATATNKASIPSFFPLPTQLSKDV

SEQ ID NO: 803322 - protein, 277 aa, Homo sapiens
MANKANTSGDFEKDDDACKTEDSDDIHFEPVVQMPEKVELVTGEEGEKVLYSQGVKLFRFDAEISQWKERGLGNLKILKNEVNGKPRMLMRRDQVLKVCANHWITTTMNLKPLSGSDRAWMWLASDFSDGDAKLERLAAQFKTPELAEEFKQKFEECQRLLLDIPLQTPHKLVDTGRAAKLIQRAEEMKSGLKDFKTFLTNDQTKVTEEENKGSGTGAAGASDTTIKPNPENTGPTLEWDNYDLREDALDDNVSSSSVHDSPLASSPVRKGRPMGGR

SEQ ID NO: 803323 - protein, 754 aa, Homo sapiens
MANKANTSGDFEKDDDACKTEDSDDIHFEPVVQMPEKVELVTGEEGEKVLYSQGVKLFRFDAEISQWKERGLGNLKILKNEVNGKPRMLMRRDQVLKVCANHWITTTMNLKPLSGSDRAWMWLASDFSDGDAKLERLAAQFKTPELAEEFKQKFEECQRLLLDIPLQTPHKLVDTGRAAKLIQRAEEMKSGLKDFKTFLTNDQTKVTEEENKGSGTGAAGASDTTIKPNPENTGPTLEWDNYDLREDALDDNVSSSSVHDSPLASSPVRKNIFRFDESTTGFNFSFKSALSLSKSPAKLNQSGTSVGTDEESDVTQEEERDGQYFEPVVPLPDLVEVSSGEENEQVVFSHMAELYRYDKDVGQWKERGIGDIKILQNYDNKQVRIVMRRDQVLKLCANHRITPDMSLQNMKGTERVWVWTACDFADGERKVEHLAVRFKLQDVADSFKKIFDEAKTAQEKDSLITPHVSRSSTPRESPCGKIAVAVLEETTRERTDVIQGDDVADAASEVEVSSTSETTTKAVVSPPKFVFGSESVKRIFSSEKSNPFAFGNSSATGSLFGFSFNAPLKSNDSETSSVAQSGSESKVEPKKCELSKNSDIEQSSDSKVKNLSASFPMEESSINYTFKTPEKEPPLWHAEFTKEELVQKLSSTTKSADQLNGLLRETEATSAVLMEQIKLLKSEIRRLERNQEESAANVEHLKNVLLQFIFLKPGSERESLLPVINTMLQLSPEEKGKLAAVAQGLQETSIPKKK

SEQ ID NO: 803324 - protein, 547 aa, Homo sapiens
VRPRVFMAEGAAGASDTTIKPNPENTGPTLEWDNYDLREDALDDNVSSSSVHDSPLASSPVRKNIFRFDESTTGFNFSFKSALSLSKSPAKLNQSGTSVGTDEESDVTQEEERDGQYFEPVVPLPDLVEVSSGEENEQVVFSHMAELYRYDKDVGQWKERGIGDIKILQNYDNKQVRIVMRRDQVLKLCANHRITPDMSLQNMKGTERVWVWTACDFADGERKVEHLAVRFKLQDVADSFKKIFDEAKTAQEKDSLITPHVSRSSTPRESPCGKIAVAVLEETTRERTDVIQGDDVADAASEVEVSSTSETTTKAVVSPPKFVFGSESVKRIFSSEKSNPFAFGNSSATGSLFGFSFNAPLKSNDSETSSVAQSGSESKVEPKKCELSKNSDIEQSSDSKVKNLSASFPMEESSINYTFKTPEKEPPLWHAEFTKEELVQKLSSTTKSADQLNGLLRETEATSAVLMEQIKLLKSEIRRLERNQEESAANVEHLKNVLLQFIFLKPGSERESLLPVINTMLQLSPEEKGKLAAVAQGLQETSIPKKK

SEQ ID NO: 803325 - protein, 260 aa, Homo sapiens
GNGFCQLCENMAAAGLALLCRRVSSALKSSRSLITPQVPACTGFFLSLLPKSTPNVTSFHQYRLLHTTLSRKGLEEFFDDPKNWGQEKVKSGAAWTCQQLRNKSNEDLHKLWYVLLKERNMLLTLEQEAKRQRLPMPSPERLDKVVDSMDALDKVVQEREDALRLLQTGQERARPGAWRRDIFGRIIWHKFKQWVIPWHLNKRYNRKRFFALPYVDHFLRLEREKRARIKARKENLERKKAKILLKKFPHLAEAQKSSLV

SEQ ID NO: 803326 - protein, 260 aa, Homo sapiens; identical to SEQ ID NO: 803325

SEQ ID NO: 803327 - protein, 260 aa, Homo sapiens; identical to SEQ ID NO: 803325

SEQ ID NO: 803328 - protein, 140 aa, Homo sapiens
MLLTLEQEAKRQRLPMPSPERLDKVVDSMDALDKVVQEREDALRLLQTGQERARPGAWRRDIFGRIIWHKFKQWVIPWHLNKRYNRKRFFALPYVDHFLRLEREKRARIKARKENLERKKAKILLKKFPHLAEAQKSSLV

SEQ ID NO: 803329 - protein, 296 aa, Homo sapiens
GNGFCQLCENMAAAGLALLCRRVSSALKSSRSLITPQVPACTGFFLSLLPKSTPNVTSFHQYRLLHTTLSRKGLEEFFDDPKNWGQEKVKSGAAWTCQQLRNKSNEDLHKLWYVLLKERNMLLTLEQEAKRQRLPMPSPERLDKVVDSMDALDKVVQEREDALRLLQTGQERARPGAWRRDIFGRIIWHKFKQWVIPWHLNKRYNRKRFFALPYVDHFLSNAYGKAKVPELDQEVPTTEEDDATSQRQQPGEEPEPLCQADAGLQGQHQGQHRRHLPSLPKGVQRCQGWKLAGAGC

SEQ ID NO: 803330 - protein, 135 aa, Homo sapiens
RSSSVPVHMARPSPERLDKVVDSMDALDKVVQEREDALRLLQTGQERARPGAWRRDIFGRIIWHKFKQWVIPWHLNKRYNRKRFFALPYVDHFLRLEREKRARIKARKENLERKKAKILLKKFPHLAEAQKSSLV

SEQ ID NO: 803331 - protein, 140 aa, Homo sapiens; identical to SEQ ID NO: 803328

SEQ ID NO: 803332 - protein, 257 aa, Homo sapiens
RFYRIPAMAAAGLALLCRRVSSALKSSRSLITPQVPACTGFFLSLLPKSTPNVTSFHQYRLLHTTLSRKGLEEFFDDPKNWGQEKVKSGAAWTCQQLRNKSNEDLHKLWYVLLKERNMLLTLEQEAKRQRLPMPSPERLDKVVDSMDALDKVVQEREDALRLLQTGQERARPGAWRRDIFGRIIWHKFKQWVIPWHLNKRYNRKRFFALPYVDHFLRLEREKRARIKARKENLERKKAKILLKKFPHLAEAQKSSLV

SEQ ID NO: 803333 - protein, 140 aa, Homo sapiens; identical to SEQ ID NO: 803328

SEQ ID NO: 803334 - protein, 141 aa, Homo sapiens
LLEDPLYCKAKRQRLPMPSPERLDKVVDSMDALDKVVQEREDALRLLQTGQERARPGAWRRDIFGRIIWHKFKQWVIPWHLNKRYNRKRFFALPYVDHFLRLEREKRARIKARKENLERKKAKILLKKFPHLAEAQKSSLV

SEQ ID NO: 803335 - protein, 112 aa, Homo sapiens
MLLTLEQEAKRQRLPMPSPERLDKVVDSMDALDKVVQEREDALRLLQTGQERARPGAWRRDIFGRIIWHKFKQWVIPWHLNKRYNRKRFFALPYVDHFLRGKHQKHMGAFPK

SEQ ID NO: 803336 - protein, 892 aa, Homo sapiens
MACLHETRTPSPSFGGFVSTLSEASMRKLDPDTSDCTPEKDLTPTQCVLRDVVPLGGQGGGGPSPSPGGEPPPEPFANSVLQLHEQDAGGPGGAAGSPESRASRVRADEVRLQCQSGSGFLEGLFGCLRPVWTMIGKAYSTEHKQQQEDLWEVPFEEILDLQWVGSGAQGAVFLGRFHGEEVAVKKVRDLKETDIKHLRKLKHPNIITFKGVCTQAPCYCILMEFCAQGQLYEVLRAGRPVTPSLLVDWSMGIAGGMNYLHLHKIIHRDLKSPNMLITYDDVVKISDFGTSKELSDKSTKMSFAGTVAWMAPEVIRNEPVSEKVDIWSFGVVLWELLTGEIPYKDVDSSAIIWGVGSNSLHLPVPSSCPDGFKILLRQCWNSKPRNRPSFRQILLHLDIASADVLSTPQETYFKSQAEWREEVKLHFEKIKSEGTCLHRLEEELVMRRREELRHALDIREHYERKLERANNLYMELNALMLQLELKERELLRREQALERRCPGLLKPHPSRGLLHGNTMEKLIKKRNVPQKLSPHSKRPDILKTESLLPKLDAALSGVGLPGCPKGPPSPGRSRRGKTRHRKASAKGSCGDLPGLRTAVPPHEPGGPGSPGGLGGGPSAWEACPPALRGLHHDLLLRKMSSSSPDLLSAALGSRGRGATGGAGDPGSPPPARGDTPPSEGSAPGSTSPDSPGGAKGEPPPPVGPGEGVGLLGTGREGTSGRGGSRAGSQHLTPAALLYRAAVTRSQKRGISSEEEEGEVDSEVELTSSQRWPQSLNMRQSLSTFSSENPSDGEEGTASEPSPSGTPEVGSTNTDERPDERSDDMCSQGSEIPLDPPPSEVIPGPEPSSLPIPHQELLRERGPPNSEDSDCDSTELDNSNSVDALRPPASLPP

SEQ ID NO: 803337 - protein, 892 aa, Homo sapiens; identical to SEQ ID NO: 803336

SEQ ID NO: 803338 - protein, 385 aa, Homo sapiens
MKIYNYLKPGGRVGRPTRRNVPQKLSPHSKRPDILKTESLLPKLDAALSGVGLPGCPKGPPSPGRSRRGKTRHRKASAKGSCGDLPGLRTAVPPHEPGGPGSPGGLGGGPSAWEACPPALRGLHHDLLLRKMSSSSPDLLSAALGSRGRGATGGAGDPGSPPPARGDTPPSEGSAPGSTSPDSPGGAKGEPPPPVGPGEGVGLLGTGREGTSGRGGSRAGSQHLTPAALLYRAAVTRSQKRGISSEEEEGEVDSEVELTSSQRWPQSLNMRQSLSTFSSENPSDGEEGTASEPSPSGTPEVGSTNTDERPDERSDDMCSQGSEIPLDPPPSEVIPGPEPSSLPIPHQELLRERGPPNSEDSDCDSTELDNSNSVDALRPPASLPP

SEQ ID NO: 803339 - protein, 892 aa, Homo sapiens; identical to SEQ ID NO: 803336

SEQ ID NO: 803340 - protein, 64 aa, Homo sapiens
MLITYDDVVKISDFGTSKELSDKSTKMSFAGTVAWMAPEVIRNEPVSEKVDIWLRTRLKTEKSG

SEQ ID NO: 803341 - protein, 859 aa, Homo sapiens
MACLHETRTPSPSFGGFVSTLSEASMRKLDPDTSDCTPEKDLTPTHVLQLHEQDAGGPGGAAGSPESRASRVRADEVRLQCQSGSGFLEGLFGCLRPVWTMIGKAYSTEHKQQQEDLWEVPFEEILDLQWVGSGAQGAVFLGRFHGEEVAVKKVRDLKETDIKHLRKLKHPNIITFKGVCTQAPCYCILMEFCAQGQLYEVLRAGRPVTPSLLVDWSMGIAGGMNYLHLHKIIHRDLKSPNMLITYDDVVKISDFGTSKELSDKSTKMSFAGTVAWMAPEVIRNEPVSEKVDIWSFGVVLWELLTGEIPYKDVDSSAIIWGVGSNSLHLPVPSSCPDGFKILLRQCWNSKPRNRPSFRQILLHLDIASADVLSTPQETYFKSQAEWREEVKLHFEKIKSEGTCLHRLEEELVMRRREELRHALDIREHYERKLERANNLYMELNALMLQLELKERELLRREQALERRCPGLLKPHPSRGLLHGNTMEKLIKKRNVPQKLSPHSKRPDILKTESLLPKLDAALSGVGLPGCPKGPPSPGRSRRGKTRHRKASAKGSCGDLPGLRTAVPPHEPGGPGSPGGLGGGPSAWEACPPALRGLHHDLLLRKMSSSSPDLLSAALGSRGRGATGGAGDPGSPPPARGDTPPSEGSAPGSTSPDSPGGAKGEPPPPVGPGEGVGLLGTGREGTSGRGGSRAGSQHLTPAALLYRAAVTRSQKRGISSEEEEGEVDSEVELTSSQRWPQSLNMRQSLSTFSSENPSDGEEGTASEPSPSGTPEVGSTNTDERPDERSDDMCSQGSEIPLDPPPSEVIPGPEPSSLPIPHQELLRERGPPNSEDSDCDSTELDNSNSVDALRPPASLPP

SEQ ID NO: 803342 - protein, 380 aa, Homo sapiens
MACLHETRTPSPSFGGFVSTLSEASMRKLDPDTSDCTPEKDLTPTQCVLRDVVPLGGQGGGGPSPSPGGEPPPEPFANSVLQLHEQDAGGPGGAAGSPESRASRVRADEVRLQCQSGSGFLEGLFGCLRPVWTMIGKAYSTEHKQQQEDLWEVPFEEILDLQWVGSGAQGAVFLGRFHGEEVAVKKVRDLKETDIKHLRKLKHPNIITFKGVCTQAPCYCILMEFCAQGQLYEVLRAGRPVTPSLLVDWSMGIAGGMNYLHLHKIIHRDLKSPNMLITYDDVVKISDFGTSKELSDKSTKMSFAGTVAWMAPEVIRNEPVSEKVDIWSFGVVLWELLTGEIPYKDVDSSAIIWGVGSNSLHLPVPSSCPDGFKILLRQCW

SEQ ID NO: 803343 - protein, 116 aa, Homo sapiens [sequence omitted]

SEQ ID NO: 803344 - protein, 380 aa, Homo sapiens; identical to SEQ ID NO: 803342

SEQ ID NO: 803345 - protein, 76 aa, Homo sapiens
MGQHPESWMPSSCQETCFLVRYIWEMPGLLSSLISSPACKNKSPVSPHLSMALRTSWTAFTCAIVNLRRPLIWPGA

SEQ ID NO: 803346 - protein, 82 aa, Homo sapiens
MLSQKPKKKHNFLNHGLSLNLVIKPYLALEGSVAFPAENGVQDTESTQEKRETGDEENSAKFPVGRRDFDIFSDHFYQNINL

SEQ ID NO: 803347 - protein, 165 aa, Homo sapiens
MAKMNLSSYILILTFSLFSQGILLSASKSIRNLDDDMVFNTFRLGKGFQKEDTAEKSVIAPSLEQYKNDESSFMNEEENKVSKNTGSKHNFLNHGLPLNLAIKPYLALKGSVAFPAENGVQNTESTQEKREIGDEENSAKFPIGRRDFDMLRCMLGRVYRPCWQV

SEQ ID NO: 803348 - protein, 129 aa, Homo sapiens
MVFNTFRLGKGFQKEDTAEKSVIAPSLEQYKNDESSFMNEEENKVSKNTGSKHNFLNHGLPLNLAIKPYLALKGSVAFPAENGVQNTESTQEKREIGDEENSAKFPIGRRDFDMLRCMLGRVYRPCWQV

SEQ ID NO: 803349 - protein, 82 aa, Homo sapiens; identical to SEQ ID NO: 803346

SEQ ID NO: 803350 - protein, 82 aa, Homo sapiens; identical to SEQ ID NO: 803346

SEQ ID NO: 803351 - protein, 154 aa, Homo sapiens
QRKGPVEDTGRRQPSANQEQRPDQKQNLLAPDLGLAASKMPVSEEFHKMSKITEYFEYIKIYKISYSEHTEQKNTTRLYQKIHYSFEVSHTVFSFHFHEYAVGGRLDWYVQKSVDSGVIKDFCHFLKKMEGENTNHFNKLWNGFPHINTTSASK

SEQ ID NO: 803352 - protein, 198 aa, Homo sapiens
EETRRGPAPAGLTPSVCLYGRAPTASRTGPGAPAEGARAAPREGGGEAVAERCARSQPSWEGELWGVRHLVSLSLPASSGACAPPPLPPRRGEGPLLATAFAAFKLPWRLRLLPPPCLHCLFAQHTDADGGWEKGQTLLPANRRCRSRGLTKMAAAVSAATTTTTTTTRSESLSPARPVFSRETVTGGWGNGEARVLA

SEQ ID NO: 803353 - protein, 84 aa, Homo sapiens
LVIQARQGAPPSPDRERLREGRVRATRSPSKLQQVSSGTWASRFPWQPTSVALLRFTRGWFPDSFQTPLPSLRKLSRLRIPLRI

SEQ ID NO: 803354 - protein, 223 aa, Homo sapiens
MGARRQPRAPAPGPRLRVRAQHPGKVGGRRWRKDARAVSRHGRGNCGAFAILSPSPYLRPRGRAHHPPSRLGGGRAPSWPPPSRPLNSPGDCGYCHRLASTASSRSTQMRTVGGKKGRRYSQRTAAAAPEASPKWPPPSRPPPPPLPPPLARNRYRRRGPSSRERQSPSKLQQVSSGTWASRFPWQPTSVALLRFTRGWFPDSFQTPLPSLRKLSRLRIPLRI

SEQ ID NO: 803355 - protein, 965 aa, Homo sapiens
MQTGITKWKEGSFEIVEKENKVSLVVHYNTGGIPRIFQLSHNIKNVVLRPSGAKQSRLMLTLQDNSFLSIDKVPSKDAEEMRLFLDAVHQNRLPAAMKPSQGSGSFGAILGSRTSQKETSRQLSYSDNQASAKRGSLETKDDIPFRKVLGNPGRGSIKTVAGSGIARTIPSLTSTSTPLRSGLLENRTEKRKRMISTGSELNEDYPKENDSSSNNKAMTDPSRKYLTSSREKQLSLKQSEENRTSGLLPLQSSSFYGSRAGSKEHSSGGTNLDRTNVSSQTPSAKRSLGFLPQPVPLSVKKLRCNQDYTGWNKPRVPLSSHQQQQLQGFSNLGNTCYMNAILQSLFSLQSFANDLLKQGIPWKKIPLNALIRRFAHLLVKKDICNSETKKDLLKKVKNAISATAERFSGYMQNDAHEFLSQCLDQLKEDMEKLNKTWKTEPVSGEENSPDISATRAYTCPVITNLEFEVQHSIICKACGEIIPKREQFNDLSIDLPRRKKPLPPRSIQDSLDLFFRAEELEYSCEKCGGKCALVRHKFNRLPRVLILHLKRYSFNVALSLNNKIGQQVIIPRYLTLSSHCTENTKPPFTLGWSAHMAISRPLKASQMVNSCITSPSTPSKKFTFKSKSSLALCLDSDSEDELKRSVALSQRLCEMLGNEQQQEDLEKDSKLCPIEPDKSELENSGFDRMSEEELLAAVLEISKRDASPSLSHEDDDKPTSSPDTGFAEDDIQEMPENPDTMETEKPKTITELDPASFTEITKDCDENKENKTPEGSQGEVDWLQQYDMEREREEQELQQALAQSLQEQEAWEQKEDDDLKRATELSLQEFNNSFVDALGSDEDSGNEDVFDMEYTEAEAEELKRNAETGNLPHSYRLISVVSHIGSTSSSGHYISDVYDIKKQAWFTYNDLEVSKIQEAAVQSDRDRSGYIFFYMHKEIFDELLETEKNSQSLSTEVGKTTRQAS

SEQ ID NO: 803356 - protein, 964 aa, Homo sapiens
MQTGITKWKEGSFEIVEKENKVSLVVHYNTGGIPRIFQLSHNIKNVVLRPSGAKQSRLMLTLQDNSFLSIDKVPSKDAEEMRLFLDAVHQNRLPAAMKPSQGSGSFGAILGSRTSQKETSRQLSYSDNQASAKRGSLETKDDIPFRKVLGNPGRGSIKTVAGSGIARTIPSLTSTSTPLRSGLLENRTEKRKRMISTGSELNEDYPKENDSSSNNKAMTDPSRKYLTSSREKQLSLKQSEENRTSGLLPLQSSSFYGSRAGSKEHSSGGTNLDRTNVSSQTPSAKRSLGFLPQPVPLSVKKLRCNQDYTGWNKPRVPLSSHQQQQLQGFSNLGNTCYMNAILQSLFSLQSFANDLLKQGIPWKKIPLNALIRRFAHLLVKKDICNSETKKDLLKKVKNAISATAERFSGYMQNDAHEFLSQCLDQLKEDMEKLNKTWKTEPVSGEENSPDISATRAYTCPVITNLEFEVQHSIICKACGEIIPKREQFNDLSIDLPRRKKPLPPRSIQDSLDLFFRAEELEYSCEKCGGKCALVRHKFNRLPRVLILHLKRYSFNVALSLNNKIGQQVIIPRYLTLSSHCTENTKPPFTLGWSAHMAISRPLKASQMVNSCITSPSTPSKKFTFKSKSSLALCLDSDSEDELKRSVALSQRLCEMLGNEQQQEDLEKDSKLCPIEPDKSELENSGFDRMSEEELLAAVLEISKRDASPSLSHEDDDKPTSSPDTGFAEDDIQEMPENPDTMETEKPKTITELDPASFTEITKDCDENKENKTPEGSQGEVDWLQQYDMEREREEQELQQALAQSLQEQEAWEQKEDDDLKRATELSLQEFNNSFVDALGSDEDSGNEDVFDMEYTEAEAEELKRNAETGNLPHSYRLISVVSHIGSTSSSGHYISDVYDIKKQAWFTYNDLEVSKIQEAAVQSDRDRSGYIFFYMHKEIFDGLAGTVVRTILLGWQYALHILLQ

SEQ ID NO: 803357 - protein, 39 aa, Homo sapiens
MILIHSLDHLHLPLDQSSLQNMNCIFVVHFLAPISSRQI

SEQ ID NO: 803358 - protein, 965 aa, Homo sapiens; identical to SEQ ID NO: 803355

SEQ ID NO: 803359 - protein, 978 aa, Homo sapiens
MQTGITKWKEGSFEIVEKENKVSLVVHYNTGGIPRIFQLSHNIKNVVLRPSGAKQSRLMLTLQDNSFLSIDKVPSKDAEEMRLFLDAVHQNRLPAAMKPSQGSGSFGAILGSRTSQKETSRQLSYSDNQASAKRGSLETKDDIPFRKVLGNPGRGSIKTVAGSGIARTIPSLTSTSTPLRSGLLENRTEKRKRMISTGSELNEDYPKENDSSSNNKAMTDPSRKYLTSSREKQLSLKQSEENRTSGLLPLQSSSFYGSRAGSKEHSSGGTNLDRTNVSSQTPSAKRSLGFLPQPVPLSVKKLRCNQDYTGWNKPRVPLSSHQQQQLQGFSNLGNTCYMNAILQSLFSLQSFANDLLKQGIPWKKIPLNALIRRFAHLLVKKDICNSETKKDLLKKVKNAISATAERFSGYMQNDAHEFLSQCLDQLKEDMEKLNKTWKTEPVSGEENSPDISATRAYTCPVITNLEFEVQHSIICKACGEIIPKREQFNDLSIDLPRRKKPLPPRSIQDSLDLFFRAEELEYSCEKCGGKCALVRHKFNRLPRVLILHLKRYSFNVALSLNNKIGQQVIIPRYLTLSSHCTENTKPPFTLGWSAHMAISRPLKASQMVNSCITSPSTPSKKFTFKSKSSLALCLDSDSEDELKRSVALSQRLCEMLGNEQQQEDLEKVFWFLLKVTLFFMDSKLCPIEPDKSELENSGFDRMSEEELLAAVLEISKRDASPSLSHEDDDKPTSSPDTGFAEDDIQEMPENPDTMETEKPKTITELDPASFTEITKDCDENKENKTPEGSQGEVDWLQQYDMEREREEQELQQALAQSLQEQEAWEQKEDDDLKRATELSLQEFNNSFVDALGSDEDSGNEDVFDMEYTEAEAEELKRNAETGNLPHSYRLISVVSHIGSTSSSGHYISDVYDIKKQAWFTYNDLEVSKIQEAAVQSDRDRSGYIFFYMHKEIFDELLETEKNSQSLSTEVGKTTRQAS

SEQ ID NO: 803360 - protein, 905 aa, Homo sapiens
MQTGITKWKEGSFEIVEKENKVSLVVHYNTGGIPRIFQLSHNIKNVVLRPSGAKQSRLMLTLQDNSFLSIDKVPSKDAEEMRLFLDAVHQNRLPAAMKPSQGSGSFGAILGSRTSQKETSRQLSYSDNQASAKRGSLETKDDIPFRKVLGNPGRGSIKTVAGSGIARTIPSLTSTSTPLRSGLLENRTEKRKRMISTGSELNEDYPKENDSSSNNKAMTDPSRKYLTSSREKQLSLKQSEENRTSGLLPLQSSSFYGSRAGSKEHSSGGTNLDRTNVSSQTPSAKRSLGFLPQPVPLSVKKLRCNQDYTGWNKPRVPLSSHQQQQLQGFSNLGNTCYMNAILQSLFSLQSFANDLLKQGIPWKKIPLNALIRRFAHLLVKKDICNSETKKDLLKKVKNAISATAERFSGYMQNDAHEFLSQCLDQLKEDMEKLNKTWKTEPVSGEENSPDISATRAYTCPVITNLEFEVQHSIICKACGEIIPKREQFNDLSIDLPRRKKPLPPRSIQDSLDLFFRAEELEYSCEKCGGKCALVRHKFNRLPRVLILHLKRYSFNVALSLNNKIGQQVIIPRYLTLSSHCTENTKPPFTLGWSAHMAISRPLKASQMVNSCITSPSTPSKKFTFKSKSSLALCLDSDSEDELKRSVALSQRLCEMLGNEQQQEDLEKDSKLCPIEPDKSELENSGFDRMSEEELLAAVLEISKRDASPSLSHEDDDKPTSSPDTGFAEDDIQEMPENPDTMETEKPKTITELDPASFTEITKDCDENKENKTPEGSQGEVDWLQQYDMEREREEQELQQALAQSLQEQEAWEQKEDDDLKRATELSLQEFNNSFVDALGSDEDSGNEDVFDMEYTEAEAEELKRNAEVIVFIPEYSWSNSVSLFPLFTSKAPLSVSTAGSFWPFQ

SEQ ID NO: 803361 - protein, 510 aa, Homo sapiens
AGGGVTAASSPAQTVAAAFAQGELVAAAAAWNCGSCVCHSAAGGRRSLTMAPQSLPSSRMAPLGMLLGLLMAACFTFCLSHQNLKEFALTNPEKSSTKETERKETKAEEELDAEVLEVFHPTHEWQALQPGQAVPAGSHVRLNLQTGEREAKLQYEDKFRNNLKGKRLDINTNTYTSQDLKSALAKFKEGAEMESSKEDKARQAEVKRLFRPIEELKKDFDELNVVIETDMQIMVRLINKFNSSSSSLEEKIAALFDLEYYVHQMDNAQDLLSFGGLQVVINGLNSTEPLVKEYAAFVLGAAFSSNPKVQVEAIEGGALQKLLVILATEQPLTAKKKVLFALCSLLRHFPYAQRQFLKLGGLQVLRTLVQEKGTEVLAVRVVTLLYDLVTEKMFAEEEAELTQEMSPEKLQQYRQVHLLPGLWEQGWCEITAHLLALPEHDAREKVLQTLGVLLTTCRDRYRQDPQLGRTLASLQAEYQVLASLELQDGEDEGYFQELLGSVNSLLKELR

SEQ ID NO: 803362 - protein, 461 aa, Homo sapiens
MAPQSLPSSRMAPLGMLLGLLMAACFTFCLSHQNLKEFALTNPEKSSTKETERKETKAEEELDAEVLEVFHPTHEWQALQPGQAVPAGSHVRLNLQTGEREAKLQYEDKFRNNLKGKRLDINTNTYTSQDLKSALAKFKEGAEMESSKEDKARQAEVKRLFRPIEELKKDFDELNVVIETDMQIMVRLINKFNSSSSSLEEKIAALFDLEYYVHQMDNAQDLLSFGGLQVVINGLNSTEPLVKEYAAFVLGAAFSSNPKVQVEAIEGGALQKLLVILATEQPLTAKKKVLFALCSLLRHFPYAQRQFLKLGGLQVLRTLVQEKGTEVLAVRVVTLLYDLVTEKMFAEEEAELTQEMSPEKLQQYRQVHLLPGLWEQGWCEITAHLLALPEHDAREKVLQTLGVLLTTCRDRYRQDPQLGRTLASLQAEYQVLASLELQDGEDEGYFQELLGSVNSLLKELR

SEQ ID NO: 803363 - protein, 388 aa, Homo sapiens
AGGGVTAASSPAQTVAAAFAQGELVAAAAAWNCGSCVCHSAAGGRRSLTMAPQSLPSSRMAPLGMLLGLLMAACFTFCLSHQNLKEFALTNPEKSSTKETERKETKAEEELDAEVLEVFHPTHEWQALQPGQAVPAGSHVRLNLQTGEREAKLQYEDKFRNNLKGKRLDINTNTYTSQDLKSALAKFKEGAEMESSKEDKARQAEVKRLFRPIEELKKDFDELNVVIETDMQIMVRLINKFNSSSSSLEEKIAALFDLEYYVHQMDNAQDLLSFGGLQVVINGLNSTEPLVKEYAAFVLGAAFSSNPKVQVEAIEGGALQKLLVILATEQPLTAKKKVLFALCSLLRHFPYAQRQFLKLGGLQVLRTHLPGPLPSGPPARQDTGQPAG

SEQ ID NO: 803364 - protein, 403 aa, Homo sapiens
TVGESMGLFDVEYKPEKENSSTHRQAVPAGSHVRLNLQTGEREAKLQYEDKFRNNLKGKRLDINTNTYTSQDLKSALAKFKEGAEMESSKEDKARQAEVKRLFRPIEELKKDFDELNVVIETDMQIMVRLINKFNSSSSSLEEKIAALFDLEYYVHQMDNAQDLLSFGGLQVVINGLNSTEPLVKEYAAFVLGAAFSSNPKVQVEAIEGGALQKLLVILATEQPLTAKKKVLFALCSLLRHFPYAQRQFLKLGGLQVLRTLVQEKGTEVLAVRVVTLLYDLVTEKMFAEEEAELTQEMSPEKLQQYRQVHLLPGLWEQGWCEITAHLLALPEHDAREKVLQTLGVLLTTCRDRYRQDPQLGRTLASLQAEYQVLASLELQDGEDEGYFQELLGSVNSLLKELR

SEQ ID NO: 803365 - protein, 341 aa, Homo sapiens
ALEIPFRSLGPLDALAKFKEGAEMESSKEDKARQAEVKRLFRPIEELKKDFDELNVVIETDMQIMVRLINKFNSSSSSLEEKIAALFDLEYYVHQMDNAQDLLSFGGLQVVINGLNSTEPLVKEYAAFVLGAAFSSNPKVQVEAIEGGALQKLLVILATEQPLTAKKKVLFALCSLLRHFPYAQRQFLKLGGLQVLRTLVQEKGTEVLAVRVVTLLYDLVTEKMFAEEEAELTQEMSPEKLQQYRQVHLLPGLWEQGWCEITAHLLALPEHDAREKVLQTLGVLLTTCRDRYRQDPQLGRTLASLQAEYQVLASLELQDGEDEGYFQELLGSVNSLLKELR

SEQ ID NO: 803366 - protein, 68 aa, Homo sapiens
AGGGVTAASSPAQTVAAAFAQGELVAAAAAWNCGSCVCHSAAGGRSYYFSTEANCEPWCVSLAGEEAN

SEQ ID NO: 803367 - protein, 68 aa, Homo sapiens; identical to SEQ ID NO: 803366

SEQ ID NO: 803368 - protein, 239 aa, Homo sapiens
TLKLVPGQNRSGELSSFHSASFGGTPAVCRALLLNPKVQVEAIEGGALQKLLVILATEQPLTAKKKVLFALCSLLRHFPYAQRQFLKLGGLQVLRTLVQEKGTEVLAVRVVTLLYDLVTEKMFAEEEAELTQEMSPEKLQQYRQVHLLPGLWEQGWCEITAHLLALPEHDAREKVLQTLGVLLTTCRDRYRQDPQLGRTLASLQAEYQVLASLELQDGEDEGYFQELLGSVNSLLKELR

SEQ ID NO: 803369 - protein, 486 aa, Homo sapiens
MAFGAKLALNSDSTALWLHELWSLTMAPQSLPSSRMAPLGMLLGLLMAACFTFCLSHQNLKEFALTNPEKSSTKETERKETKAEEELDAEVLEVFHPTHEWQALQPGQAVPAGSHVRLNLQTGEREAKLQYEDKFRNNLKGKRLDINTNTYTSQDLKSALAKFKEGAEMESSKEDKARQAEVKRLFRPIEELKKDFDELNVVIETDMQIMVRLINKFNSSSSSLEEKIAALFDLEYYVHQMDNAQDLLSFGGLQVVINGLNSTEPLVKEYAAFVLGAAFSSNPKVQVEAIEGGALQKLLVILATEQPLTAKKKVLFALCSLLRHFPYAQRQFLKLGGLQVLRTLVQEKGTEVLAVRVVTLLYDLVTEKMFAEEEAELTQEMSPEKLQQYRQVHLLPGLWEQGWCEITAHLLALPEHDAREKVLQTLGVLLTTCRDRYRQDPQLGRTLASLQAEYQVLASLELQDGEDEGYFQELLGSVNSLLKELR

SEQ ID NO: 803370 - protein, 451 aa, Homo sapiens
MAPLGMLLGLLMAACFTFCLSHQNLKEFALTNPEKSSTKETERKETKAEEELDAEVLEVFHPTHEWQALQPGQAVPAGSHVRLNLQTGEREAKLQYEDKFRNNLKGKRLDINTNTYTSQDLKSALAKFKEGAEMESSKEDKARQAEVKRLFRPIEELKKDFDELNVVIETDMQIMVRLINKFNSSSSSLEEKIAALFDLEYYVHQMDNAQDLLSFGGLQVVINGLNSTEPLVKEYAAFVLGAAFSSNPKVQVEAIEGGALQKLLVILATEQPLTAKKKVLFALCSLLRHFPYAQRQFLKLGGLQVLRTLVQEKGTEVLAVRVVTLLYDLVTEKMFAEEEAELTQEMSPEKLQQYRQVHLLPGLWEQGWCEITAHLLALPEHDAREKVLQTLGVLLTTCRDRYRQDPQLGRTLASLQAEYQVLASLELQDGEDEGYFQELLGSVNSLLKELR

SEQ ID NO: 803371 - protein, 318 aa, Homo sapiens [sequence omitted]

SEQ ID NO: 803372 - protein, 446 aa, Homo sapiens
AGGGVTAASSPAQTVAAAFAQGELVAAAAAWNCGSCVCHSAAGGRRSLTMAPQSLPSSRMAPLGMLLGLLMAACFTFCLSHQNLKEFALTNPEKSSTKETERKETKAEEELDAEVLEVFHPTHEWQALQPGQAVPAGSHVRLNLQTGEREAKLQYEDKFRNNLKGKRLDINTNTYTSQDLKSALAKFKEGAEMESSKEDKMDNAQDLLSFGGLQVVINGLNSTEPLVKEYAAFVLGAAFSSNPKVQVEAIEGGALQKLLVILATEQPLTAKKKVLFALCSLLRHFPYAQRQFLKLGGLQVLRTLVQEKGTEVLAVRVVTLLYDLVTEKMFAEEEAELTQEMSPEKLQQYRQVHLLPGLWEQGWCEITAHLLALPEHDAREKVLQTLGVLLTTCRDRYRQDPQLGRTLASLQAEYQVLASLELQDGEDEGYFQELLGSVNSLLKELR

SEQ ID NO: 803373 - protein, 126 aa, Homo sapiens
ATRLPEAEVGAVRAARPWSWAGGSGRFLGLLLPAASAPSQQCSGDPHILTSVSKAGRPSGPGAPCRRPTFLIFPTQNVSIHLFIGRRWGRGNLRLALAPHLFLVPLPVSFSQPKFPYLSEEGVVWC

SEQ ID NO: 803374 - protein, 176 aa, Homo sapiens [sequence omitted]

SEQ ID NO: 803375 - protein, 445 aa, Homo sapiens
MPANVYTVHAFYYKTTEHRRKIHHLYDAVPIQSSVVLCSCPSPSMVRTQTESSTPPGIPGGSRQGPAMDGTAAEPRPGAGSLQHAQPPPQPRKKRPEDFKFGKILGEGSFSTVVLARELATSREYAIKILEKRHIIKENKVPYVTRERDVMSRLDHPFFVKLYFTFQDDEKLYFGLSYAKNGELLKYIRKIGSFDETCTRFYTAEIVSALEYLHGKGIIHRDLKPENILLNEDMHIQITDFGTAKVLSPESKQARANSFVGTAQYVSPELLTEKSACKSSDLWALGCIIYQLVAGLPPFRAGNEYLIFQKIIKLEYDFPEKFFPKARDLVEKLLVLDATKRLGCEEMEGYGPLKAHPFFESVTWENLHQQTPPKLTAYLPAMSEDDEDCYGNGAARTGRRAPPALAPGSHVRGLLPGLSHLRLAWCLYNCAAKMLQNTACLSTEK

SEQ ID NO: 803376 - protein, 401 aa, Homo sapiens
MVRTQTESSTPPGIPGGSRQGPAMDGTAAEPRPGAGSLQHAQPPPQPRKKRPEDFKFGKILGEGSFSTVVLARELATSREYAIKILEKRHIIKENKVPYVTRERDVMSRLDHPFFVKLYFTFQDDEKLYFGLSYAKNGELLKYIRKIGSFDETCTRFYTAEIVSALEYLHGKGIIHRDLKPENILLNEDMHIQITDFGTAKVLSPESKQARANSFVGTAQYVSPELLTEKSACKSSDLWALGCIIYQLVAGLPPFRAGNEYLIFQKIIKLEYDFPEKFFPKARDLVEKLLVLDATKRLGCEEMEGYGPLKAHPFFESVTWENLHQQTPPKLTAYLPAMSEDDEDCYGNGAARTGRRAPPALAPGSHVRGLLPGLSHLRLAWCLYNCAAKMLQNTACLSTEK

SEQ ID NO: 803377 - protein, 427 aa, Homo sapiens
MPANVYTVHAFYYKTTEHRRKIHHLYDAVPIQSSVVLCSCPSPSMVRTQTESSTPPGIPGGSRQGPAMDGTAAEPRPGAGSLQHAQPPPQPRKKRPEDFKFGKILGEGSFSTVVLARELATSREYAIKILEKRHIIKENKVPYVTRERDVMSRLDHPFFVKLYFTFQDDEKLYFGLSYAKNGELLKYIRKIGSFDETCTRFYTAEIVSALEYLHGKGIIHRDLKPENILLNEDMHIQITDFGTAKVLSPESKQARANSFVGTAQYVSPELLTEKSACKSSDLWALGCIIYQLVAGLPPFRAGNEYLIFQKIIKLEYDFPEKFFPKARDLVEKLLVLDATKRLGCEEMEGYGPLKAHPFFESVTWENLHQQTPPKLTAYLPAMSEDDEDCYGNYDNLLSQFGCMQVSSSSSSHSLSDSDTGLTQRSGS

SEQ ID NO: 803378 - protein, 255 aa, Homo sapiens
MPANVYTVHAFYYKTTEHRRKIHHLYDAVPIQSSVVLCSCPSPSMVRTQTESSTPPGIPGGSRQGPAMDGTAAEPRPGAGSLQHAQPPPQPRKKRPEDFKFGKILGEGSFSTVVLARELATSREYAIKILEKRHIIKENKVPYVTRERDVMSRLDHPFFVKLYFTFQDDEKLYFGLSYAKNGELLKYIRKIGSFDETCTRFYTAEIVSALEYLHGKGIIHRDLKPENILLNEDMHIQITDFGTAKVLSPESKQGV

SEQ ID NO: 803379 - protein, 105 aa, Homo sapiens [sequence omitted]

SEQ ID NO: 803380 - protein, 342 aa, Homo sapiens
TGIAPPRPKIIHPFFTPEHPELWKLAAALSGIKIWNTTYQLLRTKTKTPTFNITLISEWVIPIRSCVKPPYMLLVGNIIMMPDAQTIECHNCKLFTCIDATFNPTTSILLVRAREGVWIPVSLHRPWESSPSIHIVNEVLKDILKRTKRFIFTLIAVLAGLLAVTATAATAGVAIRSSVQTAHYVEACQKNSSRLWNSQAQIDQKLANQINDLRQSVTWLGDRVMNLQHRMQLQCDWNTSDYCITPYAYNQDQHSWENVSRHLKAWDDNLTLDISQLKEQIFEASQAHLSTVPGSHIFEGITKQLPDFNPFKWLKPVRGSLLLLALLILVCLCCLLLVCRCL

SEQ ID NO: 803381 - protein, 255 aa, Homo sapiens
MPANVYTVHAFYYKTTEHRRKIHHLYDAVPIQSSVVLCSCPSPSMVRTQTESSTPPGIPGGSRQGPAMDGTAAEPRPGAGSLQHAQPPPQPRKKRPEDFKFGKILGEGSFSTVVLARELATSREYAIKILEKRHIIKENKVPYVTRERDVMSRLDHPFFVKLYFTFQDDEKLYFGLSYAKNGELLKYIRKIGSFDETCTRFYTAEIVSALEYLHGKGIIHRDLKPENILLNEDMHIQITDFGTAKVLSPESKQVC

SEQ ID NO: 803382 - protein, 342 aa, Homo sapiens; identical to SEQ ID NO: 803380

SEQ ID NO: 803383 - protein, 62 aa, Homo sapiens
MGARHGYARSRRRSISKLIKAVLVERLNCWRTVVSIPAPKEQSPEFSGATKRSQRRVPTQSV

SEQ ID NO: 803384 - protein, 114 aa, Homo sapiens
ENNGGRGAEDSSMQLTTRRQKAEAGVLENLAVLEFTLTPPRSSAAEPSSPALPAARWRWFCCQLGETELGHARWRRPPCCVPFPGCWPPPGSRAALQCDQSSTCESRRMPNLTG

SEQ ID NO: 803385 - protein, 112 aa, Homo sapiens
MADAEGFPTRVTLPNTQAAVTSFPHLLWVSELAGKPGGWPACGGREGRGRPRPSFQCVVPSKRPRSYGRLGKYGSDRLLIKNSLSGAFLLDRPFIPWKESRTLCDHRLSPKC

SEQ ID NO: 803386 - protein, 112 aa, Homo sapiens; identical to SEQ ID NO: 803385

SEQ ID NO: 803387 - protein, 165 aa, Homo sapiens
MADAEGFPTRVTLPNTQAGDLLSPPPLGFGACRETWRLACLWRPGGSGQAPPIISVRGALEAPAELREARQKAEAGVLENLAVLEFTLTPPRSSAAEPSSPALPAARWRWFCCQLGETELGHARWRRPPCCVPFPGCWPPPGSRAALQCDQSSTCESRRMPNLTG

SEQ ID NO: 803388 - protein, 74 aa, Homo sapiens
  misc_feature (4)..(4): Xaa can be any naturally occurring amino acid
AHAXFFVPPFRVWCPRGFQSPSVRSKFYVREPPNAKPDWLKVGFTLGTTVFLWIYLIKQHNEDILEYKRRNGLE

SEQ ID NO: 803389 - protein, 112 aa, Homo sapiens; identical to SEQ ID NO: 803385

SEQ ID NO: 803390 - protein, 85 aa, Homo sapiens
ALGAQGIRKMAPSALLRPLSRLLAPARLPSGPSVRSKFYVREPPNAKPDWLKVGFTLGTTVFLWIYLIKQHNEDILEYKRRNGLE

SEQ ID NO: 803391 - protein, 112 aa, Homo sapiens; identical to SEQ ID NO: 803385

SEQ ID NO: 803392 - protein, 104 aa, Homo sapiens
MKWAWLSYRQKAEAGVLENLAVLEFTLTPPRSSAAEPSSPALPAARWRWFCCQLGETELGHARWRRPPCCVPFPGCWPPPGSRAALQCDQSSTCESRRMPNLTG

SEQ ID NO: 803393 - protein, 32 aa, Homo sapiens
MRTQSTTGTKRWPGLRGYTTTSARRNTLTSED

SEQ ID NO: 803394 - protein, 139 aa, Homo sapiens
MTGKNVYFQSQLEAFHCLQYELFPSRLTINLLVTTHIPFPQTKPHIARCVFTESSKILLGLWVQDGECSEIMTGAWSCRALRRKSRNLFSEQLKIIPKDLHFRNTMLSSCIRNQLGGPFLLEVENNERLNYRSGEGRQL

SEQ ID NO: 803395 - protein, 323 aa, Homo sapiens
PREARRAGPRAGGGLGRAEGEPGRKEAAGGREAGAGQELLGWSGGAAMSDSEKLNLDSIIGRLLEVQGSRPGKNVQLTENEIRGLCLKSREIFLSQPILLELEAPLKICGDIHGQYYDLLRLFEYGGFPPESNYLFLGDYVDRGKQSLETICLLLAYKIKYPENFFLLRGNHECASINRIYGFYDECKRRYNIKLWKTFTDCFNCLPIAAIVDEKIFCCHGGLSPDLQSMEQIRRIMRPTDVPDQGLLCDLLWSDPDKDRAGLGRERPWRLFYLWSRGGGQVPPQARLGPHLPSTPGGRRRLRVLCQAAAGDTFLSSQLLWRV

SEQ ID NO: 803396 - protein, 189 aa, Homo sapiens
LFLERKPKSRGFRSPKGWFSGLEPAVTVSRILGPRLQLRATAGQVVGLQPCLASGLAAGSWGNPSGLLNKGQSWILAMASVSHLRHCLAALLHRAAWESRHRAPARATLATHSGPRLLEFQVSAKEYQESKENLSAPRGSQMHAQDFRKEQVMIGREAGSPGASSTYYDIFLRKVSLRETGFQPWPAGV

SEQ ID NO: 803397 - protein, 305 aa, Homo sapiens
CGTSSTHAAAGGREAGAGQELLGWSGGAAMSDSEKLNLDSIIGRLLEVQGSRPGKNVQLTENEIRGLCLKSREIFLSQPILLELEAPLKICGDIHGQYYDLLRLFEYGGFPPESNYLFLGDYVDRGKQSLETICLLLAYKIKYPENFFLLRGNHECASINRIYGFYDECKRRYNIKLWKTFTDCFNCLPIAAIVDEKIFCCHGGLSPDLQSMEQIRRIMRPTDVPDQGLLCDLLWSDPDKDRAGLGRERPWRLFYLWSRGGGQVPPQARLGPHLPSTPGGRRRLRVLCQAAAGDTFLSSQLLWRV

SEQ ID NO: 803398 - protein, 323 aa, Homo sapiens; identical to SEQ ID NO: 803395

SEQ ID NO: 803399 - protein, 323 aa, Homo sapiens; identical to SEQ ID NO: 803395

SEQ ID NO: 803400 - protein, 316 aa, Homo sapiens
CGTSSTHAAAGGREAGAGQELLGWSGGAAMSDSEKLNLDSIIGRLLEGSRVLTPHCAPVQGSRPGKNVQLTENEIRGLCLKSREIFLSQPILLELEAPLKICGDIHGQYYDLLRLFEYGGFPPESNYLFLGDYVDRGKQSLETICLLLAYKIKYPENFFLLRGNHECASINRIYGFYDECKRRYNIKLWKTFTDCFNCLPIAAIVDEKIFCCHGGLSPDLQSMEQIRRIMRPTDVPDQGLLCDLLWSDPDKDRAGLGRERPWRLFYLWSRGGGQVPPQARLGPHLPSTPGGRRRLRVLCQAAAGDTFLSSQLLWRV

SEQ ID NO: 803401 - protein, 281 aa, Homo sapiens
MGPPVSPTLLLSGSRVLTPHCAPVQGSRPGKNVQLTENEIRGLCLKSREIFLSQPILLELEAPLKICGDIHGQYYDLLRLFEYGGFPPESNYLFLGDYVDRGKQSLETICLLLAYKIKYPENFFLLRGNHECASINRIYGFYDECKRRYNIKLWKTFTDCFNCLPIAAIVDEKIFCCHGGLSPDLQSMEQIRRIMRPTDVPDQGLLCDLLWSDPDKDRAGLGRERPWRLFYLWSRGGGQVPPQARLGPHLPSTPGGRRRLRVLCQAAAGDTFLSSQLLWRV

SEQ ID NO: 803402 - protein, 279 aa, Homo sapiens
PREARRAGPRAGGGLGRAEGEPGRKEAAGGREAGAGQELLGWSGGAAMSDSEKLNLDSIIGRLLEGDIHGQYYDLLRLFEYGGFPPESNYLFLGDYVDRGKQSLETICLLLAYKIKYPENFFLLRGNHECASINRIYGFYDECKRRYNIKLWKTFTDCFNCLPIAAIVDEKIFCCHGGLSPDLQSMEQIRRIMRPTDVPDQGLLCDLLWSDPDKDRAGLGRERPWRLFYLWSRGGGQVPPQARLGPHLPSTPGGRRRLRVLCQAAAGDTFLSSQLLWRV

SEQ ID NO: 803403 - protein, 405 aa, Homo sapiens
PREARRAGPRAGGGLGRAEGEPGRKEAAGGREAGAGQELLGWSGGAAMSDSEKLNLDSIIGRLLEVQGSRPGKNVQLTENEIRGLCLKSREIFLSQPILLELEAPLKICGDIHGQYYDLLRLFEYGGFPPESNYLFLGDYVDRGKQSLETICLLLAYKIKYPENFFLLRGNHECASINRIYGFYDECKRRYNIKLWKTFTDCFNCLPIAAIVDEKIFCCHGGLSPDLQSMEQIRRIMRPTDVPDQGLLCDLLWSDPDKDRAGLGRERPWRLFYLWSRGGGQVPPQARLGPHLPSTPGGLVAPACGRGRGGPCLRSGLTAPILAQVVEDGYEFFAKRQLVTLFSAPNYCGEFDNAGAMMSVDETLMCSFQILKPADKNKGKYGQFSGLNPGGRPITPPRNSAKAKK

SEQ ID NO: 803404 - protein, 288 aa, Homo sapiens
CGTSSTHAAAGGREAGAGQELLGWSGGAAMSDSEKLNLDSIIGRLLEVQGSRPGKNVQLTENEIRGLCLKSREIFLSQPILLELEAPLKICGDIHGQYYDLLRLFEYGGFPPESNYLFLGDYKIKYPENFFLLRGNHECASINRIYGFYDECKRRYNIKLWKTFTDCFNCLPIAAIVDEKIFCCHGGLSPDLQSMEQIRRIMRPTDVPDQGLLCDLLWSDPDKDRAGLGRERPWRLFYLWSRGGGQVPPQARLGPHLPSTPGGRRRLRVLCQAAAGDTFLSSQLLWRV

SEQ ID NO: 803405 - protein, 137 aa, Homo sapiens
MCLTRACCVTCCGLTLTRTVQGWGENDRGVSFTFGAEVVAKFLHKHDLDLICRAHQVVEDGYEFFAKRQLVTLFSAPNYCGEFDNAGAMMSVDETLMCSFQILKPADKNKGKYGQFSGLNPGGRPITPPRNSAKAKK

SEQ ID NO: 803406 - protein, 137 aa, Homo sapiens; identical to SEQ ID NO: 803405

SEQ ID NO: 803407 - protein, 288 aa, Homo sapiens
PREARRAGPRAGGGLGRAEGEPGRKEAAGGREAGAGQELLGWSGGAAMSDSEKLNLDSIIGRLLEVQGSRPGKNVQLTENEIRGLCLKSREIFLSQPILLELEAPLKICGDIHGQYYDLLRLFEYGGFPPESNYLFLGDYVDRGKQSLETICLLLAYKIKYPENFFLLRGNHECASINRIYGFYDECLSPDLQSMEQIRRIMRPTDVPDQGLLCDLLWSDPDKDRAGLGRERPWRLFYLWSRGGGQVPPQARLGPHLPSTPGGRRRLRVLCQAAAGDTFLSSQLLWRV

SEQ ID NO: 803408 - protein, 311 aa, Homo sapiens
PREARRAGPRAGGGLGRAEGEPGRKEAAGGREAGAGQELLGWSGGAAMSDSEKLNLDSIIGRLLEVQGSRPGKNVQLTENEIRGLCLKSREIFLSQPILLELEAPLKICGDIHGQYYDLLRLFEYGGFPPESNYLFLGDYVDRGKQSLETICLLLAYKIKYPENFFLLRGNHECASINRIYGFYDECKRRYNIKLWKTFTDCFNCLPIAAIVDEKIFCCHGGLSPDLQSMEQIRRIMRPTDVPDQGLLCDLLWSDPDKDRAGLGRERPWRLFYLWSRGGGQVPPQARLGPHLPSTPGVQPVRSCPRALCPF

SEQ ID NO: 803409 - protein, 198 aa, Homo sapiens
PREARRAGPRAGGGLGRAEGEPGRKEAAGGREAGAGQELLGWSGGAAMSDSEKLNLDSIIGRLLEVQGSRPGKNVQLTENEIRGLCLKSREIFLSQPILLELEAPLKICGDIHGQYYDLLRLFEYGGFPPESNYLFLGDYVDRGKQSLETICLLLAYKIKYPENFFLLRGNHECASINRIYGFYDECEWSERLGLPGS

SEQ ID NO: 803410 - protein, 66 aa, Homo sapiens
DGYEFFAKRQLVTLFSAPNYCGEFDNAGAMMSVDETLMCSFQVSVGKKGAASPVAQPHEPDQHCLF

SEQ ID NO: 803411 - protein, 136 aa, Homo sapiens
HRCLTLSSQPRLNSPGTLAEGGVGRHLTATSPWAGKRRYNIKLWKTFTDCFNCLPIAAIVDEKIFCCHGGEGGDGWGGGALAASLSTRQLSLGLIWEVTPSRKCPPYPTVLGCTHFLDVCPTWSGLVSFLPGALCS

SEQ ID NO: 803412 - protein, 323 aa, Homo sapiens; identical to SEQ ID NO: 803395

SEQ ID NO: 803413 - protein, 323 aa, Homo sapiens; identical to SEQ ID NO: 803395

SEQ ID NO: 803414 - protein, 309 aa, Homo sapiens
HSLGFEALRFYAGREAVQPGLVCCWAWSGGARHVRQPRMLNLDSIIGRLLEVQGSRPGKNVQLTENEIRGLCLKSREIFLSQPILLELEAPLKICGDIHGQYYDLLRLFEYGGFPPESNYLFLGDYVDRGKQSLETICLLLAYKIKYPENFFLLRGNHECASINRIYGFYDECKRRYNIKLWKTFTDCFNCLPIAAIVDEKIFCCHGGLSPDLQSMEQIRRIMRPTDVPDQGLLCDLLWSDPDKDRAGLGRERPWRLFYLWSRGGGQVPPQARLGPHLPSTPGGRRRLRVLCQAAAGDTFLSSQLLWRV

SEQ ID NO: 803415 - protein, 359 aa, Homo sapiens
MPVEAAGIQAEIWPGAAAMRQELGLEKAPGRQEQGLQRLFSSQSWACSCHWEAEGGPGEFDLRKFWAYIGRHELDRNWAKKGCCEAAVVPVDPAKRKRWAWRSPHEVEVGPVDADRRQELRLESQLEEILRQPILLELEAPLKICGDIHGQYYDLLRLFEYGGFPPESNYLFLGDYVDRGKQSLETICLLLAYKIKYPENFFLLRGNHECASINRIYGFYDECKRRYNIKLWKTFTDCFNCLPIAAIVDEKIFCCHGGLSPDLQSMEQIRRIMRPTDVPDQGLLCDLLWSDPDKDRAGLGRERPWRLFYLWSRGGGQVPPQARLGPHLPSTPGGRRRLRVLCQAAAGDTFLSSQLLWRV

SEQ ID NO: 803416 - protein, 323 aa, Homo sapiens; identical to SEQ ID NO: 803395

SEQ ID NO: 803417 - protein, 137 aa, Homo sapiens; identical to SEQ ID NO: 803405

SEQ ID NO: 803418 - protein, 137 aa, Homo sapiens; identical to SEQ ID NO: 803405

SEQ ID NO: 803419 - protein, 125 aa, Homo sapiens
LWVIVAVGRPWLWVERGVSFTFGAEVVAKFLHKHDLDLICRAHQVVEDGYEFFAKRQLVTLFSAPNYCGEFDNAGAMMSVDETLMCSFQILKPADKNKGKYGQFSGLNPGGRPITPPRNSAKAKK

SEQ ID NO: 803420 - protein, 278 aa, Homo sapiens
MDKSGIDSLDHVTSDAVELANRSDNSSDSSLFKTQCIPYSPKGEKRNPIRKFVRTPESVHASDSSSDSSFEPIPLTIKAIFERFKNRKKRYKKKKKRRYQPTGRPRGRPEGRRNPIYSLIDKKKQFRSRGSGFPFLESENEKNAPWRKILTFEQAVARGFFNYIEKLKYEHHLKESLKQMNVGEDLENEDFDSRRYKFLDDDGSISPIEESTAEDEDATHLEDNECDIKLAGDSFIVSSEFPVRLSVYLEEEDITEEAALSKKRATKAKNTGQRGLKM

SEQ ID NO: 803421 - protein, 278 aa, Homo sapiens; identical to SEQ ID NO: 803420

SEQ ID NO: 803422 - protein, 278 aa, Homo sapiens; identical to SEQ ID NO: 803420

SEQ ID NO: 803423 - protein, 278 aa, Homo sapiens; identical to SEQ ID NO: 803420

SEQ ID NO: 803424 - protein, 278 aa, Homo sapiens; identical to SEQ ID NO: 803420

SEQ ID NO: 803425 - protein, 215 aa, Homo sapiens
MDKSGIDSLDHVTSDAVELANRSDNSSDSSLFKTQCIPYSPKGEKRNPIRKFVRTPESVHASDSSSDSSFEPIPLTIKAIFERFKNRKKRYKKKKKRRYQPTGRPRGRPEGRRNPIYSLIDKKKQFRSRGSGFPFLESENEKNAPWRKILTFEQAVARGFFNYIEKLKYEHHLKESLKQMNVGEDLENEDFDSRRYKFLDDDGSISPIEESTLLS

SEQ ID NO: 803426 - protein, 278 aa, Homo sapiens; identical to SEQ ID NO: 803420

SEQ ID NO: 803427 - protein, 278 aa, Homo sapiens; identical to SEQ ID NO: 803420

SEQ ID NO: 803428 - protein, 278 aa, Homo sapiens; identical to SEQ ID NO: 803420

SEQ ID NO: 803429 - protein, 278 aa, Homo sapiens; identical to SEQ ID NO: 803420

SEQ ID NO: 803430 - protein, 278 aa, Homo sapiens; identical to SEQ ID NO: 803420

SEQ ID NO: 803431 - protein, 278 aa, Homo sapiens; identical to SEQ ID NO: 803420

SEQ ID NO: 803432 - protein, 278 aa, Homo sapiens; identical to SEQ ID NO: 803420

SEQ ID NO: 803433 - protein, 212 aa, Homo sapiens [sequence omitted]

SEQ ID NO: 803434 - protein, 278 aa, Homo sapiens; identical to SEQ ID NO: 803420

SEQ ID NO: 803435 - protein, 278 aa, Homo sapiens; identical to SEQ ID NO: 803420

SEQ ID NO: 803436 - protein, 278 aa, Homo sapiens; identical to SEQ ID NO: 803420

SEQ ID NO: 803437 - protein, 278 aa, Homo sapiens; identical to SEQ ID NO: 803420

SEQ ID NO: 803438 - protein, 278 aa, Homo sapiens; identical to SEQ ID NO: 803420

SEQ ID NO: 803439 - protein, 278 aa, Homo sapiens; identical to SEQ ID NO: 803420

SEQ ID NO: 803440 - protein, 278 aa, Homo sapiens; identical to SEQ ID NO: 803420

SEQ ID NO: 803441 - protein, 278 aa, Homo sapiens; identical to SEQ ID NO: 803420

SEQ ID NO: 803442 - protein, 278 aa, Homo sapiens; identical to SEQ ID NO: 803420

SEQ ID NO: 803443 - protein, 278 aa, Homo sapiens; identical to SEQ ID NO: 803420

SEQ ID NO: 803444 - protein, 67 aa, Homo sapiens
EVIGLTILFCIHYKRAGVLFQMFSWEGCREGGVYRALGLTHQASRGFWAEAWVTSSKCAVGATARPF

SEQ ID NO: 803445 - protein, 106 aa, Homo sapiens
MATPGPVIPEVPFEPSKPPVIEGLSPTVYRNPESFKEKFVRKTRENPVVPIGCLATAAALTYGLYSFHRGNSQRSQLMMRTRIAAQGFTVAAILLGLAVTAMKSRP

SEQ ID NO: 803446 - protein, 106 aa, Homo sapiens; identical to SEQ ID NO: 803445

SEQ ID NO: 803447 - protein, 75 aa, Homo sapiens
MATPGPVIPEVPFEPSKPPVIEGLSPTVYRNPSQNRSNGTCHSAAGAPSYLTASRFVCGTTRSSGDSVSRMYIHY

SEQ ID NO: 803448 - protein, 106 aa, Homo sapiens; identical to SEQ ID NO: 803445

SEQ ID NO: 803449 - protein, 105 aa, Homo sapiens
MTCGARPAVSQLLCPLLRLPGHGGRPHLRPLLLPPGQQPALSAHDAHPDRRPGFHGRSHLAGSGCHCYEVSTLSPGSGLESSAEMIPKPREQPLALPWDLLPPLL

SEQ ID NO: 803450 - protein, 106 aa, Homo sapiens; identical to SEQ ID NO: 803445

SEQ ID NO: 803451 - protein, 481 aa, Homo sapiens
MGDDRPFVCNAPGCGQRFTNEDHLAVHKHKHEMTLKFGPARTDSVIIADQTPTPTRFLKNCEEVGLFNELASSFEHEFKKAADEDEAAAGPLDMSLPSTPDIKIKEEEPVEVDSSPPDSPASSPCSPPLKEKEVTPKPVLISTPTPTIVRPGSLPLHLGYDPLHPTLPSPTSVITQAPPSNRQMGSPTGSLPLVMHLANGQTMPVLPGPPVQMPSVISLARPVSMVPNIPGIPGPPVNSSGSISPSGHPIPSEAKMRLKATLTHQVSSINGGCGMVVGTASTMVTARPEQSQILIQHPDAPSPAQPQVSPAQPTPSTGGRRRRTVDEDPDERRQRFLERNRAAASRCRQKRKLWVSSLEKKAEELTSQNIQLSNEVTLLRNEVAQLKQLLLAHKDCPVTALQKKTQGYLESPKESSEPTGSPAPVIQHSSATAPSNGLSVRSAAEAVATSVLTQMASQRTELSMPIQSHVIMTPQSQSAGR

SEQ ID NO: 803452 - protein, 494 aa, Homo sapiens
MGDDRPFVCNAPGCGQRFTNEDHLAVHKHKHEMTLKFGPARTDSVIIADQTPTPTRFLKNCEEVGLFNELASSFEHEFKKAADEDEKKARSRTVAKKLVAAAGPLDMSLPSTPDIKIKEEEPVEVDSSPPDSPASSPCSPPLKEKEVTPKPVLISTPTPTIVRPGSLPLHLGYDPLHPTLPSPTSVITQAPPSNRQMGSPTGSLPLVMHLANGQTMPVLPGPPVQMPSVISLARPVSMVPNIPGIPGPPVNSSGSISPSGHPIPSEAKMRLKATLTHQVSSINGGCGMVVGTASTMVTARPEQSQILIQHPDAPSPAQPQVSPAQPTPSTGGRRRRTVDEDPDERRQRFLERNRAAASRCRQKRKLWVSSLEKKAEELTSQNIQLSNEVTLLRNEVAQLKQLLLAHKDCPVTALQKKTQGYLESPKESSEPTGSPAPVIQHSSATAPSNGLSVRSAAEAVATSVLTQMASQRTELSMPIQSHVIMTPQSQSAGR

SEQ ID NO: 803453 - protein, 124 aa, Homo sapiens
APYYYYICGRSTKKARSRTVAKKLVAAAGPLDMSLPSTPDIKIKEEEPVEVDSSPPDSPASSPCSPPLKEKEVTPKPVLISTPTPTIVRPGSLPLHLGYDPLHPTLPSPTSVITQAPPSNRQMG

SEQ ID NO: 803454 - protein, 117 aa, Homo sapiens
MGDDRPFVCNAPGCGQRFTNEDHLAVHKHKHEMTLKFGPARTDSVIIADQTPTPTRFLKNCEEVGLFNELASSFEHEFKKAADEDEKKARSRTVAKKLVVFRPRLFLLCFGIIFLIG

SEQ ID NO: 803455 - protein, 117 aa, Homo sapiens; identical to SEQ ID NO: 803454

SEQ ID NO: 803456 - protein, 494 aa, Homo sapiens; identical to SEQ ID NO: 803452

SEQ ID NO: 803457 - protein, 372 aa, Homo sapiens
RTTRKLAQRGCQWSLPERMPLVVFCGLPYSGKSRRAEELRVALAAEGRAVYVVDDAAVLGAEDPAVYGDSAREKALRGALRASVERRLSRHDVVILDSLNYIKGFRYELYCLARAARTPLCLVYCVRPGGPIAGPQVAGANENPGRNVSVSWRPRAEEDGRAQAAGSSVLRELHTADSVVNGSAQADVPKELEREESGAAESPALVTPDSEKSAKHGSGAFYSPELLEALTLRFEAPDSRNRWDRPLFTLVGLEEPLPLAGIRSALFENRAPPPHQSTQSQPLASGSFLHQLDQVTSQVLAGLMEAQKSAVPGDLLTLPGTTEHLRFTRPLTMAELSRLRRQFISYTKMHPNNENLPQLANMFLQYLSQSLH

SEQ ID NO: 803458 - protein, 363 aa, Homo sapiens
RTTRKLAQRGCQWSLPERMPLVVFCGLPYSGKSRRAEELRVALAAEGRAVYVVDDAAVLGAEDPAVYGDSAREKALRGALRASVERRLSRHDVVILDSLNYIKGFRYELYCLARAARTPLCLVYCVRPGGANENPGRNVSVSWRPRAEEDGRAQAAGSSVLRELHTADSVVNGSAQADVPKELEREESGAAESPALVTPDSEKSAKHGSGAFYSPELLEALTLRFEAPDSRNRWDRPLFTLVGLEEPLPLAGIRSALFENRAPPPHQSTQSQPLASGSFLHQLDQVTSQVLAGLMEAQKSAVPGDLLTLPGTTEHLRFTRPLTMAELSRLRRQFISYTKMHPNNENLPQLANMFLQYLSQSLH

SEQ ID NO: 803459 - protein, 346 aa, Homo sapiens
AGTGSGLWACGREVTLSSAAPAALCPRWIPRRGSFKSLAGRPPLGRSPAMRALRAGLTLALGAGLGAVVEGWRRRREDARAAPGLLGRLPVLPVAAAAELPPVPGGPRGPGELAKYGLPGLAQSRAASRTCCATTRAPAARSGWWSSCDPSVSAANGDRRECDFREDDSVHAYHRATNADYRGSGFDRGHLAAAANHRWSQKAMDDTFYLSNVAPQVPHLNQNAWNNLEKYSRSLTRSYQNVYVCTGPLFLPRTEADGKSYVKYQVIGKNHVAVPTHFFKVLILEAAGGQIELRTYVMPNAPVDEAIPLERFLVPIESIERASGLLFVPNILARAGSLKAITAGSK

SEQ ID NO: 803460 - protein, 358 aa, Homo sapiens
TRLGSAAPFWVPRPKPLAVFVSGREVTLSSAAPAALCPRWIPRRGSFKSLAGRPPLGRSPAMRALRAGLTLALGAGLGAVVEGWRRRREDARAAPGLLGRLPVLPVAAAAELPPVPGGPRGPGELAKYGLPGLAQSRAASRTCCATTRAPAARSGWWSSCDPSVSAANGDRRECDFREDDSVHAYHRATNADYRGSGFDRGHLAAAANHRWSQKAMDDTFYLSNVAPQVPHLNQNAWNNLEKYSRSLTRSYQNVYVCTGPLFLPRTEADGKSYVKYQVIGKNHVAVPTHFFKVLILEAAGGQIELRTYVMPNAPVDEAIPLERFLVPIESIERASGLLFVPNILARAGSLKAITAGSK

SEQ ID NO: 803461 - protein, 108 aa, Homo sapiens
MSAQGHSSCPGKVETRGAAEPPTHPRPLLPLTGPGLPQALGQYQFPTHLVSWQACQLPCLESPHSTSTAKDLSGTPDHLSSAHGQQQALNLPPLLPAVTSWHAHPILF

SEQ ID NO: 803462 - protein, 206 aa, Homo sapiens
PSREGSLGRTPGGHGPDHAQTQEGGEGRRARGGRGRTYSSSLKRSRPAATYLPPACSASSPSTRCPRVGVKRRRTPNGTSTCSVSCSSSASKVEFDRFSPSVFQDSWPRVGNLSFSTRGGGVQSHWEAVRNRAIAAGVRCQARAIQNASSLGNDSKGEGVFGRIVPTLGKDRPVPLSDSRQSVGYMLRLEVHTEGTDIDIMSINIL

SEQ ID NO: 803463 - protein, 185 aa, Homo sapiens
PSREGSLGRTPGGHGPDHAQTQEGGEGRRARGGRGRTYSSSLKRSRPAATYLPPACSASSPSTRCPRVGVKRRRTPNGTSTCSVSCSSSASKVAARRRDSTNFLPTYNGSPLRYTTMVLAGVVSTGAEGPRVPIAAPRSSLAGAERLRQRGQRRLQSRAQARAPPTGGPLQPLAQDGDGTGTGRG

SEQ ID NO: 803464 - protein, 278 aa, Homo sapiens
ARGLEALYRPAGAPLLRVPRPSPLPAPLWDPPAAFPTNEIFAMSKRKWRGFRGAQQERAQPPAASPQPCPAPHAGLPGGSRRRAPAPAGQQQMRAESRSGAQRRRGSARRGAHREAGGCVRGRTRSSGSERSNALWQAVDAAEALALSSPLRRPWDQAQHFTNPAPVSKGPQSAPPSPPAGRRRRGADLALAPLAGEGHTRWRQPAGLGSRTKDPNCNPPHQTAQTTPRLLNLPKAKRAPLPGPRCRGDCGEPALPTPALAPRRKHLEPTTELQIPAV

SEQ ID NO: 803465 - protein, 241 aa, Homo sapiens
ARGLEALYRPAGAPLLRVPRPSPLPAPLWDPPAAFPTNEIFAMSKRKWRGFRGAQQERAQPPAASPQPCPAPHAGLPGGSRRRAPAPAGQQQMRAESRSGAQRRRGSARRGAHREAGGCVRGRTRSSGSERSNALWQAVDAAEGRRRRGADLALAPLAGEGHTRWRQPAGLGSRTKDPNCNPPHQTAQTTPRLLNLPKAKRAPLPGPRCRGDCGEPALPTPALAPRRKHLEPTTELQIPAV

SEQ ID NO: 803466 - protein, 70 aa, Homo sapiens
MQAALGAVTWSRGQGDSILEPEMSDSSSSSHSMDEKKETAGVVGTGVRCVPLTPYLKTRMASCDLMVSDA

SEQ ID NO: 803467 - protein, 83 aa, Homo sapiens
RKKLSSTSVTNSWVTKVHILASSPARSSGSQGPGTTGACLSFSTGTPESPGTPCIPPPYLSGLLSWSLTVSLSVGRTPNGPLG

SEQ ID NO: 803468 - protein, 339 aa, Homo sapiens
SAERPLAAAAGGEDAAAAGGGGGPGAAEEEALEWCKCLLAGGGGYDEFCAAVRAYDPAALCGLVWTANFVAYRCRTCGISPCMSLCAECFHQGDHTGHDFNMFRSQAGGACDCGDSNVMRESGFCKRHQIKSSSNIPCVPKDLLMMSEFVLPRFIFCLIQYLREGYNEPAADGPSEKDLNKVLQLLEPQISFLEDLTKMGGAMRSVLTQVLTNQQNYKDLTSGLGENACVKKSHEKYLIALKSSGLTYPEDKLVYGVQEPSAGTSSLAVQGFIGATGTLGQVDSSDEDDQDGSQGLGKRKRVKLSSGTKDQSIMDVLKHKSFLEELLFWTIKYEFPQKM

SEQ ID NO: 803469 - protein, 197 aa, Homo sapiens
GVCGTWRSAAGSGRAARVNTAKGLSGENGSNKMFFYPEKEEKKKWKDLKLMKKLERQRAQEEQAKRLEEEEAAAEKEDRGRPYTLSVALPGSILDNAQSPELRTYLAGQIARACAIFCVDEIVVFDEEGQDAKTVEGEFTGVGKKGQACVQLARILQYLECPQYLRKAFFPKHQDLQFAGNAVWARPPISPGSCHRH

SEQ ID NO: 803470 - protein, 350 aa, Homo sapiens
GVCGTWRSAAGSGRAARVNTAKGLSGENGSNKMFFYPEKEEKKKWKDLKLMKKLERQRAQEEQAKRLEEEEAAAEKEDRGRPYTLSVALPGSILDNAQSPELRTYLAGQIARACAIFCVDEIVVFDEEGQDAKTVEGEFTGVGKKGQACVQLARILQYLECPQYLRKAFFPKHQDLQFAGLLNPLDSPHHMRQDEESEFREGIVVDRPTRPGHGSFVNCGMKKEVKIDKNLEPGLRVTVRLNQQQHPDCKTYHGKVVSSQDPRTKAGLYWGYTVRLASCLSAVFAEAPFQDGYDLTIGTSERGSDVASAQLPNFRKPSSSPWPPCSLASPRRVPGTPESSKGPRTSVKQQ

SEQ ID NO: 803471 - protein, 386 aa, Homo sapiens
GVCGTWRSAAGSGRAARVNTAKGLSGENGSNKMFFYPEKEEKKKWKDLKLMKKLERQRAQEEQAKRLEEEEAAAEKEDRGRPYTLSVALPGSILDNAQSPELRTYLAGQIARACAIFCVDEIVVFDEEGQDAKTVEGEFTGVGKKGQACVQLARILQYLECPQYLRKAFFPKHQDLQFAGLLNPLDSPHHMRQDEESEFREGIVVDRPTRPGHGSFVNCGMKKEVKIDKNLEPGLRVTVRLNQQQHPDCKTYHGKVVSSQDPRTKAGLYWGYTVRLASCLSAVFAEAPFQDGYDLTIGTSERGSDVASAQLPNFRHALVVFGGLQGLEAGADADPNLEVAEPSVLFDLYVNTCPGQGSRTIRTEEAILISLAALQPGLTQAGARHT

SEQ ID NO: 803472 - protein, 326 aa, Homo sapiens
IPAVDPNFPNKPPLTFDIIRKNVENNRYRRLDLFQEHMFEVLERARRMNRTDSEIYEDAVELQQFFIKIRDELCKNGEILLSPALSYTTKHLHNDVEKERKEKLPKEIEEDKLKREEEKREAEKSEDSSGAAGLSGLHRTYSQDCSFKNSMYHVGDYVYVEPAEANLQPHIVCIERLWEDSAGEKWLYGCWFYRPNETFHLATRKFLEKEVFKSDYYNKVPVSKILGKCVVMFVKEYFKLCPENFRDEDVFVCESRYSAKTKSFKKIKLWTMPISSVRFVPRDVPLPVVRVASVFANADKGDDEKNTDNSEDSRAEDNFNLEKVCR

SEQ ID NO: 803473 - protein, 218 aa, Homo sapiens
MLETFRNLASVDDGTQFKANGSVSLQDMYGQEKSKEQTIPNFTGNNSCAYTLEKNCEGYGTEDHHKNLRNHMVDRFCTHNEGNQYGEAIHQMPDLTLHKKVSAGEKPYECTKCRTVFTHLSSLKRHVKSHCGRKAPPGEECKQACICPSHLHSHGRTDTEEKPYKCQACGQTFQHPRYLSHHVKTHTAEKTYKCEQCRMAFNGFASFTRHVRTHTKDR

SEQ ID NO: 803474 - protein, 276 aa, Homo sapiens
EYLYLSAAPAARPRRARLGEPRSRGDMDSVVFEDVAVDFTLEEWALLDSAQRDLYRDVMLETFRNLASVDDGTQFKANGSVSLQDMYGQEKSKEQTIPNFTGNNSCAYTLEKNCEGYGTEDHHKNLRNHMVDRFCTHNEGNQYGEAIHQMPDLTLHKKVSAGEKPYECTKCRTVFTHLSSLKRHVKSHCGRKAPPGEECKQACICPSHLHSHGRTDTEEKPYKCQACGQTFQHPRYLSHHVKTHTAEKTYKCEQCRMAFNGFASFTRHVRTHTKDR

SEQ ID NO: 803475 - protein, 218 aa, Homo sapiens; identical to SEQ ID NO: 803473

SEQ ID NO: 803476 - protein, 90 aa, Homo sapiens
RTNQGGDLGHITVIELLHSLSDLVLVGFNIHSEHKRVVFFYLLHGRLSGQRKLDDSIVAKLVSPGGALPRISGLPPESQCLGPPEDIISP

SEQ ID NO: 803477 - protein, 157 aa, Homo sapiens
MLAGRLKPDEGGEVPVLNVSYKPQKISPKSTGSVRQLLHEKIRDAYTHPQFVTDVMKPLQIENIIDQEVQTLSGGELQRVALALCLGKPADVYLIDEPSAYLDSEQRLMAARVVKRFILHAKKTAFVVEHDFIMATYLADRVIVFDGVPSKNTVANR

SEQ ID NO: 803478 - protein, 599 aa, Homo sapiens
MADKLTRIAIVNHDKCKPKKCRQECKKSCPVVRMGKLCIEVTPQSKIAWISETLCIGCGICIKKCPFGALSIVNLPSNLEKETTHRYCANAFKLHRLPIPRPGEVLGLVGTNGIGKSTALKILAGKQKPNLGKYDDPPDWQEILTYFRGSELQNYFTKILEDDLKAIIKPQYVDQIPKAAKGTVGSILDRKDETKTQAIVCQQLDLTHLKERNVEDLSGGELQRFACAVVCIQKADIFMFDEPSSYLDVKQRLKAAITIRSLINPDRYIIVVEHDLSVLDYLSDFICCLYGVPSAYGVVTMPFSVREGINIFLDGYVPTENLRFRDASLVFKVAETANEEEVKKMCMYKYPGMKKKMGEFELAIVAGEFTDSEIMVMLGENGTGKTTFIRMLAGRLKPDEGGEVPVLNVSYKPQKISPKSTGSVRQLLHEKIRDAYTHPQFVTDVMKPLQIENIIDQEVQTLSGGELQRVALALCLGKPADVYLIDEPSAYLDSEQRLMAARVVKRFILHAKKTAFVVEHDFIMATYLADRVIVFDGVPSKNTVANSPQTLLAGMNKFLSQLEITFRRDPNNYRPRINKLNSIKDVEQKKSGNYFFLDD

SEQ ID NO: 803479 - protein, 599 aa, Homo sapiens; identical to SEQ ID NO: 803478

SEQ ID NO: 803480 - protein, 599 aa, Homo sapiens; identical to SEQ ID NO: 803478

SEQ ID NO: 803481 - protein, 599 aa, Homo sapiens; identical to SEQ ID NO: 803478

SEQ ID NO: 803482 - protein, 326 aa, Homo sapiens
MADKLTRIAIVNHDKCKPKKCRQECKKSCPVVRMGINIFLDGYVPTENLRFRDASLVFKVAETANEEEVKKMCMYKYPGMKKKMGEFELAIVAGEFTDSEIMVMLGENGTGKTTFIRMLAGRLKPDEGGEVPVLNVSYKPQKISPKSTGSVRQLLHEKIRDAYTHPQFVTDVMKPLQIENIIDQEVQTLSGGELQRVALALCLGKPADVYLIDEPSAYLDSEQRLMAARVVKRFILHAKKTAFVVEHDFIMATYLADRVIVFDGVPSKNTVANSPQTLLAGMNKFLSQLEITFRRDPNNYRPRINKLNSIKDVEQKKSGNYFFLDD

SEQ ID NO: 803483 - protein, 289 aa, Homo sapiens
AVVSTQSRHYGRGFRDASLVFKVAETANEEEVKKMCMYKYPGMKKKMGEFELAIVAGEFTDSEIMVMLGENGTGKTTFIRMLAGRLKPDEGGEVPVLNVSYKPQKISPKSTGSVRQLLHEKIRDAYTHPQFVTDVMKPLQIENIIDQEVQTLSGGELQRVALALCLGKPADVYLIDEPSAYLDSEQRLMAARVVKRFILHAKKTAFVVEHDFIMATYLADRVIVFDGVPSKNTVANSPQTLLAGMNKFLSQLEITFRRDPNNYRPRINKLNSIKDVEQKKSGNYFFLDD

SEQ ID NO: 803484 - protein, 154 aa, Homo sapiens
MKPLQIENIIDQEVQTLSGGELQRVALALCLGKPADVYLIDEPSAYLDSEQRLMAARVVKRFILHAKKTAFVVEHDFIMATYLADRVIVFDGVPSKNTVANSPQTLLAGMNKFLSQLEITFRRDPNNYRPRINKLNSIKDVEQKKSGNYFFLDD

SEQ ID NO: 803485 - protein, 154 aa, Homo sapiens; identical to SEQ ID NO: 803484

SEQ ID NO: 803486 - protein, 599 aa, Homo sapiens [sequence omitted]

SEQ ID NO: 803487 - protein, 243 aa, Homo sapiens [sequence omitted]

SEQ ID NO: 803488 - protein, 243 aa, Homo sapiens [sequence omitted]

SEQ ID NO: 803489 - protein, 130 aa, Homo sapiens
MVAWRVSASDAEHCPELPPVDNSIFVAKEVEGQILGTYVCIKGYHLVGKKTLFCNASKEWDNTTTECRLGHCPDPVLVNGEFSSSGPVNVSDKITFMCNDHYILKGSNRSQCLEDHTWAPPFPICKSNFA

SEQ ID NO: 803490 - protein, 243 aa, Homo sapiens [sequence omitted]

SEQ ID NO: 803491 - protein, 228 aa, Homo sapiens
MVAWRVSASDAEHCPELPPVDNSIFVAKEVEGQILGTYVCIKGYHLVGKKTLFCNASKEWDNTTTECRLGHCPDPVLVNGEFSSSGPVNVSDKITFMCNDHYILKGSNRSQCLEDHTWAPPFPICKSRNNFTLGSTISYYCEDRYYLVGVQEQQCVDGEWSSALPVCKLIQEAPKPECEKALLAFQESKNLCEAMENFMQQLKESGMTMEELKYSLELKKAELKAKLL

SEQ ID NO: 803492 - protein, 243 aa, Homo sapiens [sequence omitted]

SEQ ID NO: 803493 - protein, 161 aa, Homo sapiens
MADGWETARRLDRPPILENDENGILLVPGCEWAVFRLAHPGVITRIEIDTKYFEGNAPDSCKVDGCILTTQEEAVIRQKWILPAHKWKPLLPVTKLSPNQSHLFDSLTLELQDVITHARLTIVPDGGVSRLRLRGFPSSICLLRPREKPMLKFSVSFKANP

SEQ ID NO: 803494 - protein, 409 aa, Homo sapiens
MADAPKEGRLTRFLDFTQLMDMASESVGGKILFATDDFFAPAENLIKSDSPCFKEHEYTEFGKWMDGWETRRKRIPGHDWCVLRLGIQGVIRGFDVDVSYFTGDYAPRVSIQAANLEEDKLPEIPERGIRTGAAATPEEFEAIAELKSDDWSYLVPMTELKPGNPASGHNYFLVNSQQRWTHIRLNIFPDGGIARLRVFGTGQKDWTATDPKEPADLVAIAFGGVCVGFSNAKFGHPNNIIGVGGAKSMADGWETARRLDRPPILENDENGILLVPGCEWAVFRLAHPGVITRIEIDTKYFEGNAPDSCKVDGCILTTQEEAVIRQKWILPAHKWKPLLPVTKLSPNQSHLFDSLTLELQDVITHARLTIVPDGGVSRLRLRGFPSSICLLRPREKPMLKFSVSFKANP

SEQ ID NO: 803495 - protein, 486 aa, Homo sapiens
MYIKMATLANGQADNASLSTNGLGSSPGSAGHMNGLSHSPGNPSTIPMKDHDAIKLFIGQIPRNLDEKDLKPLFEEFGKIYELTVLKDRFTGMHKGCAFLTYCERESALKAQSALHEQKTLPGMNRPIQVKPADSESRGGSSCLRQPPSQDRKLFVGMLNKQQSEDDVRRLFEAFGNIEECTILRGPDGNSKGCAFVKYSSHAEAQAAINALHGSQTMPGASSSLVVKFADTDKERTMRRMQQMAGQMGMFNPMAIPFGAYGAYAQALMQQQAALMASVAQGGYLNPMAAFAAAQMQQMAALNMNGLAAAPMTPTSGGSTPPGITAPAVPSIPSPIGVNGFTGLPPQANGQPAAEAVFANGIHPYPAQSPTAADPLQQAYAGVQQYAGPAAYPAAYGQISQAFPQPPPMIPQQQREGPEGCNLFIYHLPQEFGDAELMQMFLPFGFVSFDNPASAQTAIQAMNGFQIGMKRLKVQLKRPKDANRPY

SEQ ID NO: 803496 - protein, 486 aa, Homo sapiens; identical to SEQ ID NO: 803495

SEQ ID NO: 803497 - protein, 486 aa, Homo sapiens; identical to SEQ ID NO: 803495

SEQ ID NO: 803498 - protein, 329 aa, Homo sapiens
MLNKQQSEDDVRRLFEAFGNIEECTILRGPDGNSKGCAFVKYSSHAEAQAAINALHGSQTMPGASSSLVVKFADTDKERTMRRMQQMAGQMGMFNPMAIPFGAYGAYAQALMQQQAALMASVAQGGYLNPMAAFAAAQMQQMAALNMNGLAAAPMTPTSGGSTPPGITAPAVPSIPSPIGVNGFTGLPPQANGQPAAEAVFANGIHPYPAQSPTAADPLQQAYAGVQQYAGPAAYPAAYGQISQAFPQPPPMIPQQQREGPEGCNLFIYHLPQEFGDAELMQMFLPFGFVSFDNPASAQTAIQAMNGFQIGMKRLKVQLKRPKDANRPY

SEQ ID NO: 803499 - protein, 301 aa, Homo sapiens
MLNKQQSEDDVRRLFEAFGNIEECTILRGPDGNSKGCAFVKYSSHAEAQAAINALHGSQTMPGASSSLVVKFADTDKERTMRRMQQMAGQMGMFNPMAIPFGAYGAYAQALMQQQAALMASVAQGGYLNPMAAFAAAQMQQMAALNMNGLAAAPMTPTSGGSTPPGITAPAVPSIPSPIGVNGFTGLPPQANGQPAAEAVFANGIHPYPAQSPTAADPLQQAYAGVQQYAGPAAYPAAYGQISQAFPQPPPMIPQQQREGFVSFDNPASAQTAIQAMNGFQIGMKRLKVQLKRPKDANRPY

SEQ ID NO: 803500 - protein, 486 aa, Homo sapiens; identical to SEQ ID NO: 803495

SEQ ID NO: 803501 - protein, 301 aa, Homo sapiens; identical to SEQ ID NO: 803499

SEQ ID NO: 803502 - protein, 273 aa, Homo sapiens
MLNKQQSEDDVRRLFEAFGNIEECTILRGPDGNSKGCAFVKYSSHAEAQAAINALHGSQTMPGASSSLVVKFADTDKERTMRRMQQMAGQMGMFNPMAIPFGAYGAYAQALMQQQAALMASVAQGGYLNPMAAFAAAQMQQMAALNMNGLAAAPMTPTSGGSTPPGITAPAVPSIPSPIGVNGFTGLPPQANGQPAAEAVFANGIHPYPAQSPTAADPLQQAYAGVQQYAGRFVSFDNPASAQTAIQAMNGFQIGMKRLKVQLKRPKDANRPY

SEQ ID NO: 803503 - protein, 349 aa, Homo sapiens
MLNKQQSEDDVRRLFEAFGNIEECTILRGPDGNSKGCAFVKYSSHAEAQAAINALHGSQTMPGASSSLVVKFADTDKERTMRRMQQMAGQMGMFNPMAIPFGAYGAYAQALMQQQAALMASVAQGGYLNPMAAFAAAQMQQMAALNMNGLAAAPMTPTSGGSTPPGITAPAVPSIPSPIGVNGFTGLPPQANGQPAAEAVFANGIHPYPAQSPTAADPLQQAYAGVQQYAGPAAYPAAYGQISQAFPQPPPMIPQQQREGPEGCNLFIYHLPQEFGDAELMQMFLPFGNVISSKVFVDRATNQSKCFGFVSFDNPASAQTAIQAMNGFQIGMKRLKVQLKRPKDANRPY

SEQ ID NO: 803504 - protein, 329 aa, Homo sapiens; identical to SEQ ID NO: 803498

SEQ ID NO: 803505 - protein, 329 aa, Homo sapiens; identical to SEQ ID NO: 803498

SEQ ID NO: 803506 - protein, 684 aa, Homo sapiens
MQDDLLMDKSKTQPQPQQQQRQQQQPQPESSVSEAPSTPLSSETPKPEENSAVPALSPAAAPPAPNGPDKMQMESPLLPGLSFHQPPQQPPPPQEPAAPGASLSPSFGSTWSTGTTNAVEDSFFQGITPVNGTMLFQNFPHHVNPVFGGTFSPQIGLAQTQHHQQPPPPAPAPQPAQPAQPPQAQPPQQRRSPASPSQAPYAQRSAAAAYGHQPIMTSKPSSSSAVAAAAAAAAASSASSSWNTHQSVNAAWSAPSNPWGGLQAGRDPRRAVGVGVGVGVGVPSPLNPISPLKKPFSSNVIAPPKFPRAAPLTSKSWMEDNAFRTDNGNNLLPFQDRSRPYDTFNLHSLENSLMDMIRTDHEPLKGRMGINFHHPGTDNIMALNSRSSLFPFEDAFLDDSHGDQALSSGLSSPTRCQNGERVERYSRKVFVGGLPPDIDEDEITASFRRFGPLVVDWPHKAESKSYFPPKGYAFLLFQEESSVQALIDACLEEDGKLYLCVSSPTIKDKPVQIRPWNLSDSDFVMDGSQPLDPRKTIFVGGVPRPLRAVELAMIMDRLYGGVCYAGIDTDPELKYPKGAGRVAFSNQQSYIAAISARFVQLQHNDIDKRVEVKPYVLDDQMCDECQGTRCGGKFAPFFCANVTCLQYYCEYCWASIHSRAGREFHKPLVKEGGDRPRHVPFRWS

SEQ ID NO: 803507 - protein, 684 aa, Homo sapiens; identical to SEQ ID NO: 803506

SEQ ID NO: 803508 - protein, 485 aa, Homo sapiens
MLGKDYMLAIILVNCDDDLWGDHSLEVEAGLPPGWRKIHDAAGTYYWHVPSGSTQWQRPTWELGDAEDPGTGTEGIWGLRPPKGRSFSSLESSLDRSNSLSWYGGESYIQSMEPGAKCFAVRSLGWVEVPEEDLAPGKSSIAVNNCIQQLAQTRSRSQPPDGAWGEGQNMLMILKKDAMSLVNPLDHSLIHCQPLVHIRVWGVGSSKGRRDFAFVASDKDSCMLKCHVFRCDVPAKAIASALHGLCAQILSERVEVSGDASCCSPDPISPEDLPRQVELLDAVSQAAQKYEALYMGTLPVTKAMGMDVLNEAIGTLTARGDRNAWVPTMLSVSDSLMTAHPIQAEASTEEEPLWQCPVRLVTFIGVGRDPHTFGLIADLGRQSFQCAAFWCQPHAGGLSEAVQAACMVQYQKCLVASAARGKAWGAQARARLRLKRTSSMDSPGGPLPLPLLKGGVGGAGATPRKRGVFSFLDAFRLKPSLLHMP

SEQ ID NO: 803509 - protein, 539 aa, Homo sapiens
MLGKDYMLAIILVNCDDDLWGDHSLEVEAGLPPGWRKIHDAAGTYYWHVPSGSTQWQRPTWELGDAEDPGTGTEGIWGLRPPKGRSFSSLESSLDRSNSLSWYGGESYIQSMEPGAKCFAVRSLGWVEVPEEDLAPGKSSIAVNNCIQQLAQTRSRSQPPDGAWGEGQNMLMILKKDAMSLVNPLDHSLIHCQPLAVIPTDADPQYLNPWTQILCCGPRTASPAWSSPGWGGWAQLSRDSLGRVREAGLIPFCAPTCFRNSDSRDFAFVASDKDSCMLKCHVFRCDVPAKAIASALHGLCAQILSERVEVSGDASCCSPDPISPEDLPRQVELLDAVSQAAQKYEALYMGTLPVTKAMGMDVLNEAIGTLTARGDRNAWVPTMLSVSDSLMTAHPIQAEASTEEEPLWQCPVRLVTFIGVGRDPHTFGLIADLGRQSFQCAAFWCQPHAGGLSEAVQAACMVQYQKCLVASAARGKAWGAQARARLRLKRTSSMDSPGGPLPLPLLKGGVGGAGATPRKRGVFSFLDAFRLKPSLLHMP

SEQ ID NO: 803510 - protein, 495 aa, Homo sapiens
MLGKDYMLAIILVNCDDDLWGDHSLEVEAGLPPGWRKIHDAAGTYYWHVPSGSTQWQRPTWELGDAEDPGTGTEGIWGLRPPKGRSFSSLESSLDRSNSLSWYGGESYIQSMEPGAKCFAVRSLGWVEVPEEDLAPGKSSIAVNNCIQQLAQTRSRSQPPDGAWGEGQNMLMILKKDAMSLVNPLDHSLIHCQPLVHIRVWGVGSSKGRLPQPHLCPWLRDFAFVASDKDSCMLKCHVFRCDVPAKAIASALHGLCAQILSERVEVSGDASCCSPDPISPEDLPRQVELLDAVSQAAQKYEALYMGTLPVTKAMGMDVLNEAIGTLTARGDRNAWVPTMLSVSDSLMTAHPIQAEASTEEEPLWQCPVRLVTFIGVGRDPHTFGLIADLGRQSFQCAAFWCQPHAGGLSEAVQAACMVQYQKCLVASAARGKAWGAQARARLRLKRTSSMDSPGGPLPLPLLKGGVGGAGATPRKRGVFSFLDAFRLKPSLLHMP

SEQ ID NO: 803511 - protein, 263 aa, Homo sapiens
MLKCHVFRCDVPAKAIASALHGLCAQILSERVEVSGDASCCSPDPISPEDLPRQVELLDAVSQAAQKYEALYMGTLPVTKAMGMDVLNEAIGTLTARGDRNAWVPTMLSVSDSLMTAHPIQAEASTEEEPLWQCPVRLVTFIGVGRDPHTFGLIADLGRQSFQCAAFWCQPHAGGLSEAVQAACMVQYQKCLVASAARGKAWGAQARARLRLKRTSSMDSPGGPLPLPLLKGGVGGAGATPRKRGVFSFLDAFRLKPSLLHMP

SEQ ID NO: 803512 - protein, 263 aa, Homo sapiens; identical to SEQ ID NO: 803511

SEQ ID NO: 803513 - protein, 263 aa, Homo sapiens; identical to SEQ ID NO: 803511

SEQ ID NO: 803514 - protein, 439 aa, Homo sapiens
MLGKDYMLAIILVNCDDDLWGDHSLEVEAGLPPGWRKIHDAAGTYYWHVPSGSTQWQRPTWELGDAEDPGTCFAVRSLGWVEVPEEDLAPGKSSIAVNNCIQQLAQTRSRSQPPDGAWGEGQNMLMILKKDAMSLVNPLDHSLIHCQPLVHIRVWGVGSSKGRRDFAFVASDKDSCMLKCHVFRCDVPAKAIASALHGLCAQILSERVEVSGDASCCSPDPISPEDLPRQVELLDAVSQAAQKYEALYMGTLPVTKAMGMDVLNEAIGTLTARGDRNAWVPTMLSVSDSLMTAHPIQAEASTEEEPLWQCPVRLVTFIGVGRDPHTFGLIADLGRQSFQCAAFWCQPHAGGLSEAVQAACMVQYQKCLVASAARGKAWGAQARARLRLKRTSSMDSPGGPLPLPLLKGGVGGAGATPRKRGVFSFLDAFRLKPSLLHMP

SEQ ID NO: 803515 - protein, 374 aa, Homo sapiens
MEPGAKCFAVRSLGWVEVPEEDLAPGKSSIAVNNCIQQLAQTRSRSQPPDGAWGEGQNMLMILKKDAMSLVNPLDHSLIHCQPLVHIRVWGVGSSKGRRDFAFVASDKDSCMLKCHVFRCDVPAKAIASALHGLCAQILSERVEVSGDASCCSPDPISPEDLPRQVELLDAVSQAAQKYEALYMGTLPVTKAMGMDVLNEAIGTLTARGDRNAWVPTMLSVSDSLMTAHPIQAEASTEEEPLWQCPVRLVTFIGVGRDPHTFGLIADLGRQSFQCAAFWCQPHAGGLSEAVQAACMVQYQKCLVASAARGKAWGAQARARLRLKRTSSMDSPGGPLPLPLLKGGVGGAGATPRKRGVFSFLDAFRLKPSLLHMP

SEQ ID NO: 803516 - protein, 121 aa, Homo sapiens [sequence omitted]

SEQ ID NO: 803517 - protein, 239 aa, Homo sapiens
MLKCHVFRCDVPAKAIASALHGLCAQILSERVEVSGDASCCSPDPISPEDLPRQVELLDAVSQAAQKYEALYMGTLPVTKAMGMDVLNEAIGTLTARGDRNAWVPTMLSVSDSLMTAHPIQAEASTEEEPLWQCPVRLVTFIGVGRDPHTFGLIADLGRQSFQCAAFWCQPHAGGLSEAVQAACMVQYQKCLVASAARGKAWGAQARARLRLKRTSSMDSPGGPLPLPCPLPEIKNSLT

SEQ ID NO: 803518 - protein, 209 aa, Homo sapiens [sequence omitted]

SEQ ID NO: 803519 - protein, 209 aa, Homo sapiens [sequence omitted]

SEQ ID NO: 803520 - protein, 839 aa, Homo sapiens
MGWVGGRRRDSASPPGRSRSAADDINPAPANMEGGGGSVAVAGLGARGSGAAAATVRELLQDGCYSDFLNEDFDVKTYTSQSIHQAVIAEQLAKLAQGISQLDRELHLQVVARHEDLLAQATGIESLEGVLQMMQTRIGALQGAVDRIKAKIVEPYNKIVARTAQLARLQVACDLLRRIIRILNLSKRLQGQLQGGSREITKAAQSLNELDYLSQGIDLSGIEVIENDLLFIARARLEVENQAKRLLEQGLETQNPTQVGTALQVFYNLGTLKDTITSVVDGYCATLEENINSALDIKVLTQPSQSAVRGGPGRSTMPTPGNTAALRASLWTNMEKLMDHIYAVCGQVQHLQKVLAKKRDPVSHICFIEEIVKDGQPEIFYTFWNSVTQALSSQFHMATNSSMFLKQAFEGEYPKLLRLYNDLWKRLQQYSQHIQGNFNASGTTDLYVDLQHMEDDAQDIFIPKKPDYDPEKALKDSLQPYEAAYLSKSLSRLFDPINLVFPPGGRNPPSSDELDGIIKTIASELNVAAVDTNLTLAVSKNVAKTIQLYSVKSEQLLSTQGDASQVIGPLTEGQRRNVAVVNSLYKLHQSVTKAIHALMENAVQPLLTSVGDAIEAIIITMHQEDFSGSLSSSGKPDVPCSLYMKELQGFIARVMSDYFKHFECLDFVFDNTEAIAQRAVELFIRHASLIRPLGEGGKMRLAADFAQMELAVGPFCRRVSDLGKSYRMLRSFRPLLFQASEHVASSPALGDVIPFSIIIQFLFTRAPAELKSPFQRAEWSHTRFSQWLDDHPSEKDRLLLIRGALEAYVQSVRSREGKEFAPVYPIMVQLLQKAMSALQ

SEQ ID NO: 803521 - protein, 860 aa, Homo sapiens
MGWVGGRRRDSASPPGRSRSAADDINPAPANMEGGGGSVAVAGLGARGSGAAAATVRELLQDGCYSDFLNEDFDVKTYTSQSIHQAVIAEQLAKLAQGISQLDRELHLQVVARHEDLLAQATGIESLEGVLQMMQTRIGALQGAVDRIKAKIVEPYNKIVARTAQLARLQVACDLLRRIIRILNLSKRLQGQLQGGSREITKAAQSLNELDYLSQGIDLSGIEVIENDLLFIARARLEVENQAKRLLEQGLETQNPTQVGTALQVFYNLGTLKDTITSVVDGYCATLEENINSALDIKVLTQPSQSAVRGGPGRSTMPTPGNTAALRASLWTNMEKLMDHIYAVCGQVQHLQKVLAKKRDPVSHICFIEEIVKDGQPEIFYTFWNSVTQALSSQFHMATNSSMFLKQAFEGEYPKLLRLYNDLWKRLQQYSQHIQGNFNASGTTDLYVDLQHMEDDAQDIFIPKKPDYDPEKALKDSLQPYEAAYLSKSLSRLFDPINLVFPPGGRNPPSSDELDGIIKTIASELNVAAVDTNLTLAVSKNVAKTIQLYSVKSEQLLSTQGDASQVIGPLTEGQRRNVAVVNSLYKLHQSVTKVVSSQSSFPLAAEQTIISALKAIHALMENAVQPLLTSVGDAIEAIIITMHQEDFSGSLSSSGKPDVPCSLYMKELQGFIARVMSDYFKHFECLDFVFDNTEAIAQRAVELFIRHASLIRPLGEGGKMRLAADFAQMELAVGPFCRRVSDLGKSYRMLRSFRPLLFQASEHVASSPALGDVIPFSIIIQFLFTRAPAELKSPFQRAEWSHTRFSQWLDDHPSEKDRLLLIRGALEAYVQSVRSREGKEFAPVYPIMVQLLQKAMSALQ

SEQ ID NO: 803522 - protein, 727 aa, Homo sapiens
MQTRIGALQGAVDRIKAKIVEPYNKIVARTAQLARLQVACDLLRRIIRILNLSKRLQGQLQGGSREITKAAQSLNELDYLSQGIDLSGIEVIENDLLFIARARLEVENQAKRLLEQGLETQNPTQVGTALQVFYNLGTLKDTITSVVDGYCATLEENINSALDIKVLTQPSQSAVRGGPGRSTMPTPGNTAALRASLWTNMEKLMDHIYAVCGQVQHLQKVLAKKRDPVSHICFIEEIVKDGQPEIFYTFWNSVTQALSSQFHMATNSSMFLKQAFEGEYPKLLRLYNDLWKRLQQYSQHIQGNFNASGTTDLYVDLQHMEDDAQDIFIPKKPDYDPEKALKDSLQPYEAAYLSKSLSRLFDPINLVFPPGGRNPPSSDELDGIIKTIASELNVAAVDTNLTLAVSKNVAKTIQLYSVKSEQLLSTQGDASQVIGPLTEGQRRNVAVVNSLYKLHQSVTKVVSSQSSFPLAAEQTIISALKAIHALMENAVQPLLTSVGDAIEAIIITMHQEDFSGSLSSSGKPDVPCSLYMKELQGFIARVMSDYFKHFECLDFVFDNTEAIAQRAVELFIRHASLIRPLGEGGKMRLAADFAQMELAVGPFCRRVSDLGKSYRMLRSFRPLLFQASEHVASSPALGDVIPFSIIIQFLFTRAPAELKSPFQRAEWSHTRFSQWLDDHPSEKDRLLLIRGALEAYVQSVRSREGKEFAPVYPIMVQLLQKAMSALQ

SEQ ID NO: 803523 - protein, 643 aa, Homo sapiens
QVIMLTALPLTSCCVAQFLTATDSYWSAAQGRWELLINPTQVGTALQVFYNLGTLKDTITSVVDGYCATLEENINSALDIKVLTQPSQSAVRGGPGRSTMPTPGNTAALRASLWTNMEKLMDHIYAVCGQVQHLQKVLAKKRDPVSHICFIEEIVKDGQPEIFYTFWNSVTQALSSQFHMATNSSMFLKQAFEGEYPKLLRLYNDLWKRLQQYSQHIQGNFNASGTTDLYVDLQHMEDDAQDIFIPKKPDYDPEKALKDSLQPYEAAYLSKSLSRLFDPINLVFPPGGRNPPSSDELDGIIKTIASELNVAAVDTNLTLAVSKNVAKTIQLYSVKSEQLLSTQGDASQVIGPLTEGQRRNVAVVNSLYKLHQSVTKVVSSQSSFPLAAEQTIISALKAIHALMENAVQPLLTSVGDAIEAIIITMHQEDFSGSLSSSGKPDVPCSLYMKELQGFIARVMSDYFKHFECLDFVFDNTEAIAQRAVELFIRHASLIRPLGEGGKMRLAADFAQMELAVGPFCRRVSDLGKSYRMLRSFRPLLFQASEHVASSPALGDVIPFSIIIQFLFTRAPAELKSPFQRAEWSHTRFSQWLDDHPSEKDRLLLIRGALEAYVQSVRSREGKEFAPVYPIMVQLLQKAMSALQ

SEQ ID NO: 803524 - protein, 870 aa, Homo sapiens
MGWVGGRRRDSASPPGRSRSAADDINPAPANMEGGGGSVAVAGLGARGSGAAAATVRELLQDGCYSDFLNEDFDVKTYTSQSIHQAVIAEQLAKLAQGISQLDRELHLQVVARHEDLLAQATGIESLEGVLQMMQTRIGALQGAVDRIKAKIVEPYNKIVARTAQLARLQVACDLLRRIIRILNLSKRLQGQLQGGSREITKAAQSLNELDYLSQGIDLSGIEVIENDLLFIARARLEVENQAKRLLEQGLETQNPTQVGTALQVFYNLGTLKDTITSVVDGYCATLEENINSALDIKVLTQPSQSAVRGGPGRSTMPTPGNTAALRASLWTNMEKLMDHIYAVCGQVQHLQKVLAKKRDPVSHICFIEEIVKDGQPEIFYTFWNSVTQALSSQFHMATNSSMFLKQAFEGEYPKLLRLYNDLWKRLQQYSQHIQGNFNASGTTDLYVDLQHMEDDAQDIFIPKKPDYDPEKALKDSLQPYEAAYLSKSLSRLFDPINLVFPPGGRNPPSSDELDGIIKTIASELNVAAVDTNLTLAVSKNVAKTIQLYSVKSEQLLSTQGDASQVIGPLTEGQRRNVAVVNSLYKLHQSVTKVVSSQSSFPLAAEQTIISALKDLQYSVEYELAIHALMENAVQPLLTSVGDAIEAIIITMHQEDFSGSLSSSGKPDVPCSLYMKELQGFIARVMSDYFKHFECLDFVFDNTEAIAQRAVELFIRHASLIRPLGEGGKMRLAADFAQMELAVGPFCRRVSDLGKSYRMLRSFRPLLFQASEHVASSPALGDVIPFSIIIQFLFTRAPAELKSPFQRAEWSHTRFSQWLDDHPSEKDRLLLIRGALEAYVQSVRSREGKEFAPVYPIMVQLLQKAMSALQ

SEQ ID NO: 803525 - protein, 737 aa, Homo sapiens
MGWVGGRRRDSASPPGRSRSAADDINPAPANMEGGGGSVAVAGLGARGSGAAAATVRELLQDGCYSDFLNEDFDVKTYTSQSIHQAVIAEQLAKLAQGISQLDRELHLQVVARHEDLLAQATGIESLEGVLQMMQTRIGALQGAVDRIKAKIVEPYNKIVARTAQLARLQVACDLLRRIIRILNLSKRLQGQLQGGSREITKAAQSLNELESCCITQAGVQWCYHSSLQPQPPGLRQSSFLSLPGELGPQDGQPEIFYTFWNSVTQALSSQFHMATNSSMFLKQAFEGEYPKLLRLYNDLWKRLQQYSQHIQGNFNASGTTDLYVDLQHMEDDAQDIFIPKKPDYDPEKALKDSLQPYEAAYLSKSLSRLFDPINLVFPPGGRNPPSSDELDGIIKTIASELNVAAVDTNLTLAVSKNVAKTIQLYSVKSEQLLSTQGDASQVIGPLTEGQRRNVAVVNSLYKLHQSVTKVVSSQSSFPLAAEQTIISALKAIHALMENAVQPLLTSVGDAIEAIIITMHQEDFSGSLSSSGKPDVPCSLYMKELQGFIARVMSDYFKHFECLDFVFDNTEAIAQRAVELFIRHASLIRPLGEGGKMRLAADFAQMELAVGPFCRRVSDLGKSYRMLRSFRPLLFQASEHVASSPALGDVIPFSIIIQFLFTRAPAELKSPFQRAEWSHTRFSQWLDDHPSEKDRLLLIRGALEAYVQSVRSREGKEFAPVYPIMVQLLQKAMSALQ

SEQ ID NO: 803526 - protein, 823 aa, Homo sapiens
MGWVGGRRRDSASPPGRSRSAADDINPAPANMEGGGGSVAVAGLGARGSGAAAATVRELLQDGCYSDFLNEDFDVKTYTSQSIHQAVIAEQLAKLAQGISQLDRELHLQVVARHEDLLAQATGIESLEGVLQMMQTRIGALQGAVDRIKAKIVEPYNKIVARTAQLARLQVACDLLRRIIRILNLSKRLQGQLQGGSREITKAAQSLNELDYLSQGIDLSGIEVIENDLLFIARARLEVENQAKRLLEQGLETQNPTQVGTALQVFYNLGTLKDTITSVVDGYCATLEENINSALDIKVLTQPSQSAVRGGPGRSTMPTPGNTAALRASLWTNMEKLMDHIYAVCGQVQHLQKVLAKKRDPVSHICFIEEIVKDGQPEIFYTFWNSVTQALSSQFHMATNSSMFLKQAFEGEYPKLLRLYNDLWKRLQQYSQHIQGNFNASGTTDLYVDLQHMEDDAQDIFIPKKPDYDPEKALKDSLQPYEAAYLSKSLSRLFDPINLVFPPGGRNPPSSDELDGIIKTIASELNVAAVDTNLTLAVSKNVAKTIQLYSVKSEQLLSTQGDASQVIGPLTEGQRRNVAVVNSLYKLHQSVTKVVSSQSSFPLAAEQTIISALKAIHALMENAVQPLLTSVGDAIEAIIITMHQEDFSGSLSSSGKPDVPCSLYMKELQGFIARVMSDYFKHFECLDFVFDNTEAIAQRAVELFIRHASLIRPLGEGGKMRLAADFAQMELAVGPFCRRVSDLGKSYRMLRSFRPLLFQASEHVASSPALGDVIPFSIIIQFLFTRAPAELKSPFQRAEWSHTRFSQWLDDHPSEKDRLLLIR

SEQ ID NO: 803527 - protein, 207 aa, Homo sapiens
MGWVGGRRRDSASPPGRSRSAADDINPAPANMEGGGGSVAVAGLGARGSGAAAATVRELLQDGCYSDFLNEDFDVKTYTSQSIHQAVIAEQLAKLAQGISQLDRELHLQVVARHEDLLAQATGIESLEGVLQMMQTRIGALQGAVDRIKAKIVEPYNKIVARTAQLARLQVVSYFYFFILYYSFCFHKWTKFKSMSLEEVREWEQKV

SEQ ID NO: 803528 - protein, 206 aa, Homo sapiens
MNFQQRLQSLWTLARPFCPPLLATASQMQMVVLPCLGFTLLLWSQVSGAQGQEFHFGPCQVKGVVPQKLWEAFWAVKDTMQAQDNITSARLLQQEVLQNVSDAESCYLVHTLLEFYLKTVFKNYHNRTVEVRTLKSFSTLANNFVLIVSQLQPSQENEMFSIRDSAHRRFLLFRRAFKQLDVEAALTKALGEVDILLTWMQKFYKL

SEQ ID NO: 803529 - protein, 442 aa, Homo sapiens
MPASGAPTPSRHVSLPTLAGYEETLTRLAAILAKHFADARIVGTDIRDSLMQALASYVCYPHSLRAVERIPEEQRIAMVRNLLAPYEQRPWAQTNWILVRLWRGCGFGYRYTRLPHLLKTKLEDANLPSLQKPCPSTLLQQHMADLLQQGPDVAPSFLNSVLNQLNWAFSEFIGMIQEIQQAAERLERNFVDSRQLKVCATCFDLSVSLLRVLEMTITLVPEIFLDWTRPTSEMLLRRLAQLLNQVLNRVTAERNLFDRVVTLRLPGLESVDHYPILVAVTGILVQLLVRGPASEREQATSVLLADPCFQLRSICYLLGQPEPPAPGTALPAPDRKRFSLQSYADYISADELAQVEQMLAHLTSASAQAAAASLPTSEEDLCPICYAHPISAVFQPCGHKSCKACINQHLMNNKDCFFCKTTIVSVEDWEKGANTSTTSSAA

SEQ ID NO: 803530 - protein, 202 aa, Homo sapiens
DAWVDPRVRVTAERNLFDRVVTLRLPGLESVDHYPILVAVTGILVQLLVRGPASEREQATSVLLADPCFQLRSICYLLGQPEPPAPGTALPAPDRKRFSLQSYADYISADELAQVEQMLAHLTSASAQAAAASLPTSEEDLCPICYAHPISAVFQPCGHKSCKACINQHLMNNKDCFFCKTTIVSVEDWEKGANTSTTSSAA

SEQ ID NO: 803531 - protein, 181 aa, Homo sapiens
MEHGYEETLTRLAAILAKHFADARIVGTDIRDSLMQALASYVCYPHSLRAVERIPEEQRIAMVRNLLAPYEQRPWAQTNWILVRLWRGCGFGYRYTRLPHLLKTKLEDANLPSLQKPCPSTLLQQHMADLLQQGPDVAPSFSGPQPGPGATPNPRTVHRSHEQTAARTRETRAPAIPTTAP

SEQ ID NO: 803532 - protein, 196 aa, Homo sapiens
TLRGSPLRLPRLCAQLLERAGCLGPAAAAAGTAAAAAGWGEQVEQHEHKAHGTAQQCGEACVESLGLWARKVHAHVVLVRLVVVQAGPSGQAHEESRMLLLYVAYGQAAVGQHRDAAIAGSWRPEKLLLRRNPGNAHGRDAGVAVKPQGPTHQRVQVLFRPLRPRAGADEQFSKTRLCWKKRTRDAGTLKAKHTYS

SEQ ID NO: 803533 - protein, 991 aa, Homo sapiens
MMSLLRLYRFSPIVPDLGLQIHYLRLTIAILRHEKSRKFLLSNVLFDVLRSVVFFYIKSPLRVEEAGLQELIPTTWWPHCSSREGKESTEMKEETAEERLRRRAYERGCQRLRKRIEGQPALGTGEGGRCVCAHEGAWRCPCLGGTWGTLVVEPWPKPAPHLLEPEGHVPHLTSSGGRTTGQILKLLLDNKDDNGGEASRYIFLTKFRKFLQENASGRGNMPMLCPPEYMVCFLHRLISALRYYWDEYKASNPHASFSEEAYIPPQVFYNGKVDYFDLQRLGGLLSHLRKTLKDDLASKANIVIDPLELQSTAMDDLDEDEEPAPAMAQRPMQALAVGGPLPLPRPGWLSSPTLGRANRFLSTAAVSLMTPRRPLSTSEKVKVRTLSVEQRTREDIEGSHWNEGLLLGRPPEEPEQPLTENSLLEVLDGAVMMYNLSVHQQLGKMVGVSDDVNEYAMALRDTEDKLRRCPKRRKDILAELTKSQKVFSEKLDHLSRRLAWVHATVYSQEKMLDIYWLLRVCLRTIEHGDRTGSLFAFMPEFYLSVAINSYSALKNYFGPVHSMEELPGYEETLTRLAAILAKHFADARIVGTDIRDSLMQALASYVCYPHSLRAVERIPEEQRIAMVRNLLAPYEQRPWAQTNWILVRLWRGCGFGYRYTRLPHLLKTKLEDANLPSLQKPCPSTLLQQHMADLLQQGPDVAPSFLNSVLNQLNWAFSEFIGMIQEIQQAAERLERNFVDSRQLKVCATCFDLSVSLLRVLEMTITLVPEIFLDWTRPTSEMLLRRLAQLLNQVLNRVTAERNLFDRVVTLRLPGLESVDHYPILVAVTGILVQLLVRGPASEREQATSVLLADPCFQLRSICYLLGQPEPPAPGTALPAPDRKRFSLQSYADYISADELAQVEQMLAHLTSASAQAAAASLPTSEEDLCPICYAHPISAVFQPCGHKSCKACINQHLMNNKDCFFCKTTNHHIQPPCLPVSSLVGAQPWP

SEQ ID NO: 803534 - protein, 875 aa, Homo sapiens
PRLRSFNSSENAVAGEHAHALPPRQGKESTEMKEETAEERLRRRAYERGCQRLRKRIEVVEELQVQILKLLLDNKDDNGGEASRYIFLTKFRKFLQENASGRGNMPMLCPPEYMVCFLHRLISALRYYWDEYKASNPHASFSEEAYIPPQVFYNGKVDYFDLQRLGGLLSHLRKTLKDDLASKANIVIDPLELQSTAMDDLDEDEEPAPAMAQRPMQALAVGGPLPLPRPGWLSSPTLGRANRFLSTAAVSLMTPRRPLSTSEKVKVRTLSVEQRTREDIEGSHWNEGLLLGRPPEEPEQPLTENSLLEVLDGAVMMYNLSVHQQLGKMVGVSDDVNEYAMALRDTEDKLRRCPKRRKDILAELTKSQKVFSEKLDHLSRRLAWVHATVYSQEKMLDIYWLLRVCLRTIEHGDRTGSLFAFMPEFYLSVAINSYSALKNYFGPVHSMEELPGYEETLTRLAAILAKHFADARIVGTDIRDSLMQALASYVCYPHSLRAVERIPEEQRIAMVRNLLAPYEQRPWAQTNWILVRLWRGCGFGYRYTRLPHLLKTKLEDANLPSLQKPCPSTLLQQHMADLLQQGPDVAPSFLNSVLNQLNWAFSEFIGMIQEIQQAAERLERNFVDSRQLKVCATCFDLSVSLLRVLEMTITLVPEIFLDWTRPTSEMLLRRLAQLLNQVLNRVTAERNLFDRVVTLRLPGLESVDHYPILVAVTGILVQLLVRGPASEREQATSVLLADPCFQLRSICYLLGQPEPPAPGTALPAPDRKRFSLQSYADYISADELAQVEQMLAHLTSASAQAAAASLPTSEEDLCPICYAHPISAVFQPCGHKSCKACINQHLMNNKDCFFCKTTNHHIQPPCLPVSSLVGAQPWP

SEQ ID NO: 803535 - protein, 990 aa, Homo sapiens
MMSLLRLYRFSPIVPDLGLQIHYLRLTIAILRHEKSRKFLLSNVLFDVLRSVVFFYIKSPLRVEEAGLQELIPTTWWPHCSSREGKESTEMKEETAEERLRRRAYERGCQRLRKRIEGQPALGTGEGGRCVCAHEGAWRCPCLGGTWGTLVVEPWPKPAPHLLEPEGHVPHLTSSGGRTTGQILKLLLDNKDDNGGEASRYIFLTKFRKFLQENASGRGNMPMLCPPEYMVCFLHRLISALRYYWDEYKASNPHASFSEEAYIPPQVFYNGKVDYFDLQRLGGLLSHLRKTLKDDLASKANIVIDPLELQSTAMDDLDEDEEPAPAMAQRPMQALAVGGPLPLPRPGWLSSPTLGRANRFLSTAAVSLMTPRRPLSTSEKVKVRTLSVEQRTREDIEGSHWNEGLLLGRPPEEPEQPLTENSLLEVLDGAVMMYNLSVHQQLGKMVGVSDDVNEYAMALRDTEDKLRRCPKRRKDILAELTKSQKVFSEKLDHLSRRLAWVHATVYSQEKMLDIYWLLRVCLRTIEHGDRTGSLFAFMPEFYLSVAINSYSALKNYFGPVHSMEELPGYEETLTRLAAILAKHFADARIVGTDIRDSLMQALASYVCYPHSLRAVERIPEEQRIAMVRNLLAPYEQRPWAQTNWILVRLWRGCGFGYRYTRLPHLLKTKLEDANLPSLQKPCPSTLLQQHMADLLQQGPDVAPSFLNSVLNQLNWAFSEFIGMIQEIQQAAERLERNFVDSRQLKVCATCFDLSVSLLRVLEMTITLVPEIFLDWTRPTSEMLLRRLAQLLNQVLNRVTAERNLFDRVVTLRLPGLESVDHYPILVAVTGILVQLLVRGPASEREQATSVLLADPCFQLRSICYLLGQPEPPAPGTALPAPDRKRFSLQSYADYISADELAQVEQMLAHLTSASAQAAAASLPTSEEDLCPICYAHPISAVFQPCGHKSCKACINQHLMNNKDCFFCKTTIVSVEDWEKGANTSTTSSAA

SEQ ID NO: 803536 - protein, 961 aa, Homo sapiens
MMSLLRLYRFSPIVPDLGLQIHYLRLTIAILRHEKSRKFLLSNVLFDVLRSVVFFYIKSPLRVEEAGLQELIPTTWWPHCSSREGKESTEMKEETAEERLRRRAYERGCQRLRKRIEGQPALGTGEGGRCVCAHEGAWRCPCLGGTWGTLVVEPWPKPAPHLLEPEGHVPHLTSSGGRTTGQILKLLLDNKDDNGGEASRYIFLTKFRKFLQENASGRGNMPMLCPPEYMVCFLHRLISALRYYWDEYKASNPHASFSEEAYIPPQVFYNGKVDYFDLQRLGGLLSHLRKTLKDDLASKANIVIDPLELQSTAMDDLDEDEEPAPAMAQRPMQALAVGGPLPLPRPGWLSSPTLGRANRFLSTAAVSLMTPRRPLSTSEKVKVRTLSVEQRTREDIEGSHWNEGLLLGRPPEEPEQPLTENSLLEVLDGAVMMYNLSVHQQLGKMVGVSDDVNEYAMALRDTEDKLRRCPKRRKDILAELTKSQKVFSEKLDHLSRRLAWVHATVYSQEKMLDIYWLLRVCLRTIEHGDRTGSLFAFMPEFYLSVAINSYSALKNYFGPVHSMEELPGYEEDPDPPGCHSRQTLCRRTHCGHWRIAMVRNLLAPYEQRPWAQTNWILVRLWRGCGFGYRYTRLPHLLKTKLEDANLPSLQKPCPSTLLQQHMADLLQQGPDVAPSFLNSVLNQLNWAFSEFIGMIQEIQQAAERLERNFVDSRQLKVCATCFDLSVSLLRVLEMTITLVPEIFLDWTRPTSEMLLRRLAQLLNQVLNRVTAERNLFDRVVTLRLPGLESVDHYPILVAVTGILVQLLVRGPASEREQATSVLLADPCFQLRSICYLLGQPEPPAPGTALPAPDRKRFSLQSYADYISADELAQVEQMLAHLTSASAQAAAASLPTSEEDLCPICYAHPISAVFQPCGHKSCKACINQHLMNNKDCFFCKTTIVSVEDWEKGANTSTTSSAA

SEQ ID NO: 803537 - protein, 426 aa, Homo sapiens
MEHGYEETLTRLAAILAKHFADARIVGTDIRDSLMQALASYVCYPHSLRAVERIPEEQRIAMVRNLLAPYEQRPWAQTNWILVRLWRGCGFGYRYTRLPHLLKTKLEDANLPSLQKPCPSTLLQQHMADLLQQGPDVAPSFLNSVLNQLNWAFSEFIGMIQEIQQAAERLERNFVDSRQLKVCATCFDLSVSLLRVLEMTITLVPEIFLDWTRPTSEMLLRRLAQLLNQVLNRVTAERNLFDRVVTLRLPGLESVDHYPILVAVTGILVQLLVRGPASEREQATSVLLADPCFQLRSICYLLGQPEPPAPGTALPAPDRKRFSLQSYADYISADELAQVEQMLAHLTSASAQAAAASLPTSEEDLCPICYAHPISAVFQPCGHKSCKACINQHLMNNKDCFFCKTTIVSVEDWEKGANTSTTSSAA

SEQ ID NO: 803538 - protein, 990 aa, Homo sapiens; identical to SEQ ID NO: 803535

SEQ ID NO: 803539 - protein, 112 aa, Homo sapiens
TCLWTLALRLGASGGVVLSTEDCALSSWSGLGVWGQRRQRQARRQQRQGGANRRGPVARHTKSPACCSCTLPMAKLPSASTAMLPSRDPGALRSSCCGETQAMRMAGTLVLQ

SEQ ID NO: 803540 - protein, 990 aa, Homo sapiens; identical to SEQ ID NO: 803535

SEQ ID NO: 803541 - protein, 979 aa, Homo sapiens
MMSLLRLYRFSPIVPDLGLQIHYLRLTIAILRHEKSRKFLLSNVLFDVLRSVVFFYIKSPLRVEEAGLQELIPTTWWPHCSSREGKESTEMKEETAEERLRRRAYERGCQRLRKRIEGQPALGTGEGGRCVCAHEGAWRCPCLGGTWGTLVVEPWPKPAPHLLEPEGHVPHLTSSGGRTTGQILKLLLDNKDDNGGEASRYIFLTKFRKFLQENASGRGNMPMLCPPEYMVCFLHRLISALRYYWDEYKASNPHASFSEEAYIPPQVFYNGKVDYFDLQRLGGLLSHLRKTLKDDLASKANIVIDPLELQSTAMDDLDEDEEPAPAMAQRPMQALAVGGPLPLPRPGWLSSPTLGRANRFLSTAAVSLMTPRRPLSTSEKVKVRTLSVEQRTREDIEGSHWNEGLLLGRPPEEPEQPLTENSLLEVLDGAVMMYNLSVHQQLGKMVGVSDDVNEYAMALRDTEDKLRRCPKRRKDILAELTKSQKVFSEKLDHLSRRLAWVHATVYSQEKMLDIYWLLRVCLRTIEHGDRTGSLFAFMPEFYLSVAINSYSALKNYFGPVHSMEELPGYEETLTRLAAILAKHFADARIVGTDIRDSLMQALASYVCYPHSLRAVERIPEEQRIAMVRNLLAPYEQRPWAQTNWILVRLWRGCGFGYRYTRLPHLLKTKLEDANLPSLQKPCPSTLLQQHMADLLQQGPDVAPSFLNSVLNQLNWAFSEFIGMIQEIQQAAERLERNFVDSRQLKVCATCFDLSVSLLRVLEMTITLVPEIFLDWTRPTSEMLLRRLAQLLNQVLNRVTAERNLFDRVVTLRLPGLESVDHYPILVAVTGILVQLLVRGPASEREQATSVLLADPCFQLRSICYLLGQPEPPAPGTALPAPDRKRFSLQSYADYISADELAQVEQMLAHLTSASAQAAAASLPTSEEDLCPICYAHPISAVFQPCGHKSCKACINQHLMNNKDCFFCKTTTQSQAGPYL

SEQ ID NO: 803542 - protein, 984 aa, Homo sapiens
MMSLLRLYRFSPIVPDLGLQIHYLRLTIAILRHEKSRKFLLSNVLFDVLRSVVFFYIKSPLRVEEAGLQELIPTTWWPHCSSREGKESTEMKEETAEERLRRRAYERGCQRLRKRIEGQPALGTGEGGRCVCAHEGAWRCPCLGGTWGTLVVEPWPKPAPHLLEPEGHVPHLTSSGGRTTGQILKLLLDNKDDNGGEASRYIFLTKFRKFLQENASGRGNMPMLCPPEYMVCFLHRLISALRYYWDEYKASNPHASFSEEAYIPPQVFYNGKVDYFDLQRLGGLLSHLRKTLKDDLASKANIVIDPLELQSTAMDDLDEDEEPAPAMAQRPMQALAVGGPLPLPRPGWLSSPTLGRANRFLSTAAVSLMTPRRPLSTSEKVKVRTLSVEQRTREDIEGSHWNEGLLLGRPPEEPEQPLTENSLLEVLDGAVMMYNLSVHQQLGKMVGVSDDVNEYAMALRDTEDKLRRCPKRRKDILAELTKSQKVFSEKLDHLSRRLAWVHATVYSQEKMLDIYWLLRVCLRTIEHGDRTGSLFAFMPEFYLSVAINSYSALKNYFGPVHSMEELPGYEETLTRLAAILAKHFADARIVGTDIRDSLMQALASYVCYPHSLRAVERIPEEQRIAMVRNLLAPYEQRPWAQTNWILVRLWRGCGFGYRYTRLPHLLKTKLEDANLPSLQKPCPSTLLQQHMADLLQQGPDVAPSFLNSVLNQLNWAFSEFIGMIQEIQQAAERLERNFVDSRQLKVCATCFDLSVSLLRVLEMTITLVPEIFLDWTRPTSEMLLRRLAQLLNQVLNRVTAERNLFDRVVTLRLPGLESVDHYPILVAVTGILVQLLVRGPASEREQATSVLLADPCFQLRSICYLLGQPEPPAPGTALPAPDRKRFSLQSYADYISADELAQVEQMLAHLTSASAQAAAASLPTSEEDLCPICYAHPISAVFQPCGHKSCKPPHPTSLPACILIGGSPAMALIVPELDFQSGPQ

SEQ ID NO: 803543 - protein, 828 aa, Homo sapiens
MMSLLRLYRFSPIVPDLGLQIHYLRLTIAILRHEKSRKFLLSNVLFDVLRSVVFFYIKSPLRVEEAGLQELIPTTWWPHCSSREGKESTEMKEETAEERLRRRAYERGCQRLRKRIEGQPALGTGEGGRCVCAHEGAWRCPCLGGTWGTLVVEPWPKPAPHLLEPEGHVPHLTSSGGRTTGQILKLLLDNKDDNGGEASRYIFLTKFRKFLQENASGRGNMPMLCPPEYMVCFLHRLISALRYYWDEYKASNPHASFSEEAYIPPQVFYNGKVDYFDLQRLGGLLSHLRKTLKDDLASKANIVIDPLELQSTAMDDLDEDEEPAPAMAQRPMQALAVGGPLPLPRPGWLSSPTLGRANRFLSTAAVSLMTPRRPLSTSEKVKVRTLSVEQRTREDIEGSHWNEGLLLGRPPEEPEQPLTENSLLEVLDGAVMMYNLSVHQQLGKMVGVSDDVNEYAMALRDTEDKLRRCPKRRKDILAELTKSQKVFSEKLDHLSRRLAWVHATVYSQEKMLDIYWLLRVCLRTIEHGDRTGSLFAFMPEFYLSVAINSYSALKNYFGPVHSMEELPGYEETLTRLAAILAKHFADARIVGTDIRDSLMQALASYVCYPHSLRAVERIPEEQCVGPGGHTPWPQAPCPASPRLSPPCPHRRIAMVRNLLAPYEQRPWAQTNWILVRLWRGCGFGYRYTRLPHLLKTKLEDANLPSLQKPCPSTLLQQHMADLLQQGPDVAPSFLNSVLNQLNWAFSEFIGMIQEIQQAAERLERNFVDSRQLKVCATCFDLSVSLLRVLEMTITLVPEIFLDWTRPTSEMLLRRLAQVWPSGQQGWDP

SEQ ID NO: 803544 - protein, 212 aa, Homo sapiens
MASKGAGMSFSRKSYRLTSDAEKSRVTGIVQEKLLNDYLNRIFSSSEHAPPAATSRKPLNFQNLPEHLDQLLQVDNEEEESQGQVEGRLGPSTVVLDHTGGFEGLLLVDDDLLGVIGHSNFGTIRSTTCVYKGKWLYEVLISSQGLMQIGWCTISCRFNQEEGVGDTHNSYAYDGNRVRKWNVTTTNYGKAWAAGDIVSCLIDLDDGTLSFC

SEQ ID NO: 803545 - protein, 468 aa, Homo sapiens
MMSLLRLYRFSPIVPDLGLQIHYLRLTIAILRHEKSRKFLLSNVLFDVLRSVVFFYIKSPLRVEEAGLQELIPTTWWPHCSSREGKESTEMKEETAEERLRRRAYERGCQRLRKRIEGQPALGTGEGGRCVCAHEGAWRCPCLGGTWGTLVVEPWPKPAPHLLEPEGHVPHLTSSGGRTTGQILKLLLDNKDDNGGEASRYIFLTKFRKFLQENASGRGNMPMLCPPEYMVCFLHRLISALRYYWDEYKASNPHASFSEEAYIPPQVFYNGKVDYFDLQRLGGLLSHLRKTLKDDLASKANIVIDPLELQSTAMDDLDEDEEPAPAMAQRPMQALAVGGPLPLPRPGWLSSPTLGRANRFLSTAAVSLMTPRRPLSTSEKVKVRTLSVEQRTREDIEGSHWNEGLLLGRPPEEPEQPLTENSLLEVLDGAVMMYNLSVHQQLGKTTTSNLLACLYPHWWEPSHGPNCA

SEQ ID NO: 803546 - protein, 174 aa, Homo sapiens
MASKGAGMSFSRKSYRLTSDAEKSRVTGIVQEKLLNDYLNRIFSSSEHAPPAATSRKPLNFQNLPEHLDQLLQVDNEEEESQGQVEGRLGPSTVVLDHTGGFEGLLLVDDDLLGVIGHSNFGTIRSTTCVYKGKWLYEVLIPPHPTSLPACILIGGSPAMALIVPELDFQSGPQ

SEQ ID NO: 803547 - protein, 591 aa, Homo sapiens
MSDEVFSTTLAYTKSPKVTKRTTFQDELIRAITARSARQRSSEYSDDFDSDEIVSLGDFSDTSADENSVNKKMNDFHISDDEEKNPSKLLFLKTNKSNGNITKDEPVCAIKNEEEMAPDGCEDIVVKSFSESQNKDEEFEKDKIKMKPKPRILSIKSTSSAENNSLDTDDHFKPSPWPRSMLKKKSHMEEKDGLEDKETALSEELELHSAPSSLPTPNGIQLEAEKKAFSENLDPEDSCLTSLASSSLKQILGDSFSPGSEGNASGKDPNEEITENHNSLKSDENKENSFSADHVTTAVEKSKESQVTADDLEEEKAKAELIMDDDRTVDPLLSKSQSILISTSATASSKKTIEDRNIKNKKSTNNSSIQCICQEWLEKKNVYLHEMHRIKRIESENLRIQNEQKKAAKREEALASFEAWKAMKEKEAKKIAAKKRLEEKNKKKTEEENAARKGEALQAFEKWKEKKMEYLKEKNRKEREYERAKKQKEEETVAEKKKDNLTAVEKWNEKKEAFFKQKEKEKINEKRKEELKRAEKKDKDKQAINEYEKWLENKEKQERIERKQKKRHSFLESEALPPWSPPSRTVFAKVF

SEQ ID NO: 803548 - protein, 647 aa, Homo sapiens [sequence omitted]

SEQ ID NO: 803549 - protein, 236 aa, Homo sapiens
MIDRARSWLADTEGQLFISEWLEKKNVYLHEMHRIKRIESENLRIQNEQKKAAKREEALASFEAWKAMKEKEAKKIAAKKRLEEKNKKKTEEENAARKGEALQAFEKWKEKKMEYLKEKNRKEREYERAKKQKEEETVAEKKKDNLTAVEKWNEKKEAFFKQKEKEKINEKRKEELKRAEKKDKDKQAINEYEKWLENKEKQERIERKQKKRHSFLESEALPPWSPPSRTVFAKVF

SEQ ID NO: 803550 - protein, 541 aa, Homo sapiens
MPSLLVLTFSPCVLLGWALLAGGTGGGGVGGGGGGAGIGGGRQEREALPPQKIEVLVLLPQDDSYLFSLTRVRPAIEYALRSVEGNGTGRRLLPPGTRFQVAYEDSDCGNRALFSLVDRVAAARGAKPDLILGPVCEYAAAPVARLASHWDLPMLSAGALAAGFQHKDSEYSHLTRVAPAYAKMGEMMLALFRHHHWSRAALVYSDDKLERNCYFTLEGVHEVFQEEGLHTSIYSFDETKDLDLEDIVRNIQASERVVIMCASSDTIRSIMLVAHRHGMTSGDYAFFNIELFNSSSYGDGSWKRGDKHDFEAKQAYSSLQTVTLLRTVKPEFEKFSMEVKSSVEKQGLNMEDYVNMFVEGFHDAILLYVLALHEVLRAGYSKKDGGKIIQQTWNRTFEGIAGQVSIDANGDRYGDFSVIAMTDVEAGTQEVIGDYFGKEGRFEMRPNVKYPWGPLKLRIDENRIVEHTNSSPCKSSGGLEESAVTGIVVGALLGAGLLMAFYFFRKKYRITIERRTQQEESNLGKHRELREDSIRSHFSVA

SEQ ID NO: 803551 - protein, 266 aa, Homo sapiens
PSLRGSMAEGCAVYGTWPWGGMFQLFRPSALAGLCSIGLVVIMCASSDTIRSIMLVAHRHGMTSGDYAFFNIELFNSSSYGDGSWKRGDKHDFEAKQAYSSLQTVTLLRTVKPEFEKFSMEVKSSVEKQGLNMEDYVNMFVEGFHDAILLYVLALHEVLRAGYSKKDGGKIIQQTWNRTFEGIAGQVSIDANGDRYGDFSVIAMTDVEAGTQEVIGDYFGKEGRFEMRPNVKYPWGPLKLRIDENRIVEHTNSSPCKSWWLKRNRE

SEQ ID NO: 803552 - protein, 305 aa, Homo sapiens
EAAWMRTEMFQLTTPGILQTLVIMCASSDTIRSIMLVAHRHGMTSGDYAFFNIELFNSSSYGDGSWKRGDKHDFEAKQAYSSLQTVTLLRTVKPEFEKFSMEVKSSVEKQGLNMEDYVNMFVEGFHDAILLYVLALHEVLRAGYSKKDGGKIIQQTWNRTFEGIAGQVSIDANGDRYGDFSVIAMTDVEAGTQEVIGDYFGKEGRFEMRPNVKYPWGPLKLRIDENRIVEHTNSSPCKSSGGLEESAVTGIVVGALLGAGLLMAFYFFRKKYRITIERRTQQEESNLGKHRELREDSIRSHFSVA

SEQ ID NO: 803553 - protein, 688 aa, Homo sapiens
RGSDVGVSTCKMAAHHRQNTAGRRKVQVSYVIRDEVEKYNRNGVNALQLDPALNRLFTAGRDSIIRIWSVNQHKQDPYIASMEHHTDWVNDIVLCCNGKTLISASSDTTVKVWNAHKGFCMSTLRTHKDYVKALAYAKDKELVASAGLDRQIFLWDVNTLTALTASNNTVTTSSLSGNKDSIYSLAMNQLGTIIVSGSTEKVLRVWDPRTCAKLMKLKGHTDNVKALLLNRDGTQCLSGSSDGTIRLWSLGQQRCIATYRVHDEGVWALQVNDAFTHVYSGGRDRKIYCTDLRNPDIRVLICEEKAPVLKMELDRSADPPPAIWVATTKSTVNKWTLKGIHNFRASGDYDNDCTNPITPLCTQPDQVIKGGASIIQCHILNDKRHILTKDTNNNVAYWDVLKACKVEDLGKVDFEDEIKKRFKMVYVPNWFSVDLKTGMLTITLDESDCFAAWVSAKDAGFSSPDGSDPKLNLGGLLLQALLEYWPRTHVNPMDEEENEVNHVNGEQENRVQKGNGYFQVPPHTPVIFGEAGGRTLFRLLCRDSGGETESMLLNETVPQWVIDITVDKNMPKFNKIPFYLQPHASSGAKTLKKDRLSASDMLQVRKVMEHVYEKIINLDNESQTTSSSNNEKPGEQEKEEDIAVLAEEKIELLCQDQVLDPNMDLRTVKHFIWKSGGDLTLHYRQKST

SEQ ID NO: 803554 - protein, 665 aa, Homo sapiens
MFALLVLKIYFSSLNMCLEDFKKLRQYTIGSQKELLGMFVCVRERICEFEIMLHCCKISFQSLSHTTKEFVNSLLLLVISASSDTTVKVWNAHKGFCMSTLRTHKDYVKALAYAKDKELVASAGLDRQIFLWDVNTLTALTASNNTVTTSSLSGNKDSIYSLAMNQLGTIIVSGSTEKVLRVWDPRTCAKLMKLKGHTDNVKALLLNRDGTQCLSGSSDGTIRLWSLGQQRCIATYRVHDEGVWALQVNDAFTHVYSGGRDRKIYCTDLRNPDIRVLICEEKAPVLKMELDRSADPPPAIWVATTKSTVNKWTLKGIHNFRASGDYDNDCTNPITPLCTQPDQVIKGGASIIQCHILNDKRHILTKDTNNNVAYWDVLKACKVEDLGKVDFEDEIKKRFKMVYVPNWFSVDLKTGMLTITLDESDCFAAWVSAKDAGFSSPDGSDPKLNLGGLLLQALLEYWPRTHVNPMDEEENEVNHVNGEQENRVQKGNGYFQVPPHTPVIFGEAGGRTLFRLLCRDSGGETESMLLNETVPQWVIDITVDKNMPKFNKIPFYLQPHASSGAKTLKKDRLSASDMLQVRKVMEHVYEKIINLDNESQTTSSSNNEKPGEQEKEEDIAVLAEEKIELLCQDQVLDPNMDLRTVKHFIWKSGGDLTLHYRQKST

SEQ ID NO: 803555 - protein, 163 aa, Homo sapiens
MEHHTDWVNDIVLCCNGKTLISASSDTTVKVWNAHKGFCMSTLRTHKDYVKALAYAKDKELVASAGLDRQIFLWDVNTLTALTASNNTVTTSSLSGNKDSIYSLAMNQLGTIIVSGSTEKVLRVWDPRTCAKLMKLKGHTDNVKALLLNRDGTQCLSGSLMGT

SEQ ID NO: 803556 - protein, 665 aa, Homo sapiens; identical to SEQ ID NO: 803554

SEQ ID NO: 803557 - protein, 607 aa, Homo sapiens
MEHHTDWVNDIVLCCNGKTLISASSDTTVKVWNAHKGFCMSTLRTHKDYVKALAYAKDKELVASAGLDRQIFLWDVNTLTALTASNNTVTTSSLSGNKDSIYSLAMNQLGTIIVSGSTEKVLRVWDPRTCAKLMKLKGHTDNVKALLLNRDGTQCLSGSSDGTIRLWSLGQQRCIATYRVHDEGVWALQVNDAFTHVYSGGRDRKIYCTDLRNPDIRVLICEEKAPVLKMELDRSADPPPAIWVATTKSTVNKWTLKGIHNFRASGDYDNDCTNPITPLCTQPDQVIKGGASIIQCHILNDKRHILTKDTNNNVAYWDVLKACKVEDLGKVDFEDEIKKRFKMVYVPNWFSVDLKTGMLTITLDESDCFAAWVSAKDAGFSSPDGSDPKLNLGGLLLQALLEYWPRTHVNPMDEEENEVNHVNGEQENRVQKGNGYFQVPPHTPVIFGEAGGRTLFRLLCRDSGGETESMLLNETVPQWVIDITVDKNMPKFNKIPFYLQPHASSGAKTLKKDRLSASDMLQVRKVMEHVYEKIINLDNESQTTSSSNNEKPGEQEKEEDIAVLAEEKIELLCQDQVLDPNMDLRTVKHFIWKSGGDLTLHYRQKST

SEQ ID NO: 803558 - protein, 668 aa, Homo sapiens
MRGSDVISRMIVGEPGTDYGVNASADGSSTKKRVHMPVEYAIDKKMLSDNLEHKQDPYIASMEHHTDWVNDIVLCCNGKTLISASSDTTVKVWNAHKGFCMSTLRTHKDYVKALAYAKDKELVASAGLDRQIFLWDVNTLTALTASNNTVTTSSLSGNKDSIYSLAMNQLGTIIVSGSTEKVLRVWDPRTCAKLMKLKGHTDNVKALLLNRDGTQCLSGSSDGTIRLWSLGQQRCIATYRVHDEGVWALQVNDAFTHVYSGGRDRKIYCTDLRNPDIRVLICEEKAPVLKMELDRSADPPPAIWVATTKSTVNKWTLKGIHNFRASGDYDNDCTNPITPLCTQPDQVIKGGASIIQCHILNDKRHILTKDTNNNVAYWDVLKACKVEDLGKVDFEDEIKKRFKMVYVPNWFSVDLKTGMLTITLDESDCFAAWVSAKDAGFSSPDGSDPKLNLGGLLLQALLEYWPRTHVNPMDEEENEVNHVNGEQENRVQKGNGYFQVPPHTPVIFGEAGGRTLFRLLCRDSGGETESMLLNETVPQWVIDITVDKNMPKFNKIPFYLQPHASSGAKTLKKDRLSASDMLQVRKVMEHVYEKIINLDNESQTTSSSNNEKPGEQEKEEDIAVLAEEKIELLCQDQVLDPNMDLRTVKHFIWKSGGDLTLHYRQKST

SEQ ID NO: 803559 - protein, 502 aa, Homo sapiens
MNQLGTIIVSGSTEKVLRVWDPRTCAKLMKLKGHTDNVKALLLNRDGTQCLSGSSDGTIRLWSLGQQRCIATYRVHDEGVWALQVNDAFTHVYSGGRDRKIYCTDLRNPDIRVLICEEKAPVLKMELDRSADPPPAIWVATTKSTVNKWTLKGIHNFRASGDYDNDCTNPITPLCTQPDQVIKGGASIIQCHILNDKRHILTKDTNNNVAYWDVLKACKVEDLGKVDFEDEIKKRFKMVYVPNWFSVDLKTGMLTITLDESDCFAAWVSAKDAGFSSPDGSDPKLNLGGLLLQALLEYWPRTHVNPMDEEENEVNHVNGEQENRVQKGNGYFQVPPHTPVIFGEAGGRTLFRLLCRDSGGETESMLLNETVPQWVIDITVDKNMPKFNKIPFYLQPHASSGAKTLKKDRLSASDMLQVRKVMEHVYEKIINLDNESQTTSSSNNEKPGEQEKEEDIAVLAEEKIELLCQDQVLDPNMDLRTVKHFIWKSGGDLTLHYRQKST

SEQ ID NO: 803560 - protein, 265 aa, Homo sapiens
MVYVPNWFSVDLKTGMLTITLDESDCFAAWVSAKDAGFSSPDGSDPKLNLGGLLLQALLEYWPRTHVNPMDEEENEVNHVNGEQENRVQKGNGYFQVPPHTPVIFGEAGGRTLFRLLCRDSGGETESMLLNETVPQWVIDITVDKNMPKFNKIPFYLQPHASSGAKTLKKDRLSASDMLQVRKVMEHVYEKIINLDNESQTTSSSNNEKPGEQEKEEDIAVLAEEKIELLCQDQVLDPNMDLRTVKHFIWKSGGDLTLHYRQKST

SEQ ID NO: 803561 - protein, 77 aa, Homo sapiens
NSTRTYFVTKTLLLTSSNNEKPGEQEKEEDIAVLAEEKIELLCQDQVLDPNMDLRTVKHFIWKSGGDLTLHYRQKST

SEQ ID NO: 803562 - protein, 585 aa, Homo sapiens
RGSDVGVSTCKMAAHHRQNTAGRRKVQVSYVIRDEVEKYNRNGVNALQLDPALNRLFTAGRDSIIRIWSVNQHKQDPYIASMEHHTDWVNDIVLCCNGKTLISASSDTTVKVWNAHKGFCMSTLRTHKDYVKALAYAKDKELVASAGLDRQIFLWDVNTLTALTASNNTVTTSSLSGNKDSIYSLAMNQLGTIIVSGSTEKVLRVWDPRTCAKLMKLKGHTDNVKALLLNRDGTQCLSGSSDGTIRLWSLGQQRCIATYRVHDEGVWALQVNDAFTHVYSGGRDRKIYCTDLRNPDIRVLICEEKAPVLKMELDRSADPPPAIWVATTKSTVNKWTLKGIHNFRASGDYDNDCTNPITPLCTQPDQVIKGGASIIQCHILNDKRHILTKDTNNNVAYWDVLKACKVEDLGKVDFEDEIKKRFKMVYVPNWFSVDLKTGMLTITLDESDCFAAWVSAKDAGFSSPDGSDPKLNLGGLLLQALLEYWPRTHVNPMDEEENEVNHVNGEQENRVQKGNGYFQVPPHTPVIFGEAGGRTLFRLLCRDSGGETESMLLNETVPQWVIDITVDKICQFTNSFTSPMHLGQT

SEQ ID NO: 803563 - protein, 688 aa, Homo sapiens; identical to SEQ ID NO: 803553

SEQ ID NO: 803564 - protein, 148 aa, Homo sapiens
LEEGAGVGLLALVAQARDPRGRHSEPGIACRRSSVGVDLRGRDRLVPRPLASPLPCLSSKRSALAASEPRPPGVSQGGGRWRSERLVRGRGEAAERQRPCGVSAEDSALGSPQPSLMWELSPGFPMLFEMKWRSTTEMESMLCSWIQH

SEQ ID NO: 803565 - protein, 222 aa, Homo sapiens
MEIPPTNYPASRAALVAQNYINYQQGTPHRVFEVQKVKQASMEDIPGRGHKYRLKFAVEEIIQKQVKVNCTAEVLYPSTGQETAPEVNFTFEGETGKNPDEEDNTFYQRLKSMKEPLEAQNIPDNFGNVSPEMTLVLHLAWVACGYIIWQNSTEDTWYKMVKIQTVKQVQRNDDFIELDYTILLHNIASQEIIPWQMQVLWHPQYGTKVKHNSRLPKEVQLE

SEQ ID NO: 803566 - protein, 222 aa, Homo sapiens; identical to SEQ ID NO: 803565

SEQ ID NO: 803567 - protein, 226 aa, Homo sapiens
MEIPPTNYPASRAALVAQNYINYQQGTPHRVFEVQKVKQASMEDIPGRGHKYRLKFAVEEIIQKQVKVNCTAEVLYPSTGQETAPEVNFTFEGETGKNPDEEDNTFYQRLKSMKEPLEAQNIPDNFGNVSPEMTLVLHLAWVACGYIIWQNSTEDTWYKMVKIQTVKQVQRNDDFIELDYTILLHNIASQFHGIHDSTNSIFTFHLNTSTAIQTFSVPAFQEGKKS

SEQ ID NO: 803568 - protein, 178 aa, Homo sapiens
MEIPPTNYPASRAALVAQNYINYQQGTPHRVFEVQKVKQASMEDIPGRGHKYRLKFAVEEIIQKQVKVNCTAEVLYPSTGQETAPEVNFTFEGETGKNPDEEDNTFYQRLKSMKEPLEAQNIPDNFGNVSPEMTLVLHLAWVACGYIIWQNSTEDTWYKMVKIQTVKQVVSSFYKIHY

SEQ ID NO: 803569 - protein, 1513 aa, Homo sapiens
EHGELPPRPAGDAGDAFAPEVVWRPRRRKKGGRAAVLSPSSPREARPAPPSWISRRSPRQLFAKLLETSPKLGMDTTAAAALPAFVALLLLSPWPLLGSAQGQFSAGGCTFDDGPGACDYHQDLYDDFEWVHVSAQEPHYLPPEMPQGSYMIVDSSDHDPGEKARLQLPTMKENDTHCIDFSYLLYSQKGLNPGTLNILVRVNKGPLANPIWNVTGFTGRDWLRAELAVSTFWPNEYQVIFEAEVSGGRSGYIAIDDIQVLSYPCDKSPHFLRLGDVEVNAGQNATFQCIATGRDAVHNKLWLQRRNGEDIPVAQTKNINHRRFAASFRLQEVTKTDQDLYRCVTQSERGSGVSNFAQLIVREPPRPIAPPQLLGVGPTYLLIQLNANSIIGDGPIILKEVEYRMTSGSWTETHAVNAPTYKLWHLDPDTEYEIRVLLTRPGEGGTGLPGPPLITRTKCAEPMRTPKTLKIAEIQARRIAVDWESLGYNITRCHTFNVTICYHYFRGHNESKADCLDMDPKAPQHVVNHLPPYTNVSLKMILTNPEGRKESEETIIQTDEDVPGPVPVKSLQGTSFENKIFLNWKEPLDPNGIITQYEISYSSIRSFDPAVPVAGPPQTVSNLWNSTHHVFMHLHPGTTYQFFIRASTVKGFGPATAINVTTNISAPTLPDYEGVDASLNETATTITVLLRPAQAKGAPISAYQIVVEELHPHRTKREAGAMECYQVPVTYQNAMSGGAPYYFAAELPPGNLPEPAPFTVGDNRTYQGFWNPPLAPRKGYNIYFQAMSSVEKETKTQCVRIATKAAATEEPEVIPDPAKQTDRVVKIAGISAGILVFILLLLVVILIVKKSKLAKKRKDAMGNTRQEMTHMVNAMDRSYADQSTLHAEDPLSITFMDQHNFSPRYENHSATAESSRLLDVPRYLCEGTESPYQTGQLHPAIRVADLLQHINLMKTSDSYGFKEEYESFFEGQSASWDVAKKDQNRAKNRYGNIIAYDHSRVILQPVEDDPSSDYINANYIDGYQRPSHYIATQGPVHETVYDFWRMIWQEQSACIVMVTNLVEVGRVKCYKYWPDDTEVYGDFKVTCVEMEPLAEYVVRTFTLERRGYNEIREVKQFHFTGWPDHGVPYHATGLLSFIRRVKLSNPPSAGPIVVHCSAGAGRTGCYIVIDIMLDMAEREGVVDIYNCVKALRSRRINMVQTEEQYIFIHDAILEACLCGETAIPVCEFKAAYFDMIRIDSQTNSSHLKDEFQTLNSVTPRLQAEDCSIACLPRNHDKNRFMDMLPPDRCLPFLITIDGESSNYINAALMDSYRQPAAFIVTQYPLPNTVKDFWRLVYDYGCTSIVMLNEVDLSQGCPQYWPEEGMLRYGPIQVECMSCSMDCDVINRIFRICNLTRPQEGYLMVQQFQYLGWASHREVPGSKRSFLKLILQVEKWQEECKEGEGRTIIHCLNGGGRSGMFCAIGIVVEMVKRQNVVDVFHAVKTLRNSKPNMVEAPEQYRFCYDVALEYLESS

SEQ ID NO: 803570 - protein, 351 aa, Homo sapiens
EHGELPPRPAGDAGDAFAPEVVWRPRRRKKGGRAAVLSPSSPREARPAPPSWISRRSPRQLFAKLLETSPKLGMDTTAAAALPAFVALLLLSPWPLLGSAQGQFSAVSVLVVGNFCCCCSAAVCHSIRHLSRTQNPGQDHEGRLKGGCTFDDGPGACDYHQDLYDDFEWVHVSAQEPHYLPPEMPQGSYMIVDSSDHDPGEKARLQLPTMKENDTHCIDFSYLLYSQKGLNPGTLNILVRVNKGPLANPIWNVTGFTGRDWLRAELAVSTFWPNEYQVIFEAEVSGGRSGYIAIDDIQVLSYPCDKSPHFLRLGDVEVNAGQNATFQCIATGRDAVHNKLWLQVRPSWQLS

SEQ ID NO: 803571 - protein, 144 aa, Homo sapiens
EHGELPPRPAGDAGDAFAPEVVWRPRRRKKGGRAAVLSPSSPREARPAPPSWISRRSPRQLFAKLLETSPKLGMDTTAAAALPAFVALLLLSPWPLLGSAQGQFSAASLGWRAHLLLGFAVQMETQWWPEGDGEDGKSDSHAPG

SEQ ID NO: 803572 - protein, 1513 aa, Homo sapiens; identical to SEQ ID NO: 803569

SEQ ID NO: 803573 - protein, 1109 aa, Homo sapiens
MTSGSWTETHAVNAPTYKLWHLDPDTEYEIRVLLTRPGEGGTGLPGPPLITRTKCAEPMRTPKTLKIAEIQARRIAVDWESLGYNITRCHTFNVTICYHYFRGHNESKADCLDMDPKAPQHVVNHLPPYTNVSLKMILTNPEGRKESEETIIQTDEDVPGPVPVKSLQGTSFENKIFLNWKEPLDPNGIITQYEISYSSIRSFDPAVPVAGPPQTVSNLWNSTHHVFMHLHPGTTYQFFIRASTVKGFGPATAINVTTNISAPTLPDYEGVDASLNETATTITVLLRPAQAKGAPISAYQIVVEELHPHRTKREAGAMECYQVPVTYQNAMSGGAPYYFAAELPPGNLPEPAPFTVGDNRTYQGFWNPPLAPRKGYNIYFQAMSSVEKETKTQCVRIATKAAATEEPEVIPDPAKQTDRVVKIAGISAGILVFILLLLVVILIVKKSKLAKKRKDAMGNTRQEMTHMVNAMDRSYADQSTLHAEDPLSITFMDQHNFSPRYENHSATAESSRLLDVPRYLCEGTESPYQTGQLHPAIRVADLLQHINLMKTSDSYGFKEEYESFFEGQSASWDVAKKDQNRAKNRYGNIIAYDHSRVILQPVEDDPSSDYINANYIDGYQRPSHYIATQGPVHETVYDFWRMIWQEQSACIVMVTNLVEVGRVKCYKYWPDDTEVYGDFKVTCVEMEPLAEYVVRTFTLERRGYNEIREVKQFHFTGWPDHGVPYHATGLLSFIRRVKLSNPPSAGPIVVHCSAGAGRTGCYIVIDIMLDMAEREGVVDIYNCVKALRSRRINMVQTEEQYIFIHDAILEACLCGETAIPVCEFKAAYFDMIRIDSQTNSSHLKDEFQTLNSVTPRLQAEDCSIACLPRNHDKNRFMDMLPPDRCLPFLITIDGESSNYINAALMDSYRQPAAFIVTQYPLPNTVKDFWRLVYDYGCTSIVMLNEVDLSQGCPQYWPEEGMLRYGPIQVECMSCSMDCDVINRIFRICNLTRPQEGYLMVQQFQYLGWASHREVPGSKRSFLKLILQVEKWQEECKEGEGRTIIHCLNGGGRSGMFCAIGIVVEMVKRQNVVDVFHAVKTLRNSKPNMVEAPEQYRFCYDVALEYLESS

SEQ ID NO: 803574 - protein, 1394 aa, Homo sapiens
EHGELPPRPAGDAGDAFAPEVVWRPRRRKKGGRAAVLSPSSPREARPAPPSWISRRSPRQLFAKLLETSPKLGMDTTAAAALPAFVALLLLSPWPLLGSAQGQFSAGGCTFDDGPGACDYHQDLYDDFEWVHVSAQEPHYLPPEMPQGSYMIVDSSDHDPGEKARLQLPTMKENDTHCIDFSYLLYSQKGLNPGTLNILVRVNKGPLANPIWNVTGFTGRDWLRAELAVSTFWPNEYQVIFEAEVSGGRSGYIAIDDIQVLSYPCDKSPHFLRLGDVEVNAGQNATFQCIATGRDAVHNKLWLQRRNGEDIPVAQTKNINHRRFAASFRLQEVTKTDQDLYRCVTQSERGSGVSNFAQLIVREPPRPIAPPQLLGVGPTYLLIQLNANSIIGDGPIILKEVEYRMTSGSWTETHAVNAPTYKLWHLDPDTEYEIRVLLTRPGEGGTGLPGPPLITRTKCAEPMRTPKTLKIAEIQARRIAVDWESLGYNITRCHTFNVTICYHYFRGHNESKADCLDMDPKAPQHVVNHLPPYTNVSLKMILTNPEGRKESEETIIQTDEDVPGPVPVKSLQGTSFENKIFLNWKEPLDPNGIITQYEISYSSIRSFDPAVPVAGPPQTVSNLWNSTHHVFMHLHPGTTYQFFIRASTVKGFGPATAINVTTNISAPTLPDYEGVDASLNETATTITVLLRPAQAKGAPISAYQIVVEELHPHRTKREAGAMECYQVPVTYQNAMSGGAPYYFAAELPPGNLPEPAPFTVGDNRTYQGFWNPPLAPRKGYNIYFQAMSSVEKETKTQCVRIATKAAATEEPEVIPDPAKQTDRVVKIAGISAGILVFILLLLVVILIVKKSKLAKKRKDAMGNTRQEMTHMVNAMDRSYADQSTLHAEDPLSITFMDQHNFSPRYENHSATAESSRLLDVPRYLCEGTESPYQTGQLHPAIRVADLLQHINLMKTSDSYGFKEEYESFFEGQSASWDVAKKDQNRAKNRYGNIIAYDHSRVILQPVEDDPSSDYINANYIDGYQRPSHYIATQGPVHETVYDFWRMIWQEQSACIVMVTNLVEVGRVKCYKYWPDDTEVYGDFKVTCVEMEPLAEYVVRTFTLERRGYNEIREVKQFHFTGWPDHGVPYHATGLLSFIRRVKLSNPPSAGPIVVHCSAGAGRTGCYIVIDIMLDMAEREGVVDIYNCVKALRSRRINMVQTEEQYIFIHDAILEACLCGETAIPVCEFKAAYFDMIRIDSQTNSSHLKDEFQTLNSVTPRLQAEDCSIACLPRNHDKNRFMDMLPPDRCLPFLITIDGESSNYINAALMDSYRQPAAFIVTQYPLPNTVKDFWRLVYDYGCTSIVMLNEVDLSQGCPQYWPEEGMLRYGPIQVECMSCSHAPRSCNFTSSACSL

SEQ ID NO: 803575 - protein, 813 aa, Homo sapiens
EHGELPPRPAGDAGDAFAPEVVWRPRRRKKGGRAAVLSPSSPREARPAPPSWISRRSPRQLFAKLLETSPKLGMDTTAAAALPAFVALLLLSPWPLLGSAQGQFSAGGCTFDDGPGACDYHQDLYDDFEWVHVSAQEPHYLPPEMPQGSYMIVDSSDHDPGEKARLQLPTMKENDTHCIDFSYLLYSQKGLNPGTLNILVRVNKGPLANPIWNVTGFTGRDWLRAELAVSTFWPNEYQVIFEAEVSGGRSGYIAIDDIQVLSYPCDKSPHFLRLGDVEVNAGQNATFQCIATGRDAVHNKLWLQRRNGEDIPVAQTKNINHRRFAASFRLQEVTKTDQDLYRCVTQSERGSGVSNFAQLIVREPPRPIAPPQLLGVGPTYLLIQLNANSIIGDGPIILKEVEYRMTSGSWTETHAVNAPTYKLWHLDPDTEYEIRVLLTRPGEGGTGLPGPPLITRTKCAEPMRTPKTLKIAEIQARRIAVDWESLGYNITRCHTFNVTICYHYFRGHNESKADCLDMDPKAPQHVVNHLPPYTNVSLKMILTNPEGRKESEETIIQTDEDVPGPVPVKSLQGTSFENKIFLNWKEPLDPNGIITQYEISYSSIRSFDPAVPVAGPPQTVSNLWNSTHHVFMHLHPGTTYQFFIRASTVKGFGPATAINVTTNISAPTLPDYEGVDASLNETATTITVLLRPAQAKGAPISAYQIVVEELHPHRTKREAGAMECYQVPVTYQNAMSGGAPYYFAAELPPGNLPEPAPFTVGDNRTYQGFWNPPLAPRKGYNIYFQAMSSVEKETKPSAYALLHKQQLHENQYL

SEQ ID NO: 803576 - protein, 308 aa, Homo sapiens
EHGELPPRPAGDAGDAFAPEVVWRPRRRKKGGRAAVLSPSSPREARPAPPSWISRRSPRQLFAKLLETSPKLGMDTTAAAALPAFVALLLLSPWPLLGSAQGQFSAGGCTFDDGPGACDYHQDLYDDFEWVHVSAQEPHYLPPEMPQGSYMIVDSSDHDPGEKARLQLPTMKENDTHCIDFSYLLYSQKGLNPGTLNILVRVNKGPLANPIWNVTGFTGRDWLRAELAVSTFWPNEYQVIFEAEVSGGRSGYIAIDDIQVLSYPCDKSPHFLRLGDVEVNAGQNATFQCIATGRDAVHNKLWLQIFRL

SEQ ID NO: 803577 - protein, 118 aa, Homo sapiens
FFSFPQSAYQIVVEELHPHRTKREAGAMECYQVPVTYQNAMSGGAPYYFAAELPPGNLPEPAPFTVGDNRTYQGFWNPPLAPRKGYNIYFQAMSSVEKETKTQCVRIATKAFFPHMKS

SEQ ID NO: 803578 - protein, 223 aa, Homo sapiens
RVRKLRTAALVHVLTQEFLILNLFLRDKSPHFLRLGDVEVNAGQNATFQCIATGRDAVHNKLWLQRRNGEDIPVAQTKNINHRRFAASFRLQEVTKTDQDLYRCVTQSERGSGVSNFAQLIVREPPRPIAPPQLLGVGPTYLLIQLNANSIIGDGPIILKEVEYRMTSGSWTETHAVNAPTYKLWHLDPDTEYEIRVLLTRPGEGGTGLPGPPLITRTKCAGL

SEQ ID NO: 803579 - protein, 1513 aa, Homo sapiens; identical to SEQ ID NO: 803569

SEQ ID NO: 803580 - protein, 1552 aa, Homo sapiens
EHGELPPRPAGDAGDAFAPEVVWRPRRRKKGGRAAVLSPSSPREARPAPPSWISRRSPRQLFAKLLETSPKLGMDTTAAAALPAFVALLLLSPWPLLGSAQGQFSAVSVLVVGNFCCCCSAAVCHSIRHLSRTQNPGQDHEGRLKGGCTFDDGPGACDYHQDLYDDFEWVHVSAQEPHYLPPEMPQGSYMIVDSSDHDPGEKARLQLPTMKENDTHCIDFSYLLYSQKGLNPGTLNILVRVNKGPLANPIWNVTGFTGRDWLRAELAVSTFWPNEYQVIFEAEVSGGRSGYIAIDDIQVLSYPCDKSPHFLRLGDVEVNAGQNATFQCIATGRDAVHNKLWLQRRNGEDIPVAQTKNINHRRFAASFRLQEVTKTDQDLYRCVTQSERGSGVSNFAQLIVREPPRPIAPPQLLGVGPTYLLIQLNANSIIGDGPIILKEVEYRMTSGSWTETHAVNAPTYKLWHLDPDTEYEIRVLLTRPGEGGTGLPGPPLITRTKCAEPMRTPKTLKIAEIQARRIAVDWESLGYNITRCHTFNVTICYHYFRGHNESKADCLDMDPKAPQHVVNHLPPYTNVSLKMILTNPEGRKESEETIIQTDEDVPGPVPVKSLQGTSFENKIFLNWKEPLDPNGIITQYEISYSSIRSFDPAVPVAGPPQTVSNLWNSTHHVFMHLHPGTTYQFFIRASTVKGFGPATAINVTTNISAPTLPDYEGVDASLNETATTITVLLRPAQAKGAPISAYQIVVEELHPHRTKREAGAMECYQVPVTYQNAMSGGAPYYFAAELPPGNLPEPAPFTVGDNRTYQGFWNPPLAPRKGYNIYFQAMSSVEKETKTQCVRIATKAAATEEPEVIPDPAKQTDRVVKIAGISAGILVFILLLLVVILIVKKSKLAKKRKDAMGNTRQEMTHMVNAMDRSYADQSTLHAEDPLSITFMDQHNFSPRYENHSATAESSRLLDVPRYLCEGTESPYQTGQLHPAIRVADLLQHINLMKTSDSYGFKEEYESFFEGQSASWDVAKKDQNRAKNRYGNIIAYDHSRVILQPVEDDPSSDYINANYIDGYQRPSHYIATQGPVHETVYDFWRMIWQEQSACIVMVTNLVEVGRVKCYKYWPDDTEVYGDFKVTCVEMEPLAEYVVRTFTLERRGYNEIREVKQFHFTGWPDHGVPYHATGLLSFIRRVKLSNPPSAGPIVVHCSAGAGRTGCYIVIDIMLDMAEREGVVDIYNCVKALRSRRINMVQTEEQYIFIHDAILEACLCGETAIPVCEFKAAYFDMIRIDSQTNSSHLKDEFQTLNSVTPRLQAEDCSIACLPRNHDKNRFMDMLPPDRCLPFLITIDGESSNYINAALMDSYRQPAAFIVTQYPLPNTVKDFWRLVYDYGCTSIVMLNEVDLSQGCPQYWPEEGMLRYGPIQVECMSCSMDCDVINRIFRICNLTRPQEGYLMVQQFQYLGWASHREVPGSKRSFLKLILQVEKWQEECKEGEGRTIIHCLNGGGRSGMFCAIGIVVEMVKRQNVVDVFHAVKTLRNSKPNMVEAPEQYRFCYDVALEYLESS

SEQ ID NO: 803581 - protein, 934 aa, Homo sapiens
EHGELPPRPAGDAGDAFAPEVVWRPRRRKKGGRAAVLSPSSPREARPAPPSWISRRSPRQLFAKLLETSPKLGMDTTAAAALPAFVALLLLSPWPLLGSAQGQFSAGGCTFDDGPGACDYHQDLYDDFEWVHVSAQEPHYLPPEMPQGSYMIVDSSDHDPGEKARLQLPTMKENDTHCIDFSYLLYSQKGLNPGTLNILVRVNKGPLANPIWNVTGFTGRDWLRAELAVSTFWPNEYQVIFEAEVSGGRSGYIAIDDIQVLSYPCDKSPHFLRLGDVEVNAGQNATFQCIATGRDAVHNKLWLQRRNGEDIPVAQTKNINHRRFAASFRLQEVTKTDQDLYRCVTQSERGSGVSNFAQLIVREPPRPIAPPQLLGVGPTYLLIQLNANSIIGDGPIILKEVEYRMTSGSWTETHAVNAPTYKLWHLDPDTEYEIRVLLTRPGEGGTGLPGPPLITRTKCAEPMRTPKTLKIAEIQARRIAVDWESLGYNITRCHTFNVTICYHYFRGHNESKADCLDMDPKAPQHVVNHLPPYTNVSLKMILTNPEGRKESEETIIQTDEDVPGPVPVKSLQGTSFENKIFLNWKEPLDPNGIITQYEISYSSIRSFDPAVPVAGPPQTVSNLWNSTHHVFMHLHPGTTYQFFIRASTVKGFGPATAINVTTNISAPTLPDYEGVDASLNETATTITVLLRPAQAKGAPISAYQIVVEELHPHRTKREAGAMECYQVPVTYQNAMSGGAPYYFAAELPPGNLPEPAPFTVGDNRTYQGFWNPPLAPRKGYNIYFQAMSSVEKETKTQCVRIATKAAATEEPEVIPDPAKQTDRVVKIAGISAGILVFILLLLVVILIVKKSKLAKKRKDAMGNTRQEMTHMVNAMDRSYADQSTLHAEDPLSITFMDQHNFSPRCKFFIKILINDVTTHFTLNSTRYLLSNERE

SEQ ID NO: 803582 - protein, 812 aa, Homo sapiens
EHGELPPRPAGDAGDAFAPEVVWRPRRRKKGGRAAVLSPSSPREARPAPPSWISRRSPRQLFAKLLETSPKLGMDTTAAAALPAFVALLLLSPWPLLGSAQGQFSAGGCTFDDGPGACDYHQDLYDDFEWVHVSAQEPHYLPPEMPQGSYMIVDSSDHDPGEKARLQLPTMKENDTHCIDFSYLLYSQKGLNPGTLNILVRVNKGPLANPIWNVTGFTGRDWLRAELAVSTFWPNEYQVIFEAEVSGGRSGYIAIDDIQVLSYPCDKSPHFLRLGDVEVNAGQNATFQCIATGRDAVHNKLWLQRRNGEDIPVAQTKNINHRRFAASFRLQEVTKTDQDLYRCVTQSERGSGVSNFAQLIVREPPRPIAPPQLLGVGPTYLLIQLNANSIIGDGPIILKEVEYRMTSGSWTETHAVNAPTYKLWHLDPDTEYEIRVLLTRPGEGGTGLPGPPLITRTKCAEPMRTPKTLKIAEIQARRIAVDWESLGYNITRCHTFNVTICYHYFRGHNESKADCLDMDPKAPQHVVNHLPPYTNVSLKMILTNPEGRKESEETIIQTDEDVPGPVPVKSLQGTSFENKIFLNWKEPLDPNGIITQYEISYSSIRSFDPAVPVAGPPQTVSNLWNSTHHVFMHLHPGTTYQFFIRASTVKGFGPATAINVTTNISAPTLPDYEGVDASLNETATTITVLLRPAQAKGAPISAYQIVVEELHPHRTKREAGAMECYQVPVTYQNAMSGGAPYYFAAELPPGNLPEPAPFTVGDNRTYQGFWNPPLAPRKGYNIYFQAMSSVEKETKTQCVRIATKAFFPHMKS

SEQ ID NO: 803583 - protein, 777 aa, Homo sapiens
  misc_feature (750)..(751): Xaa can be any naturally occurring amino acid
EHGELPPRPAGDAGDAFAPEVVWRPRRRKKGGRAAVLSPSSPREARPAPPSWISRRSPRQLFAKLLETSPKLGMDTTAAAALPAFVALLLLSPWPLLGSAQGQFSAGGCTFDDGPGACDYHQDLYDDFEWVHVSAQEPHYLPPEMPQGSYMIVDSSDHDPGEKARLQLPTMKENDTHCIDFSYLLYSQKGLNPGTLNILVRVNKGPLANPIWNVTGFTGRDWLRAELAVSTFWPNEYQVIFEAEVSGGRSGYIAIDDIQVLSYPCDKSPHFLRLGDVEVNAGQNATFQCIATGRDAVHNKLWLQRRNGEDIPVAQTKNINHRRFAASFRLQEVTKTDQDLYRCVTQSERGSGVSNFAQLIVREPPRPIAPPQLLGVGPTYLLIQLNANSIIGDGPIILKEVEYRMTSGSWTETHAVNAPTYKLWHLDPDTEYEIRVLLTRPGEGGTGLPGPPLITRTKCAEPMRTPKTLKIAEIQARRIAVDWESLGYNITRCHTFNVTICYHYFRGHNESKADCLDMDPKAPQHVVNHLPPYTNVSLKMILTNPEGRKESEETIIQTDEDVPGPVPVKSLQGTSFENKIFLNWKEPLDPNGIITQYEISYSSIRSFDPAVPVAGPPQTVSNLWNSTHHVFMHLHPGTTYQFFIRASTVKGFGPATAINVTTNISAPTLPDYEGVDASLNETATTITVLLRPAQAKGAPISAYQIVVEELHPHRTKREAGAMECYQVPVTYQNAMSGGAPYYFAAELPPXXRTWHDRRLGGASVGLLPDPQHNKNET

SEQ ID NO: 803584 - protein, 966 aa, Homo sapiens
MFWKFDLNTTSHVDKLLDKEHVTLQELMDEDDILQECKAQNQKLLDFLCRQQCMEELVSLITQDPPLDMEEKVRFKYPNTACELLTCDVPQISDRLGGDESLLSLLYDFLDHEPPLNPLLASFFSKTIGNLIARKTEQVITFLKKKDKFISLVLKHIGTSALMDLLLRLVSCVEPAGLRQDVLHWLNEEKVIQRLVELIHPSQDEDRQSNASQTLCDIVRLGRDQGSQLQEALEPDPLLTALESQDCVEQLLKNMFDGDRTESCLVSGTQVLLTLLETRRVGTEGLVDSFSQGLERSYAVSSSVLHGIEPRLKDFHQLLLNPPKKKAILTTIGVLEEPLGNARLHGARLMAALLHTNTPSINQELCRLNTMDLLLDLFFKYTWNNFLHFQVELCIAAILSHAAREERTEASGSESRVEPPHENGNRSLETPQPAASLPDNTMVTHLFQKCCLVQRILEAWEANDHTQAAGGMRRGNMGHLTRIANAVVQNLERGPVQTHISEVIRGLPADCRGRWESFVEETLTETNRRNTVDLVSTHHLHSSSEDEDIEGAFPNELSLQQAFSDYQIQQMTANFVDQFGFNDEEFADQDDNINAPFDRIAEINFNIDADEDSPSAALFEACCSDRIQPFDDDEDEDIWEDSDTRCAARVMARPRFGAPHASESCSKNGPERGGQDGKASLEAHRDAPGAGAPPAPGKKEAPPVEGDSEGAMWTAVFDEPANSTPTAPGVVRDVGSSVWAAGTSAPEEKGWAKFTDFQPFCCSESGPRCSSPVDTECSHAEGSRSQGPEKASQASYFAVSPASPCAWNVCVTRKAPLLASDSSSSGGSHSEDGDQKAASAMDAVSRGPGREAPPLPTVARTEEAVGRVGCADSRLLSPACPAPKEVTAAPAVAVPPEATVAITTALSKAGPAIPTPAVSSALAVAVPLGPIMAVTAAPAMVATLGTVTKDGKTDAPPEGAALNGPV

SEQ ID NO: 803585 - protein, 126 aa, Homo sapiens
SSWSLGMRRGGTEGGGARNRSPCLPHRVGCADSRLLSPACPAPKEVTAAPAVAVPPEATVAITTALSKAGPAIPTPAVSSALAVAVPLGPIMAVTAAPAMVATLGTVTKDGKTDAPPEGAALNGPV

SEQ ID NO: 803586 - protein, 959 aa, Homo sapiens
MFWKFDLNTTSHVDKLLDKEHVTLQELMDEDDILQECKAQNQKLLDFLCRQQCMEELVSLITQDPPLDMEEKVRFKYPNTACELLTCDVPQISDRLGGDESLLSLLYDFLDHEPPLNPLLASFFSKTIGNLIARKTEQVITFLKKKDKFISLVLKHIGTSALMDLLLRLVSCVEPAGLRQDVLHWLNEEKVIQRLVELIHPSQDEDRQSNASQTLCDIVRLGRDQGSQLQEALEPDPLLTALESQDCVEQLLKNMFDGDRTESCLVSGTQVLLTLLETRRVGTEGLVDSFSQGLERSYAVSSSVLHGIEPRLKDFHQLLLNPPKKKAILTTIGVLEEPLGNARLHGARLMAALLHTNTPSINQELCRLNTMDLLLDLFFKYTWNNFLHFQVELCIAAILSHAAREERTEASGSESRVEPPHENGNRSLETPQPAASLPDNTMVTHLFQKCCLVQRILEAWEANDHTQAAGGMRRGNMGHLTRIANAVVQNLERGPVQTHISEVIRGLPADCRGRWESFVEETLTETNRRNTVDLVSTHHLHSSSEDEDIEGAFPNELSLQQAFSDYQIQQMTANFVDQFGFNDEEFADQDDNINAPFDRIAEINFNIDADEDSPSAALFEACCSDRIQPFDDDEDEDIWEDSDTRCAARVMARPRFGAPHASESCSKNGPERGGQDGKASLEAHRDAPGAGAPPAPGKKEAPPVEGDSEGAMWTAVFDEPANSTPTAPGVVRDVGSSVWAAGTSAPEEKGWAKFTDFQPFCCSESGPRCSSPVDTECSHAEGSRSQGPEKAFSPASPCAWNVCVTRKAPLLASDSSSSGGSHSEDGDQKAASAMDAVSRGPGREAPPLPTVARTEEAVGRVGCADSRLLSPACPAPKEVTAAPAVAVPPEATVAITTALSKAGPAIPTPAVSSALAVAVPLGPIMAVTAAPAMVATLGTVTKDGKTDAPPEGAALNGPV

SEQ ID NO: 803587 - protein, 959 aa, Homo sapiens; identical to SEQ ID NO: 803586

SEQ ID NO: 803588 - protein, 714 aa, Homo sapiens
SGKVKRALSGRSGCTELLVRLDRVLVSPVSICFPHPRTEGLVDSFSQGLERSYAVSSSVLHGIEPRLKDFHQLLLNPPKKKAILTTIGVLEEPLGNARLHGARLMAALLHTNTPSINQELCRLNTMDLLLDLFFKYTWNNFLHFQVELCIAAILSHAAREERTEASGSESRVEPPHENGNRSLETPQPAASLPDNTMVTHLFQKCCLVQRILEAWEANDHTQAAGGMRRGNMGHLTRIANAVVQNLERGPVQTHISEVIRGLPADCRGRWESFVEETLTETNRRNTVDLVSTHHLHSSSEDEDIEGAFPNELSLQQAFSDYQIQQMTANFVDQFGFNDEEFADQDDNINAPFDRIAEINFNIDADEDSPSAALFEACCSDRIQPFDDDEDEDIWEDSDTRCAARVMARPRFGAPHASESCSKNGPERGGQDGKASLEAHRDAPGAGAPPAPGKKEAPPVEGDSEGAMWTAVFDEPANSTPTAPGVVRDVGSSVWAAGTSAPEEKGWAKFTDFQPFCCSESGPRCSSPVDTECSHAEGSRSQGPEKAFSPASPCAWNVCVTRKAPLLASDSSSSGGSHSEDGDQKAASAMDAVSRGPGREAPPLPTVARTEEAVGRVGCADSRLLSPACPAPKEVTAAPAVAVPPEATVAITTALSKAGPAIPTPAVSSALAVAVPLGPIMAVTAAPAMVATLGTVTKDGKTDAPPEGAALNGPV

SEQ ID NO: 803589 - protein, 932 aa, Homo sapiens
MFWKFDLNTTSHVDKLLDKEHVTLQELMDEDDILQECKAQNQKLLDFLCRQQCMEELVSLITQDPPLDMEEKVRFKYPNTACELLTCDVPQISDRLGGDESLLSLLYDFLDHEPPLNPLLASFFSKTIGNLIARKTEQVITFLKKKDKFISLVLKHIGTSALMDLLLRLVSCVEPAGLRQDVLHWLNEEKVIQRLVELIHPSQDEDRQSNASQTLCDIVRLGRDQGSQLQEALEPDPLLTALESQDCVEQLLKNMFDGDRTESCLVSGTQVLLTLLETRRVGTEGLVDSFSQGLERSYAVSSSVLHGIEPRLKDFHQLLLNPPKKKAILTTIGVLEEPLGNARLHGARLMAALLHTNTPSINQELCRLNTMDLLLDLFFKYTWNNFLHFQVELCIAAILSHAAREERTEASGSESRVEPPHENGNRSLETPQPAASLPDNTMVTHLFQKCCLVQRILEAWEANDHTQAAGGMRRGNMGHLTRIANAVVQNLERGPVQTHISEVIRGLPADCRGRWESFVEETLTETNRRNTVDLAFSDYQIQQMTANFVDQFGFNDEEFADQDDNINAPFDRIAEINFNIDADEDSPSAALFEACCSDRIQPFDDDEDEDIWEDSDTRCAARVMARPRFGAPHASESCSKNGPERGGQDGKASLEAHRDAPGAGAPPAPGKKEAPPVEGDSEGAMWTAVFDEPANSTPTAPGVVRDVGSSVWAAGTSAPEEKGWAKFTDFQPFCCSESGPRCSSPVDTECSHAEGSRSQGPEKAFSPASPCAWNVCVTRKAPLLASDSSSSGGSHSEDGDQKAASAMDAVSRGPGREAPPLPTVARTEEAVGRVGCADSRLLSPACPAPKEVTAAPAVAVPPEATVAITTALSKAGPAIPTPAVSSALAVAVPLGPIMAVTAAPAMVATLGTVTKDGKTDAPPEGAALNGPV

SEQ ID NO: 803590 - protein, 404 aa, Homo sapiens
GEAPLWSSEQSLSLPLPVLPSSPGLPHPELSPSGSSMGRAAPVSPRPSGNSPWRFTLQPSAALFEACCSDRIQPFDDDEDEDIWEDSDTRCAARVMARPRFGAPHASESCSKNGPERGGQDGKASLEAHRDAPGAGAPPAPGKKEAPPVEGDSEGAMWTAVFDEPANSTPTAPGVVRDVGSSVWAAGTSAPEEKGWAKFTDFQPFCCSESGPRCSSPVDTECSHAEGSRSQGPEKAFSPASPCAWNVCVTRKAPLLASDSSSSGGSHSEDGDQKAASAMDAVSRGPGREAPPLPTVARTEEAVGRVGCADSRLLSPACPAPKEVTAAPAVAVPPEATVAITTALSKAGPAIPTPAVSSALAVAVPLGPIMAVTAAPAMVATLGTVTKDGKTDAPPEGAALNGPV

SEQ ID NO: 803591 - protein, 126 aa, Homo sapiens; identical to SEQ ID NO: 803585

SEQ ID NO: 803592 - protein, 165 aa, Homo sapiens
MRETDCRQKQNQNKPLPTSPKQPLKNCSEKQGISLCKVSCFFPRGCLRKTCHLEPCLHRRHGPACRVGCADSRLLSPACPAPKEVTAAPAVAVPPEATVAITTALSKAGPAIPTPAVSSALAVAVPLGPIMAVTAAPAMVATLGTVTKDGKTDAPPEGAALNGPV

SEQ ID NO: 803593 - protein, 891 aa, Homo sapiens
MFWKFDLNTTSHVDKLLDKEHVTLQELMDEDDILQECKAQNQKLLDFLCRQQCMEELVSLITQDPPLDMEEKVRFKYPNTACELLTCDVPQISDRLGGDESLLSLLYDFLDHEPPLNPLLASFFSKTIGNLIARKTEQVITFLKKKDKFISLVLKHIGTSALMDLLLRLVSCVEPAGLRQDVLHWLNEEKVIQRLVELIHPSQDEDRQSNASQTLCDIVRLGRDQGSQLQEALEPDPLLTALESQDCVEQLLKNMFDGDRTESCLVSGTQVLLTLLETRRVGTEGLVDSFSQGLERSYAVSSSVLHGIEPRLKDFHQLLLNPPKKKAILTTIGVLEEPLGNARLHGARLMAALLHTNTPSINQELCRLNTMDLLLDLFFKYTWNNFLHFQVELCIAAILSHAAREERTEASGSESRVEPPHENGNRSLETPQPAASLPDNTMVTHLFQKCCLVQRILEAWEANDHTQAAGGMRRGNMGHLTRIANAVVQNLERGPVQTHISEVIRGLPADCRGRWESFVEETLTETNRRNTVDLVSTHHLHSSSEDEDIEGAFPNELSLQQAFSDYQIQQMTANFVDQFGFNDEEFADQDDNINAPFDRIAEINFNIDADEDSPSAALFEACCSDRIQPFDDDEDEDIWEDSDTRCAARVMARPRFGAPHASESCSKNGPERGGQDGKASLEAHRDAPGAGAPPAPGKKEAPPVEGDSEGAMWTAVFDEPANSTPTAPGVVRDVGSSVWAAGTSAPEEKGWAKFTDFQPFCCSESGPRCSSPVDTECSHAEGSRSQGPEKAFSPASPCAWNVCVTRKAPLLASDSSSSGGSHSEDGDQKAASAMDAVSRGPGREAPPLPTVARTEEAVGRVGCADSRLLSPACPAPKEVTQPQPWWPPWGQ

SEQ ID NO: 803594 - protein, 902 aa, Homo sapiens
MFWKFDLNTTSHVDKLLDKEHVTLQELMDEDDILQECKAQNQKLLDFLCRQQCMEELVSLITQDPPLDMEEKVRFKYPNTACELLTCDVPQISDRLGGDESLLSLLYDFLDHEPPLNPLLASFFSKTIGNLIARKTEQVITFLKKKDKFISLVLKHIGTSALMDLLLRLVSCVEPAGLRQDVLHWLNEEKVIQRLVELIHPSQDEDRQSNASQTLCDIVRLGRDQGSQLQEALEPDPLLTALESQDCVEQLLKNMFDGDRTESCLVSGTQVLLTLLETRRVGTEGLVDSFSQGLERSYAVSSSVLHGIEPRLKDFHQLLLNPPKKKAILTTIGVLEEPLGNARLHGARLMAALLHTNTPSINQELCRLNTMDLLLDLFFKYTWNNFLHFQVELCIAAILSHAAREERTEASGSESRVEPPHENGNRSLETPQPAASLPDNTMVTHLFQKCCLVQRILEAWEANDHTQAAGGMRRGNMGHLTRIANAVVQNLERGPVQTHISEVIRGLPADCRGRWESFVEETLTETNRRNTVDLVSTHHLHSSSEDEDIEGAFPNELSLQQAFSDYQIQQMTANFVDQFGFNDEEFADQDDNINAPFDRIAEINFNIDADEDSPSAALFEACCSDRIQPFDDDEDEDIWEDSDTRCAARVMARPRFGAPHASESCSKNGPERGGQDGKASLEAHRDAPGAGAPPAPGKKEAPPVEGDSEGAMWTAVFDEPANSTPTAPGVVRDVGSSVWAAGTSAPEEKGWAKFTDFQPFCCSESGPRCSSPVDTECSHAEGSRSQGPEKAFSPASPCAWNVCVTRKAPLLASDSSSSGGSHSEDGDQKAASAMDAVSRGPGREAPPLPTVARTEEAVGSPACLPLLRLPTHSPPPTLPHPFPTPCLTSHPPSLPPTHHCPT

SEQ ID NO: 803595 - protein, 932 aa, Homo sapiens; identical to SEQ ID NO: 803589

SEQ ID NO: 803596 - protein, 959 aa, Homo sapiens; identical to SEQ ID NO: 803586

SEQ ID NO: 803597 - protein, 959 aa, Homo sapiens; identical to SEQ ID NO: 803586

SEQ ID NO: 803598 - protein, 402 aa, Homo sapiens
PALLSAVVMATVASGGTATAGAAVTSFGAGQAGLNSRLSAHPTLPTASSVLATVGSGGASRPGACCSDRIQPFDDDEDEDIWEDSDTRCAARVMARPRFGAPHASESCSKNGPERGGQDGKASLEAHRDAPGAGAPPAPGKKEAPPVEGDSEGAMWTAVFDEPANSTPTAPGVVRDVGSSVWAAGTSAPEEKGWAKFTDFQPFCCSESGPRCSSPVDTECSHAEGSRSQGPEKAFSPASPCAWNVCVTRKAPLLASDSSSSGGSHSEDGDQKAASAMDAVSRGPGREAPPLPTVARTEEAVGRVGCADSRLLSPACPAPKEVTAAPAVAVPPEATVAITTALSKAGPAIPTPAVSSALAVAVPLGPIMAVTAAPAMVATLGTVTKDGKTDAPPEGAALNGPV

SEQ ID NO: 803599 - protein, 891 aa, Homo sapiens; identical to SEQ ID NO: 803593

SEQ ID NO: 803600 - protein, 165 aa, Homo sapiens; identical to SEQ ID NO: 803592

SEQ ID NO: 803601 - protein, 223 aa, Homo sapiens
MFWKFDLNTTSHVDKLLDKEHVTLQELMDEDDILQECKAQNQKLLDFLCRQQCMEELVSLITQDPPLDMEEKVRFKYPNTACELLTCDVPQISDRLGGDESLLSLLYDFLDHEPPLNPLLASFFSKTIGNLIARKTEQVITFLKKKDKFISLVLKHIGTSALMDLLLRLVSCVEPAGLRQDVLHWLNEEKVIQRLVELIHPSQDEDRQSNASQTLCDLVRLPP

SEQ ID NO: 803602 - protein, 369 aa, Homo sapiens
MFWKFDLNTTSHVDKLLDKEHVTLQELMDEDDILQECKAQNQKLLDFLCRQQCMEELVSLITQDPPLDMEEKVRFKYPNTACELLTCDVPQISDRLGGDESLLSLLYDFLDHEPPLNPLLASFFSKTIGNLIARKTEQVITFLKKKDKFISLVLKHIGTSALMDLLLRLVSCVEPAGLRQDVLHWLNEEKVIQRLVELIHPSQDEDRQSNASQTLCDIVRLGRDQGSQLQEALEPDPLLTALESQDCVEQLLKNMFDGDRTESCLVSGTQVLLTLLETRRVGTEGLVDSFSQGLERSYAVSSSVLHGIEPRLKDFHQLLLNPPKKKAILTTIGVLEEPLGNARLHGARLMAALLHTNTRRQMPRQKELP

SEQ ID NO: 803603 - protein, 120 aa, Homo sapiens
MDSPSLRELQQPLLEGTECETPAQKPGRHELGSPLREIAFAESLRGLQFLSPPLPSVSAGLGEPRPPDVEDMSSSDSDSDWDGGSRLSPFLPHDHLGLAVFSMLCCFWPVGIAAFCLAQK

SEQ ID NO: 803604 - protein, 132 aa, Homo sapiens
MDSPSLRELQQPLLEGTECETPAQKPGRHELGSPLREIAFAESLRGLQFLSPPLPSVSAGLGEPRPPDVEDMSSSDSDSDWDGGSRLSPFLPHDHLGLAVFSMLCCFWPVGIAAFCLAQKVSLCVGLGGDWA

SEQ ID NO: 803605 - protein, 120 aa, Homo sapiens; identical to SEQ ID NO: 803603

SEQ ID NO: 803606 - protein, 120 aa, Homo sapiens; identical to SEQ ID NO: 803603

SEQ ID NO: 803607 - protein, 113 aa, Homo sapiens
MISCDKMEGTECETPAQKPGRHELGSPLREIAFAESLRGLQFLSPPLPSVSAGLGEPRPPDVEDMSSSDSDSDWDGGSRLSPFLPHDHLGLAVFSMLCCFWPVGIAAFCLAQK

SEQ ID NO: 803608 - protein, 139 aa, Homo sapiens
MDSPSLRELQQPLLEGTECETPAQKPGRHELGSPLREIAFAESLRGLQFLSPPLPSVSAGLGEPRPPDVEDMSSSDSDSDWDGGSRLSPFLPHDHLGLAVFSMLCCFWPVGIAAFCLAQKHPQCLTYSRCYVSAFGIHA

SEQ ID NO: 803609 - protein, 132 aa, Homo sapiens; identical to SEQ ID NO: 803604

SEQ ID NO: 803610 - protein, 172 aa, Homo sapiens
MDSPSLRELQQPLLEGTECETPAQKPGRHELGSPLREIAFAESLRGLQFLSPPLPSVSAGLGEPRPPDVEDMSSSDSDSDWDGGSRLSPFLPHDHLGLAVFSMLCCFWPVGIAAFCLAQKTNKAWAKGDIQGAGAASRRAFLLGVLAVGLGVCTYAAALVTLAAYLASRDPP

SEQ ID NO: 803611 - protein, 120 aa, Homo sapiens; identical to SEQ ID NO: 803603

SEQ ID NO: 803612 - protein, 139 aa, Homo sapiens; identical to SEQ ID NO: 803608

SEQ ID NO: 803613 - protein, 172 aa, Homo sapiens; identical to SEQ ID NO: 803610

SEQ ID NO: 803614 - protein, 132 aa, Homo sapiens; identical to SEQ ID NO: 803604

SEQ ID NO: 803615 - protein, 759 aa, Homo sapiens
MTLRINHHIKEEVKGKYILYNKYLNIKHWDMTKTDLNTLKESLGWSDVQNYHACYKWRGVYMSCIACGAADDLNFQNENPFLRCRRINRMLSNESLHPPAFSRSNSEASVDSASMEDFWREIESIKDSSMGGQEEPPPAEVTPVDEGELEAEWLQDVGLSTLISGDEEEDGKALLSTLTRTQAAAVQKRYHTYTQTMRKKDKQSIRDVRDIFGVSESPPRDTCGNHTNQLDGTKEERELPRVIKTSGSMPDDASLNSTTLSDASQDKEGSFAVPRSDSVAILETIPVLPVHSNGSPEPGQPVQNAISDDDFLEKNIPPEAEELSFEVSYSEMVTEALKRNKLKKSEIKKEDYVLTKFNVQKTRFGLTEAGDLSAEDMKKIRHLSLIELTAFFDAFGIQLKRNKTEKVKGRDNGIFGVPLTVLLDGDRKKDPGVKVPLVLQKFFEKVEESGLESEGIFRLSGCTAKVKQYREELDAKFNADKFKWDKMCHREAAVMLKAFFRELPTSLFPVEYIPAFISLMERGPHVKVQFQALHLMVMALPDANRDAAQALMTFFNKVIANESKNRMSLWNISTVMAPNLFFSRSKHSDYEELLLANTAAHIIRLMLKYQKILWKVPSFLITQVRRMNEATMLLKKQLPSVRKLLRRKTLERETASPKTSKVLQKSPSARRMSDVPEGVIRVHAPLLSKVSMAIQLNNQTKAKDILAKFQYENRILHWQRAALSFLNGKWVKKEREESTETNRSPKHVFLFTIGLDIST

SEQ ID NO: 803616 - protein, 563 aa, Homo sapiens
MRKKDKQSIRDVRDIFGVSESPPRDTCGNHTNQLDGTKEERELPRVIKTSGSMPDDASLNSTTLSDASQDKEGSFAVPRSDSVAILETIPVLPVHSNGSPEPGQPVQNAISDDDFLEKNIPPEAEELSFEVSYSEMVTEALKRNKLKKSEIKKEDYVLTKFNVQKTRFGLTEAGDLSAEDMKKIRHLSLIELTAFFDAFGIQLKRNKTEKVKGRDNGIFGVPLTVLLDGDRKKDPGVKVPLVLQKFFEKVEESGLESEGIFRLSGCTAKVKQYREELDAKFNADKFKWDKMCHREAAVMLKAFFRELPTSLFPVEYIPAFISLMERGPHVKVQFQALHLMVMALPDANRDAAQALMTFFNKVIANESKNRMSLWNISTVMAPNLFFSRSKHSDYEELLLANTAAHIIRLMLKYQKILWKVPSFLITQVRRMNEATMLLKKQLPSVRKLLRRKTLERETASPKTSKVLQKSPSARRMSDVPEGVIRVHAPLLSKVSMAIQLNNQTKAKDILAKFQYENRILHWQRAALSFLNGKWVKKEREESTETNRSPKHVFLFTIGLDIST

SEQ ID NO: 803617 - protein, 563 aa, Homo sapiens; identical to SEQ ID NO: 803616

SEQ ID NO: 803618 - protein, 544 aa, Homo sapiens
MRKKDKQSIRDVRDIFGVSESPPRDTCGNHTNQLDGTKEERELPRVIKTSGSMPDDASLNSTTLSDASQDKEGSFAVPRSDSVAILETIPVLPVHSNGSPEPGQPVQNAISDDDFLEKNIPPEAEELSFEVSYSEMVTEALKRNKLKKSEIKKEDYVLTKFNVQKTRFGLTEAGDLSAEDMKKIRHLSLIELTAFFDAFGIQLKRNKTEKVKGRDNGIFGVPLTVLLDGDRKKDPGVKVPLVLQKQYREELDAKFNADKFKWDKMCHREAAVMLKAFFRELPTSLFPVEYIPAFISLMERGPHVKVQFQALHLMVMALPDANRDAAQALMTFFNKVIANESKNRMSLWNISTVMAPNLFFSRSKHSDYEELLLANTAAHIIRLMLKYQKILWKVPSFLITQVRRMNEATMLLKKQLPSVRKLLRRKTLERETASPKTSKVLQKSPSARRMSDVPEGVIRVHAPLLSKVSMAIQLNNQTKAKDILAKFQYENSHGSSECIKIQNQRLYEIGGNIGEHCLDPDAYILDVYRINPQAEWVIKPQQSS

SEQ ID NO: 803619 - protein, 346 aa, Homo sapiens
MRKKDKQSIRDVRDIFGVSESPPRDTCGNHTNQLDGTKEERELPRVIKTSGSMPDDASLNSTTLSDASQDKEGSFAVPRSDSVAILETIPVLPVHSNGSPEPGQPVQNAISDDDFLEKNIPPEAEELSFEVSYSEMVTEALKRNKLKKSEIKKEDYVLTKFNVQKTRFGLTEAGDLSAEDMKKIRHLSLIELTAFFDAFGIQLKRNKTEKVKGRDNGIFGVPLTVLLDGDRKKDPGVKVPLVLQKFFEKVEESGLESEGIFRLSGCTAKVKQYREELDAKFNADKFKWDKMCHREAAVMLKAFFRELPTSLFPVEYIPAFISLMESRWKTLYVNTLRYKVNKVRAE

SEQ ID NO: 803620 - protein, 197 aa, Homo sapiens
  misc_feature (117)..(117): Xaa can be any naturally occurring amino acid
  misc_feature (173)..(173): Xaa can be any naturally occurring amino acid
MPGERPTDATVIPSAKRERKAITLDLKLEVLRRFEAGEKLSQIAKALDLAISTVATIRDSKEKIKASSQIATPLRASRLTRHRSAVMESMEQLLSLWLEDQSQPNATLTRIVGEASXAYADMRGLKKVMQQGAEIRMPVALRYSSSDRMHDVKYERSTQATMTDCECRTIQKXAVVKLAFEHDYTWLTSRYIDAKCS

SEQ ID NO: 803621 - protein, 187 aa, Homo sapiens
MPGERPTDATVIPSAKRERKAITLDLKLEVLRRFEAGEKLSQIAKALDLAISTVATIRDSKEKIKASSQIATPLRASRLTRHRSAVMESMEQLLSLWLEDQSQPNATLSAAIVQEKAEFDDLQREHGEGSQTERFHASQGWLVRFKECHCLPHFKMNSAAPSNKDMYTEMLKSIIEEGEYTPQVSLT

SEQ ID NO: 803622 - protein, 169 aa, Homo sapiens
MPGERPTDATVIPSAKRERKAITLDLKLEVLRRFEAGEKLSQIAKALDLAISTVATIRDSKEKIKASSQIATPLRASRLTRHRSAVMESMEQLLSLWLEDQSQPNATLSEGSQTERFHASQGWLVRFKECHCLPHFKMNSAAPSNKDMYTEMLKSIIEEGEYTPQVSLT

SEQ ID NO: 803623 - protein, 187 aa, Homo sapiens; identical to SEQ ID NO: 803621

SEQ ID NO: 803624 - protein, 169 aa, Homo sapiens
MPGERPTDATVIPSAKRERKAITLDLKLEVLRRFEAGEKLSQIAKALDLAISTVATIRDSKESPSKCSDGEHGAAAELVAGRPEPAKCDLERRIVQEKAEFDDLQREHGEGSQTERFHASQGWLVRFKECHCLPHFKMNSAAPSNKDMYTEMLKSIIEEGEYTPQVSLT

SEQ ID NO: 803625 - protein, 132 aa, Homo sapiens [sequence omitted]

SEQ ID NO: 803626 - protein, 236 aa, Homo sapiens
SRPAPAESASPLTCRALPRALALVLAVLPPPGPPHRHSKASGLATALLPAAASSRYHIPRPRSRAARARACAMGERSQGPASAGRTRAGAAGARRRLGPRLGCPRRRLTVRGFDRQRSLALPRQLGPKGIASAFRLILNRASASTLISGVLHGKQLPKQHPPGPPSAALENRPWTFLPQCPPHGVPFVCLVGCSLEPQDPGRLYVPAAARPQHADFERYRETRAASSEWTVKQQLG

SEQ ID NO: 803627 - protein, 250 aa, Homo sapiens
GVVARLRNFGNCHFIHTRHCLGEGAVPGCRILALTSTQTTALAAVWGRLLRGSPRLSDPATGNGAPFGEEPQPGVGTHRLSDSSNTDRSSRAEGISFRRSHYSPREKAAKLGSPGCAPPALLDPRACTGCTLRTSCARSGAMQHPPCEPGNCLSLKEKKITEGSGGVCWGGETDASNPAPALTACCAAEREANVEQGLAGRLLLCNYERRLVRRCKIAGRGRAPLGTRPLDVSSFKLKEEGRPPCLKINK

SEQ ID NO: 803628 - protein, 219 aa, Homo sapiens
TAGAWAAAQTSSRCPPPGGSSRGRRSRSHLRPGAPFGEEPQPGVGTHRLSDSSNTDRSSRAEGISFRRSHYSPREKAAKLGSPGCAPPALLDPRACTGCTLRTSCARSGAMQHPPCEPGNCLSLKEKKITEGSGGVCWGGETDASNPAPALTACCAAEREANVEQGLAGRLLLCNYERRLVRRCKIAGRGRAPLGTRPLDVSSFKLKEEGRPPCLKINK

SEQ ID NO: 803629 - protein, 254 aa, Homo sapiens [sequence omitted]

SEQ ID NO: 803630 - protein, 254 aa, Homo sapiens [sequence omitted]

SEQ ID NO: 803631 - protein, 213 aa, Homo sapiens
MQLVQQRSQIQTLQKKVVNLETALSYMTKEFESEVLKLQQHAMIENQAGQVEIDKLQHLLQMKDREMNRVKKLAKNILDERTEVERFFLDALHQVKQQILISRKHYKQIAQAAFNLKMRAACTGRTEYPKIRTFDGREHSTNSVNQDLLEAEKWTHIEGNVDIGDLTWEQKEKVLRLLFAKMNGCPSRKYNQSSRPPVPDYVVSDSGETKEFG

SEQ ID NO: 803632 - protein, 213 aa, Homo sapiens; identical to SEQ ID NO: 803631

SEQ ID NO: 803633 - protein, 213 aa, Homo sapiens; identical to SEQ ID NO: 803631

SEQ ID NO: 803634 - protein, 221 aa, Homo sapiens
MSAHMSGLEIMDEDQLIKDVLDKFLNCHEQTYDEEFLNTFTHLSQEDHVSKRGVFGTDSSENIFTSAKVTHKNEADDYHLRNKTIFLRTSSQCLEEQVDNFLDLEDLDMDEEIKPQMSEDLLLLPGEVEQDVSTSIPSCIPFVAQPPTCEVKPKPSVKRMDKQTEEILGDEVQLFSLDEEFDYDNVMLTSKFSPAEIENIKELCKQQKRKDTSPDLEKSCD

SEQ ID NO: 803635 - protein, 221 aa, Homo sapiens; identical to SEQ ID NO: 803634

SEQ ID NO: 803636 - protein, 221 aa, Homo sapiens; identical to SEQ ID NO: 803634

SEQ ID NO: 803637 - protein, 217 aa, Homo sapiens [sequence omitted]

SEQ ID NO: 803638 - protein, 221 aa, Homo sapiens; identical to SEQ ID NO: 803634

SEQ ID NO: 803639 - protein, 105 aa, Homo sapiens
MSGLEIMDEDQLIKDVLDKFLNCHEQTYDEEFLNTFTHLSQEDHVSKRGVFGTDSSENIFTSAKVTHKNEADDYHLRNKTIFLRTSSQCLEEQICCCFQEKWSRM

SEQ ID NO: 803640 - protein, 203 aa, Homo sapiens
MSAHMSGLEIMDEDQLIKDVLDKFLNCHEQTYDEEFLNTFTHLSQEDHVSKRGVFGTDSSENIFTSAKVTHKNEADDYHLRNKTIFLRTSSQCLEEQVDNFLDLEDLDMDEEIKPQMSEDLLLLPGEVEQDVSTSIPSCIPFVAQPPTCEVKPKPIFSLDEEFDYDNVMLTSKFSPAEIENIKELCKQQKRKDTSPDLEKSCD

SEQ ID NO: 803641 - protein, 147 aa, Homo sapiens
MSAHMSGLEIMDEDQLIKDVLDKFLNCHEQTYDEEFLNTFTHLSQDLLLLPGEVEQDVSTSIPSCIPFVAQPPTCEVKPKPSVKRMDKQTEEILGDEVQLFSLDEEFDYDNVMLTSKFSPAEIENIKELCKQQKRKDTSPDLEKSCD

SEQ ID NO: 803642 - protein, 147 aa, Homo sapiens; identical to SEQ ID NO: 803641

SEQ ID NO: 803643 - protein, 1881 aa, Homo sapiens
MPYSVGFREADAATSFLRAARSGNLDKALDHLRNGVDINTCNQNGLNGLHLASKEGHVKMVVELLHKEIILETTTKKGNTALHIAALAGQDEVVRELVNYGANVNAQSQKGFTPLYMAAQENHLEVVKFLLENGANQNVATEDGFTPLAVALQQGHENVVAHLINYGTKGKVRLPALHIAARNDDTRTAAVLLQNDPNPDVLSKTGFTPLHIAAHYENLNVAQLLLNRGASVNFTPQNGITPLHIASRRGNVIMVRLLLDRGAQIETKTKDELTPLHCAARNGHVRISEILLDHGAPIQAKTKNGLSPIHMAAQGDHLDCVRLLLQYDAEIDDITLDHLTPLHVAAHCGHHRVAKVLLDKGAKPNSRALNGFTPLHIACKKNHVRVMELLLKTGASIDAVTESGLTPLHVASFMGHLPIVKNLLQRGASPNVSNVKVETPLHMAARAGHTEVAKYLLQNKAKVNAKAKDDQTPLHCAARIGHTNMVKLLLENNANPNLATTAGHTPLHIAAREGHVETVLALLEKEASQACMTKKGFTPLHVAAKYGKVRVAELLLERDAHPNAAGKNGLTPLHVAVHHNNLDIVKLLLPRGGSPHSPAWNGYTPLHIAAKQNQVEVARSLLQYGGSANAESVQGVTPLHLAAQEGHAEMVALLLSKQANGNLGNKSGLTPLHLVAQEGHVPVADVLIKHGVMVDATTRMGYTPLHVASHYGNIKLVKFLLQHQADVNAKTKLGYSPLHQAAQQGHTDIVTLLLKNGASPNEVSSDGTTPLAIAKRLGYISVTDVLKVVTDETSFVLVSDKHRMSFPETVDEILDVSEDEGEELISFKAERRDSRDVDEEKELLDFVPKLDQVVESPAIPRIPCAMPETVVIRSEEQEQASKEYDEDSLIPSSPATETSDNISPVASPVHTGFLVSFMVDARGGSMRGSRHNGLRVVIPPRTCAAPTRITCRLVKPQKLSTPPPLAEEEGLASRIIALGPTGAQFLSPVIVEIPHFASHGRGDRELVVLRSENGSVWKEHRSRYGESYLDQILNGMDEELGSLEELEKKRVCRIITTDFPLYFVIMSRLCQDYDIIGPEGGSLKSKLVPLVQATFPENAVTKRVKLALQAQPVPDELVTKLLGNQATFSPIVTVEPRRRKFHRPIGLRIPLPPSWTDNPRDSGEGDTTSLRLLCSVIGGTDQAQWEDITGTTKLVYANECANFTTNVSARFWLSDCPRTAEAVNFATLLYKELTAVPYMAKFVIFAKMNDPREGRLRCYCMTDDKVDKTLEQHENFVEVARSRDIEVLEGMSLFAELSGNLVPVKKAAQQRSFHFQSFRENRLAMPVKVRDSSREPGGSLSFLRKAMKYEDTQHILCHLNITMPPCAKGSGAEDRRRTPTPLALRYSILSESTPGSLSGTEQAEMKMAVISEHLGLSWAELARELQFSVEDINRIRVENPNSLLEQSVALLNLWVIREGQNANMENLYTALQSIDRGEIVNMLEGSGRQSRNLKPDRRHTDRDYSLSPSQMNGYSSLQDELLSPASLGCALSSPLRADQYWNEVAVLDAIPLAATEHDTMLEMSDMQVWSAGLTPSLVTAEDSSLECSKAEDSDATGHEWKLEGALSEEPRGPELGSLELVEDDTVDSDATNGLIDLLEQEEGQRSEEKLPGSKRQDDATGAGQDSENEVSLVSGHQRGQARITHSPTVSQVTERSQDRLQDWDADGSIVSYLQDAAQGSWQEEVTQGPHSFQGTSTMTEGLEPGGSQEYEKVLVSVSEHTWTEQPEAESSQADRDRRQQGQEEQVQEAKNTFTQVVQGNEFQNIPGEQVTEEQFTDEQGNIVTKKIIRKVVRQIDLSSADAAQEHEEVTVEGPLEDPSELEVDIDYFMKHSKDHTSTPNP

SEQ ID NO: 803644 - protein, 1880 aa, Homo sapiens
MPYSVGFREADAATSFLRAARSGNLDKALDHLRNGVDINTCNQNGLNGLHLASKEGHVKMVVELLHKEIILETTTKKGNTALHIAALAGQDEVVRELVNYGANVNAQSQKGFTPLYMAAQENHLEVVKFLLENGANQNVATEDGFTPLAVALQQGHENVVAHLINYGTKGKVRLPALHIAARNDDTRTAAVLLQNDPNPDVLSKTGFTPLHIAAHYENLNVAQLLLNRGASVNFTPQNGITPLHIASRRGNVIMVRLLLDRGAQIETKTKDELTPLHCAARNGHVRISEILLDHGAPIQAKTKNGLSPIHMAAQGDHLDCVRLLLQYDAEIDDITLDHLTPLHVAAHCGHHRVAKVLLDKGAKPNSRALNGFTPLHIACKKNHVRVMELLLKTGASIDAVTESGLTPLHVASFMGHLPIVKNLLQRGASPNVSNVKVETPLHMAARAGHTEVAKYLLQNKAKVNAKAKDDQTPLHCAARIGHTNMVKLLLENNANPNLATTAGHTPLHIAAREGHVETVLALLEKEASQACMTKKGFTPLHVAAKYGKVRVAELLLERDAHPNAAGKNGLTPLHVAVHHNNLDIVKLLLPRGGSPHSPAWNGYTPLHIAAKQNQVEVARSLLQYGGSANAESVQGVTPLHLAAQEGHAEMVALLLSKQANGNLGNKSGLTPLHLVAQEGHVPVADVLIKHGVMVDATTRMGYTPLHVASHYGNIKLVKFLLQHQADVNAKTKLGYSPLHQAAQQGHTDIVTLLLKNGASPNEVSSDGTTPLAIAKRLGYISVTDVLKVVTDETSFVLVSDKHRMSFPETVDEILDVSEDEGEELISFKAERRDSRDVDEEKELLDFVPKLDQVVESPAIPRIPCAMPETVVIRSEEQEQASKEYDEDSLIPSSPATETSDNISPVASPVHTGFLVSFMVDARGGSMRGSRHNGLRVVIPPRTCAAPTRITCRLVKPQKLSTPPPLAEEEGLASRIIALGPTGAQFLSPVIVEIPHFASHGRGDRELVVLRSENGSVWKEHRSRYGESYLDQILNGMDEELGSLEELEKKRVCRIITTDFPLYFVIMSRLCQDYDIIGPEGGSLKSKLVPLVQATFPENAVTKRVKLALQAQPVPDELVTKLLGNQATFSPIVTVEPRRRKFHRPIGLRIPLPPSWTDNPRDSGEGDTTSLRLLCSVIGGTDQAQWEDITGTTKLVYANECANFTTNVSARFWLSDCPRTAEAVNFATLLYKELTAVPYMAKFVIFAKMNDPREGRLRCYCMTDDKVDKTLEQHENFVEVARSRDIEVLEGMSLFAELSGNLVPVKKAAQQRSFHFQSFRENRLAMPVKVRDSSREPGGSLSFLRKAMKYEDTQHILCHLNITMPPCAKGSGAEDRRRTPTPLALRYSILSESTPGSLSGTEQAEMKMAVISEHLGLSWAELARELQFSVEDINRIRVENPNSLLEQSVALLNLWVIREGQNANMENLYTALQSIDRGEIVNMLEGSGRQSRNLKPDRRHTDRDYSLSPSQMNGYSSLQDELLSPASLGCALSSPLRADQYWNEVAVLDAIPLAATEHDTMLEMSDMQVWSAGLTPSLVTAEDSSLECSKAEDSDATGHEWKLEGALSEEPRGPELGSLELVEDDTVDSDATNGLIDLLEQEEGQRSEEKLPGSKRQDDATGAGQDSENEVSLVSGHQRGQARITHSPTVSQVTERSQDRLQDWDADGSIVSYLQDAAQGSWQEEVTQGPHSFQGTSTMTEGLEPGGSQEYEKVLVSVSEHTWTEQPEAESSQADRDRRQQGQEEQVQEAKNTFTQVVQGNEFQNIPGEQVTEEQFTDEQGNIVTKKIIRKVVRQIDLSSADAAQEHEEVELRGSGLQPDLIEGRKGAQIVKRASLKRGKQ

SEQ ID NO: 803645 - protein, 1719 aa, Homo sapiens
MPYSVGFREADAATSFLRAARSGNLDKALDHLRNGVDINTCNQNGLNGLHLASKEGHVKMVVELLHKEIILETTTKKGNTALHIAALAGQDEVVRELVNYGANVNAQSQKGFTPLYMAAQENHLEVVKFLLENGANQNVATEDGFTPLAVALQQGHENVVAHLINYGTKGKVRLPALHIAARNDDTRTAAVLLQNDPNPDVLSKTGFTPLHIAAHYENLNVAQLLLNRGASVNFTPQNGITPLHIASRRGNVIMVRLLLDRGAQIETKTKDELTPLHCAARNGHVRISEILLDHGAPIQAKTKNGLSPIHMAAQGDHLDCVRLLLQYDAEIDDITLDHLTPLHVAAHCGHHRVAKVLLDKGAKPNSRALNGFTPLHIACKKNHVRVMELLLKTGASIDAVTESGLTPLHVASFMGHLPIVKNLLQRGASPNVSNVKVETPLHMAARAGHTEVAKYLLQNKAKVNAKAKDDQTPLHCAARIGHTNMVKLLLENNANPNLATTAGHTPLHIAAREGHVETVLALLEKEASQACMTKKGFTPLHVAAKYGKVRVAELLLERDAHPNAAGKNGLTPLHVAVHHNNLDIVKLLLPRGGSPHSPAWNGYTPLHIAAKQNQVEVARSLLQYGGSANAESVQGVTPLHLAAQEGHAEMVALLLSKQANGNLGNKSGLTPLHLVAQEGHVPVADVLIKHGVMVDATTRMGYTPLHVASHYGNIKLVKFLLQHQADVNAKTKLGYSPLHQAAQQGHTDIVTLLLKNGASPNEVSSDGTTPLAIAKRLGYISVTDVLKVVTDETSFVLVSDKHRMSFPETVDEILDVSEDEGEELISFKAERRDSRDVDEEKELLDFVPKLDQVVESPAIPRIPCAMPETVVIRSEEQEQASKEYDEDSLIPSSPATETSDNISPVASPVHTGFLVSFMVDARGGSMRGSRHNGLRVVIPPRTCAAPTRITCRLVKPQKLSTPPPLAEEEGLASRIIALGPTGAQFLSPVIVEIPHFASHGRGDRELVVLRSENGSVWKEHRSRYGESYLDQILNGMDEELGSLEELEKKRVCRIITTDFPLYFVIMSRLCQDYDIIGPEGGSLKSKLVPLVQATFPENAVTKRVKLALQAQPVPDELVTKLLGNQATFSPIVTVEPRRRKFHRPIGLRIPLPPSWTDNPRDSGEGDTTSLRLLCSVIGGTDQAQWEDITGTTKLVYANECANFTTNVSARFWLSDCPRTAEAVNFATLLYKELTAVPYMAKFVIFAKMNDPREGRLRCYCMTDDKVDKTLEQHENFVEVARSRDIEVLEGMSLFAELSGNLVPVKKAAQQRSFHFQSFRENRLAMPVKVRDSSREPGGSLSFLRKAMKYEDTQHILCHLNITMPPCAKGSGAEDRRRTPTPLALRYSILSESTPGSLSGTEQAEMKMAVISEHLGLSWAELARELQFSVEDINRIRVENPNSLLEQSVALLNLWVIREGQNANMENLYTALQSIDRGEIVNMLEGSGRQSRNLKPDRRHTDRDYSLSPSQMNGHQRGQARITHSPTVSQVTERSQDRLQDWDADGSIVSYLQDAAQGSWQEEVTQGPHSFQGTSTMTEGLEPGGSQEYEKVLVSVSEHTWTEQPEAESSQADRDRRQQGQEEQVQEAKNTFTQVVQGNEFQNIPGEQVTEEQFTDEQGNIVTKKIIRKVVRQIDLSSADAAQEHEEVTVEGPLEDPSELEVDIDYFMKHSKDHTSTPNP

SEQ ID NO: 803646 - protein, 1856 aa, Homo sapiens
MPYSVGFREADAATSFLRAARSGNLDKALDHLRNGVDINTCNQNGLNGLHLASKEGHVKMVVELLHKEIILETTTKKGNTALHIAALAGQDEVVRELVNYGANVNAQSQKGFTPLYMAAQENHLEVVKFLLENGANQNVATEDGFTPLAVALQQGHENVVAHLINYGTKGKVRLPALHIAARNDDTRTAAVLLQNDPNPDVLSKTGFTPLHIAAHYENLNVAQLLLNRGASVNFTPQNGITPLHIASRRGNVIMVRLLLDRGAQIETKTKDELTPLHCAARNGHVRISEILLDHGAPIQAKTKNGLSPIHMAAQGDHLDCVRLLLQYDAEIDDITLDHLTPLHVAAHCGHHRVAKVLLDKGAKPNSRALNGFTPLHIACKKNHVRVMELLLKTGASIDAVTESGLTPLHVASFMGHLPIVKNLLQRGASPNVSNVKVETPLHMAARAGHTEVAKYLLQNKAKVNAKAKDDQTPLHCAARIGHTNMVKLLLENNANPNLATTAGHTPLHIAAREGHVETVLALLEKEASQACMTKKGFTPLHVAAKYGKVRVAELLLERDAHPNAAGKNGLTPLHVAVHHNNLDIVKLLLPRGGSPHSPAWNGYTPLHIAAKQNQVEVARSLLQYGGSANAESVQGVTPLHLAAQEGHAEMVALLLSKQANGNLGNKSGLTPLHLVAQEGHVPVADVLIKHGVMVDATTRMGYTPLHVASHYGNIKLVKFLLQHQADVNAKTKLGYSPLHQAAQQGHTDIVTLLLKNGASPNEVSSDGTTPLAIAKRLGYISVTDVLKVVTDETSFVLVSDKHRMSFPETVDEILDVSEDEGEELISFKAERRDSRDVDEEKELLDFVPKLDQVVESPAIPRIPCAMPETVVIRSEEQEQASKEYDEDSLIPSSPATETSDNISPVASPVHTGFLVSFMVDARGGSMRGSRHNGLRVVIPPRTCAAPTRITCRLVKPQKLSTPPPLAEEEGLASRIIALGPTGAQFLSPVIVEIPHFASHGRGDRELVVLRSENGSVWKEHRSRYGESYLDQILNGMDEELGSLEELEKKRVCRIITTDFPLYFVIMSRLCQDYDIIGPEGGSLKSKLVPLVQATFPENAVTKRVKLALQAQPVPDELVTKLLGNQATFSPIVTVEPRRRKFHRPIGLRIPLPPSWTDNPRDSGEGDTTSLRLLCSVIGGTDQAQWEDITGTTKLVYANECANFTTNVSARFWLSDCPRTAEAVNFATLLYKELTAVPYMAKFVIFAKMNDPREGRLRCYCMTDDKVDKTLEQHENFVEVARSRDIEVLEGMSLFAELSGNLVPVKKAAQQRSFHFQSFRENRLAMPVKVRDSSREPGGSLSFLRKAMKYEDTQHILCHLNITMPPCAKGSGAEDRRRTPTPLALRYSILSESTPGSLSGTEQAEMKMAVISEHLGLSWAELARELQFSVEDINRIRVENPNSLLEQSVALLNLWVIREGQNANMENLYTALQSIDRGEIVNMLEGSGRQSRNLKPDRRHTDRDYSLSPSQMNGYSSLQDELLSPASLGCALSSPLRADQYWNEVAVLDAIPLAATEHDTMLEMSDMQVWSAGLTPSLVTAEDSSLECSKAEDSDATGHEWKLEGALSEEPRGPELGSLELVEDDTVDSDATNGLIDLLEQEEGQRSEEKLPGSKRQDDATGAGQDSENEVSLVSGHQRGQARITHSPTVSQVTERSQDRLQDWDADGSIVSYLQDAAQGSWQEEVTQGPHSFQGTSTMTEGLEPGGSQEYEKVLVSVSEHTWTEQPEAESSQADRDRRQQGQEEQVQEAKNTFTQVVQGNEFQNIPGEQVTEEQFTDEQGNIVTKKIIRKVVRQIDLSSADAAQEHEEDHTSTPNP

SEQ ID NO: 803647 - protein, 69 aa, Homo sapiens
DEQGNIVTKKIIRKVVRQIDLSSADAAQEHEEVLCAKAHPPGAGQGAGGERGPLLRLAWLHAPAASRSR

SEQ ID NO: 803648 - protein, 1880 aa, Homo sapiens; identical to SEQ ID NO: 803644

SEQ ID NO: 803649 - protein, 155 aa, Homo sapiens
MWTFVTQLLVTLVLLSFFLVSCQNVMHIVRGSLCFVLKHIHQELDKELGESEGLSDDEETISTRVVRRRVFLKGNEFQNIPGEQVTEEQFTDEQGNIVTKKIIRKVVRQIDLSSADAAQEHEEVELRGSGLQPDLIEGRKGAQIVKRASLKRGKQ

SEQ ID NO: 803650 - protein, 156 aa, Homo sapiens
MWTFVTQLLVTLVLLSFFLVSCQNVMHIVRGSLCFVLKHIHQELDKELGESEGLSDDEETISTRVVRRRVFLKGNEFQNIPGEQVTEEQFTDEQGNIVTKKIIRKVVRQIDLSSADAAQEHEEVTVEGPLEDPSELEVDIDYFMKHSKDHTSTPNP

SEQ ID NO: 803651 - protein, 133 aa, Homo sapiens
MWTFVTQLLVTLVLLSFFLVSCQNVMHIVRGSLCFVLKHIHQELDKELGESEGLSDDEETISTRVVRRRVFLKGNEFQNIPGEQVTEEQFTDEQGNIVTKKVELRGSGLQPDLIEGRKGAQIVKRASLKRGKQ

SEQ ID NO: 803652 - protein, 131 aa, Homo sapiens
MWTFVTQLLVTLVLLSFFLVSCQNVMHIVRGSLCFVLKHIHQELDKELGESEGLSDDEETISTRVVRRRVFLKGNEFQNIPGEQVTEEQFTDEQGNIVTKKIIRKVVRQIDLSSADAAQEHEEDHTSTPNP

SEQ ID NO: 803653 - protein, 1040 aa, Homo sapiens
MVRWGPFLWWRSPWMQPRTAAVRNQWVLDQPTVFNSWPRASKEYDEDSLIPSSPATETSDNISPVASPVHTGFLVSFMVDARGGSMRGSRHNGLRVVIPPRTCAAPTRITCRLVKPQKLSTPPPLAEEEGLASRIIALGPTGAQFLSPVIVEIPHFASHGRGDRELVVLRSENGSVWKEHRSRYGESYLDQILNGMDEELGSLEELEKKRVCRIITTDFPLYFVIMSRLCQDYDIIGPEGGSLKSKLVPLVQATFPENAVTKRVKLALQAQPVPDELVTKLLGNQATFSPIVTVEPRRRKFHRPIGLRIPLPPSWTDNPRDSGEGDTTSLRLLCSVIGGTDQAQWEDITGTTKLVYANECANFTTNVSARFWLSDCPRTAEAVNFATLLYKELTAVPYMAKFVIFAKMNDPREGRLRCYCMTDDKVDKTLEQHENFVEVARSRDIEVLEGMSLFAELSGNLVPVKKAAQQRSFHFQSFRENRLAMPVKVRDSSREPGGSLSFLRKAMKYEDTQHILCHLNITMPPCAKGSGAEDRRRTPTPLALRYSILSESTPGSLSGTEQAEMKMAVISEHLGLSWAELARELQFSVEDINRIRVENPNSLLEQSVALLNLWVIREGQNANMENLYTALQSIDRGEIVNMLEGSGRQSRNLKPDRRHTDRDYSLSPSQMNGYSSLQDELLSPASLGCALSSPLRADQYWNEVAVLDAIPLAATEHDTMLEMSDMQVWSAGLTPSLVTAEDSSLECSKAEDSDATGHEWKLEGALSEEPRGPELGSLELVEDDTVDSDATNGLIDLLEQEEGQRSEEKLPGSKRQDDATGAGQDSENEVSLVSGHQRGQARITHSPTVSQVTERSQDRLQDWDADGSIVSYLQDAAQGSWQEEVTQGPHSFQGTSTMTEGLEPGGSQEYEKVLVSVSEHTWTEQPEAESSQADRDRRQQGQEEQVQEAKNTFTQVVQGNEFQNIPGEQVTEEQFTDEQGNIVTKKIIRKVVRQIDLSSADAAQEHEEVELRGSGLQPDLIEGRKGAQIVKRASLKRGKQ

SEQ ID NO: 803654 - protein, 109 aa, Homo sapiens
MWTFVTQLLVTLVLLSFFLVSCQNVMHIVRGSLCFVLKHIHQELDKELGESEGLSDDEETISTRVVRRRVFLKGNEFQNIPGEQVTEEQFTDEQGNIVTKKDHTSTPNP

SEQ ID NO: 803655 - protein, 1040 aa, Homo sapiens; identical to SEQ ID NO: 803653

SEQ ID NO: 803656 - protein, 675 aa, Homo sapiens
MVRWGPFLWWRSPWMQPRTAAVRNQWVLDQPTVFNSWPRASKEYDEDSLIPSSPATETSDNISPVASPVHTGFLVSFMVDARGGSMRGSRHNGLRVVIPPRTCAAPTRITCRLVKPQKLSTPPPLAEEEGLASRIIALGPTGAQFLSPVIVEIPHFASHGRGDRELVVLRSENGSVWKEHRSRYGESYLDQILNGMDEELGSLEELEKKRVCRIITTDFPLYFVIMSRLCQDYDIIGPEGGSLKSKLVPLVQATFPENAVTKRVKLALQAQPVPDELVTKLLGNQATFSPIVTVEPRRRKFHRPIGLRIPLPPSWTDNPRDSGEGDTTSLRLLCSVIGGTDQAQWEDITGTTKLVYANECANFTTNVSARFWLSDCPRTAEAVNFATLLYKELTAVPYMAKFVIFAKMNDPREGRLRCYCMTDDKVDKTLEQHENFVEVARSRDIEVLEGMSLFAELSGNLVPVKKAAQQRSFHFQSFRENRLAMPVKVRDSSREPGGSLSFLRKAMKYEDTQHILCHLNITMPPCAKGSGAEDRRRTPTPLALRYSILSESTPGSLSGTEQAEMKMAVISEHLGLSWAELARELQFSVEDINRIRVENPNSLLEQSVALLNLWVIREGQNANMENLYTALQSIDRGEIVLQEEEPFIWEGDSEESRSVCRLSGFKLRLCRPEPS

SEQ ID NO: 803657 - protein, 110 aa, Homo sapiens
IIRKVVRQIDLSSADAAQEHEEVTVEGPLEDPSELEVDIDYFMKHSKVLRRPRPWGTQRHHCCLALPGRLHDTSLHSPLYELSLQSLFSLVGSVSAPPCGLLSIFCLCSA

SEQ ID NO: 803658 - protein, 291 aa, Homo sapiens
ARLGLPPWGAGGGVRDVETRGPGSRAARGPRVGMHRRGVGAGAIAKKKLAEAKYKERGTVLAEDQLAQMSKQLDMFKTNLEEFASKHKQEIRKNPEFRVQFQDMCATIGVDPLASGKGFWSEMLGVGDFYYELGVQIIEVCLALKHRNGGLITLEELHQQVLKGRGKFAQDVSQDDLIRAIKKLKALGTGFGIIPVGGTYLIQSVPAELNMDHTVVLQLAEKNGYVTVSEIKASLKWETERARQVLEHLLKEGLAWLDLQAPGEAHYWLPALFTDLYSQEITAEEAREALP

SEQ ID NO: 803659 - protein, 98 aa, Homo sapiens
MDHTVVLQLAEKNGYVTVSEIKASLKWETERARQVLEHLLKEGLAWLDLQAPGEAHYWLPALFTDLYSQVYLPPPPPPCLLLCALPHAVRGGLLWPPQ

SEQ ID NO: 803660 - protein, 291 aa, Homo sapiens; identical to SEQ ID NO: 803658

SEQ ID NO: 803661 - protein, 291 aa, Homo sapiens; identical to SEQ ID NO: 803658

SEQ ID NO: 803662 - protein, 291 aa, Homo sapiens; identical to SEQ ID NO: 803658

SEQ ID NO: 803663 - protein, 169 aa, Homo sapiens
MLGVGDFYYELGVQIIEVCLALKHRNGGLITLEELHQQVLKGRGKFAQDVSQDDLIRAIKKLKALGTGFGIIPVGGTYLIQSVPAELNMDHTVVLQLAEKNGYVTVSEIKASLKWETERARQVLEHLLKEGLAWLDLQAPGEAHYWLPALFTDLYSQEITAEEAREALP

SEQ ID NO: 803664 - protein, 317 aa, Homo sapiens
ARLGLPPWGAGGGVRDVETRGPGSRAARGPRVGMHRRGVGAGAIAKKKLAEAKYKERGTVLAEDQLAQMSKQLDMFKTNLEEFASKHKQEIRKNPEFRVQFQDMCATIGVDPLASGKGFWSEMLGVGDFYYELGVQIIEVCLALKHRNGVYRPLRTWRHLSCFMQLNPWQVSMAKGLITLEELHQQVLKGRGKFAQDVSQDDLIRAIKKLKALGTGFGIIPVGGTYLIQSVPAELNMDHTVVLQLAEKNGYVTVSEIKASLKWETERARQVLEHLLKEGLAWLDLQAPGEAHYWLPALFTDLYSQEITAEEAREALP

SEQ ID NO: 803665 - protein, 154 aa, Homo sapiens
MQLNPWQVSMAKGLITLEELHQQVLKGRGKFAQDVSQDDLIRAIKKLKALGTGFGIIPVGGTYLIQSVPAELNMDHTVVLQLAEKNGYVTVSEIKASLKWETERARQVLEHLLKEGLAWLDLQAPGEAHYWLPALFTDLYSQEITAEEAREALP

SEQ ID NO: 803666 - protein, 174 aa, Homo sapiens
ARLGLPPWGAGGGVRDVETRGPGSRAARGPRVGMHRRGVGAGAIAKKKLAEAKYKERGTVLAEDQLAQMSKQLDMFKTNLEEFASKHKQEIRKNPEFRVQFQDMCATIGVDPLASGKGFWSEMLGVGDFYYELGVQIIEVCLALKHRNGGLITLEELHQQVLKGRGKFAQDVSQ

SEQ ID NO: 803667 - protein, 131 aa, Homo sapiens
PSRLLLLNSRPVDQDDLIRAIKKLKALGTGFGIIPVGGTYLIQSVPAELNMDHTVVLQLAEKNGYVTVSEIKASLKWETERARQVLEHLLKEGLAWLDLQAPGEAHYWLPALFTDLYSQEITAEEAREALP

SEQ ID NO: 803668 - protein, 114 aa, Homo sapiens
ARLGLPPWGAGGGVRDVETRGPGSRAARGPRVGMHRRGVGAGAIAKKKLAEAKYKERGTVLAEDQLAQMSKQLDMFKTNLEEFASKHKQEIRKNPEFRVQFQDMCATIGVDPLA

SEQ ID NO: 803669 - protein, 174 aa, Homo sapiens; identical to SEQ ID NO: 803666

SEQ ID NO: 803670 - protein, 153 aa, Homo sapiens
ARLGLPPWGAGGGVRDVETRGPGSRAARGPRVGMHRRGVGAGAIAKKKLAEAKYKERGTVLAEDQLAQMSKQLDMFKTNLEEFASKHKQEIRKNPEFRVQFQDMCATIGVDPLASGKGFWSEMLGVGDFYYELGVQIIEVCLALKHRNGGEGG

SEQ ID NO: 803671 - protein, 153 aa, Homo sapiens; identical to SEQ ID NO: 803670

SEQ ID NO: 803672 - protein, 512 aa, Homo sapiens
MMLSEQAQKWFPTHVQVTVLQAKDLKPKGKSGTNDTYTIIQLGKEKYSTSVAEKTLEPVWKEEASFELPGLLIQGSPEKYILFLIVMHRSLVGLDKFLGQVAINLNDIFEDKQRRKTEWFRLESKQGKRIKNRGEIKVNIQFMRNNMTASMFDLSMKDKTRSPFAKLKDKMKGRKNDGTFSDTSSAIIPSTHMPDANSEFSSGEIQMKSKPKKPFLLGPQRLSSAHSMSDLSGSHMSSEKLKAGTIGQTHLLGHQLDSFGTVPESGSLKSPHRRTLSFDTSKMNQPDSIVDEGELCFGRQNDPFTNVTASLPQKFATLPRKKNPFEESSETWDSSMNLFSKPIEIRKENKREKREKVSLFERVTGKKDSRRSDKLNNGGSDSPCDLKSPNAFSENRQDYFDYESTNPFTAKFRASNIMPSSSFHMSPTSNEDLRKIPDSNPFDATAGYRSLTYEEVLQELVKHKELLRRKDTHIRELEDYIDNLLVRVMEETPSILRVPYEPSRKAGKFSNS

SEQ ID NO: 803673 - protein, 494 aa, Homo sapiens
MMLSEQAQKWFPTHVQVTVLQAKDLKPKGKSGTNDTYTIIQLGKEKYSTSVAEKTLEPVWKEEASFELPGLLIQGSPEKYILFLIVMHRSLVGLDKFLGQVAINLNDIFEDKQRRKTEWFRLESKQGKRIKNRGEIKVNIQFMRNNMTASMFDLSMKDKTRSPFAKLKDKMKGRKNDGTFSDTSSAIIPSTHMPDANSEFSSGEIQMKSKPNLSGSHMSSEKLKAGTIGQTHLLGHQLDSFGTVPESGSLKSPHRRTLSFDTSKMNQPDSIVDEGELCFGRQNDPFTNVTASLPQKFATLPRKKNPFEESSETWDSSMNLFSKPIEIRKENKREKREKVSLFERVTGKKDSRRSDKLNNGGSDSPCDLKSPNAFSENRQDYFDYESTNPFTAKFRASNIMPSSSFHMSPTSNEDLRKIPDSNPFDATAGYRSLTYEEVLQELVKHKELLRRKDTHIRELEDYIDNLLVRVMEETPSILRVPYEPSRKAGKFSNS

SEQ ID NO: 803674 - protein, 512 aa, Homo sapiens; identical to SEQ ID NO: 803672

SEQ ID NO: 803675 - protein, 270 aa, Homo sapiens
MMLSEQAQKWFPTHVQVTVLQAKDLKPKGKSGTNDTYTIIQLGKEKYSTSVAEKTLEPVWKEEASFELPGLLIQGSPEKYILFLIVMHRSLVGLDKFLGQVAINLNDIFEDKQRRKTEWFRLESKQGKRIKNRGEIKVNIQFMRNNMTASMFDLSMKDKTRSPFAKLKDKMKGRKNDGTFSDTSSAIIPSTHMPDANSEFSSGEIQMKSKPKKPFLLGPREFARLQVRFLVPSFGTGVSMLSSPPIICEPQEDTPQCFYNPSVVWPPSGR

SEQ ID NO: 803676 - protein, 422 aa, Homo sapiens
MMLSEQAQKWFPTHVQVTVLQAKDLKPKGKSGTNDTYTIIQLGKEKYSTSVAEKTLEPVWKEEASFELPGLLIQGSPEKYILFLIVMHRSLVGLDKFLGQVAINLNDIFEDKQRRKTEWFRLESKQGKRIKNRGEIKVNIQFMRNNMTASMFDLSMKDKTRSPFAKLKDKMKGRKNDGTFSDTSSAIIPSTHMPDANSEFSSGEIQMKSKPKKPFLLGPQRLSSAHSMSDLSGSHMSSEKLKAGTIGQTHLLGHQLDSFGTVPESGSLKSPHRRTLSFDTSKMNQPDSIVDEGELCFGRQNDPFTNVTASLPQKFATLPRKKNPFEESSETWDSSMNLFSKPIEIRKENKREKREKVSLFERVTGKKDSRRSDKLNNGGSDSPCDLKSPNAFSENRQDYFDYESTNPFTAKFRASNIMPSSR

SEQ ID NO: 803677 - protein, 119 aa, Homo sapiens
MRPRAPRASSPNLPADDMRHRPGDPGSGISRLHGRRTREDTPQCACATLSRPLKKAMWPLHQSESCFFPGPALFPDFRRLAGRKTTLNYRARRLPETSGYCSPKGSERQEHVLVKSSLE

SEQ ID NO: 803678 - protein, 84 aa, Homo sapiens
SEKSGKHVSAEEKEKDKSKLWEESTAQVKDKKAGLPGLEEGGKDSLPLAYVLALGAPTMNFMVDETAAINSNKESQQLVQKTYT

SEQ ID NO: 803679 - protein, 239 aa, Homo sapiens
HIKPEDFLFAYTILRSVPNKLGGVLALLLSILILAKNLHNRLISERTVEENILKKANQKRMLGDMAIEGGNFTTAYFKQQTIRELFDMPLEEPSSSSVPSAPEEEEETVASKQTHILEQALCRAEDEEDIRAATQAKAEQVAELAEFNENDGFPAGEGEEAGRPGAEDEEMSRAEQEIAALVEQLTPIERYAMKFLEASLEEVSREELKQAEVSISRGGAGSWKLLISFSFLFFLRQSR

SEQ ID NO: 803680 - protein, 3347 aa, Homo sapiens
AAETAAAILVRPRERQRRFAGSSVCPFSHPPSASVCCAKRQWRQGGGSSRSLQGSLKAAKAVAKRGPSPLLGGRGGGAHAPEDAGVIPFSTAAPWKCRLSQGVWSQLTQVLQRLVDLSGGWDALVGPGPWKAGPGGLVAQNEASSQHALQPDASPSASSTGDNNPVILQASKGEPGSGTMQSSPSPAHPQLPVLQTQMVSDGMTGSNPVSPASSSSPASSGAGGISPQHIAQDSSLDGPPGPPDGATVPLEGFSLSQAADLANKGPKWEKSHAEIAEQAKHEAEIETRIAELRKEGFWSLKRLPKVPEPPRPKGHWDYLCEEMQWLSADFAQERRWKRGVARKVVRMVIRHHEEQRQKEERARREEQAKLRRIASTMAKDVRQFWSNVEKVVQFKQQSRLEEKRKKALDLHLDFIVGQTEKYSDLLSQSLNQPLTSSKAGSSPCLGSSSAASSPPPPASRLDDEDGDFQPQEDEEEDDEETIEVEEQQEGNDAEAQRREIELLRREGELPLEELLRSLPPQLLEGPSSPSQTPSSHDSDTRDGPEEGAEEEPPQVLEIKPPPSAVTQRNKQPWHPDEDDEEFTANEEEAEDEEDTIAAEEQLEGEVDHAMELSELAREGELSMEELLQQYAGAYAPGSGSSEDEDEDEVDANSSDCEPEGPVEAEEPPQEDSSSQSDSVEDRSEDEEDEHSEEEETSGSSASEESESEESEDAQSQSQADEEEEDDDFGVEYLLARDEEQSEADAGSGPPTPGPTTLGPKKEITDIAAAAESLQPKGYTLATTQVKTPIPLLLRGQLREYQHIGLDWLVTMYEKKLNGILADEMGLGKTIQTISLLAHLACEKGNWGPHLIIVPTSVMLNWEMELKRWCPSFKILTYYGAQKERKLKRQGWTKPNAFHVCITSYKLVLQDHQAFRRKNWRYLILDEAQNIKNFKSQRWQSLLNFNSQRRLLLTGTPLQNSLMELWSLMHFLMPHVFQSHREFKEWFSNPLTGMIEGSQEYNEGLVKRLHKVLRPFLLRRVKVDVEKQMPKKYEHVIRCRLSKRQRCLYDDFMAQTTTKETLATGHFMSVINILMQLRKVCNHPNLFDPRPVTSPFITPGICFSTASLVLRATDVHPLQRIDMGRFDLIGLEGRVSRYEADTFLPRHRLSRRVLLEVATAPDPPPRPKPVKMKVNRMLQPVPKQEGRTVVVVNNPRAPLGPVPVRPPPGPELSAQPTPGPVPQVLPASLMVSASPAGPPLIPASRPPGPVLLPPLQPNSGSLPQVLPSPLGVLSGTSRPPTPTLSLKPTPPAPVRLSPAPPPGSSSLLKPLTVPPGYTFPPAAATTTSTTTATATTTAVPAPTPAPQRLILSPDMQARLPSGEVVSIGQLASLAQRPVANAGGSKPLTFQIQGNKLTLTGAQVRQLAVGQPRPLQMPPTMVNNTGVVKIVVRQAPRDGLTPVPPLAPAPRPPSSGLPAVLNPRPTLTPGRLPTPTLGTARAPMPTPTLVRPLLKLVHSPSPEVSASAPGAAPLTISSPLHVPSSLPGPASSPMPIPNSSPLASPVSSTVSVPLSSSLPISVPTTLPAPASAPLTIPISAPLTVSASGPALLTSVTPPLAPVVPAAPGPPSLAPSGASPSASALTLGLATAPSLSSSQTPGHPLLLAPTSSHVPGLNSTVAPACSPVLVPASALASPFPSAPNPAPAQASLLAPASSASQALATPLAPMAAPQTAILAPSPAPPLAPLPVLAPSPGAAPVLASSQTPVPVMAPSSTPGTSLASASPVPAPTPVLAPSSTQTMLPAPVPSPLPSPASTQTLALAPALAPTLGGSSPSQTLSLGTGNPQGPFPTQTLSLTPASSLVPTPAQTLSLAPGPPLGPTQTLSLAPAPPLAPASPVGPAPAHTLTLAPASSSASLLAPASVQTLTLSPAPVPTLGPAAAQTLALAPASTQSPASQASSLVVSASGAAPLPVTMVSRLPVSKDEPDTLTLRSGPPSPPSTATSFGGPRPRRQPPPPPRSPFYLDSLEEKRKRQRSERLERIFQLSEAHGALAPVYGTEVLDFCTLPQPVASPIGPRSPGPSHPTFWTYTEAAHRAVLFPQQRLDQLSEIIERFIFVMPPVEAPPPSLHACHPPPWLAPRQAAFQEQLASELWPRARPLHRIVCNMRTQFPDLRLIQYDCGKLQTLAVLLRQLKAEGHRVLIFTQMTRMLDVLEQFLTYHGHLYLRLDGSTRVEQRQALMERFNADKRIFCFILSTRSGGVGVNLTGADTVVFYDSDWNPTMDAQAQDRCHRIGQTRDVHIYRLISERTVEENILKKANQKRMLGDMAIEGGNFTTAYFKQQTIRELFDMPLEEPSSSSVPSAPEEEEETVASKQTHILEQALCRAEDEEDIRAATQAKAEQVAELAEFNENDGFPAGEGEEAGRPGAEDEEMSRAEQEIAALVEQLTPIERYAMKFLEASLEEVSREELKQAEEQVEAARKDLDQAKEEVFRLPQEEEEGPGAGDESSCGTGGGTHRRSKKAKAPERPGTRVSERLRGARAETQGANHTPVISAHQTRSTTTPPRCSPARERVPRPAPRPRPTPASAPAAIPALVPVPVSAPVPISAPNPITILPVHILPSPPPPSQIPPCSSPACTPPPACTPPPAHTPPPAQTCLVTPSSPLLLGPPSVPISASVTNLPLGLRPEAELCAQALASPESLELASVASSETSSLSLVPPKDLLPVAVEILPVSEKNLSLTPSAPSLTLEAGSIPNGQEQEAPDSAEGTTLTVLPEGEELPLCVSESNGLELPPSAASDEPLQEPLEADRTSEELTEAKTPTSSPEKPQELVTAEVAAPSTSSSATSSPEGPSPARPPRRRTSADVEIRGQGTGRPGQPPGPKVLRKLPGRLVTVVEEKELVRRRRQQRGAASTLVPGVSETSASPGSPSVRSMSGPESSPPIGGPCEAAPSSSLPTPPQQPFIARRHIELGVTGGGSPENGDGALLAITPPAVKRRRGRPPKKNRSPADAGRGVDEAPSSTLKGKTNGADPVPGPETLIVADPVLEPQLIPGPQPLGPQPVHRPNPLLSPVEKRRRGRPPKARDLPIPGTISSAGDGNSESRTQPPPHPSPLTPLPPLLVCPTATVANTVTTVTISTSPPKRKRGRPPKNPPSPRPSQLPVLDRDSTSVLESCGLGRRRQPQGQGESEGSSSDEDGSRPLTRLARLRLEAEGMRGRKSGGSMVVAVIQDDLDLADSGPGGLELTPPVVSLTPKLRSTRLRPGSLVPPLETEKLPRKRAGAPVGGSPGLAKRGRLQPPSPLGPEGSVEESEAEASGEEEEGDGTPRRRPGPRRLVGTTNQGDQRILRSSAPPSLAGPAVSHRGRKAKT

SEQ ID NO: 803681 - protein, 3347 aa, Homo sapiens; identical to SEQ ID NO: 803680

SEQ ID NO: 803682 - protein, 3347 aa, Homo sapiens; identical to SEQ ID NO: 803680

SEQ ID NO: 803683 - protein, 3347 aa, Homo sapiens; identical to SEQ ID NO: 803680

SEQ ID NO: 803684 - protein, 3347 aa, Homo sapiens; identical to SEQ ID NO: 803680

SEQ ID NO: 803685 - protein, 3310 aa, Homo sapiens
AAETAAAILVRPRERQRRFAGSSVCPFSHPPSASVCCAKRQWRQGGGSSRSLQGSLKAAKAVAKRGPSPLLGGRGGGAHAPEDAGVIPFSTAAPWKCRLSQGVWSQLTQVLQRLVDLSGGWDALVGPGPWKAGPGGLVAQNEASSQHALQPDASPSASSTGDNNPVILQASKGEPGSGTMQSSPSPAHPQLPVLQTQMVSDGMTGSNPVSPASSSSPASSGAGGISPQHIAQDSSLDGPPGPPDGATVPLEGFSLSQAADLANKGPKWEKSHAEIAEQAKHEAEIETRIAELRKEGFWSLKRLPKVPEPPRPKGHWDYLCEEMQWLSADFAQERRWKRGVARKVVRMVIRHHEEQRQKEERARREEQAKLRRIASTMAKDVRQFWSNVEKVVQFKQQSRLEEKRKKALDLHLDFIVGQTEKYSDLLSQSLNQPLTSSKAGSSPCLGSSSAASSPPPPASRLDDEDGDFQPQEDEEEDDEETIEVEEQQEGNDAEAQRREIELLRREGELPLEELLRSLPPQLLEGPSSPSQTPSSHDSDTRDGPEEGAEEEPPQVLEIKPPPSAVTQRNKQPWHPDEDDEEFTANEEEAEDEEDTIAAEEQLEGEVDHAMELSELAREGELSMEELLQQYAGAYAPGSGSSEDEDEDEVDANSSDCEPEGPVEAEEPPQEDSSSQSDSVEDRSEDEEDEHSEEEETSGSSASEESESEESEDAQSQSQADEEEEDDDFGVEYLLARDEEQSEADAGSGPPTPGPTTLGPKKEITDIAAAAESLQPKGYTLATTQVKTPIPLLLRGQLREYQHIGLDWLVTMYEKKLNGILADEMGLGKTIQTISLLAHLACEKGNWGPHLIIVPTSVMLNWEMELKRWCPSFKILTYYGAQKERKLKRQGWTKPNAFHVCITSYKLVLQDHQAFRRKNWRYLILDEAQNIKNFKSQRWQSLLNFNSQRRLLLTGTPLQNSLMELWSLMHFLMPHVFQSHREFKEWFSNPLTGMIEGSQEYNEGLVKRLHKVLRPFLLRRVKVDVEKQMPKKYEHVIRCRLSKRQRCLYDDFMAQTTTKETLATGHFMSVINILMQLRKVCNHPNLFDPRPVTSPFITPGICFSTASLVLRATDVHPLQRIDMGRFDLIGLEGRVSRYEADTFLPRHRLSRRVLLEVATAPDPPPRPKPVKMKVNRMLQPVPKQEGRTVVVVNNPRAPLGPVPVRPPPGPELSAQPTPGPVPQVLPASLMVSASPAGPPLIPASRPPGPVLLPPLQPNSGSLPQVLPSPLGVLSGTSRPPTPTLSLKPTPPAPVRLSPAPPPGSSSLLKPLTVPPGYTFPPAAATTTSTTTATATTTAVPAPTPAPQRLILSPDMQARLPSGEVVSIGQLASLAQRPVANAGGSKPLTFQIQGNKLTLTGAQVRQLAVGQPRPLQMPPTMVNNTGVVKIVVRQAPRDGLTPVPPLAPAPRPPSSGLPAVLNPRPTLTPGRLPTPTLGTARAPMPTPTLVRPLLKLVHSPSPEVSASAPGAAPLTISSPLHVPSSLPGPASSPMPIPNSSPLASPVSSTVSVPLSSSLPISVPTTLPAPASAPLTIPISAPLTVSASGPALFDQCDSTIGTCCPSGSWTSLLGTIWCFPVSISLDSRFGHSSIPVFISDTWSPSVVGSHLFTCSRVELNRGPSMLTCPGASFGSGQSFSVSTKSTPPLAPLPVLAPSPGAAPVLASSQTPVPVMAPSSTPGTSLASASPVPAPTPVLAPSSTQTMLPAPVPSPLPSPASTQTLALAPALAPTLGGSSPSQTLSLGTGNPQGPFPTQTLSLTPASSLVPTPAQTLSLAPGPPLGPTQTLSLAPAPPLAPASPVGPAPAHTLTLAPASSSASLLAPASVQTLTLSPAPVPTLGPAAAQTLALAPASTQSPASQASSLVVSASGAAPLPVTMVSRLPVSKDEPDTLTLRSGPPSPPSTATSFGGPRPRRQPPPPPRSPFYLDSLEEKRKRQRSERLERIFQLSEAHGALAPVYGTEVLDFCTLPQPVASPIGPRSPGPSHPTFWTYTEAAHRAVLFPQQRLDQLSEIIERFIFVMPPVEAPPPSLHACHPPPWLAPRQAAFQEQLASELWPRARPLHRIVCNMRTQFPDLRLIQYDCGKLQTLAVLLRQLKAEGHRVLIFTQMTRMLDVLEQFLTYHGHLYLRLDGSTRVEQRQALMERFNADKRIFCFILSTRSGGVGVNLTGADTVVFYDSDWNPTMDAQAQDRCHRIGQTRDVHIYRLISERTVEENILKKANQKRMLGDMAIEGGNFTTAYFKQQTIRELFDMPLEEPSSSSVPSAPEEEEETVASKQTHILEQALCRAEDEEDIRAATQAKAEQVAELAEFNENDGFPAGEGEEAGRPGAEDEEMSRAEQEIAALVEQLTPIERYAMKFLEASLEEVSREELKQAEEQVEAARKDLDQAKEEVFRLPQEEEEGPGAGDESSCGTGGGTHRRSKKAKAPERPGTRVSERLRGARAETQGANHTPVISAHQTRSTTTPPRCSPARERVPRPAPRPRPTPASAPAAIPALVPVPVSAPVPISAPNPITILPVHILPSPPPPSQIPPCSSPACTPPPACTPPPAHTPPPAQTCLVTPSSPLLLGPPSVPISASVTNLPLGLRPEAELCAQALASPESLELASVASSETSSLSLVPPKDLLPVAVEILPVSEKNLSLTPSAPSLTLEAGSIPNGQEQEAPDSAEGTTLTVLPEGEELPLCVSESNGLELPPSAASDEPLQEPLEADRTSEELTEAKTPTSSPEKPQELVTAEVAAPSTSSSATSSPEGPSPARPPRRRTSADVEIRGQGTGRPGQPPGPKVLRKLPGRLVTVVEEKELVRRRRQQRGAASTLVPGVSETSASPGSPSVRSMSGPESSPPIGGPCEAAPSSSLPTPPQQPFIARRHIELGVTGGGSPENGDGALLAITPPAVKRRRGRPPKKNRSPADAGRGVDEAPSSTLKGKTNGADPVPGPETLIVADPVLEPQLIPGPQPLGPQPVHRPNPLLSPVEKRRRGRPPKARDLPIPGTISSAGDGNSESRTQPPPHPSPLTPLPPLLVCPTATVANTVTTVTISTSPPKRKRGRPPKNPPSPRPSQLPVLDRDSTSVLESCGLGRRRQPQGQGESEGSSSDEDGSRPLTRLARLRLEAEGMRGRKSGGSMVVAVIQDDLDLADSGPGGLELTPPVVSLTPKLRSTRLRPGSLVPPLETEKLPRKRAGAPVGGSPGLAKRGRLQPPSPLGPEGSVEESEAEASGEEEEGDGTPRRRPGPRRLVGTTNQGDQRILRSSAPPSLAGPAVSHRGRKAKT

SEQ ID NO: 803686 - protein, 2798 aa, Homo sapiens
MPRLSRGSRLTLLNPSPSQTPSSHDSDTRDGPEEGAEEEPPQVLEIKPPPSAVTQRNKQPWHPDEDDEEFTANEEEAEDEEDTIAAEEQLEGEVDHAMELSELAREGELSMEELLQQYAGAYAPGSGSSEDEDEDEVDANSSDCEPEGPVEAEEPPQEDSSSQSDSVEDRSEDEEDEHSEEEETSGSSASEESESEESEDAQSQSQADEEEEDDDFGVEYLLARDEEQSEADAGSGPPTPGPTTLGPKKEITDIAAAAESLQPKGYTLATTQVKTPIPLLLRGQLREYQHIGLDWLVTMYEKKLNGILADEMGLGKTIQTISLLAHLACEKGNWGPHLIIVPTSVMLNWEMELKRWCPSFKILTYYGAQKERKLKRQGWTKPNAFHVCITSYKLVLQDHQAFRRKNWRYLILDEAQNIKNFKSQRWQSLLNFNSQRRLLLTGTPLQNSLMELWSLMHFLMPHVFQSHREFKEWFSNPLTGMIEGSQEYNEGLVKRLHKVLRPFLLRRVKVDVEKQMPKKYEHVIRCRLSKRQRCLYDDFMAQTTTKETLATGHFMSVINILMQLRKVCNHPNLFDPRPVTSPFITPGICFSTASLVLRATDVHPLQRIDMGRFDLIGLEGRVSRYEADTFLPRHRLSRRVLLEVATAPDPPPRPKPVKMKVNRMLQPVPKQEGRTVVVVNNPRAPLGPVPVRPPPGPELSAQPTPGPVPQVLPASLMVSASPAGPPLIPASRPPGPVLLPPLQPNSGSLPQVLPSPLGVLSGTSRPPTPTLSLKPTPPAPVRLSPAPPPGSSSLLKPLTVPPGYTFPPAAATTTSTTTATATTTAVPAPTPAPQRLILSPDMQARLPSGEVVSIGQLASLAQRPVANAGGSKPLTFQIQGNKLTLTGAQVRQLAVGQPRPLQMPPTMVNNTGVVKIVVRQAPRDGLTPVPPLAPAPRPPSSGLPAVLNPRPTLTPGRLPTPTLGTARAPMPTPTLVRPLLKLVHSPSPEVSASAPGAAPLTISSPLHVPSSLPGPASSPMPIPNSSPLASPVSSTVSVPLSSSLPISVPTTLPAPASAPLTIPISAPLTVSASGPALLTSDDSTIGTCCPSGSWTSLLGTIWCFPVSISLDSRFGHSSIPVFISDTWSPSVVGSHLFTCSRVELNRGPSMLTCPGASFGSGQSFSVSTKSTPPLAPLPVLAPSPGAAPVLASSQTPVPVMAPSSTPGTSLASASPVPAPTPVLAPSSTQTMLPAPVPSPLPSPASTQTLALAPALAPTLGGSSPSQTLSLGTGNPQGPFPTQTLSLTPASSLVPTPAQTLSLAPGPPLGPTQTLSLAPAPPLAPASPVGPAPAHTLTLAPASSSASLLAPASVQTLTLSPAPVPTLGPAAAQTLALAPASTQSPASQASSLVVSASGAAPLPVTMVSRLPVSKDEPDTLTLRSGPPSPPSTATSFGGPRPRRQPPPPPRSPFYLDSLEEKRKRQRSERLERIFQLSEAHGALAPVYGTEVLDFCTLPQPVASPIGPRSPGPSHPTFWTYTEAAHRAVLFPQQRLDQLSEIIERFIFVMPPVEAPPPSLHACHPPPWLAPRQAAFQEQLASELWPRARPLHRIVCNMRTQFPDLRLIQYDCGKLQTLAVLLRQLKAEGHRVLIFTQMTRMLDVLEQFLTYHGHLYLRLDGSTRVEQRQALMERFNADKRIFCFILSTRSGGVGVNLTGADTVVFYDSDWNPTMDAQAQDRCHRIGQTRDVHIYRLISERTVEENILKKANQKRMLGDMAIEGGNFTTAYFKQQTIRELFDMPLEEPSSSSVPSAPEEEEETVASKQTHILEQALCRAEDEEDIRAATQAKAEQVAELAEFNENDGFPAGEGEEAGRPGAEDEEMSRAEQEIAALVEQLTPIERYAMKFLEASLEEVSREELKQAEEQVEAARKDLDQAKEEVFRLPQEEEEGPGAGDESSCGTGGGTHRRSKKAKAPERPGTRVSERLRGARAETQGANHTPVISAHQTRSTTTPPRCSPARERVPRPAPRPRPTPASAPAAIPALVPVPVSAPVPISAPNPITILPVHILPSPPPPSQIPPCSSPACTPPPACTPPPAHTPPPAQTCLVTPSSPLLLGPPSVPISASVTNLPLGLRPEAELCAQALASPESLELASVASSETSSLSLVPPKDLLPVAVEILPVSEKNLSLTPSAPSLTLEAGSIPNGQEQEAPDSAEGTTLTVLPEGEELPLCVSESNGLELPPSAASDEPLQEPLEADRTSEELTEAKTPTSSPEKPQELVTAEVAAPSTSSSATSSPEGPSPARPPRRRTSADVEIRGQGTGRPGQPPGPKVLRKLPGRLVTVVEEKELVRRRRQQRGAASTLVPGVSETSASPGSPSVRSMSGPESSPPIGGPCEAAPSSSLPTPPQQPFIARRHIELGVTGGGSPENGDGALLAITPPAVKRRRGRPPKKNRSPADAGRGVDEAPSSTLKGKTNGADPVPGPETLIVADPVLEPQLIPGPQPLGPQPVHRPNPLLSPVEKRRRGRPPKARDLPIPGTISSAGDGNSESRTQPPPHPSPLTPLPPLLVCPTATVANTVTTVTISTSPPKRKRGRPPKNPPSPRPSQLPVLDRDSTSVLESCGLGRRRQPQGQGESEGSSSDEDGSRPLTRLARLRLEAEGMRGRKSGGSMVVAVIQDDLDLADSGPGGLELTPPVVSLTPKLRSTRLRPGSLVPPLETEKLPRKRAGAPVGGSPGLAKRGRLQPPSPLGPEGSVEESEAEASGEEEEGDGTPRRRPGPRRLVGTTNQGDQRILRSSAPPSLAGPAVSHRGRKAKT

SEQ ID NO: 803687 - protein, 1649 aa, Homo sapiens
MLTCPGASFGSGQSFSVSTKSTPPLAPLPVLAPSPGAAPVLASSQTPVPVMAPSSTPGTSLASASPVPAPTPVLAPSSTQTMLPAPVPSPLPSPASTQTLALAPALAPTLGGSSPSQTLSLGTGNPQGPFPTQTLSLTPASSLVPTPAQTLSLAPGPPLGPTQTLSLAPAPPLAPASPVGPAPAHTLTLAPASSSASLLAPASVQTLTLSPAPVPTLGPAAAQTLALAPASTQSPASQASSLVVSASGAAPLPVTMVSRLPVSKDEPDTLTLRSGPPSPPSTATSFGGPRPRRQPPPPPRSPFYLDSLEEKRKRQRSERLERIFQLSEAHGALAPVYGTEVLDFCTLPQPVASPIGPRSPGPSHPTFWTYTEAAHRAVLFPQQRLDQLSEIIERFIFVMPPVEAPPPSLHACHPPPWLAPRQAAFQEQLASELWPRARPLHRIVCNMRTQFPDLRLIQYDCGKLQTLAVLLRQLKAEGHRVLIFTQMTRMLDVLEQFLTYHGHLYLRLDGSTRVEQRQALMERFNADKRIFCFILSTRSGGVGVNLTGADTVVFYDSDWNPTMDAQAQDRCHRIGQTRDVHIYRLISERTVEENILKKANQKRMLGDMAIEGGNFTTAYFKQQTIRELFDMPLEEPSSSSVPSAPEEEEETVASKQTHILEQALCRAEDEEDIRAATQAKAEQVAELAEFNENDGFPAGEGEEAGRPGAEDEEMSRAEQEIAALVEQLTPIERYAMKFLEASLEEVSREELKQAEEQVEAARKDLDQAKEEVFRLPQEEEEGPGAGDESSCGTGGGTHRRSKKAKAPERPGTRVSERLRGARAETQGANHTPVISAHQTRSTTTPPRCSPARERVPRPAPRPRPTPASAPAAIPALVPVPVSAPVPISAPNPITILPVHILPSPPPPSQIPPCSSPACTPPPACTPPPAHTPPPAQTCLVTPSSPLLLGPPSVPISASVTNLPLGLRPEAELCAQALASPESLELASVASSETSSLSLVPPKDLLPVAVEILPVSEKNLSLTPSAPSLTLEAGSIPNGQEQEAPDSAEGTTLTVLPEGEELPLCVSESNGLELPPSAASDEPLQEPLEADRTSEELTEAKTPTSSPEKPQELVTAEVAAPSTSSSATSSPEGPSPARPPRRRTSADVEIRGQGTGRPGQPPGPKVLRKLPGRLVTVVEEKELVRRRRQQRGAASTLVPGVSETSASPGSPSVRSMSGPESSPPIGGPCEAAPSSSLPTPPQQPFIARRHIELGVTGGGSPENGDGALLAITPPAVKRRRGRPPKKNRSPADAGRGVDEAPSSTLKGKTNGADPVPGPETLIVADPVLEPQLIPGPQPLGPQPVHRPNPLLSPVEKRRRGRPPKARDLPIPGTISSAGDGNSESRTQPPPHPSPLTPLPPLLVCPTATVANTVTTVTISTSPPKRKRGRPPKNPPSPRPSQLPVLDRDSTSVLESCGLGRRRQPQGQGESEGSSSDEDGSRPLTRLARLRLEAEGMRGRKSGGSMVVAVIQDDLDLADSGPGGLELTPPVVSLTPKLRSTRLRPGSLVPPLETEKLPRKRAGAPVGGSPGLAKRGRLQPPSPLGPEGSVEESEAEASGEEEEGDGTPRRRPGPRRLVGTTNQGDQRILRSSAPPSLAGPAVSHRGRKAKT

SEQ ID NO: 803688 - protein, 1762 aa, Homo sapiens
RNQINNNLFFCSPTFFSGPSLGSTHHPHLSPLDCFCFGPSSVDQCDSTIGTCCPSGSWTSLLGTIWCFPVSISLDSRFGHSSIPVFISDTWSPSVVGSHLFTCSRVELNRGPSMLTCPGASFGSGQSFSVSTKSTPPLAPLPVLAPSPGAAPVLASSQTPVPVMAPSSTPGTSLASASPVPAPTPVLAPSSTQTMLPAPVPSPLPSPASTQTLALAPALAPTLGGSSPSQTLSLGTGNPQGPFPTQTLSLTPASSLVPTPAQTLSLAPGPPLGPTQTLSLAPAPPLAPASPVGPAPAHTLTLAPASSSASLLAPASVQTLTLSPAPVPTLGPAAAQTLALAPASTQSPASQASSLVVSASGAAPLPVTMVSRLPVSKDEPDTLTLRSGPPSPPSTATSFGGPRPRRQPPPPPRSPFYLDSLEEKRKRQRSERLERIFQLSEAHGALAPVYGTEVLDFCTLPQPVASPIGPRSPGPSHPTFWTYTEAAHRAVLFPQQRLDQLSEIIERFIFVMPPVEAPPPSLHACHPPPWLAPRQAAFQEQLASELWPRARPLHRIVCNMRTQFPDLRLIQYDCGKLQTLAVLLRQLKAEGHRVLIFTQMTRMLDVLEQFLTYHGHLYLRLDGSTRVEQRQALMERFNADKRIFCFILSTRSGGVGVNLTGADTVVFYDSDWNPTMDAQAQDRCHRIGQTRDVHIYRLISERTVEENILKKANQKRMLGDMAIEGGNFTTAYFKQQTIRELFDMPLEEPSSSSVPSAPEEEEETVASKQTHILEQALCRAEDEEDIRAATQAKAEQVAELAEFNENDGFPAGEGEEAGRPGAEDEEMSRAEQEIAALVEQLTPIERYAMKFLEASLEEVSREELKQAEEQVEAARKDLDQAKEEVFRLPQEEEEGPGAGDESSCGTGGGTHRRSKKAKAPERPGTRVSERLRGARAETQGANHTPVISAHQTRSTTTPPRCSPARERVPRPAPRPRPTPASAPAAIPALVPVPVSAPVPISAPNPITILPVHILPSPPPPSQIPPCSSPACTPPPACTPPPAHTPPPAQTCLVTPSSPLLLGPPSVPISASVTNLPLGLRPEAELCAQALASPESLELASVASSETSSLSLVPPKDLLPVAVEILPVSEKNLSLTPSAPSLTLEAGSIPNGQEQEAPDSAEGTTLTVLPEGEELPLCVSESNGLELPPSAASDEPLQEPLEADRTSEELTEAKTPTSSPEKPQELVTAEVAAPSTSSSATSSPEGPSPARPPRRRTSADVEIRGQGTGRPGQPPGPKVLRKLPGRLVTVVEEKELVRRRRQQRGAASTLVPGVSETSASPGSPSVRSMSGPESSPPIGGPCEAAPSSSLPTPPQQPFIARRHIELGVTGGGSPENGDGALLAITPPAVKRRRGRPPKKNRSPADAGRGVDEAPSSTLKGKTNGADPVPGPETLIVADPVLEPQLIPGPQPLGPQPVHRPNPLLSPVEKRRRGRPPKARDLPIPGTISSAGDGNSESRTQPPPHPSPLTPLPPLLVCPTATVANTVTTVTISTSPPKRKRGRPPKNPPSPRPSQLPVLDRDSTSVLESCGLGRRRQPQGQGESEGSSSDEDGSRPLTRLARLRLEAEGMRGRKSGGSMVVAVIQDDLDLADSGPGGLELTPPVVSLTPKLRSTRLRPGSLVPPLETEKLPRKRAGAPVGGSPGLAKRGRLQPPSPLGPEGSVEESEAEASGEEEEGDGTPRRRPGPRRLVGTTNQGDQRILRSSAPPSLAGPAVSHRGRKAKT

SEQ ID NO: 803689 - protein, 1548 aa, Homo sapiens
MMLELMTMSELERVPGGSPFPKRVSEMEMSLQEWVLKLGLGPVSAWKPGSGEVTEPGLVAEFELMMEPTPPLAPASPVGPAPAHTLTLAPASSSASLLAPASVQTLTLSPAPVPTLGPAAAQTLALAPASTQSPASQASSLVVSASGAAPLPVTMVSRLPVSKDEPDTLTLRSGPPSPPSTATSFGGPRPRRQPPPPPRSPFYLDSLEEKRKRQRSERLERIFQLSEAHGALAPVYGTEVLDFCTLPQPVASPIGPRSPGPSHPTFWTYTEAAHRAVLFPQQRLDQLSEIIERFIFVMPPVEAPPPSLHACHPPPWLAPRQAAFQEQLASELWPRARPLHRIVCNMRTQFPDLRLIQYDCGKLQTLAVLLRQLKAEGHRVLIFTQMTRMLDVLEQFLTYHGHLYLRLDGSTRVEQRQALMERFNADKRIFCFILSTRSGGVGVNLTGADTVVFYDSDWNPTMDAQAQDRCHRIGQTRDVHIYRLISERTVEENILKKANQKRMLGDMAIEGGNFTTAYFKQQTIRELFDMPLEEPSSSSVPSAPEEEEETVASKQTHILEQALCRAEDEEDIRAATQAKAEQVAELAEFNENDGFPAGEGEEAGRPGAEDEEMSRAEQEIAALVEQLTPIERYAMKFLEASLEEVSREELKQAEEQVEAARKDLDQAKEEVFRLPQEEEEGPGAGDESSCGTGGGTHRRSKKAKAPERPGTRVSERLRGARAETQGANHTPVISAHQTRSTTTPPRCSPARERVPRPAPRPRPTPASAPAAIPALVPVPVSAPVPISAPNPITILPVHILPSPPPPSQIPPCSSPACTPPPACTPPPAHTPPPAQTCLVTPSSPLLLGPPSVPISASVTNLPLGLRPEAELCAQALASPESLELASVASSETSSLSLVPPKDLLPVAVEILPVSEKNLSLTPSAPSLTLEAGSIPNGQEQEAPDSAEGTTLTVLPEGEELPLCVSESNGLELPPSAASDEPLQEPLEADRTSEELTEAKTPTSSPEKPQELVTAEVAAPSTSSSATSSPEGPSPARPPRRRTSADVEIRGQGTGRPGQPPGPKVLRKLPGRLVTVVEEKELVRRRRQQRGAASTLVPGVSETSASPGSPSVRSMSGPESSPPIGGPCEAAPSSSLPTPPQQPFIARRHIELGVTGGGSPENGDGALLAITPPAVKRRRGRPPKKNRSPADAGRGVDEAPSSTLKGKTNGADPVPGPETLIVADPVLEPQLIPGPQPLGPQPVHRPNPLLSPVEKRRRGRPPKARDLPIPGTISSAGDGNSESRTQPPPHPSPLTPLPPLLVCPTATVANTVTTVTISTSPPKRKRGRPPKNPPSPRPSQLPVLDRDSTSVLESCGLGRRRQPQGQGESEGSSSDEDGSRPLTRLARLRLEAEGMRGRKSGGSMVVAVIQDDLDLADSGPGGLELTPPVVSLTPKLRSTRLRPGSLVPPLETEKLPRKRAGAPVGGSPGLAKRGRLQPPSPLGPEGSVEESEAEASGEEEEGDGTPRRRPGPRRLVGTTNQGDQRILRSSAPPSLAGPAVSHRGRKAKT

SEQ ID NO: 803690 - protein, 1347 aa, Homo sapiens
MIPDSLEEKRKRQRSERLERIFQLSEAHGALAPVYGTEVLDFCTLPQPVASPIGPRSPGPSHPTFWTYTEAAHRAVLFPQQRLDQLSEIIERFIFVMPPVEAPPPSLHACHPPPWLAPRQAAFQEQLASELWPRARPLHRIVCNMRTQFPDLRLIQYDCGKLQTLAVLLRQLKAEGHRVLIFTQMTRMLDVLEQFLTYHGHLYLRLDGSTRVEQRQALMERFNADKRIFCFILSTRSGGVGVNLTGADTVVFYDSDWNPTMDAQAQDRCHRIGQTRDVHIYRLISERTVEENILKKANQKRMLGDMAIEGGNFTTAYFKQQTIRELFDMPLEEPSSSSVPSAPEEEEETVASKQTHILEQALCRAEDEEDIRAATQAKAEQVAELAEFNENDGFPAGEGEEAGRPGAEDEEMSRAEQEIAALVEQLTPIERYAMKFLEASLEEVSREELKQAEEQVEAARKDLDQAKEEVFRLPQEEEEGPGAGDESSCGTGGGTHRRSKKAKAPERPGTRVSERLRGARAETQGANHTPVISAHQTRSTTTPPRCSPARERVPRPAPRPRPTPASAPAAIPALVPVPVSAPVPISAPNPITILPVHILPSPPPPSQIPPCSSPACTPPPACTPPPAHTPPPAQTCLVTPSSPLLLGPPSVPISASVTNLPLGLRPEAELCAQALASPESLELASVASSETSSLSLVPPKDLLPVAVEILPVSEKNLSLTPSAPSLTLEAGSIPNGQEQEAPDSAEGTTLTVLPEGEELPLCVSESNGLELPPSAASDEPLQEPLEADRTSEELTEAKTPTSSPEKPQELVTAEVAAPSTSSSATSSPEGPSPARPPRRRTSADVEIRGQGTGRPGQPPGPKVLRKLPGRLVTVVEEKELVRRRRQQRGAASTLVPGVSETSASPGSPSVRSMSGPESSPPIGGPCEAAPSSSLPTPPQQPFIARRHIELGVTGGGSPENGDGALLAITPPAVKRRRGRPPKKNRSPADAGRGVDEAPSSTLKGKTNGADPVPGPETLIVADPVLEPQLIPGPQPLGPQPVHRPNPLLSPVEKRRRGRPPKARDLPIPGTISSAGDGNSESRTQPPPHPSPLTPLPPLLVCPTATVANTVTTVTISTSPPKRKRGRPPKNPPSPRPSQLPVLDRDSTSVLESCGLGRRRQPQGQGESEGSSSDEDGSRPLTRLARLRLEAEGMRGRKSGGSMVVAVIQDDLDLADSGPGGLELTPPVVSLTPKLRSTRLRPGSLVPPLETEKLPRKRAGAPVGGSPGLAKRGRLQPPSPLGPEGSVEESEAEASGEEEEGDGTPRRRPGPRRLVGTTNQGDQRILRSSAPPSLAGPAVSHRGRKAKT

SEQ ID NO: 803691 - protein, 1365 aa, Homo sapiens
MSGFDVDSEGADYFLFFSHPQDSLEEKRKRQRSERLERIFQLSEAHGALAPVYGTEVLDFCTLPQPVASPIGPRSPGPSHPTFWTYTEAAHRAVLFPQQRLDQLSEIIERFIFVMPPVEAPPPSLHACHPPPWLAPRQAAFQEQLASELWPRARPLHRIVCNMRTQFPDLRLIQYDCGKLQTLAVLLRQLKAEGHRVLIFTQMTRMLDVLEQFLTYHGHLYLRLDGSTRVEQRQALMERFNADKRIFCFILSTRSGGVGVNLTGADTVVFYDSDWNPTMDAQAQDRCHRIGQTRDVHIYRLISERTVEENILKKANQKRMLGDMAIEGGNFTTAYFKQQTIRELFDMPLEEPSSSSVPSAPEEEEETVASKQTHILEQALCRAEDEEDIRAATQAKAEQVAELAEFNENDGFPAGEGEEAGRPGAEDEEMSRAEQEIAALVEQLTPIERYAMKFLEASLEEVSREELKQAEEQVEAARKDLDQAKEEVFRLPQEEEEGPGAGDESSCGTGGGTHRRSKKAKAPERPGTRVSERLRGARAETQGANHTPVISAHQTRSTTTPPRCSPARERVPRPAPRPRPTPASAPAAIPALVPVPVSAPVPISAPNPITILPVHILPSPPPPSQIPPCSSPACTPPPACTPPPAHTPPPAQTCLVTPSSPLLLGPPSVPISASVTNLPLGLRPEAELCAQALASPESLELASVASSETSSLSLVPPKDLLPVAVEILPVSEKNLSLTPSAPSLTLEAGSIPNGQEQEAPDSAEGTTLTVLPEGEELPLCVSESNGLELPPSAASDEPLQEPLEADRTSEELTEAKTPTSSPEKPQELVTAEVAAPSTSSSATSSPEGPSPARPPRRRTSADVEIRGQGTGRPGQPPGPKVLRKLPGRLVTVVEEKELVRRRRQQRGAASTLVPGVSETSASPGSPSVRSMSGPESSPPIGGPCEAAPSSSLPTPPQQPFIARRHIELGVTGGGSPENGDGALLAITPPAVKRRRGRPPKKNRSPADAGRGVDEAPSSTLKGKTNGADPVPGPETLIVADPVLEPQLIPGPQPLGPQPVHRPNPLLSPVEKRRRGRPPKARDLPIPGTISSAGDGNSESRTQPPPHPSPLTPLPPLLVCPTATVANTVTTVTISTSPPKRKRGRPPKNPPSPRPSQLPVLDRDSTSVLESCGLGRRRQPQGQGESEGSSSDEDGSRPLTRLARLRLEAEGMRGRKSGGSMVVAVIQDDLDLADSGPGGLELTPPVVSLTPKLRSTRLRPGSLVPPLETEKLPRKRAGAPVGGSPGLAKRGRLQPPSPLGPEGSVEESEAEASGEEEEGDGTPRRRPGPRRLVGTTNQGDQRILRSSAPPSLAGPAVSHRGRKAKT

SEQ ID NO: 803692 - protein, 1106 aa, Homo sapiens
HIKPEDFLFAYTILRSVPNKLGGVLALLLSILILAKNLHNRLISERTVEENILKKANQKRMLGDMAIEGGNFTTAYFKQQTIRELFDMPLEEPSSSSVPSAPEEEEETVASKQTHILEQALCRAEDEEDIRAATQAKAEQVAELAEFNENDGFPAGEGEEAGRPGAEDEEMSRAEQEIAALVEQLTPIERYAMKFLEASLEEVSREELKQAEEQVEAARKDLDQAKEEVFRLPQEEEEGPGAGDESSCGTGGGTHRRSKKAKAPERPGTRVSERLRGARAETQGANHTPVISAHQTRSTTTPPRCSPARERVPRPAPRPRPTPASAPAAIPALVPVPVSAPVPISAPNPITILPVHILPSPPPPSQIPPCSSPACTPPPACTPPPAHTPPPAQTCLVTPSSPLLLGPPSVPISASVTNLPLGLRPEAELCAQALASPESLELASVASSETSSLSLVPPKDLLPVAVEILPVSEKNLSLTPSAPSLTLEAGSIPNGQEQEAPDSAEGTTLTVLPEGEELPLCVSESNGLELPPSAASDEPLQEPLEADRTSEELTEAKTPTSSPEKPQELVTAEVAAPSTSSSATSSPEGPSPARPPRRRTSADVEIRGQGTGRPGQPPGPKVLRKLPGRLVTVVEEKELVRRRRQQRGAASTLVPGVSETSASPGSPSVRSMSGPESSPPIGGPCEAAPSSSLPTPPQQPFIARRHIELGVTGGGSPENGDGALLAITPPAVKRRRGRPPKKNRSPADAGRGVDEAPSSTLKGKTNGADPVPGPETLIVADPVLEPQLIPGPQPLGPQPVHRPNPLLSPVEKRRRGRPPKARDLPIPGTISSAGDGNSESRTQPPPHPSPLTPLPPLLVCPTATVANTVTTVTISTSPPKRKRGRPPKNPPSPRPSQLPVLDRDSTSVLESCGLGRRRQPQGQGESEGSSSDEDGSRPLTRLARLRLEAEGMRGRKSGGSMVVAVIQDDLDLADSGPGGLELTPPVVSLTPKLRSTRLRPGSLVPPLETEKLPRKRAGAPVGGSPGLAKRGRLQPPSPLGPEGSVEESEAEASGEEEEGDGTPRRRPGPRRLVGTTNQGDQRILRSSAPPSLAGPAVSHRGRKAKT

SEQ ID NO: 803693 - protein, 823 aa, Homo sapiens
GEVTLAGSLRHQTRSTTTPPRCSPARERVPRPAPRPRPTPASAPAAIPALVPVPVSAPVPISAPNPITILPVHILPSPPPPSQIPPCSSPACTPPPACTPPPAHTPPPAQTCLVTPSSPLLLGPPSVPISASVTNLPLGLRPEAELCAQALASPESLELASVASSETSSLSLVPPKDLLPVAVEILPVSEKNLSLTPSAPSLTLEAGSIPNGQEQEAPDSAEGTTLTVLPEGEELPLCVSESNGLELPPSAASDEPLQEPLEADRTSEELTEAKTPTSSPEKPQELVTAEVAAPSTSSSATSSPEGPSPARPPRRRTSADVEIRGQGTGRPGQPPGPKVLRKLPGRLVTVVEEKELVRRRRQQRGAASTLVPGVSETSASPGSPSVRSMSGPESSPPIGGPCEAAPSSSLPTPPQQPFIARRHIELGVTGGGSPENGDGALLAITPPAVKRRRGRPPKKNRSPADAGRGVDEAPSSTLKGKTNGADPVPGPETLIVADPVLEPQLIPGPQPLGPQPVHRPNPLLSPVEKRRRGRPPKARDLPIPGTISSAGDGNSESRTQPPPHPSPLTPLPPLLVCPTATVANTVTTVTISTSPPKRKRGRPPKNPPSPRPSQLPVLDRDSTSVLESCGLGRRRQPQGQGESEGSSSDEDGSRPLTRLARLRLEAEGMRGRKSGGSMVVAVIQDDLDLADSGPGGLELTPPVVSLTPKLRSTRLRPGSLVPPLETEKLPRKRAGAPVGGSPGLAKRGRLQPPSPLGPEGSVEESEAEASGEEEEGDGTPRRRPGPRRLVGTTNQGDQRILRSSAPPSLAGPAVSHRGRKAKT

SEQ ID NO: 803694 - protein, 2590 aa, Homo sapiens
AAETAAAILVRPRERQRRFAGSSVCPFSHPPSASVCCAKRQWRQGGGSSRSLQGSLKAAKAVAKRGPSPLLGGRGGGAHAPEDAGVIPFSTAAPWKCRLSQGVWSQLTQVLQRLVDLSGGWDALVGPGPWKAGPGGLVAQNEASSQHALQPDASPSASSTGDNNPVILQASKGEPGSGTMQSSPSPAHPQLPVLQTQMVSDGMTGSNPVSPASSSSPASSGAGGISPQHIAQDSSLDGPPGPPDGATVPLEGFSLSQAADLANKGPKWEKSHAEIAEQAKHEAEIETRIAELRKEGFWSLKRLPKVPEPPRPKGHWDYLCEEMQWLSADFAQERRWKRGVARKVVRMVIRHHEEQRQKEERARREEQAKLRRIASTMAKDVRQFWSNVEKVVQFKQQSRLEEKRKKALDLHLDFIVGQTEKYSDLLSQSLNQPLTSSKAGSSPCLGSSSAASSPPPPASRLDDEDGDFQPQEDEEEDDEETIEVEEQQEGNDAEAQRREIELLRREGELPLEELLRSLPPQLLEGPSSPSQTPSSHDSDTRDGPEEGAEEEPPQVLEIKPPPSAVTQRNKQPWHPDEDDEEFTANEEEAEDEEDTIAAEEQLEGEVDHAMELSELAREGELSMEELLQQYAGAYAPGSGSSEDEDEDEVDANSSDCEPEGPVEAEEPPQEDSSSQSDSVEDRSEDEEDEHSEEEETSGSSASEESESEESEDAQSQSQADEEEEDDDFGVEYLLARDEEQSEADAGSGPPTPGPTTLGPKKEITDIAAAAESLQPKGYTLATTQVKTPIPLLLRGQLREYQHIGLDWLVTMYEKKLNGILADEMGLGKTIQTISLLAHLACEKGNWGPHLIIVPTSVMLNWEMELKRWCPSFKILTYYGAQKERKLKRQGWTKPNAFHVCITSYKLVLQDHQAFRRKNWRYLILDEAQNIKNFKSQRWQSLLNFNSQRRLLLTGTPLQNSLMELWSLMHFLMPHVFQSHREFKEWFSNPLTGMIEGSQEYNEGLVKRLHKVLRPFLLRRVKVDVEKQMPKKYEHVIRCRLSKRQRCLYDDFMAQTTTKETLATGHFMSVINILMQLRKVCNHPNLFDPRPVTSPFITPGICFSTASLVLRATDVHPLQRIDMGRFDLIGLEGRVSRYEADTFLPRHRLSRRVLLEVATAPDPPPRPKPVKMKVNRMLQPVPKQEGRTVVVVNNPRAPLGPVPVRPPPGPELSAQPTPGPVPQVLPASLMVSASPAGPPLIPASRPPGPVLLPPLQPNSGSLPQVLPSPLGVLSGTSRPPTPTLSLKPTPPAPVRLSPAPPPGSSSLLKPLTVPPGYTFPPAAATTTSTTTATATTTAVPAPTPAPQRLILSPDMQARLPSGEVVSIGQLASLAQRPVANAGGSKPLTFQIQGNKLTLTGAQVRQLAVGQPRPLQMPPTMVNNTGVVKIVVRQAPRDGLTPVPPLAPAPRPPSSGLPAVLNPRPTLTPGRLPTPTLGTARAPMPTPTLVRPLLKLVHSPSPEVSASAPGAAPLTISSPLHVPSSLPGPASSPMPIPNSSPLASPVSSTVSVPLSSSLPISVPTTLPAPASAPLTIPISAPLTVSASGPALLTSVTPPLAPVVPAAPGPPSLAPSGASPSASALTLGLATAPSLSSSQTPGHPLLLAPTSSHVPGLNSTVAPACSPVLVPASALASPFPSAPNPAPAQASLLAPASSASQALATPLAPMAAPQTAILAPSPAPPLAPLPVLAPSPGAAPVLASSQTPVPVMAPSSTPGTSLASASPVPAPTPVLAPSSTQTMLPAPVPSPLPSPASTQTLALAPALAPTLGGSSPSQTLSLGTGNPQGPFPTQTLSLTPASSLVPTPAQTLSLAPGPPLGPTQTLSLAPAPPLAPASPVGPAPAHTLTLAPASSSASLLAPASVQTLTLSPAPVPTLGPAAAQTLALAPASTQSPASQASSLVVSASGAAPLPVTMVSRLPVSKDEPDTLTLRSGPPSPPSTATSFGGPRPRRQPPPPPRSPFYLDSLEEKRKRQRSERLERIFQLSEAHGALAPVYGTEVLDFCTLPQPVASPIGPRSPGPSHPTFWTYTEAAHRAVLFPQQRLDQLSEIIERFIFVMPPVEAPPPSLHACHPPPWLAPRQAAFQEQLASELWPRARPLHRIVCNMRTQFPDLRLIQYDCGKLQTLAVLLRQLKAEGHRVLIFTQMTRMLDVLEQFLTYHGHLYLRLDGSTRVEQRQALMERFNADKRIFCFILSTRSGGVGVNLTGADTVVFYDSDWNPTMDAQAQDRCHRIGQTRDVHIYRLISERTVEENILKKANQKRMLGDMAIEGGNFTTAYFKQQTIRELFDMPLEEPSSSSVPSAPEEEEETVASKQTHILEQALCRAEDEEDIRAATQAKAEQVAELAEFNENDGFPAGEGEEAGRPGAEDEEMSRAEQEIAALVEQLTPIERYAMKFLEASLEEVSREELKQAEEQVEAARKDLDQAKEEVFRLPQEEEEGPGAGDESSCGTGGGTHRRSKKAKAPERPGTRVSERLRGARAETQGANHTPVISAHQTRSTTTPPRCSPARERVPRPAPRPRPTPASAPAAIPALVPVPVSAQFAQTCQLL

SEQ ID NO: 803695 - protein, 1884 aa, Homo sapiens
AAETAAAILVRPRERQRRFAGSSVCPFSHPPSASVCCAKRQWRQGGGSSRSLQGSLKAAKAVAKRGPSPLLGGRGGGAHAPEDAGVIPFSTAAPWKCRLSQGVWSQLTQVLQRLVDLSGGWDALVGPGPWKAGPGGLVAQNEASSQHALQPDASPSASSTGDNNPVILQASKGEPGSGTMQSSPSPAHPQLPVLQTQMVSDGMTGSNPVSPASSSSPASSGAGGISPQHIAQDSSLDGPPGPPDGATVPLEGFSLSQAADLANKGPKWEKSHAEIAEQAKHEAEIETRIAELRKEGFWSLKRLPKVPEPPRPKGHWDYLCEEMQWLSADFAQERRWKRGVARKVVRMVIRHHEEQRQKEERARREEQAKLRRIASTMAKDVRQFWSNVEKVVQFKQQSRLEEKRKKALDLHLDFIVGQTEKYSDLLSQSLNQPLTSSKAGSSPCLGSSSAASSPPPPASRLDDEDGDFQPQEDEEEDDEETIEVEEQQEGNDAEAQRREIELLRREGELPLEELLRSLPPQLLEGPSSPSQTPSSHDSDTRDGPEEGAEEEPPQVLEIKPPPSAVTQRNKQPWHPDEDDEEFTANEEEAEDEEDTIAAEEQLEGEVDHAMELSELAREGELSMEELLQQYAGAYAPGSGSSEDEDEDEVDANSSDCEPEGPVEAEEPPQEDSSSQSDSVEDRSEDEEDEHSEEEETSGSSASEESESEESEDAQSQSQADEEEEDDDFGVEYLLARDEEQSEADAGSGPPTPGPTTLGPKKEITDIAAAAESLQPKGYTLATTQVKTPIPLLLRGQLREYQHIGLDWLVTMYEKKLNGILADEMGLGKTIQTISLLAHLACEKGNWGPHLIIVPTSVMLNWEMELKRWCPSFKILTYYGAQKERKLKRQGWTKPNAFHVCITSYKLVLQDHQAFRRKNWRYLILDEAQNIKNFKSQRWQSLLNFNSQRRLLLTGTPLQNSLMELWSLMHFLMPHVFQSHREFKEWFSNPLTGMIEGSQEYNEGLVKRLHKVLRPFLLRRVKVDVEKQMPKKYEHVIRCRLSKRQRCLYDDFMAQTTTKETLATGHFMSVINILMQLRKVCNHPNLFDPRPVTSPFITPGICFSTASLVLRATDVHPLQRIDMGRFDLIGLEGRVSRYEADTFLPRHRLSRRVLLEVATAPDPPPRPKPVKMKVNRMLQPVPKQEGRTVVVVNNPRAPLGPVPVRPPPGPELSAQPTPGPVPQVLPASLMVSASPAGPPLIPASRPPGPVLLPPLQPNSGSLPQVLPSPLGVLSGTSRPPTPTLSLKPTPPAPVRLSPAPPPGSSSLLKPLTVPPGYTFPPAAATTTSTTTATATTTAVPAPTPAPQRLILSPDMQARLPSGEVVSIGQLASLAQRPVANAGGSKPLTFQIQGNKLTLTGAQVRQLAVGQPRPLQMPPTMVNNTGVVKIVVRQAPRDGLTPVPPLAPAPRPPSSGLPAVLNPRPTLTPGRLPTPTLGTARAPMPTPTLVRPLLKLVHSPSPEVSASAPGAAPLTISSPLHVPSSLPGPASSPMPIPNSSPLASPVSSTVSVPLSSSLPISVPTTLPAPASAPLTIPISAPLTVSASGPALFDQCDSTIGTCCPSGSWTSLLGTIWCFPVSISLDSRFGHSSIPVFISDTWSPSVVGSHLFTCSRVELNRGPSMLTCPGASFGSGQSFSVSTKSSSSSGFPSGSSIFCISGSSHPSGSYGGSTDSNSGSFSSSSSGSSSGPGTIARCCSCPGFITDSGSSYGSIVYSRNLFSLSFTGTSSNPCVGSIINSNYATSPGSVTSPEPGFYADTGPSPSFSTHSWRLISISDTLFGNGEPPGTLSNSDIVINSSIIPGTNSSPDTVFGTRTTAILTHWASLFSNADSRLLSPASACVLYS

SEQ ID NO: 803696 - protein, 108 aa, Homo sapiens
MEDEEKAVEILGNTEAAHPPSPIRCCWLRLRCLAATSIICGCSCLGVMALVFAIKAEERHKAGRSEEAVRWGARARKLILASFAVWLAVLILGPLLLWLLSYAIAQAE

SEQ ID NO: 803697 - protein, 1574 aa, Homo sapiens
AAETAAAILVRPRERQRRFAGSSVCPFSHPPSASVCCAKRQWRQGGGSSRSLQGSLKAAKAVAKRGPSPLLGGRGGGAHAPEDAGVIPFSTAAPWKCRLSQGVWSQLTQVLQRLVDLSGGWDALVGPGPWKAGPGGLVAQNEASSQHALQPDASPSASSTGDNNPVILQASKGEPGSGTMQSSPSPAHPQLPVLQTQMVSDGMTGSNPVSPASSSSPASSGAGGISPQHIAQDSSLDGPPGPPDGATVPLEGFSLSQAADLANKGPKWEKSHAEIAEQAKHEAEIETRIAELRKEGFWSLKRLPKVPEPPRPKGHWDYLCEEMQWLSADFAQERRWKRGVARKVVRMVIRHHEEQRQKEERARREEQAKLRRIASTMAKDVRQFWSNVEKVVQFKQQSRLEEKRKKALDLHLDFIVGQTEKYSDLLSQSLNQPLTSSKAGSSPCLGSSSAASSPPPPASRLDDEDGDFQPQEDEEEDDEETIEVEEQQEGNDAEAQRREIELLRREGELPLEELLRSLPPQLLEGPSSPSQTPSSHDSDTRDGPEEGAEEEPPQVLEIKPPPSAVTQRNKQPWHPDEDDEEFTANEEEAEDEEDTIAAEEQLEGEVDHAMELSELAREGELSMEELLQQYAGAYAPGSGSSEDEDEDEVDANSSDCEPEGPVEAEEPPQEDSSSQSDSVEDRSEDEEDEHSEEEETSGSSASEESESEESEDAQSQSQADEEEEDDDFGVEYLLARDEEQSEADAGSGPPTPGPTTLGPKKEITDIAAAAESLQPKGYTLATTQVKTPIPLLLRGQLREYQHIGLDWLVTMYEKKLNGILADEMGLGKTIQTISLLAHLACEKGNWGPHLIIVPTSVMLNWEMELKRWCPSFKILTYYGAQKERKLKRQGWTKPNAFHVCITSYKLVLQDHQAFRRKNWRYLILDEAQNIKNFKSQRWQSLLNFNSQRRLLLTGTPLQNSLMELWSLMHFLMPHVFQSHREFKEWFSNPLTGMIEGSQEYNEGLVKRLHKVLRPFLLRRVKVDVEKQMPKKYEHVIRCRLSKRQRCLYDDFMAQTTTKETLATGHFMSVINILMQLRKVCNHPNLFDPRPVTSPFITPGICFSTASLVLRATDVHPLQRIDMGRFDLIGLEGRVSRYEADTFLPRHRLSRRVLLEVATAPDPPPRPKPVKMKVNRMLQPVPKQEGRTVVVVNNPRAPLGPVPVRPPPGPELSAQPTPGPVPQVLPASLMVSASPAGPPLIPASRPPGPVLLPPLQPNSGSLPQVLPSPLGVLSGTSRPPTPTLSLKPTPPAPVRLSPAPPPGSSSLLKPLTVPPGYTFPPAAATTTSTTTATATTTAVPAPTPAPQRLILSPDMQARLPSGEVVSIGQLASLAQRPVANAGGSKPLTFQIQGNKLTLTGAQVRQLAVGQPRPLQMPPTMVNNTGVVKIVVRQAPRDGLTPVPPLAPAPRPPSSGLPAVLNPRPTLTPGRLPTPTLGTARAPMPTPTLVRPLLKLVHSPSPEVSASAPGAAPLTISSPLKSTSPGPAHASLQPLQAQLLHLGGPSRPSLCLPSASTVPTSASQQILTPSIYLTVT

SEQ ID NO: 803698 - protein, 406 aa, Homo sapiens
AAETAAAILVRPRERQRRFAGSSVCPFSHPPSASVCCAKRQWRQGGGSSRSLQGSLKAAKAVAKRGPSPLLGGRGGGAHAPEDAGVIPFSTAAPWKCRLSQGVWSQLTQVLQRLVDLSGGWDALVGPGPWKAGPGGLVAQNEASSQHALQPDASPSASSTGDNNPVILQASKGEPGSGTMQSSPSPAHPQLPVLQTQMVSDGMTGSNPVSPASSSSPASSGAGGISPQHIAQDSSLDGPPGPPDGATVPLEGFSLSQAADLANKGPKWEKSHAEIAEQAKHEAEIETRIAELRKEGFWSLKRLPKVPEPPRPKGHWDYLCEEMQWLSADFAQERRWKRGVARKVVRMVIRHHEEQRQKEERARREEQAKLRRIASTMAKDVRQFWSNVEKVGNLKHQSRLVGPVKA

SEQ ID NO: 803699 - protein, 150 aa, Homo sapiens
ELSMEELLQQYAGAYAPGSGSSEDEDEDEVDANSSDCEPEGPVEAEEPPQEDSSSQSGEYVVMKQELGRVAIGRAGMMSSKPWSYPLDSVEDRSEDEEDEHSEEEETSGSSASEESESEESEDAQSQSQADEEEEDDDFGVEYLLARDEE

SEQ ID NO: 803700 - protein, 2089 aa, Homo sapiens
AAETAAAILVRPRERQRRFAGSSVCPFSHPPSASVCCAKRQWRQGGGSSRSLQGSLKAAKAVAKRGPSPLLGGRGGGAHAPEDAGVIPFSTAAPWKCRLSQGVWSQLTQVLQRLVDLSGGWDALVGPGPWKAGPGGLVAQNEASSQHALQPDASPSASSTGDNNPVILQASKGEPGSGTMQSSPSPAHPQLPVLQTQMVSDGMTGSNPVSPASSSSPASSGAGGISPQHIAQDSSLDGPPGPPDGATVPLEGFSLSQAADLANKGPKWEKSHAEIAEQAKHEAEIETRIAELRKEGFWSLKRLPKVPEPPRPKGHWDYLCEEMQWLSADFAQERRWKRGVARKVVRMVIRHHEEQRQKEERARREEQAKLRRIASTMAKDVRQFWSNVEKVVQFKQQSRLEEKRKKALDLHLDFIVGQTEKYSDLLSQSLNQPLTSSKAGSSPCLGSSSAASSPPPPASRLDDEDGDFQPQEDEEEDDEETIEVEEQQEGNDAEAQRREIELLRREGELPLEELLRSLPPQLLEGPSSPSQTPSSHDSDTRDGPEEGAEEEPPQVLEIKPPPSAVTQRNKQPWHPDEDDEEFTANEEEAEDEEDTIAAEEQLEGEVDHAMELSELAREGELSMEELLQQYAGAYAPGSGSSEDEDEDEVDANSSDCEPEGPVEAEEPPQEDSSSQSDSVEDRSEDEEDEHSEEEETSGSSASEESESEESEDAQSQSQADEEEEDDDFGVEYLLARDEEQSEADAGSGPPTPGPTTLGPKKEITDIAAAAESLQPKGYTLATTQVKTPIPLLLRGQLREYQHIGLDWLVTMYEKKLNGILADEMGLGKTIQTISLLAHLACEKGNWGPHLIIVPTSVMLNWEMELKRWCPSFKILTYYGAQKERKLKRQGWTKPNAFHVCITSYKLVLQDHQAFRRKNWRYLILDEAQNIKNFKSQRWQSLLNFNSQRRLLLTGTPLQNSLMELWSLMHFLMPHVFQSHREFKEWFSNPLTGMIEGSQEYNEGLVKRLHKVLRPFLLRRVKVDVEKQMPKKYEHVIRCRLSKRQRCLYDDFMAQTTTKETLATGHFMSVINILMQLRKVCNHPNLFDPRPVTSPFITPGICFSTASLVLRATDVHPLQRIDMGRFDLIGLEGRVSRYEADTFLPRHRLSRRVLLEVATAPDPPPRPKPVKMKVNRMLQPVPKQEGRTVVVVNNPRAPLGPVPVRPPPGPELSAQPTPGPVPQVLPASLMVSASPAGPPLIPASRPPGPVLLPPLQPNSGSLPQVLPSPLGVLSGTSRPPTPTLSLKPTPPAPVRLSPAPPPGSSSLLKPLTVPPGYTFPPAAATTTSTTTATATTTAVPAPTPAPQRLILSPDMQARLPSGEVVSIGQLASLAQRPVANAGGSKPLTFQIQGNKLTLTGAQVRQLAVGQPRPLQRNVVHLVSAGGQHHLISQPAHVALIQAVAPTPGPTPVSVLPSSTPSTTPAPTGLSLPLAANQVPPTMVNNTGVVKIVVRQAPRDGLTPVPPLAPAPRPPSSGLPAVLNPRPTLTPGRLPTPTLGTARAPMPTPTLVRPLLKLVHSPSPEVSASAPGAAPLTISSPLHVPSSLPGPASSPMPIPNSSPLASPVSSTVSVPLSSSLPISVPTTLPAPASAPLTIPISAPLTVSASGPALLTSVTPPLAPVVPAAPGPPSLAPSGASPSASALTLGLATAPSLSSSQTPGHPLLLAPTSSHVPGLNSTVAPACSPVLVPASALASPFPSAPNPAPAQASLLAPASSASQALATPLAPMAAPQTAILAPSPAPPLAPLPVLAPSPGAAPVLASSQTPVPVMAPSSTPGTSLASASPVPAPTPVLAPSSTQTMLPAPVPSPLPSPASTQTLALAPALAPTLGGSSPSQTLSLGTGNPQGPFPTQTLSLTPASSLVPTPAQTLSLAPGPPLGPTQTLSLAPAPPLAPASPVGPAPAHTLTLAPASSSASLLAPASVQTLTLSPAPVPTLGPAAAQTLALAPASTQSPASQASSLVVSASGAAPLPVTMVSRLPVSKDEPDTLTLRSGPPSPPSTATSFGGPRPRRQPPPPPRSPFYLVSFTSSRGNRKLSFFGVLVGWMEQ

SEQ ID NO: 803701 - protein, 3100 aa, Homo sapiens
AAETAAAILVRPRERQRRFAGSSVCPFSHPPSASVCCAKRQWRQGGGSSRSLQGSLKAAKAVAKRGPSPLLGGRGGGAHAPEDAGVIPFSTAAPWKCRLSQGVWSQLTQVLQRLVDLSGGWDALVGPGPWKAGPGGLVAQNEASSQHALQPDASPSASSTGDNNPVILQASKGEPGSGTMQSSPSPAHPQLPVLQTQMVSDGMTGSNPVSPASSSSPASSGAGGISPQHIAQDSSLDGPPGPPDGATVPLEGFSLSQAADLANKGPKWEKSHAEIAEQAKHEAEIETRIAELRKEGFWSLKRLPKVPEPPRPKGHWDYLCEEMQWLSADFAQERRWKRGVARKVVRMVIRHHEEQRQKEERARREEQAKLRRIASTMAKDVRQFWSNVEKVVQFKQQSRLEEKRKKALDLHLDFIVGQTEKYSDLLSQSLNQPLTSSKAGSSPCLGSSSAASSPPPPASRLDDEDGDFQPQEDEEEDDEETIEVEEQQEGNDAEAQRREIELLRREGELPLEELLRSLPPQLLEGPSSPSQTPSSHDSDTRDGPEEGAEEEPPQVLEIKPPPSAVTQRNKQPWHPDEDDEEFTANEEEAEDEEDTIAAEEQLEGEVDHAMELSELAREGELSMEELLQQYAGAYAPGSGSSEDEDEDEVDANSSDCEPEGPVEAEEPPQEDSSSQSDSVEDRSEDEEDEHSEEEETSGSSASEESESEESEDAQSQSQADEEEEDDDFGVEYLLARDEEQSEADAGSGPPTPGPTTLGPKKEITDIAAAAESLQPKGYTLATTQVKTPIPLLLRGQLREYQHIGLDWLVTMYEKKLNGILADEMGLGKTIQTISLLAHLACEKGNWGPHLIIVPTSVMLNWEMELKRWCPSFKILTYYGAQKERKLKRQGWTKPNAFHVCITSYKLVLQDHQAFRRKNWRYLILDEAQNIKNFKSQRWQSLLNFNSQRRLLLTGTPLQNSLMELWSLMHFLMPHVFQSHREFKEWFSNPLTGMIEGSQEYNEGLVKRLHKVLRPFLLRRVKVDVEKQMPKKYEHVIRCRLSKRQRCLYDDFMAQTTTKETLATGHFMSVINILMQLRKVCNHPNLFDPRPVTSPFITPGICFSTASLVLRATDVHPLQRIDMGRFDLIGLEGRVSRYEADTFLPRHRLSRRVLLEVATAPDPPPRPKPVKMKVNRMLQPVPKQEGRTVVVVNNPRAPLGPVPVRPPPGPELSAQPTPGPVPQVLPASLMVSASPAGPPLIPASRPPGPVLLPPLQPNSGSLPQVLPSPLGVLSGTSRPPTPTLSLKPTPPAPVRLSPAPPPGSSSLLKPLTVPPGYTFPPAAATTTSTTTATATTTAVPAPTPAPQRLILSPDMQARLPSGEVVSIGQLASLAQRPVANAGGSKPLTFQIQGNKLTLTGAQVRQLAVGQPRPLQMPPTMVNNTGVVKIVVRQAPRDGLTPVPPLAPAPRPPSSGLPAVLNPRPTLTPGRLPTPTLGTARAPMPTPTLVRPLLKLVHSPSPEVSASAPGAAPLTISSPLHVPSSLPGPASSPMPIPNSSPLASPVSSTVSVPLSSSLPISVPTTLPAPASAPLTIPISAPLTVSASGPALLTSVTPPLAPVVPAAPGPPSLAPSGASPSASALTLGLATAPSLSSSQTPGHPLLLAPTSSHVPGLNSTVAPACSPVLVPASALASPFPSAPNPAPAQASLLAPASSASQALATPLAPMAAPQTAILAPSPAPPLAPLPVLAPSPGAAPVLASSQTPVPVMAPSSTPGTSLASASPVPAPTPVLAPSSTQTMLPAPVPSPLPSPASTQTLALAPALAPTLGGSSPSQTLSLGTGNPQGPFPTQTLSLTPASSLVPTPAQTLSLAPGPPLGPTQTLSLAPAPPLAPASPVGPAPAHTLTLAPASSSASLLAPASVQTLTLSPAPVPTLGPAAAQTLALAPASTQSPASQASSLVVSASGAAPLPVTMVSRLPVSKDEPDTLTLRSGPPSPPSTATSFGGPRPRRQPPPPPRSPFYLDSLEEKRKRQRSERLERIFQLSEAHGALAPVYGTEVLDFCTLPQPVASPIGPRSPGPSHPTFWTYTEAAHRAVLFPQQRLDQLSEIIERFIFVMPPVEAPPPSLHACHPPPWLAPRQAAFQEQLASELWPRARPLHRIVCNMRTQFPDLRLIQYDCGKLQTLAVLLRQLKAEGHRVLIFTQMTRMLDVLEQFLTYHGHLYLRLDGSTRVEQRQALMERFNADKRIFCFILSTRSGGVGVNLTGADTVVFYDSDWNPTMDAQAQDRCHRIGQTRDVHIYRLISERTVEENILKKANQKRMLGDMAIEGGNFTTAYFKQQTIRELFDMPLEEPSSSSVPSAPEEEEETVASKQTHILEQALCRAEDEEDIRAATQAKAEQVAELAEFNENDGFPAGEGEEAGRPGAEDEEMSRAEQEIAALVEQLTPIERYAMKFLEASLEEVSREELKQAEEQVEAARKDLDQAKEEVFRLPQEEEEGPGAGDESSCGTGGGTHRRSKKAKAPERPGTRVSERLRGARAETQGANHTPVISAHQTRSTTTPPRCSPARERVPRPAPRPRPTPASAPAAIPALVPVPVSAPVPISAPNPITILPVHILPSPPPPSQIPPCSSPACTPPPACTPPPAHTPPPAQTCLVTPSSPLLLGPPSVPISASVTNLPLGLRPEAELCAQALASPESLELASVASSETSSLSLVPPKDLLPVAVEKGERQVHSLTYHWVLDAARTFGAGPSPPLRVRRDFLQRVFRLWFRPLVPVPCAVDHGIIPGLPVFPKDEALTHPDTLRLVAPPTCKRRHTRHGMTSKHIANTQPSHKQGPHETHRTDHTPHSTQSPPSGTLRNTKDLDTERHGITKPKAPHICTERTLTSEHTHRNTLPTPCHTRKPLHSGQHRHTQGRKQTDSDTTKKPRANKEGTRDYKTQGENTNQKRKPTPNKGPTEPPPDHRSKGDHNNNMHDKPRGKKNETKQTQNQHKQRQKNADKNRPQPNNKQKRHAGKDTTRQPPNERTQTHPDTNTHDSQHTTTHITTILHFAHYKIIFYYQYNYHSHNPSSKNQELTSIKQLNLHSKTHSQTTTAKYNKQITTTNHFNPSHHTPTPHTTP

SEQ ID NO: 803702 - protein, 1855 aa, Homo sapiens
AAETAAAILVRPRERQRRFAGSSVCPFSHPPSASVCCAKRQWRQGGGSSRSLQGSLKAAKAVAKRGPSPLLGGRGGGAHAPEDAGVIPFSTAAPWKCRLSQGVWSQLTQVLQRLVDLSGGWDALVGPGPWKAGPGGLVAQNEASSQHALQPDASPSASSTGDNNPVILQASKGEPGSGTMQSSPSPAHPQLPVLQTQMVSDGMTGSNPVSPASSSSPASSGAGGISPQHIAQDSSLDGPPGPPDGATVPLEGFSLSQAADLANKGPKWEKSHAEIAEQAKHEAEIETRIAELRKEGFWSLKRLPKVPEPPRPKGHWDYLCEEMQWLSADFAQERRWKRGVARKVVRMVIRHHEEQRQKEERARREEQAKLRRIASTMAKDVRQFWSNVEKVVQFKQQSRLEEKRKKALDLHLDFIVGQTEKYSDLLSQSLNQPLTSSKAGSSPCLGSSSAASSPPPPASRLDDEDGDFQPQEDEEEDDEETIEVEEQQEGNDAEAQRREIELLRREGELPLEELLRSLPPQLLEGPSSPSQTPSSHDSDTRDGPEEGAEEEPPQVLEIKPPPSAVTQRNKQPWHPDEDDEEFTANEEEAEDEEDTIAAEEQLEGEVDHAMELSELAREGELSMEELLQQYAGAYAPGSGSSEDEDEDEVDANSSDCEPEGPVEAEEPPQEDSSSQSDSVEDRSEDEEDEHSEEEETSGSSASEESESEESEDAQSQSQADEEEEDDDFGVEYLLARDEEQSEADAGSGPPTPGPTTLGPKKEITDIAAAAESLQPKGYTLATTQVKTPIPLLLRGQLREYQHIGLDWLVTMYEKKLNGILADEMGLGKTIQTISLLAHLACEKGNWGPHLIIVPTSVMLNWEMELKRWCPSFKILTYYGAQKERKLKRQGWTKPNAFHVCITSYKLVLQDHQAFRRKNWRYLILDEAQNIKNFKSQRWQSLLNFNSQRRLLLTGTPLQNSLMELWSLMHFLMPHVFQSHREFKEWFSNPLTGMIEGSQEYNEGLVKRLHKVLRPFLLRRVKVDVEKQMPKKYEHVIRCRLSKRQRCLYDDFMAQTTTKETLATGHFMSVINILMQLRKVCNHPNLFDPRPVTSPFITPGICFSTASLVLRATDVHPLQRIDMGRFDLIGLEGRVSRYEADTFLPRHRLSRRVLLEVATAPDPPPRPKPVKMKVNRMLQPVPKQEGRTVVVVNNPRAPLGPVPVRPPPGPELSAQPTPGPVPQVLPASLMVSASPAGPPLIPASRPPGPVLLPPLQPNSGSLPQVLPSPLGVLSGTSRPPTPTLSLKPTPPAPVRLSPAPPPGSSSLLKPLTVPPGYTFPPAAATTTSTTTATATTTAVPAPTPAPQRLILSPDMQARLPSGEVVSIGQLASLAQRPVANAGGSKPLTFQIQGNKLTLTGAQVRQLAVGQPRPLQMPPTMVNNTGVVKIVVRQAPRDGLTPVPPLAPAPRPPSSGLPAVLNPRPTLTPGRLPTPTLGTARAPMPTPTLVRPLLKLVHSPSPEVSASAPGAAPLTISSPLHVPSSLPGPASSPMPIPNSSPLASPVSSTVSVPLSSSLPISVPTTLPAPASAPLTIPISAPLTVSASGPALFDQCDSTIGTCCPSGSWTSLLGTIWCFPVSISLDSRFGHSSIPVFISDTWSPSVVGSHLFTCSRVELNRGPSMLTCPGASFGSGQSFSVSTKSSSSSGFPSGSSIFCISGSSHPSGSYGGSTDSNSGSFSSSSSGSSSGPGTIARCCSCPGFITDSGSSYGSIVYSRNLFSLSFTGTSSNPCVGSIINSNYATSPGSVTSPEPGFYADTGPSPSFSTHSWRLISISDTLFGNGEPPGTLSNSDIWLSWKWGSSQSPSPSPHVAGQC

SEQ ID NO: 803703 - protein, 1390 aa, Homo sapiens
AAETAAAILVRPRERQRRFAGSSVCPFSHPPSASVCCAKRQWRQGGGSSRSLQGSLKAAKAVAKRGPSPLLGGRGGGAHAPEDAGVIPFSTAAPWKCRLSQGVWSQLTQVLQRLVDLSGGWDALVGPGPWKAGPGGLVAQNEASSQHALQPDASPSASSTGDNNPVILQASKGEPGSGTMQSSPSPAHPQLPVLQTQMVSDGMTGSNPVSPASSSSPASSGAGGISPQHIAQDSSLDGPPGPPDGATVPLEGFSLSQAADLANKGPKWEKSHAEIAEQAKHEAEIETRIAELRKEGFWSLKRLPKVPEPPRPKGHWDYLCEEMQWLSADFAQERRWKRGVARKVVRMVIRHHEEQRQKEERARREEQAKLRRIASTMAKDVRQFWSNVEKVVQFKQQSRLEEKRKKALDLHLDFIVGQTEKYSDLLSQSLNQPLTSSKAGSSPCLGSSSAASSPPPPASRLDDEDGDFQPQEDEEEDDEETIEVEEQQEGNDAEAQRREIELLRREGELPLEELLRSLPPQLLEGPSSPSQTPSSHDSDTRDGPEEGAEEEPPQVLEIKPPPSAVTQRNKQPWHPDEDDEEFTANEEEAEDEEDTIAAEEQLEGEVDHAMELSELAREGELSMEELLQQYAGAYAPGSGSSEDEDEDEVDANSSDCEPEGPVEAEEPPQEDSSSQSDSVEDRSEDEEDEHSEEEETSGSSASEESESEESEDAQSQSQADEEEEDDDFGVEYLLARDEEQSEADAGSGPPTPGPTTLGPKKEITDIAAAAESLQPKGYTLATTQVKTPIPLLLRGQLREYQHIGLDWLVTMYEKKLNGILADEMGLGKTIQTISLLAHLACEKGNWGPHLIIVPTSVMLNWEMELKRWCPSFKILTYYGAQKERKLKRQGWTKPNAFHVCITSYKLVLQDHQAFRRKNWRYLILDEAQNIKNFKSQRWQSLLNFNSQRRLLLTGTPLQNSLMELWSLMHFLMPHVFQSHREFKEWFSNPLTGMIEGSQEYNEGLVKRLHKVLRPFLLRRVKVDVEKQMPKKYEHVIRCRLSKRQRCLYDDFMAQTTTKETLATGHFMSVINILMQLRKVCNHPNLFDPRPVTSPFITPGICFSTASLVLRATDVHPLQRIDMGRFDLIGLEGRVSRYEADTFLPRHRLSRRVLLEVATAPDPPPRPKPVKMKVNRMLQPVPKQEGRTVVVVNNPRAPLGPVPVRPPPGPELSAQPTPGPVPQVLPASLMVSASPAGPPLIPASRPPGPVLLPPLQPNSGSLPQVLPSPLGVLSGTSRPPTPTLSLKPTPPAPVRLSPAPPPGSSSLLKPLTVPPGYTFPPAAATTTSTTTATATTTAVPAPTPAPQRLILSPDMQARLPCKFPGLCGEGLEMGGKLRTMRASNFRQLGQA

SEQ ID NO: 803704 - protein, 1125 aa, Homo sapiens
AAETAAAILVRPRERQRRFAGSSVCPFSHPPSASVCCAKRQWRQGGGSSRSLQGSLKAAKAVAKRGPSPLLGGRGGGAHAPEDAGVIPFSTAAPWKCRLSQGVWSQLTQVLQRLVDLSGGWDALVGPGPWKAGPGGLVAQNEASSQHALQPDASPSASSTGDNNPVILQASKGEPGSGTMQSSPSPAHPQLPVLQTQMVSDGMTGSNPVSPASSSSPASSGAGGISPQHIAQDSSLDGPPGPPDGATVPLEGFSLSQAADLANKGPKWEKSHAEIAEQAKHEAEIETRIAELRKEGFWSLKRLPKVPEPPRPKGHWDYLCEEMQWLSADFAQERRWKRGVARKVVRMVIRHHEEQRQKEERARREEQAKLRRIASTMAKDVRQFWSNVEKVVQFKQQSRLEEKRKKALDLHLDFIVGQTEKYSDLLSQSLNQPLTSSKAGSSPCLGSSSAASSPPPPASRLDDEDGDFQPQEDEEEDDEETIEVEEQQEGNDAEAQRREIELLRREGELPLEELLRSLPPQLLEGPSSPSQTPSSHDSDTRDGPEEGAEEEPPQVLEIKPPPSAVTQRNKQPWHPDEDDEEFTANEEEAEDEEDTIAAEEQLEGEVDHAMELSELAREGELSMEELLQQYAGAYAPGSGSSEDEDEDEVDANSSDCEPEGPVEAEEPPQEDSSSQSDSVEDRSEDEEDEHSEEEETSGSSASEESESEESEDAQSQSQADEEEEDDDFGVEYLLARDEEQSEADAGSGPPTPGPTTLGPKKEITDIAAAAESLQPKGYTLATTQVKTPIPLLLRGQLREYQHIGLDWLVTMYEKKLNGILADEMGLGKTIQTISLLAHLACEKGNWGPHLIIVPTSVMLNWEMELKRWCPSFKILTYYGAQKERKLKRQGWTKPNAFHVCITSYKLVLQDHQAFRRKNWRYLILDEAQNIKNFKSQRWQSLLNFNSQRRLLLTGTPLQNSLMELWSLMHFLMPHVFQSHREFKEWFSNPLTGMIEGSQEYNEGLVKRLHKVLRPFLLRRVKVDVEKQMPKKYEHVIRCRLSKRQRCLYDDFMAQTTTKETLATGHFMSVINILMQLRKVCNHPNLFDPRPVTSPFITPGICFSTASLVLRATDVHPLQVSMIPLI

SEQ ID NO: 803705 - protein, 85 aa, Homo sapiens
LRPFPFLSFAIQIKPPPSAVTQRNKQPWHPDEDDEEFTANEEEGQGCSVCPIAPYPLNELSGPNLSGFLICFIWTVSCASSLYPY

SEQ ID NO: 803706 - protein, 99 aa, Homo sapiens
LVHASAPPGRGTLLGRPRVPPRCSVPSSQLEPSSSPAVLPQRLAAGRRQTKGLEPRLTLAFVPRPSSAAAVRGRQPLPQHVWAKPPPFRLRWRERYQKE

SEQ ID NO: 803707 - protein, 99 aa, Homo sapiens; identical to SEQ ID NO: 803706

SEQ ID NO: 803708 - protein, 134 aa, Homo sapiens
ILACKDFLLSPLLPNSCEGLRHSSGGGRKSERAKNFGIEVAKASPHVLQEKVAFNCGKDTRGTGEGESSGKNEPEADKATARPAESCLLGLVVRGAPGAGWLRRLGRCAGPTPAGGVTVWNPPGSASACFLRLV

SEQ ID NO: 803709 - protein, 134 aa, Homo sapiens; identical to SEQ ID NO: 803708

SEQ ID NO: 803710 - protein, 70 aa, Homo sapiens
VNRAGVAASACALPSGGREAEVQAGRALVTLRTSRTPDDWAPGPDGGWRASAAQLPPLNRDTLQECAEWS

SEQ ID NO: 803711 - protein, 175 aa, Homo sapiens
MAEVHVIGQIMGASGFSESSLFCKWGIHTGAAWKLLSGVREGQTQVDTPQIGDMAYWSHPIDLHFATKGLQGWPRLHFQVWSQDSFGRCQLAGYGFCHVPSSPGTHQLACPTWRPLGSWREQLARAFVGGGPQLLHGDTIYSGADRYRLHTAAGGTVHLEIGLLLRNFDRYGVEC

SEQ ID NO: 803712 - protein, 255 aa, Homo sapiens
GGDGDVLGLARHYLGSLITGMVCGVGGPTDGSVKVPWSRHSSLDPSRLGSHRMLDSCCVLYPIFLAVEAAPIVSGLTSLVHNQLTDVQSHALSTEKSSLFCKVRGHSTTRAAWKLLSGVREGQTQVDTPQIGDMAYWSHPIDLHFATKGLQGWPRLHFQVWSQDSFGRCQLAGYGFCHVPSSPGTHQLACPTWRPLGSWREQLARAFVGGGPQLLHGDTIYSGADRYRLHTAAGGTVHLEIGLLLRNFDRYGVEC

SEQ ID NO: 803713 - protein, 75 aa, Homo sapiens
RGGACCCPSNNHGNQDERGRGSIAAYISRSQAGPGRGASQAWSAPAEKRSSQAHELQPRLPLSPLLTVKCAKGHG

SEQ ID NO: 803714 - protein, 102 aa, Homo sapiens
REGAWLGTMAAGGKVGLEVCGEEAAEGQQGCAFCCAPLRGPEPVFELLLSGGSGSFFRLCFPFLQPADRVCLEVESPGRIKDTAFVPFKEVMFSEKHRPGPR

SEQ ID NO: 803715 - protein, 72 aa, Homo sapiens
LWLTIVSCFCPAYPINIVALVFSIMSLNSYNDGDYEGARRLGRNAKWVAIASIIIGLLIIGISCAVHFTRNA

SEQ ID NO: 803716 - protein, 391 aa, Homo sapiens
RAAPPAAGAAGALVELRRARSGGRGGGWHWLRTLPGQGGGSSREGDVERPRGAARGRLAAGGEARAAQQPGAPTELDPQSRAAAAAVPGRMLPLTMTVLILLLLPTGQAAPKDGVTRPDSEVQHQLLPNPFQPGQEQLGLLQSYLKGLGRTEVQLEHLSREQVLLYLFALHDYDQSGQLDGLELLSMLTAALAPGAANSPTTNPVILIVDKVLETQDLNGDGLMTPAELINFPGVALRHVEPGEPLAPSPQEPQAVGRQSLLAKSPLRQETQEAPGPREEAKGQVEARRESLDPVQEPGGQAEADGDVPGPRGEAEGQAEAKGDAPGPRGEAGGQAEAEGDAPGPRGEAGGQAEARENGEEAKELPGETLESKNTQNDFEVHIVQVENDEI

SEQ ID NO: 803717 - protein, 296 aa, Homo sapiens
MTVLILLLLPTGQAAPKDGVTRPDSEVQHQLLPNPFQPGQEQLGLLQSYLKGLGRTEVQLEHLSREQVLLYLFALHDYDQSGQLDGLELLSMLTAALAPGAANSPTTNPVILIVDKVLETQDLNGDGLMTPAELINFPGVALRHVEPGEPLAPSPQEPQAVGRQSLLAKSPLRQETQEAPGPREEAKGQVEARRESLDPVQEPGGQAEADGDVPGPRGEAEGQAEAKGDAPGPRGEAGGQAEAEGDAPGPRGEAGGQAEARENGEEAKELPGETLESKNTQNDFEVHIVQVENDEI

SEQ ID NO: 803718 - protein, 147 aa, Homo sapiens
RAAPPAAGAAGALVELRRARSGGRGGGWHWLRTLPGQGGGSSREGDVERPRGAARGRLAAGGEARAAQQPGAPTELDPQSRAAAAAVPGRMLPLTMTVLILLLLPTGQAAPKDGVTRPDSEVQHQLLPNPFQPGQEQLGSPLPLCPP

SEQ ID NO: 803719 - protein, 506 aa, Homo sapiens
RAAPPAAGAAGALVELRRARSGGRGGGWHWLRTLPGQGGGSSREGDVERPRGAARGRLAAGGEARAAHSQERPRSWTPRAARRRSSFTPEASEITNPLGETNNSRRTALRAVTLTAKVRSCIPEPARPQTHQKEETSNASEHQKEQTPDTPPLGTVTLNREGRGFILEVSETKNPPIPDTLGLQVLNHNTWLSLFLIEIAKVPGRMLPLTMTVLILLLLPTGQAAPKDGVTRPDSEVQHQLLPNPFQPGQEQLGLLQSYLKGLGRTEVQLEHLSREQVLLYLFALHDYDQSGQLDGLELLSMLTAALAPGAANSPTTNPVILIVDKVLETQDLNGDGLMTPAELINFPGVALRHVEPGEPLAPSPQEPQAVGRQSLLAKSPLRQETQEAPGPREEAKGQVEARRESLDPVQEPGGQAEADGDVPGPRGEAEGQAEAKGDAPGPRGEAGGQAEAEGDAPGPRGEAGGQAEARENGEEAKELPGETLESKNTQNDFEVHIVQVENDEI

SEQ ID NO: 803720 - protein, 460 aa, Homo sapiens
APRHASLVPGSESLARPAARLATAPPRTHMEGSASPPEKPRARPAAAVLCRGPVEPLVFLANFALVLQGPLTTQYLWHRFSADLGYNGTRQRGGCSNRSADPTMQEVETLTSHWTLYMNVGGFLVGLFSSTLLGAWSDSVGRRPLLVLASLGLLLQALVSVFVVQLQLHVGYFVLGRILCALLGDFGGLLAASFASVADVSSSRSRTFRMALLEASIGVAGMLASLLGGHWLRAQGYANPFWLALALLIAMTLYAAFCFGETLKEPKSTRLFTFRHHRSIVQLYVAPAPEKSRKHLALYSLAIFVVITVHFGAQDILTLYELSTPLCWDSKLIGYGSAAQHLPYLTSLLALKLLQYCLADAWVAEIGLAFNILGMVVFAFATITPLMFTGALFSAVACVNSLAMLTASGIFNSLYPATLNFMKGFPFLLGAGLLLIPAVLIGMLEKADPHLEFQQFPQSP

SEQ ID NO: 803721 - protein, 438 aa, Homo sapiens
APRHASLVPGSESLARPAARLATAPPRTHMEGSASPPEKPRARPAAAVLCRGPVEPLVFLANFALVLQGPLTTQYLWHRFSADLGYNGTRQRGGCSNRSADPTMQEVETLTSHWTLYMNVGGFLVGLFSSTLLGAWSDSVGRRPLLVLASLGLLLQALVSVFVVQLQLHVGYFVLGRILCALLGDFGGLLAASFASVADVSSSRSRTFRMALLEASIGVAGMLASLLGGHWLRAQGYANPFWLALALLIAMTLYAAFCFGETLKEPKSTRLFTFRHHRSIVQLYVAPAPEKSRKHLALYSLAIFVVITVHFGAQDILTLYELSTPLCWDSKLIGYGSAAQHLPYLTSLLALKLLQYCLADAWVAEIGLAFNILGMVVFAFATITPLMFTGKVCGLRDSLSQRHWVRTGGRPLTAPRCGSFLCLWKHSYAPSLHWRTDN

SEQ ID NO: 803722 - protein, 371 aa, Homo sapiens [sequence omitted]

SEQ ID NO: 803723 - protein, 488 aa, Homo sapiens
APRHASLVPGSESLARPAARLATAPPRTHMEGSASPPEKPRARPAAAVLCRGPVEPLVFLANFALVLQGPLTTQYLWHRFSADLGYNGTRQRGGCSNRSADPTMQEVETLTSHWTLYMNVGGFLVGLFSSTLLGAWSDSVGRRPLLVLASLGLLLQALVSVFVVQLQLHVGYFVLGRILCALLGDFGGLLAASFASVADVSSSRSRTFRMALLEASIGVAGMLASLLGGHWLRAQGYANPFWLALALLIAMTLYAAFCFGETLKEPKSTRLFTFRHHRSIVQLYVAPAPEKSRKHLALYSLAIFVVITVHFGAQDILTLYELSTPLCWDSKLIGYGSAAQHLPYLTSLLALKLLQYCLADAWVAEIGLAFNILGMVVFAFATITPLMFTGYGLLFLSLVITPVIRAKLSKLVRETEQGALFSAVACVNSLAMLTASGIFNSLYPATLNFMKGFPFLLGAGLLLIPAVLIGMLEKADPHLEFQQFPQSP

SEQ ID NO: 803724 - protein, 353 aa, Homo sapiens
MNVGGFLVGLFSSTLLGAWSDSVGRRPVVQLQLHVGYFVLGRILCALLGDFGGLLAASFASVADVSSSRSRTFRMALLEASIGVAGMLASLLGGHWLRAQGYANPFWLALALLIAMTLYAAFCFGETLKEPKSTRLFTFRHHRSIVQLYVAPAPEKSRKHLALYSLAIFVVITVHFGAQDILTLYELSTPLCWDSKLIGYGSAAQHLPYLTSLLALKLLQYCLADAWVAEIGLAFNILGMVVFAFATITPLMFTGYGLLFLSLVITPVIRAKLSKLVRETEQGALFSAVACVNSLAMLTASGIFNSLYPATLNFMKGFPFLLGAGLLLIPAVLIGMLEKADPHLEFQQFPQSP

SEQ ID NO: 803725 - protein, 253 aa, Homo sapiens
MELEQREGTMAAVGFEEFSAPPGSELALPPLFGGHILESELETEVEFVSGGLGGSGLRERDEEEEAARGRRRRQRELNRRKYQALGRRCREIEQVNERVLNRLHQVQRITRRLQQERRFLMRVLDSYGDDYRASQFTIVLEDEGSQGTDAPTPGNAENEPPEKETLSPPRRTPAPPEPGSPAPGEGPSGRKRRRVPRDGRRAGNALTPELAPVQIKVEEDFGFEADEALDSSWVSRGPDKLLPYPTLASPASD

SEQ ID NO: 803726 - protein, 194 aa, Homo sapiens
MELEQREGTMAAVGFEEFSAPPGSELALPPLFGGHILESELETEVEFVSGGLGGSGLRERDEEEEAARGRRRRQRELNRRKYQALGRRCREIEQVNERVLNRLHQVQRITRRLQQERRFLMRVLDSYGDDYRASQFTIVLEMRAAGTDVPPRKGKMAPEEDCVPKGLCQNGDTREAKAKHDRGARKRTQTRIES

SEQ ID NO: 803727 - protein, 133 aa, Homo sapiens
MRVLDSYGDDYRASQFTIVLEDEGSQGTDAPTPGNAENEPPEKETLSPPRRTPAPPEPGSPAPGEGPSGRKRRRVPRDGRRAGNALTPELAPVQIKVEEDFGFEADEALDSSWVSRGPDKLLPYPTLASPASD

SEQ ID NO: 803728 - protein, 202 aa, Homo sapiens
MELEQREGTMAAVGFEEFSAPPGSELALPPLFGGHILESELETEVEFVSGGLGGSGLRERDEEEEAARGRRRRQRELNRRKYQALGRRCREIEQVNERVLNRLHQVQRITRRLQQERRFLMRVLDSYGDDYRASQFTIVLEDEGSQGTDAPTPGNAENEPPEKETLSPPRRTPAPPEPGSPVPCWGLNRHGKRLVSKDASRS

SEQ ID NO: 803729 - protein, 194 aa, Homo sapiens
MELEQREGTMAAVGFEEFSAPPGSELALPPLFGGHILESELETEVEFVSGGLGGSGLRERDEEEEAARGRRRRQRELNRRKYQALGRRCREIEQVNERVLNRLHQVQRITRRLQQERSHRDLEPESEPQLESETAGKWVLCNYDFQARNSSELSVKQRDVLEVLDDSRKWWKVRDPAGQEGSALQHPTPNPDKM

SEQ ID NO: 803730 - protein, 107 aa, Homo sapiens
MELEQREGTMAAVGFEEFSAPPGSELALPPLFGGHILESELETEVEFVSGGLGGSGLRERDEEEEAARGRRRRQRELNRRKYQPPVRGPVGGRGGECHGMDAEQEMR

SEQ ID NO: 803731 - protein, 244 aa, Homo sapiens
MAAVGFEEFSAPPGSELALPPLFGGHILESELETEVEFVSGGLGGSGLRERDEEEEAARGRRRRQRELNRRKYQALGRRCREIEQVNERVLNRLHQVQRITRRLQQERRFLMRVLDSYGDDYRASQFTIVLEDEGSQGTDAPTPGNAENEPPEKETLSPPRRTPAPPEPGSPAPGEGPSGRKRRRVPRDGRRAGNALTPELAPVQIKVEEDFGFEADEALDSSWVSRGPDKLLPYPTLASPASD

SEQ ID NO: 803732 - protein, 253 aa, Homo sapiens; identical to SEQ ID NO: 803725

SEQ ID NO: 803733 - protein, 253 aa, Homo sapiens; identical to SEQ ID NO: 803725

SEQ ID NO: 803734 - protein, 48 aa, Homo sapiens
MLMGYAGQKHETMVSRMVVLGLREVFTSCRGYGARIGKSCAELSQYEL

SEQ ID NO: 803735 - protein, 101 aa, Homo sapiens
LSASPTDVQSKTQRSWRIFLTSHSKGMEDSGQEYTILSFQHVTQQNKRRNHNWSMTVTVISFLLPVAGVCVSLQLNPGQGDPRTAEEACLHMSPRTSPAIM

SEQ ID NO: 803736 - protein, 169 aa, Homo sapiens
AAASPEPQGRPRSAASRPPRSAAGPGDADTKGTRVTLPGPARPRCAALTPPPGTGCGVPGARSLPPAPPRARAARTARTAMPALPPPACREPARGEAAARAGRERAQRPGTREARPRPRPRAEPHSAPCRPPAPARGPEPPRRPQDRLRHEEGLRRPPVHANMKMLFLL

SEQ ID NO: 803737 - protein, 266 aa, Homo sapiens
GYCGSWVFTCGALRQLSGGRDLSRGARMGNSALRAHVETAQKTGVFQLKDRGLTEFPADLQKLTSNLRTIDLSNNKIESLPPLLIGKFTLLKSLSLNNNKLTVLPDEICNLKKLETLSLNNNHLRELPSTFGQLSALKTLSLSGNQLGALPPQLCSLRHLDVMDLSKNQIRSIPDSVGELQVIELNLNQNQISQISVKISCCPRLKILRLEENCLELSMLPQSILSDSQICLLAVEGNLFEIKKLRELEGYDKYMERFTATKKKFA

SEQ ID NO: 803738 - protein, 125 aa, Homo sapiens [sequence omitted]

SEQ ID NO: 803739 - protein, 125 aa, Homo sapiens [sequence omitted]

SEQ ID NO: 803740 - protein, 125 aa, Homo sapiens [sequence omitted]

SEQ ID NO: 803741 - protein, 113 aa, Homo sapiens
ARARAARDLGLGMWYRLLAAAGSRAVARPLALLWRCGGPGGGRTAKTSARALGKARQWLWPVRMCGVALQKKLGKLIWPPVPVLPGDPRSEADSAGKTDVIFLVAVFKTTQRV

SEQ ID NO: 803742 - protein, 113 aa, Homo sapiens; identical to SEQ ID NO: 803741

SEQ ID NO: 803743 - protein, 122 aa, Homo sapiens
MEFVNFLKNPKQYQDLGAKIPKGAMLTGPPGTGKTLLAKATAGEATVPFITVNGSEFLEMFIGVGPARGSTLPPTSWCWLAPTALTSWTRPSCGLAGFIARFTLVPLTLKAGPPSLRSTCAH

SEQ ID NO: 803744 - protein, 122 aa, Homo sapiens; identical to SEQ ID NO: 803743

SEQ ID NO: 803745 - protein, 95 aa, Homo sapiens
VEVGGSQGEGRSSIFKVHLRPLKLDKSLNKDTLARKLAVLTPGFPDVCLHTKVKKLECYQDCFLLPIDGDDSALPLNRDDFDDSAPQQGLLSTTP

SEQ ID NO: 803746 - protein, 196 aa, Homo sapiens
RDAARVSGNMAALVRPARFVVRPLLQVVQAWDLDARRWVRALRRSPVKVVFPSGEVVEQKRAPGKQPRKAPSEASAQEQREKQPLEESASRAPSTWEESGLRYDKAYPGDRRLSSVMTIVKSRPFREKQGKILLEGRRLISDALKAGAVPKMFFFSRLEYLKELPVDKLKGVSLIKVKFEDIKDWSDLVTPQGIMG

SEQ ID NO: 803747 - protein, 429 aa, Homo sapiens
RDAARVSGNMAALVRPARFVVRPLLQVVQAWDLDARRWVRALRRSPVKVVFPSGEVVEQKRAPGKQPRKAPSEASAQEQREKQPLEESASRAPSTWEESGLRYDKAYPGDRRLSSVMTIVKSRPFREKQGKILLEGRRLISDALKAGAVPKMFFFSRLEYLKELPVDKLKGVSLIKVKFEDIKDWSDLVTPQGIMGIFAKPDHVKMTYPKTQLQHSLPLLLICDNLRDPGNLGTILRSAAGAGCSKVLLTKGCVDAWEPKVLRAGMGAHFRMPIINNLEWETVPNYLPPDTRVYVADNCGLYAQAEMSNKASDHGWVCDQRVMKFHKYEEEEDVETGASQDWLPHVEVQSYDSDWTEAPAAVVIGGETYGVSLESLQLAESTGGKRLLIPVVPGVDSLNSAMAASILLFEGKRQLRGRAEDLSRDRSYH

SEQ ID NO: 803748 - protein, 259 aa, Homo sapiens
RDAARVSGNMAALVRPARFVVRPLLQVVQAWDLDARRWVRALRRSPVKVVFPSGEVVEQKRAPGKQPRKAPSEASAQEQREKQPLEESASRAPSTWEESGLRYDKAYPGDRRLSSVMTIVKSRPFREKQGKILLEGRRLISDALKAGAVPKMFFFSRLEYLKELPVDKLKGVSLIKVKFEDIKDWSDLVTPQGIMGIFAKPDHVKMTYPKTQLQHSLPLLLICDNLRDPGNLGTILRSAAGAGCSKVLLTKGKDIKGQA

SEQ ID NO: 803749 - protein, 196 aa, Homo sapiens; identical to SEQ ID NO: 803746

SEQ ID NO: 803750 - protein, 429 aa, Homo sapiens; identical to SEQ ID NO: 803747

SEQ ID NO: 803751 - protein, 289 aa, Homo sapiens
LRLVRGCGVEFGRGFDRLEYLKELPVDKLKGVSLIKVKFEDIKDWSDLVTPQGIMGIFAKPDHVKMTYPKTQLQHSLPLLLICDNLRDPGNLGTILRSAAGAGCSKVLLTKGCVDAWEPKVLRAGMGAHFRMPIINNLEWETVPNYLPPDTRVYVADNCGLYAQAEMSNKASDHGWVCDQRVMKFHKYEEEEDVETGASQDWLPHVEVQSYDSDWTEAPAAVVIGGETYGVSLESLQLAESTGGKRLLIPVVPGVDSLNSAMAASILLFEGKRQLRGRAEDLSRDRSYH

SEQ ID NO: 803752 - protein, 224 aa, Homo sapiens
MTYPKTQLQHSLPLLLICDNLRDPGNLGTILRSAAGAGCSKVLLTKGCVDAWEPKVLRAGMGAHFRMPIINNLEWETVPNYLPPDTRVYVADNCGLYAQAEMSNKASDHGWVCDQRVMKFHKYEEEEDVETGASQDWLPHVEVQSYDSDWTEAPAAVVIGGETYGVSLESLQLAESTGGKRLLIPVVPGVDSLNSAMAASILLFEGKRQLRGRAEDLSRDRSYH

SEQ ID NO: 803753 - protein, 224 aa, Homo sapiens; identical to SEQ ID NO: 803752

SEQ ID NO: 803754 - protein, 195 aa, Homo sapiens
MSRPLGQSRRRPPDPIARWQRSRRLQAEGPAGVPLGEPVFPQGLLQAQPALGVVLAQESLGTAWVTERDSVSKKKKKAWVTMSLFQEWFLHFCSTVEGAAPSTTFPTRGCPSWTALPATLGVETESGSVAQAGVRWRDLGSLQPPPPGFTPFSCLSLPGSWDYRRPPPRPANFFVFLVETGFHRVSQNGLGLLTP

SEQ ID NO: 803755 - protein, 198 aa, Homo sapiens
MSRWPCQRLTWQRRSVTQASGASGASLCASRLPRDKTAPKAKEAPAPPKAEAKAKALKAKKAVLKGVRSHTAKKKIRMSLTFRRPKTLRLRRQPRYPRKSTPRRNKLGHYAIIKFPLTTESAVKKIEENNTLVFTVDVKANKHQIRQAVKKLYDSDVAKVTTLICPDKEKKAYVRLAPDYDAFDVVTKLGSPKLSPAG

SEQ ID NO: 803756 - protein, 195 aa, Homo sapiens; identical to SEQ ID NO: 803754

SEQ ID NO: 803757 - protein, 139 aa, Homo sapiens
MLLATLSSEMTLCPSRPVVGELVRKHTWALPTRHPSPGVGYPHGCRHPLARPGCSFSLSLLVSSPLPAFSALSSCFLLFSPGLLPCPQTFFFPRIWAHSKERVAFGHKALDPTMEDWGVPDAPQKEACRDSTWESPMAL

SEQ ID NO: 803758 - protein, 133 aa, Homo sapiens
MSRPLGQSRRRPPDPIARWQRSRRLQAEGPAGVPLGEPVFPQGLLQAQPALGVVLAQESLGTAWVTERDSVSKKKKKAWVTMSLFQEWFLHFCSTVEGAAPSTTFPTRGCPSWTALPATLGVETERDSVSKKK

SEQ ID NO: 803759 - protein, 195 aa, Homo sapiens; identical to SEQ ID NO: 803754

SEQ ID NO: 803760 - protein, 369 aa, Homo sapiens
RLRGGVLGRQPFLRRTAGRSDVLPVAGGEVRALQEGGCGDKMKIFVGNVDGADTTPEELAALFAPYGTVMSCAVMKQFAFVHMRENAGALRAIEALHGHELRPGRALVVEMSRPRPLNTWKIFVGNVSAACTSQELRSLFERRGRVIECDVVKDYAFVHMEKEADAKAAIAQLNGKEVKGKRINVELSTKGQKKGPGLAVQSGDKTKKPGAGDTAFPGTGGFSATFDYQQAFGNSTGGFDGQARQPTPPFFGRDRSPLRRSPPRASYVAPLTAQPATYRAQPSVSLGAAYRAQPSASLGVGYRTQPMTAQAASYRAQPSVSLGAPYRGQLASPSSQSAAASSLGPYGGAQPSASALSSYGGQAAAASSL

SEQ ID NO: 803761 - protein, 375 aa, Homo sapiens
GRVGRTRGSRDRVGSTHASGRTAGRSDVLPVAGGEVRALQEGGCGDKMKIFVGNVDGADTTPEELAALFAPYGTVMSCAVMKQFAFVHMRENAGALRAIEALHGHELRPGRALVVEMSRPRPLNTWKIFVGNVSAACTSQELRSLFERRGRVIECDVVKDYAFVHMEKEADAKAAIAQLNGKEVKGKRINVELSTKGQKKGPGLAVQSGDKTKKPGAGDTAFPGTGGFSATFDYQQAFGNSTGGFDGQARQPTPPFFGRDRSPLRRSPPRASYVAPLTAQPATYRAQPSVSLGAAYRAQPSASLGVGYRTQPMTAQAASYRAQPSVSLGAPYRGQLASPSSQSAAASSLGPYGGAQPSASALSSYGGQAAAASSL

SEQ ID NO: 803762 - protein, 210 aa, Homo sapiens
MEKEADAKAAIAQLNGKEVKGKRINVELSTKGQKKGPGLAVQSGDKTKKPGAGDTAFPGTGGFSATFDYQQAFGNSTGGFDGQARQPTPPFFGRDRSPLRRSPPRASYVAPLTAQPATYRAQPSVSLGAAYRAQPSASLGVGYRTQPMTAQAASYRAQPSVSLGAPYRGQLASPSSQSAAASSLGPYGGAQPSASALSSYGGQAAAASSL

SEQ ID NO: 803763 - protein, 276 aa, Homo sapiens
GRVGRTRGSRDRVGSTHASGRTAGRSDVLPVAGGEVRALQEGAASSYNTQGAASSLGSYGAQAASYGAQSAASSLAYGAQAASYNAQPSASYNAQSAPYAAQQAASYSSQPAAYVAQPATAAAYASQPAAYAAQATTPMAGSYGAQPVVQTQLNSYGAQASMGLSGSYGAQSAAAATGSYGAAAAYGAQPSATLAAPYRTQSSASLAASYAAQQHPQAAASYRGQPGNAYDGAGQPSAAYLSMSQGAVANANSTPPPYERTRLSPPRASYDDPYKK

SEQ ID NO: 803764 - protein, 207 aa, Homo sapiens
ALTVGGGKTLQQEEKQLQPCMQMDNRLPPKKVPGFCSFRYGLSFLVHCCNVIITAQRACLNLTMVVMVNSTDPHGLPNTSTKKLLDNIKNPMYNWSPDIQGIILSSTSYGVIIIQVPVGYFSGIYSTKKMIGFALCLSSVLSLLIPPAAGIGVAWVVVCRAVQGAAQGIVATAQFEIYVKWAPPLERGRLTSMSTSGKELKPRMFES

SEQ ID NO: 803765 - protein, 487 aa, Homo sapiens
ALTVGGGKTLQQEEKQLQPCMQMDNRLPPKKVPGFCSFRYGLSFLVHCCNVIITAQRACLNLTMVVMVNSTDPHGLPNTSTKKLLDNIKNPMYNWSPDIQGIILSSTSYGVIIIQVPVGYFSGIYSTKKMIGFALCLSSVLSLLIPPAAGIGVAWVVVCRAVQGAAQGIVATAQFEIYVKWAPPLERGRLTSMSTSGFLLGPFIVLLVTGVICESLGWPMVFYIFGACGCAVCLLWFVLFYDDPKDHPCISISEKEYITSSLVQQVSSSRQSLPIKAILKSLPVWAISIGSFTFFWSHNIMTLYTPMFINSMLHVNIKENGFLSSLPYLFAWICGNLAGQLSDFFLTRNILSVIAVRKLFTAAGFLLPAIFGVCLPYLSSTFYSIVIFLILAGATGSFCLGGVFINGLDIAPRYFGFIKACSTLTGMIGGLIASTLTGLILKQDPESAWFKTFILMAAINVTGLIFYLIVATAEIQDWAKEKQHTRL

SEQ ID NO: 803766 - protein, 487 aa, Homo sapiens; identical to SEQ ID NO: 803765

SEQ ID NO: 803767 - protein, 487 aa, Homo sapiens; identical to SEQ ID NO: 803765

SEQ ID NO: 803768 - protein, 81 aa, Homo sapiens
NPMYNWSPDIQGIILSSTSYGVIIIQVPVGYFSGIYSTKKMIGFALCLSSVLSLLIPPAAGIGVAWVVVCRAVQGAAQVLK

SEQ ID NO: 803769 - protein, 599 aa, Homo sapiens
HCRPARYSLPASAVPTAGLRATRPQRASHMEAPEEPAPVRGGPEATLEVRGSRCLRLSAFREELRALLVLAGPAFLVQLMVFLISFISSVFCGHLGKLELDAVTLAIAVINVTGVSVGFGLSSACDTLISQTYGSQNLKHVGVILQRSALVLLLCCFPCWALFLNTQHILLLFRQDPDVSRLTQTYVTIFIPALPATFLYMLQVKYLLNQGIVLPQIVTGVAANLVNALANYLFLHQLHLGVIGSALANLISQYTLALLLFLYILGKKLHQATWGGWSLECLQDWASFLRLAIPSMLMLCMEWWAYEVGSFLSGILGMVELGAQSIVYELAIIVYMVPAGFSVAASVRVGNALGAGDMEQARKSSTVSLLITVLFAVAFSVLLLSCKDHVGYIFTTDRDIINLVAQVVPIYAVSHLFEALACTSGGVLRGSGNQKVGAIVNTIGYYVVGLPIGIALMFATTLGVMGLWSGIIICTVFQAVCFLGFIIQLNWKKACQQAQVHANLKVNNVPRSGNSALPQDPLHPGCPENLEGILTNDVGKTGEPQSDQQMRQEEPLPEHPQDGAKLSRKQLVLRRGLLLLGVFLILLVGILVRFYVRIQ

SEQ ID NO: 803770 - protein, 495 aa, Homo sapiens
HCRPARYSLPASAVPTAGLRATRPQRASHMEAPEEPAPVRGGPEATLEVRGSRCLRLSAFREELRALLVLAGPAFLVQLMVFLISFISSVFCGHLGKLELDAVTLAIAVINVTGVSVGFGLSSACDTLISQTYGSQNLKHVGVILQRSALVLLLCCFPCWALFLNTQHILLLFRQDPDVSRLTQTYVTIFIPALPATFLYMLQVKYLLNQGIVLPQIVTGVAANLVNALANYLFLHQLHLGVIGSALANLISQYTLALLLFLYILGKKLHQATWGGWSLECLQDWASFLRLAIPSMLMLCMEWWAYEVGSFLSGILGMVELGAQSIVYELAIIVYMVPAGFSVAASVRVGNALGAGDMEQARKSSTVSLLITVLFAVAFSVLLLSCKDHVGYIFTTDRDIINLVAQVVPIYAVSHLFEALACTSGGVLRGSGNQKVGAIVNTIGYYVVGLPIGIALMFATTLGVMGSGTRQFESKQRASEWEFCSPSGSASPRVP

SEQ ID NO: 803771 - protein, 599 aa, Homo sapiens; identical to SEQ ID NO: 803769

SEQ ID NO: 803772 - protein, 556 aa, Homo sapiens
MSLLLLLLLLLLLLLLLLLVLLLLLLPGSPQFLVQLMVFLISFISSVFCGHLGKLELDAVTLAIAVINVTGVSVGFGLSSACDTLISQTYGSQNLKHVGVILQRSALVLLLCCFPCWALFLNTQHILLLFRQDPDVSRLTQTYVTIFIPALPATFLYMLQVKYLLNQGIVLPQIVTGVAANLVNALANYLFLHQLHLGVIGSALANLISQYTLALLLFLYILGKKLHQATWGGWSLECLQDWASFLRLAIPSMLMLCMEWWAYEVGSFLSGILGMVELGAQSIVYELAIIVYMVPAGFSVAASVRVGNALGAGDMEQARKSSTVSLLITVLFAVAFSVLLLSCKDHVGYIFTTDRDIINLVAQVVPIYAVSHLFEALACTSGGVLRGSGNQKVGAIVNTIGYYVVGLPIGIALMFATTLGVMGLWSGIIICTVFQAVCFLGFIIQLNWKKACQQAQVHANLKVNNVPRSGNSALPQDPLHPGCPENLEGILTNDVGKTGEPQSDQQMRQEEPLPEHPQDGAKLSRKQLVLRRGLLLLGVFLILLVGILVRFYVRIQ

SEQ ID NO: 803773 - protein, 599 aa, Homo sapiens; identical to SEQ ID NO: 803769

SEQ ID NO: 803774 - protein, 144 aa, Homo sapiens
MNTCHAGHLNGVYYQGGTYSKASTPNGYDNGIILGHLENPVVFHEENHYEDNPIQQTHNWRRTATPPGGSQTGWRRLKDTFDVGKTGEPQSDQQMRQEEPLPEHPQDGAKLSRKQLVLRRGLLLLGVFLILLVGILVRFYVRIQ

SEQ ID NO: 803775 - protein, 506 aa, Homo sapiens
HCRPARYSLPASAVPTAGLRATRPQRASHMEAPEEPAPVRGGPEATLEVRGSRCLRLSAFREELRALLVLAGPAFLVQLMVFLISFISSVFCGHLGKLELDAVTLAIAVINVTGVSVGFGLSSACDTLISQTYGSQNLKHVGVILQRSALVLLLCCFPCWALFLNTQHILLLFRQDPDVSRLTQTYVTIFIPALPATFLYMLQVKYLLNQGIVLPQIVTGVAANLVNALANYLFLHQLHLGVIGSALANLISQYTLALLLFLYILGKKLHQATWGGWSLECLQDWASFLRLAIPSMLMLCMEWWAYEVGSFLSGILGMVELGAQSIVYELAIIVYMVPAGFSVAASVRVGNALGAGDMEQARKSSTVSLLITVLFAVAFSVLLLSCKDHVGYIFTTDRDIINLVAQVVPIYAVSHLFEALACTSGGVLRGSGNQKVGAIVNTIGYYVVGLPIGIALMFATTLGVMEQCPMCSPSSMAGSLEGNGWPVPFSSPSSHSAASTSLLVQP

SEQ ID NO: 803776 - protein, 321 aa, Homo sapiens
HCRPARYSLPASAVPTAGLRATRPQRASHMEAPEEPAPVRGGPEATLEVRGSRCLRLSAFREELRALLVLAGPAFLVQLMVFLISFISSVFCGHLGKLELDAVTLAIAVINVTGVSVGFGLSSACDTLISQTYGSQNLKHVGVILQRSALVLLLCCFPCWALFLNTQHILLLFRQDPDVSRLTQTYVTIFIPALPATFLYMLQVKYLLNQGIVLPQIVTGVAANLVNALANYLFLHQLHLGVIGSALANLISQYTLALLLFLYILGKASFLRLAIPSMLMLCMEWWAYEVGSFLSGILGMVELGAQSIVYELAIIVYMRHH

SEQ ID NO: 803777 - protein, 210 aa, Homo sapiens
RPARYSLPASAVPTAGLRATRPQRASHMEAPEEPAPVRGGPEATLEVRGSRCLRLSAFREELRALLVLAGPAVSKVASVAGRYRRAGDLVISASAGDFGGLWGPSELSAGGLRGASCQEPGGHPSSSACVPAAFRSAPPDWGPRGALRERLVRARAHVGSERPAAPASCARRHRRAGTFAPNGALPGPGCICIRGCLLWELIPANKTQVA

SEQ ID NO: 803778 - protein, 436 aa, Homo sapiens
MSLNPSRPSSSELVELHVFYVPEGSWNYKLNTISTEVVNKFISAGFLRVSPQLTLRALRERLGEFLGEDAIAEKFLFLKCIGNNLAVVKEKQESELKLKSFAPPYALQPELYLLPVMDHLGNVYSPSTVILDERQTNNGVNEADGTIHRPISVTLFKEELGRDPSLLENTLKELPNKNQEEAGGKATAEKSQIAKNQIGNSELPGSLEDSNNDCFGTKKSVFGKMKMIQLSVEDSDNQTAEKEYITLPDHPSLPCQPVLSSGITDISLLQTEREKIIKQMKQVKEERRYLERNREEPVKTVEKLFEQSKLKRYHAYNGWKKKYLETKKVTASMEEVLTKLREDLELYYKKLLMQLEAREIKMRPKNLANITDSKNYLIIQITEVQHAIDQLKRKLDTDKMKLIVEVKMRKQAVSDLRTLKTELAQKKKIIHLYNLN

SEQ ID NO: 803779 - protein, 284 aa, Homo sapiens
MKKDKKRNKIPIDNYPIQTLVNMSLNPSRPSSSELVELHVFYVPEGSWNYKLNTISTEVVNKFISAGFLRVSPQLTLRALRERLGEFLGEDAIAEKFLFLKCIGNNLAVVKEKQESELKLKSFAPPYALQPELYLLPVMDHLGNVYSPSTVILDERQTNNGVNEADGTIHRPISVTLFKEELGRDPSLLENTLKELPNKNQEEAGGKATAEKSQIAKNQIGNSELPGSLEDSNNDCFGTKKSVFGKMKMIQLSVEDRTIRQLKKSTSPYQITLHFLVNLFFLQE

SEQ ID NO: 803780 - protein, 211 aa, Homo sapiens
MKKDKKRNKIPIDNYPIQTLVNMSLNPSRPSSSELVELHVFYVPEGSWNYKLNTISTEVVNKFISAGFLRVSPQLTLRALRERLGEFLGEDAIAEKFLFLKCIGNNLAVVKEKQESELKLKSFAPPYALQPELYLLPVMDHLGNVYSPSTVILDERQTNNGVNEADGTIHRPISVTLFKEELGRDPSLLENTLKELPNKNQEEEMKTHTDS

SEQ ID NO: 803781 - protein, 68 aa, Homo sapiens
YNGWKKKYLETKKVTASMEEVLTKLREDLELYYKKLLMQLEAREIKMRPKNLANITDSKVLLNVSPFR

SEQ ID NO: 803782 - protein, 492 aa, Homo sapiens
GQEARKEPPGAMDGAVMEGPLFLQSQRFGTKRWRKTWAVLYPASPHGVARLEFFDHKGSSSGGGRGSSRRLDCKVIRLAECVSVAPVTVETPPEPGATAFRLDTAQRSHLLAADAPSSAAWVQTLCRNAFPKGSWTLAPTDNPPKLSALEMLENSLYSPTWEGSQFWVTVQRTEAAERCGLHGSYVLRVEAERLTLLTVGAQSQILEPLLSWPYTLLRRYGRDKVMFSFEAGRRCPSGPGTFTFQTAQGNDIFQAVETAIHRQKAQGKAGQGHDVLRADSHEGEVAEGKLPSPPGPQELLDSPPALYAEPLDSLRIAPCPSQDSLYSDPLDSTSAQAGEGVQRKKPLYWDLYEHAQQQLLKAKLTDPKEDPIYDEPEGLAPVPPQGLYDLPREPKDAWWCQARVKEEGYELPYNPATDDYAVPPPRSTKPLLAPKPQGPAFPEPGTATGSGIKSHNSALYSQVQKSGASGSWDCGLSRVGTDKTGVKSEGST

SEQ ID NO: 803783 - protein, 519 aa, Homo sapiens
GRVLTELGNRWPAAPALESPPRLGVASRGRRAPRGRGIRLPAQASATREREPRWSPFQRWRKTWAVLYPASPHGVARLEFFDHKGSSSGGGRGSSRRLDCKVIRLAECVSVAPVTVETPPEPGATAFRLDTAQRSHLLAADAPSSAAWVQTLCRNAFPKGSWTLAPTDNPPKLSALEMLENSLYSPTWEGSQFWVTVQRTEAAERCGLHGSYVLRVEAERLTLLTVGAQSQILEPLLSWPYTLLRRYGRDKVMFSFEAGRRCPSGPGTFTFQTAQGNDIFQAVETAIHRQKAQGKAGQGHDVLRADSHEGEVAEGKLPSPPGPQELLDSPPALYAEPLDSLRIAPCPSQDSLYSDPLDSTSAQAGEGVQRKKPLYWDLYEHAQQQLLKAKLTDPKEDPIYDEPEGLAPVPPQGLYDLPREPKDAWWCQARVKEEGYELPYNPATDDYAVPPPRSTKPLLAPKPQGPAFPEPGTATGSGIKSHNSALYSQVQKSGASGSWDCGLSRVGTDKTGVKSEGST

SEQ ID NO: 803784 - protein, 267 aa, Homo sapiens
MFSFEAGRRCPSGPGTFTFQTAQGNDIFQAVETAIHRQKAQGKAGQGHDVLRADSHEGEVAEGKLPSPPGPQELLDSPPALYAEPLDSLRIAPCPSQDSLYSDPLDSTSAQAGEGVQRKKPLYWDLYEHAQQQLLKAKLTDPKEDPIYDEPEGLAPVPPQGLYDLPREPKDAWWCQARVKEEGYELPYNPATDDYAVPPPRSTKPLLAPKPQGPAFPEPGTATGSGIKSHNSALYSQVQKSGASGSWDCGLSRVGTDKTGVKSEGST

SEQ ID NO: 803785 - protein, 104 aa, Homo sapiens
GRVLTELGNRWPAAPALESPPRLGVASRGRRAPRGRGIRLPAQASATREREPRWSPFQVMLYLGAGPQAGKESQWHLSCVPPPLRNPAWCACCKPSGGMGPRRR

SEQ ID NO: 803786 - protein, 267 aa, Homo sapiens; identical to SEQ ID NO: 803784

SEQ ID NO: 803787 - protein, 100 aa, Homo sapiens
MFSFEAGRRCPSGPGTFTFQTAQGNDIFQAVETAIHRQKAQGKAGQGHDVLRADSHEGEVAEGKLPSPPGPQELLDSPPALYAEPLDSLRIAPCPSQDSL

SEQ ID NO: 803788 - protein, 80 aa, Homo sapiens
EPSLRISWGVNVNISLEYLIGFQSEPCFGFFLAAVMISTYKVWLSGFQKLAFKTTGSLSELNENQPGQIKCFNKGIFLWE

SEQ ID NO: 803789 - protein, 132 aa, Homo sapiens
SSDMVCELLGVRGMDILYIGDHIFGDILKSKKRQGWRTCLVVPELSWELDIWAQEKERLEELKRLDTHLADIYQHMDGSSCELQVINFTKREIQMPHESVVEQEQANLDPASCLLSCNQRSLPAKSCLSSAI

SEQ ID NO: 803790 - protein, 1246 aa, Homo sapiens
MPTEVLATPGYFPTVVQPYVESNLLVPMGGVGGQVQVSQPGGSLAQAPTTSSQQAVLESTQGVSQVAPAEPVAVAQPQATQPTTLASSVDSAHSDVASGMSDGNENVPSSSGRHEGRTTKRHYRKSVRSRSRHEKTSRPKLRILNVSNKGDRVVECQLETHNRKMVTFKFDLDGDNPEEIATIMVNNDFILAIERESFVDQVREIIEKADEMLSEDVSVEPEGDQGLESLQGKDDYGFSGSQKLEGEFKQPIPASSMPQQIGIPTSSLTQVVHSAGRRFIVSPVPESRLRESKVFPSEITDTVAASTAQSPGMNLSHSASSLSLQQAFSELRRAQMTEGPNTAPPNFSHTGPTFPVVPPFLSSIAGVPTTAAATAPVPATSSPPNDISTSVIQSEVTVPTEEGIAGVATSTGVVTSGGLPIPPVSESPVLSSVVSSITIPAVVSISTTSPSLQVPTSTSEIVVSSTALYPSVTVSATSASAGGSTATPGPKPPAVVSQQAAGSTTVGATLTSVSTTTSFPSTASQLSIQLSSSTSTPTLAETVVVSAHSLDKTSHSSTTGLAFSLSAPSSSSSPGAGVSSYISQPGGLHPLVIPSVIASTPILPQAAGPTSTPLLPQVPSIPPLVQPVANVPAVQQTLIHSQPQPALLPNQPHTHCPEVDSDTQPKAPGIDDIKTLEEKLRSLFSEHSSSGAQHASVSLETSLVIESTVTPGIPTTAVAPSKLLTSTTSTCLPPTNLPLGTVALPVTPVVTPGQVSTPVSTTTSGVKPGTAPSKPPLTKAPVLPVGTELPAGTLPSEQLPPFPGPSLTQSQQPLEDLDAQLRRTLSPEMITVTSAVGPVSMAAPTAITEAGTQPQKGVSQVKEGPVLATSSGAGVFKMGRFQVSVAADGAQKEGKNKSEDAKSVHFESSTSESSVLSSSSPESTLVKPEPNGITIPGISSDVPESAHKTTASEAKSDTGQPTKVGRFQVTTTANKVGRFSVSKTEDKITDTKKEGPVASPPFMDLEQAVLPAVIPKKEKPELSEPSHLNGPSSDPEAAFLSRDVDDGSGSPHSPHQLSSKSLPSQNLSQSLSNSFNSSYMSSDNESDIEDEDLKLELRRLRDKHLKEIQDLQSRQKHEIESLYTKLGKVPPAVIIPPAAPLSGRRRRPTKSKGSKSSRSSSLGNKSPQLSGNLSGQSAASVLHPQQTLHPPGNIPESGQNQLLQPLKPSPSSDNLYSAFTSDGAISVPSLSAPGQGNKATIIVQKQ

SEQ ID NO: 803791 - protein, 90 aa, Homo sapiens
KSWTCFLMPLYLLAGNLSGQSAASVLHPQQTLHPPGNIPESGQNQLLQPLKPSPSSDNLYSAFTSDGAISVPSLSAPGQGNKATIIVQKQ

SEQ ID NO: 803792 - protein, 97 aa, Homo sapiens
VIVFIQSQQPLEDLDAQLRRTLSPEMITVTSAVGPVSMAAPTAITEAGTQPQKGVSQVKEGPVLATSSGAGVFKMGRFQFLMQHTVSQKRGSSRTSA

SEQ ID NO: 803793 - protein, 2382 aa, Homo sapiens
MSGGAAEKQSSTPGSLFLSPPAPAPKNGSSSDSSVGEKLGAAAADAVTGRTEEYRRRRHTMDKDSRGAAATTTTTEHRFFRRSVICDSNATALELPGLPLSLPQPSIPAAVPQSAPPEPHREETVTATATSQVAQQPPAAAAPGEQAVAGPAPSTVPSSTSKDRPVSQPSLVGSKEEPPPARSGSGGGSAKEPQEERSQQQDDIEELETKAVGMSNDGRFLKFDIEIGRGSFKTVYKGLDTETTVEVAWCELQDRKLTKSERQRFKEEAEMLKGLQHPNIVRFYDSWESTVKGKKCIVLVTELMTSGTLKTYLKRFKVMKIKVLRSWCRQILKGLQFLHTRTPPIIHRDLKCDNIFITGPTGSVKIGDLGLATLKRASFAKSVIGTPEFMAPEMYEEKYDESVDVYAFGMCMLEMATSEYPYSECQNAAQIYRRVTSGVKPASFDKVAIPEVKEIIEGCIRQNKDERYSIKDLLNHAFFQEETGVRVELAEEDDGEKIAIKLWLRIEDIKKLKGKYKDNEAIEFSFDLERDVPEDVAQEMVESGYVCEGDHKTMAKAIKDRVSLIKRKREQRQLVREEQEKKKQEESSLKQQVEQSSASQTGIKQLPSASTGIPTASTTSASVSTQVEPEEPEADQHQQLQYQQPSISVLSDGTVDSGQGSSVFTESRVSSQQTVSYGSQHEQAHSTGTVPGHIPSTVQAQSQPHGVYPPSSVAQGQSQGQPSSSSLTGVSSSQPIQHPQQQQGIQQTAPPQQTVQYSLSQTSTSSEATTAQPVSQPQAPQVLPQVSAGKQLPVSQPVPTIQGEPQIPVATQPSVVPVHSGAHFLPVGQPLPTPLLPQYPVSQIPISTPHVSTAQTGFSSLPITMAAGITQPLLTLASSATTAAIPGVSTVVPSQLPTLLQPVTQLPSQVHPQLLQPAVQSMGIPANLGQAAEVPLSSGDVLYQGFPPRLPPQYPGDSNIAPSSNVASVCIHSTVLSPPMPTEVLATPGYFPTVVQPYVESNLLVPMGGVGGQVQVSQPGGSLAQAPTTSSQQAVLESTQGVSQVAPAEPVAVAQPQATQPTTLASSVDSAHSDVASGMSDGNENVPSSSGRHEGRTTKRHYRKSVRSRSRHEKTSRPKLRILNVSNKGDRVVECQLETHNRKMVTFKFDLDGDNPEEIATIMVNNDFILAIERESFVDQVREIIEKADEMLSEDVSVEPEGDQGLESLQGKDDYGFSGSQKLEGEFKQPIPASSMPQQIGIPTSSLTQVVHSAGRRFIVSPVPESRLRESKVFPSEITDTVAASTAQSPGMNLSHSASSLSLQQAFSELRRAQMTEGPNTAPPNFSHTGPTFPVVPPFLSSIAGVPTTAAATAPVPATSSPPNDISTSVIQSEVTVPTEEGIAGVATSTGVVTSGGLPIPPVSESPVLSSVVSSITIPAVVSISTTSPSLQVPTSTSEIVVSSTALYPSVTVSATSASAGGSTATPGPKPPAVVSQQAAGSTTVGATLTSVSTTTSFPSTASQLSIQLSSSTSTPTLAETVVVSAHSLDKTSHSSTTGLAFSLSAPSSSSSPGAGVSSYISQPGGLHPLVIPSVIASTPILPQAAGPTSTPLLPQVPSIPPLVQPVANVPAVQQTLIHSQPQPALLPNQPHTHCPEVDSDTQPKAPGIDDIKTLEEKLRSLFSEHSSSGAQHASVSLETSLVIESTVTPGIPTTAVAPSKLLTSTTSTCLPPTNLPLGTVALPVTPVVTPGQVSTPVSTTTSGVKPGTAPSKPPLTKAPVLPVGTELPAGTLPSEQLPPFPGPSLTQSQQPLEDLDAQLRRTLSPEMITVTSAVGPVSMAAPTAITEAGTQPQKGVSQVKEGPVLATSSGAGVFKMGRFQVSVAADGAQKEGKNKSEDAKSVHFESSTSESSVLSSSSPESTLVKPEPNGITIPGISSDVPESAHKTTASEAKSDTGQPTKVGRFQVTTTANKVGRFSVSKTEDKITDTKKEGPVASPPFMDLEQAVLPAVIPKKEKPELSEPSHLNGPSSDPEAAFLSRDVDDGSGSPHSPHQLSSKSLPSQNLSQSLSNSFNSSYMSSDNESDIEDEDLKLELRRLRDKHLKEIQDLQSRQKHEIESLYTKLGKVPPAVIIPPAAPLSGRRRRPTKSKGSKSSRSSSLGNKSPQLSGNLSGQSAASVLHPQQTLHPPGNIPESGQNQLLQPLKPSPSSDNLYSAFTSDGAISVPSLSAPGQGTSSTNTVGATVNSQAAQAQPPAMTSSRKGTFTDDLHKLVDNWARDAMNLSGRRGSKGHMNYEGPGMARKFSAPGQLCISMTSNLGGSAPISAASATSLGHFTKSMCPPQQYGFPATPFGAQWSGTGGPAPQPLGQFQPVGTASLQNFNISNLQKSISNPPGSNLRTT

SEQ ID NO: 803794 - protein, 2382 aa, Homo sapiens; identical to SEQ ID NO: 803793

SEQ ID NO: 803795 - protein, 2382 aa, Homo sapiens; identical to SEQ ID NO: 803793

SEQ ID NO: 803796 - protein, 2382 aa, Homo sapiens; identical to SEQ ID NO: 803793

SEQ ID NO: 803797 - protein, 2382 aa, Homo sapiens; identical to SEQ ID NO: 803793

SEQ ID NO: 803798 - protein, 2382 aa, Homo sapiens; identical to SEQ ID NO: 803793

SEQ ID NO: 803799 - protein, 2108 aa, Homo sapiens
MSGGAAEKQSSTPGSLFLSPPAPAPKNGSSSDSSVGEKLGAAAADAVTGRTEEYRRRRHTMDKDSRGAAATTTTTEHRFFRRSVICDSNATALELPGLPLSLPQPSIPAAVPQSAPPEPHREETVTATATSQVAQQPPAAAAPGEQAVAGPAPSTVPSSTSKDRPVSQPSLVGSKEEPPPARSGSGGGSAKEPQEERSQQQDDIEELETKAVGMSNDGRFLKFDIEIGRGSFKTVYKGLDTETTVEVAWCELQDRKLTKSERQRFKEEAEMLKGLQHPNIVRFYDSWESTVKGKKCIVLVTELMTSGTLKTYLKRFKVMKIKVLRSWCRQILKGLQFLHTRTPPIIHRDLKCDNIFITGPTGSVKIGDLGLATLKRASFAKSVIGTPEFMAPEMYEEKYDESVDVYAFGMCMLEMATSEYPYSECQNAAQIYRRVTSGVKPASFDKVAIPEVKEIIEGCIRQNKDERYSIKDLLNHAFFQEETGVRVELAEEDDGEKIAIKLWLRIEDIKKLKGKYKDNEAIEFSFDLERDVPEDVAQEMVESGYVCEGDHKTMAKAIKDRVSLIKRKREQRQLVREEQEKKKQEESSLKQQVEQSSASQTGIKQLPSASTGIPTASTTSASVSTQVEPEEPEADQHQQLQYQQPSISVLSDGTVDSGQGSSVFTESRVSSQQTVSYGSQHEQAHSTGTVPGHIPSTVQAQSQPHGVYPPSSVQQGIQQTAPPQQTVQYSLSQTSTSSEATTAQPVSQPQAPQVLPQVSAGKQSTQGVSQVAPAEPVAVAQPQATQPTTLASSVDSAHSDVASGMSDGNENVPSSSGRHEGRTTKRHYRKSVRSRSRHEKTSRPKLRILNVSNKGDRVVECQLETHNRKMVTFKFDLDGDNPEEIATIMVNNDFILAIERESFVDQVREIIEKADEMLSEDVSVEPEGDQGLESLQGKDDYGFSGSQKLEGEFKQPIPASSMPQQIGIPTSSLTQVVHSAGRRFIVSPVPESRLRESKVFPSEITDTVAASTAQSPGMNLSHSASSLSLQQAFSELRRAQMTEGPNTAPPNFSHTGPTFPVVPPFLSSIAGVPTTAAATAPVPATSSPPNDISTSVIQSEVTVPTEEGIAGVATSTGVVTSGGLPIPPVSESPVLSSVVSSITIPAVVSISTTSPSLQVPTSTSEIVVSSTALYPSVTVSATSASAGGSTATPGPKPPAVVSQQAAGSTTVGATLTSVSTTTSFPSTASQLSIQLSSSTSTPTLAETVVVSAHSLDKTSHSSTTGLAFSLSAPSSSSSPGAGVSSYISQPGGLHPLVIPSVIASTPILPQAAGPTSTPLLPQVPSIPPLVQPVANVPAVQQTLIHSQPQPALLPNQPHTHCPEVDSDTQPKAPGIDDIKTLEEKLRSLFSEHSSSGAQHASVSLETSLVIESTVTPGIPTTAVAPSKLLTSTTSTCLPPTNLPLGTVALPVTPVVTPGQVSTPVSTTTSGVKPGTAPSKPPLTKAPVLPVGTELPAGTLPSEQLPPFPGPSLTQSQQPLEDLDAQLRRTLSPEMITVTSAVGPVSMAAPTAITEAGTQPQKGVSQVKEGPVLATSSGAGVFKMGRFQVSVAADGAQKEGKNKSEDAKSVHFESSTSESSVLSSSSPESTLVKPEPNGITIPGISSDVPESAHKTTASEAKSDTGQPTKVGRFQVTTTANKVGRFSVSKTEDKITDTKKEGPVASPPFMDLEQAVLPAVIPKKEKPELSEPSHLNGPSSDPEAAFLSRDVDDGSGSPHSPHQLSSKSLPSQNLSQSLSNSFNSSYMSSDNESDIEDEDLKLELRRLRDKHLKEIQDLQSRQKHEIESLYTKLGKVPPAVIIPPAAPLSGRRRRPTKSKGSKSSRSSSLGNKSPQLSGNLSGQSAASVLHPQQTLHPPGNIPESGQNQLLQPLKPSPSSDNLYSAFTSDGAISVPSLSAPGQGTSSTNTVGATVNSQAAQAQPPAMTSSRKGTFTDDLHKLVDNWARDAMNLSGRRGSKGHMNYEGPGMARKFSAPGQLCISMTSNLGGSAPISAASATSLGHFTKSMCPPQQYGFPATPFGAQWSGTGGPAPQPLGQFQPVGTASLQNFNISNLQKSISNPPGSNLRTT

SEQ ID NO: 803800 - protein, 2382 aa, Homo sapiens; identical to SEQ ID NO: 803793

SEQ ID NO: 803801 - protein, 2229 aa, Homo sapiens
MSGGAAEKQSSTPGSLFLSPPAPAPKNGSSSDSSVGEKLGAAAADAVTGRTEEYRRRRHTMDKDSRGAAATTTTTEHRFFRRSVICDSNATALELPGLPLSLPQPSIPAAVPQSAPPEPHREETVTATATSQVAQQPPAAAAPGEQAVAGPAPSTVPSSTSKDRPVSQPSLVGSKEEPPPARSGSGGGSAKEPQEERSQQQDDIEELETKAVGMSNDGRFLKFDIEIGRGSFKTVYKGLDTETTVEVAWCELQDRKLTKSERQRFKEEAEMLKGLQHPNIVRFYDSWESTVKGKKCIVLVTELMTSGTLKTYLKRFKVMKIKVLRSWCRQILKGLQFLHTRTPPIIHRDLKCDNIFITGPTGSVKIGDLGLATLKRASFAKSVIGTPEFMAPEMYEEKYDESVDVYAFGMCMLEMATSEYPYSECQNAAQIYRRVTSGVKPASFDKVAIPEVKEIIEGCIRQNKDERYSIKDLLNHAFFQEETGVRVELAEEDDGEKIAIKLWLRIEDIKKLKGKYKDNEAIEFSFDLERDVPEDVAQEMVESGYVCEGDHKTMAKAIKDRVSLIKRKREQRQLVREEQEKKKQEESSLKQQVEQSSASQTGIKQLPSASTGIPTASTTSASVSTQVEPEEPEADQHQQLQYQQPSISVLSDGTVDSGQGSSVFTESRVSSQQTVSYGSQHEQAHSTGTVPGHIPSTVQAQSQPHGVYPPSSVAQGQSQGQPSSSSLTGVSSSQPIQHPQQQQGIQQTAPPQQTVQYSLSQTSTSSEATTAQPVSQPQAPQVLPQVSAGKQGFPPRLPPQYPGDSNIAPSSNVASVCIHSTVLSPPMPTEVLATPGYFPTVVQPYVESNLLVPMGGVGGQVQVSQPGGSLAQAPTTSSQQAVLESTQGVSQVAPAEPVAVAQPQATQPTTLASSVDSAHSDVASGMSDGNENVPSSSGRHEGRTTKRHYRKSVRSRSRHEKTSRPKLRILNVSNKGDRVVECQLETHNRKMVTFKFDLDGDNPEEIATIMVNNDFILAIERESFVDQVREIIEKADEMLSEDVSVEPEGDQGLESLQGKDDYGFSGSQKLEGEFKQPIPASSMPQQIGIPTSSLTQVVHSAGRRFIVSPVPESRLRESKVFPSEITDTVAASTAQSPGMNLSHSASSLSLQQAFSELRRAQMTEGPNTAPPNFSHTGPTFPVVPPFLSSIAGVPTTAAATAPVPATSSPPNDISTSVIQSEVTVPTEEGIAGVATSTGVVTSGGLPIPPVSESPVLSSVVSSITIPAVVSISTTSPSLQVPTSTSEIVVSSTALYPSVTVSATSASAGGSTATPGPKPPAVVSQQAAGSTTVGATLTSVSTTTSFPSTASQLSIQLSSSTSTPTLAETVVVSAHSLDKTSHSSTTGLAFSLSAPSSSSSPGAGVSSYISQPGGLHPLVIPSVIASTPILPQAAGPTSTPLLPQVPSIPPLVQPVANVPAVQQTLIHSQPQPALLPNQPHTHCPEVDSDTQPKAPGIDDIKTLEEKLRSLFSEHSSSGAQHASVSLETSLVIESTVTPGIPTTAVAPSKLLTSTTSTCLPPTNLPLGTVALPVTPVVTPGQVSTPVSTTTSGVKPGTAPSKPPLTKAPVLPVGTELPAGTLPSEQLPPFPGPSLTQSQQPLEDLDAQLRRTLSPEMITVTSAVGPVSMAAPTAITEAGTQPQKGVSQVKEGPVLATSSGAGVFKMGRFQVSVAADGAQKEGKNKSEDAKSVHFESSTSESSVLSSSSPESTLVKPEPNGITIPGISSDVPESAHKTTASEAKSDTGQPTKVGRFQVTTTANKVGRFSVSKTEDKITDTKKEGPVASPPFMDLEQAVLPAVIPKKEKPELSEPSHLNGPSSDPEAAFLSRDVDDGSGSPHSPHQLSSKSLPSQNLSQSLSNSFNSSYMSSDNESDIEDEDLKLELRRLRDKHLKEIQDLQSRQKHEIESLYTKLGKVPPAVIIPPAAPLSGRRRRPTKSKGSKSSRSSSLGNKSPQLSGNLSGQSAASVLHPQQTLHPPGNIPESGQNQLLQPLKPSPSSDNLYSAFTSDGAISVPSLSAPGQGTSSTNTVGATVNSQAAQAQPPAMTSSRKGTFTDDLHKLVDNWARDAMNLSGRRGSKGHMNYEGPGMARKFSAPGQLCISMTSNLGGSAPISAASATSLGHFTKSMCPPQQYGFPATPFGAQWSGTGGPAPQPLGQFQPVGTASLQNFNISNLQKSISNPPGSNLRTT

SEQ ID NO: 803802 - protein, 2354 aa, Homo sapiens
MSGGAAEKQSSTPGSLFLSPPAPAPKNGSSSDSSVGEKLGAAAADAVTGRTEEYRRRRHTMDKDSRGAAATTTTTEHRFFRRSVICDSNATALELPGLPLSLPQPSIPAAVPQSAPPEPHREETVTATATSQVAQQPPAAAAPGEQAVAGPAPSTVPSSTSKDRPVSQPSLVGSKEEPPPARSGSGGGSAKEPQEERSQQQDDIEELETKAVGMSNDGRFLKFDIEIGRGSFKTVYKGLDTETTVEVAWCELQDRKLTKSERQRFKEEAEMLKGLQHPNIVRFYDSWESTVKGKKCIVLVTELMTSGTLKTYLKRFKVMKIKVLRSWCRQILKGLQFLHTRTPPIIHRDLKCDNIFITGPTGSVKIGDLGLATLKRASFAKSVIGTPEFMAPEMYEEKYDESVDVYAFGMCMLEMATSEYPYSECQNAAQIYRRVTSGVKPASFDKVAIPEVKEIIEGCIRQNKDERYSIKDLLNHAFFQEETGVRVELAEEDDGEKIAIKLWLRIEDIKKLKGKYKDNEAIEFSFDLERDVPEDVAQEMVESGYVCEGDHKTMAKAIKDRVSLIKRKREQRQLVREEQEKKKQEESSLKQQVEQSSASQTGIKQLPSASTGIPTASTTSASVSTQVEPEEPEADQHQQLQYQQPSISVLSDGTVDSGQGSSVFTESRVSSQQTVSYGSQHEQAHSTGTVPGHIPSTVQAQSQPHGVYPPSSVQQGIQQTAPPQQTVQYSLSQTSTSSEATTAQPVSQPQAPQVLPQVSAGKQLPVSQPVPTIQGEPQIPVATQPSVVPVHSGAHFLPVGQPLPTPLLPQYPVSQIPISTPHVSTAQTGFSSLPITMAAGITQPLLTLASSATTAAIPGVSTVVPSQLPTLLQPVTQLPSQVHPQLLQPAVQSMGIPANLGQAAEVPLSSGDVLYQGFPPRLPPQYPGDSNIAPSSNVASVCIHSTVLSPPMPTEVLATPGYFPTVVQPYVESNLLVPMGGVGGQVQVSQPGGSLAQAPTTSSQQAVLESTQGVSQVAPAEPVAVAQPQATQPTTLASSVDSAHSDVASGMSDGNENVPSSSGRHEGRTTKRHYRKSVRSRSRHEKTSRPKLRILNVSNKGDRVVECQLETHNRKMVTFKFDLDGDNPEEIATIMVNNDFILAIERESFVDQVREIIEKADEMLSEDVSVEPEGDQGLESLQGKDDYGFSGSQKLEGEFKQPIPASSMPQQIGIPTSSLTQVVHSAGRRFIVSPVPESRLRESKVFPSEITDTVAASTAQSPGMNLSHSASSLSLQQAFSELRRAQMTEGPNTAPPNFSHTGPTFPVVPPFLSSIAGVPTTAAATAPVPATSSPPNDISTSVIQSEVTVPTEEGIAGVATSTGVVTSGGLPIPPVSESPVLSSVVSSITIPAVVSISTTSPSLQVPTSTSEIVVSSTALYPSVTVSATSASAGGSTATPGPKPPAVVSQQAAGSTTVGATLTSVSTTTSFPSTASQLSIQLSSSTSTPTLAETVVVSAHSLDKTSHSSTTGLAFSLSAPSSSSSPGAGVSSYISQPGGLHPLVIPSVIASTPILPQAAGPTSTPLLPQVPSIPPLVQPVANVPAVQQTLIHSQPQPALLPNQPHTHCPEVDSDTQPKAPGIDDIKTLEEKLRSLFSEHSSSGAQHASVSLETSLVIESTVTPGIPTTAVAPSKLLTSTTSTCLPPTNLPLGTVALPVTPVVTPGQVSTPVSTTTSGVKPGTAPSKPPLTKAPVLPVGTELPAGTLPSEQLPPFPGPSLTQSQQPLEDLDAQLRRTLSPEMITVTSAVGPVSMAAPTAITEAGTQPQKGVSQVKEGPVLATSSGAGVFKMGRFQVSVAADGAQKEGKNKSEDAKSVHFESSTSESSVLSSSSPESTLVKPEPNGITIPGISSDVPESAHKTTASEAKSDTGQPTKVGRFQVTTTANKVGRFSVSKTEDKITDTKKEGPVASPPFMDLEQAVLPAVIPKKEKPELSEPSHLNGPSSDPEAAFLSRDVDDGSGSPHSPHQLSSKSLPSQNLSQSLSNSFNSSYMSSDNESDIEDEDLKLELRRLRDKHLKEIQDLQSRQKHEIESLYTKLGKVPPAVIIPPAAPLSGRRRRPTKSKGSKSSRSSSLGNKSPQLSGNLSGQSAASVLHPQQTLHPPGNIPESGQNQLLQPLKPSPSSDNLYSAFTSDGAISVPSLSAPGQGTSSTNTVGATVNSQAAQAQPPAMTSSRKGTFTDDLHKLVDNWARDAMNLSGRRGSKGHMNYEGPGMARKFSAPGQLCISMTSNLGGSAPISAASATSLGHFTKSMCPPQQYGFPATPFGAQWSGTGGPAPQPLGQFQPVGTASLQNFNISNLQKSISNPPGSNLRTT

SEQ ID NO: 803803 - protein, 2382 aa, Homo sapiens; identical to SEQ ID NO: 803793

SEQ ID NO: 803804 - protein, 2382 aa, Homo sapiens; identical to SEQ ID NO: 803793

SEQ ID NO: 803805 - protein, 2043 aa, Homo sapiens
MSGGAAEKQSSTPGSLFLSPPAPAPKNGSSSDSSVGEKLGAAAADAVTGRTEEYRRRRHTMDKDSRGAAATTTTTEHRFFRRSVICDSNATALELPGLPLSLPQPSIPAAVPQSAPPEPHREETVTATATSQVAQQPPAAAAPGEQAVAGPAPSTVPSSTSKDRPVSQPSLVGSKEEPPPARSGSGGGSAKEPQEERSQQQDDIEELETKAVGMSNDGRFLKFDIEIGRGSFKTVYKGLDTETTVEVAWCELQDRKLTKSERQRFKEEAEMLKGLQHPNIVRFYDSWESTVKGKKCIVLVTELMTSGTLKTYLKRFKVMKIKVLRSWCRQILKGLQFLHTRTPPIIHRDLKCDNIFITGPTGSVKIGDLGLATLKRASFAKSVIGTPEFMAPEMYEEKYDESVDVYAFGMCMLEMATSEYPYSECQNAAQIYRRVTSGVKPASFDKVAIPEVKEIIEGCIRQNKDERYSIKDLLNHAFFQEETGVRVELAEEDDGEKIAIKLWLRIEDIKKLKGKYKDNEAIEFSFDLERDVPEDVAQEMVESGYVCEGDHKTMAKAIKDRVSLIKRKREQRQLVREEQEKKKQEESSLKQQVEQSSASQTGIKQLPSASTGIPTASTTSASVSTQVEPEEPEADQHQQLQYQQPSISVLSDGTVDSGQGSSVFTESRVSSQQTVSYGSQHEQAHSTGTVPGHIPSTVQAQSQPHGVYPPSSVQQGIQQTAPPQQTVQYSLSQTSTSSEATTAQPVSQPQAPQVLPQVSAGKQSTQGVSQVAPAEPVAVAQPQATQPTTLASSVDSAHSDVASGMSDGNENVPSSSGRHEGRTTKRHYRKSVRSRSRHEKTSRPKLRILNVSNKGDRVVECQLETHNRKMVTFKFDLDGDNPEEIATIMVNNDFILAIERESFVDQVREIIEKADEMLSEDVSVEPEGDQGLESLQGKDDYGFSGSQKLEGEFKQPIPASSMPQQIGIPTSSLTQVVHSAGRRFIVSPVPESRLRESKVFPSEITDTVAASTAQSPGMNLSHSASSLSLQQAFSELRRAQMTEGPNTAPPNFSHTGPTFPVVPPFLSSIAGVPTTAAATAPVPATSSPPNDISTSVIQSEVTVPTEEGIAGVATSTGVVTSGGLPIPPVSESPVLSSVVSSITIPAVVSISTTSPSLQVPTSTSEIVVSSTALYPSVTVSATSASAGGSTATPGPKPPAVVSQQAAGSTTVGATLTSVSTTTSFPSTASQLSIQLSSSTSTPTLAETVVVSAHSLDKTSHSSTTGLAFSLSAPSSSSSPGAGVSSYISQPGGLHPLVIPSVIASTPILPQAAGPTSTPLLPQVPSIPPLVQPVANVPAVQQTLIHSQPQPALLPNQPHTHCPEVDSDTQPKAPGIDDIKTLEEKLRSLFSEHSSSGAQHASVSLETSLVIESTVTPGIPTTAVAPSKLLTSTTSTCLPPTNLPLGTVALPVTPVVTPGQVSTPVSTTTSGVKPGTAPSKPPLTKAPVLPVGTELPAGTLPSEQLPPFPGPSLTQSQQPLEDLDAQLRRTLSPEMITVTSAVGPVSMAAPTAITEAGTQPQKGVSQVKEGPVLATSSGAGVFKMGRFQVSVAADGAQKEGKNKSEDAKSVHFESSTSESSVLSSSSPESTLVKPEPNGITIPGISSDVPESAHKTTASEAKSDTGQPTKVGRFQVTTTANKVGRFSVSKTEDKITDTKKEGPVASPPFMDLEQAVLPAVIPKKEKPELSEPSHLNGPSSDPEAAFLSRDVDDGSGSPHSPHQLSSKSLPSQNLSQSLSNSFNSSYMSSDNESDIEDEDLKLELRRLRDKHLKEIQDLQSRQKHEIESLYTKLGKVPPAVIIPPAAPLSGRRRRPTKSKGSKSSRSSSLGNKSPQLSGTSSTNTVGATVNSQAAQAQPPAMTSSRKGTFTDDLHKLVDNWARDAMNLSGRRGSKGHMNYEGPGMARKFSAPGQLCISMTSNLGGSAPISAASATSLGHFTKSMCPPQQYGFPATPFGAQWSGTGGPAPQPLGQFQPVGTASLQNFNISNLQKSISNPPGSNLRTT

SEQ ID NO: 803806 - protein, 2382 aa, Homo sapiens; identical to SEQ ID NO: 803793

SEQ ID NO: 803807 - protein, 2047 aa, Homo sapiens
MSGGAAEKQSSTPGSLFLSPPAPAPKNGSSSDSSVGEKLGAAAADAVTGRTEEYRRRRHTMDKDSRGAAATTTTTEHRFFRRSVICDSNATALELPGLPLSLPQPSIPAAVPQSAPPEPHREETVTATATSQVAQQPPAQDDIEELETKAVGMSNDGRFLKFDIEIGRGSFKTVYKGLDTETTVEVAWCELQDRKLTKSERQRFKEEAEMLKGLQHPNIVRFYDSWESTVKGKKCIVLVTELMTSGTLKTYLKRFKVMKIKVLRSWCRQILKGLQFLHTRTPPIIHRDLKCDNIFITGPTGSVKIGDLGLATLKRASFAKSVIGTPEFMAPEMYEEKYDESVDVYAFGMCMLEMATSEYPYSECQNAAQIYRRVTSGVKPASFDKVAIPEVKEIIEGCIRQNKDERYSIKDLLNHAFFQEETGVRVELAEEDDGEKIAIKLWLRIEDIKKLKGKYKDNEAIEFSFDLERDVPEDVAQEMVESGYVCEGDHKTMAKAIKDRVSLIKRKREQRQLVREEQEKKKQEESSLKQQVEQSSASQTGIKQLPSASTGIPTASTTSASVSTQVEPEEPEADQHQQLQYQQPSISVLSDGTVDSGQGSSVFTESRVSSQQTVSYGSQHEQAHSTGTVPGHIPSTVQAQSQPHGVYPPSSVQQGIQQTAPPQQTVQYSLSQTSTSSEATTAQPVSQPQAPQVLPQVSAGKQSTQGVSQVAPAEPVAVAQPQATQPTTLASSVDSAHSDVASGMSDGNENVPSSSGRHEGRTTKRHYRKSVRSRSRHEKTSRPKLRILNVSNKGDRVVECQLETHNRKMVTFKFDLDGDNPEEIATIMVNNDFILAIERESFVDQVREIIEKADEMLSEDVSVEPEGDQGLESLQGKDDYGFSGSQKLEGEFKQPIPASSMPQQIGIPTSSLTQVVHSAGRRFIVSPVPESRLRESKVFPSEITDTVAASTAQSPGMNLSHSASSLSLQQAFSELRRAQMTEGPNTAPPNFSHTGPTFPVVPPFLSSIAGVPTTAAATAPVPATSSPPNDISTSVIQSEVTVPTEEGIAGVATSTGVVTSGGLPIPPVSESPVLSSVVSSITIPAVVSISTTSPSLQVPTSTSEIVVSSTALYPSVTVSATSASAGGSTATPGPKPPAVVSQQAAGSTTVGATLTSVSTTTSFPSTASQLSIQLSSSTSTPTLAETVVVSAHSLDKTSHSSTTGLAFSLSAPSSSSSPGAGVSSYISQPGGLHPLVIPSVIASTPILPQAAGPTSTPLLPQVPSIPPLVQPVANVPAVQQTLIHSQPQPALLPNQPHTHCPEVDSDTQPKAPGIDDIKTLEEKLRSLFSEHSSSGAQHASVSLETSLVIESTVTPGIPTTAVAPSKLLTSTTSTCLPPTNLPLGTVALPVTPVVTPGQVSTPVSTTTSGVKPGTAPSKPPLTKAPVLPVGTELPAGTLPSEQLPPFPGPSLTQSQQPLEDLDAQLRRTLSPEMITVTSAVGPVSMAAPTAITEAGTQPQKGVSQVKEGPVLATSSGAGVFKMGRFQVSVAADGAQKEGKNKSEDAKSVHFESSTSESSVLSSSSPESTLVKPEPNGITIPGISSDVPESAHKTTASEAKSDTGQPTKVGRFQVTTTANKVGRFSVSKTEDKITDTKKEGPVASPPFMDLEQAVLPAVIPKKEKPELSEPSHLNGPSSDPEAAFLSRDVDDGSGSPHSPHQLSSKSLPSQNLSQSLSNSFNSSYMSSDNESDIEDEDLKLELRRLRDKHLKEIQDLQSRQKHEIESLYTKLGKVPPAVIIPPAAPLSGRRRRPTKSKGSKSSRSSSLGNKSPQLSGNLSGQSAASVLHPQQTLHPPGNIPESGQNQLLQPLKPSPSSDNLYSAFTSDGAISVPSLSAPGQGTSSTNTVGATVNSQAAQAQPPAMTSSRKGTFTDDLHKLVDNWARDAMNLSGRRGSKGHMNYEGPGMARKFSAPGQLCISMTSNLGGSAPISAASATSLGHFTKSMCPPQQYGFPATPFGAQWSGTGGPAPQPLGQFQPVGTASLQNFNISNLQKSISNPPGSNLRTT

SEQ ID NO: 803808 - protein, 1715 aa, Homo sapiens
PSFSSNKKSVLPFLMDIKKKDFCSVFVIINSHCCCCPQKDCINEGVKPASFDKVAIPEVKEIIEGCIRQNKDERYSIKDLLNHAFFQEETGVRVELAEEDDGEKIAIKLWLRIEDIKKLKGKYKDNEAIEFSFDLERDVPEDVAQEMVESGYVCEGDHKTMAKAIKDRVSLIKRKREQRQLVREEQEKKKQEESSLKQQVEQSSASQTGIKQLPSASTGIPTASTTSASVSTQVEPEEPEADQHQQLQYQQPSISVLSDGTVDSGQGSSVFTESRVSSQQTVSYGSQHEQAHSTGTVPGHIPSTVQAQSQPHGVYPPSSVQQGIQQTAPPQQTVQYSLSQTSTSSEATTAQPVSQPQAPQVLPQVSAGKQSTQGVSQVAPAEPVAVAQPQATQPTTLASSVDSAHSDVASGMSDGNENVPSSSGRHEGRTTKRHYRKSVRSRSRHEKTSRPKLRILNVSNKGDRVVECQLETHNRKMVTFKFDLDGDNPEEIATIMVNNDFILAIERESFVDQVREIIEKADEMLSEDVSVEPEGDQGLESLQGKDDYGFSGSQKLEGEFKQPIPASSMPQQIGIPTSSLTQVVHSAGRRFIVSPVPESRLRESKVFPSEITDTVAASTAQSPGMNLSHSASSLSLQQAFSELRRAQMTEGPNTAPPNFSHTGPTFPVVPPFLSSIAGVPTTAAATAPVPATSSPPNDISTSVIQSEVTVPTEEGIAGVATSTGVVTSGGLPIPPVSESPVLSSVVSSITIPAVVSISTTSPSLQVPTSTSEIVVSSTALYPSVTVSATSASAGGSTATPGPKPPAVVSQQAAGSTTVGATLTSVSTTTSFPSTASQLSIQLSSSTSTPTLAETVVVSAHSLDKTSHSSTTGLAFSLSAPSSSSSPGAGVSSYISQPGGLHPLVIPSVIASTPILPQAAGPTSTPLLPQVPSIPPLVQPVANVPAVQQTLIHSQPQPALLPNQPHTHCPEVDSDTQPKAPGIDDIKTLEEKLRSLFSEHSSSGAQHASVSLETSLVIESTVTPGIPTTAVAPSKLLTSTTSTCLPPTNLPLGTVALPVTPVVTPGQVSTPVSTTTSGVKPGTAPSKPPLTKAPVLPVGTELPAGTLPSEQLPPFPGPSLTQSQQPLEDLDAQLRRTLSPEMITVTSAVGPVSMAAPTAITEAGTQPQKGVSQVKEGPVLATSSGAGVFKMGRFQVSVAADGAQKEGKNKSEDAKSVHFESSTSESSVLSSSSPESTLVKPEPNGITIPGISSDVPESAHKTTASEAKSDTGQPTKVGRFQVTTTANKVGRFSVSKTEDKITDTKKEGPVASPPFMDLEQAVLPAVIPKKEKPELSEPSHLNGPSSDPEAAFLSRDVDDGSGSPHSPHQLSSKSLPSQNLSQSLSNSFNSSYMSSDNESDIEDEDLKLELRRLRDKHLKEIQDLQSRQKHEIESLYTKLGKVPPAVIIPPAAPLSGRRRRPTKSKGSKSSRSSSLGNKSPQLSGNLSGQSAASVLHPQQTLHPPGNIPESGQNQLLQPLKPSPSSDNLYSAFTSDGAISVPSLSAPGQGTSSTNTVGATVNSQAAQAQPPAMTSSRKGTFTDDLHKLVDNWARDAMNLSGRRGSKGHMNYEGPGMARKFSAPGQLCISMTSNLGGSAPISAASATSLGHFTKSMCPPQQYGFPATPFGAQWSGTGGPAPQPLGQFQPVGTASLQNFNISNLQKSISNPPGSNLRTT

SEQ ID NO: 803809 - protein, 1581 aa, Homo sapiens
SRGSRAENVAQEMVESGYVCEGDHKTMAKAIKDRVSLIKRKREQRQLVREEQEKKKQEESSLKQQVEQSSASQTGIKQLPSASTGIPTASTTSASVSTQVEPEEPEADQHQQLQYQQPSISVLSDGTVDSGQGSSVFTESRVSSQQTVSYGSQHEQAHSTGTVPGHIPSTVQAQSQPHGVYPPSSVQQGIQQTAPPQQTVQYSLSQTSTSSEATTAQPVSQPQAPQVLPQVSAGKQSTQGVSQVAPAEPVAVAQPQATQPTTLASSVDSAHSDVASGMSDGNENVPSSSGRHEGRTTKRHYRKSVRSRSRHEKTSRPKLRILNVSNKGDRVVECQLETHNRKMVTFKFDLDGDNPEEIATIMVNNDFILAIERESFVDQVREIIEKADEMLSEDVSVEPEGDQGLESLQGKDDYGFSGSQKLEGEFKQPIPASSMPQQIGIPTSSLTQVVHSAGRRFIVSPVPESRLRESKVFPSEITDTVAASTAQSPGMNLSHSASSLSLQQAFSELRRAQMTEGPNTAPPNFSHTGPTFPVVPPFLSSIAGVPTTAAATAPVPATSSPPNDISTSVIQSEVTVPTEEGIAGVATSTGVVTSGGLPIPPVSESPVLSSVVSSITIPAVVSISTTSPSLQVPTSTSEIVVSSTALYPSVTVSATSASAGGSTATPGPKPPAVVSQQAAGSTTVGATLTSVSTTTSFPSTASQLSIQLSSSTSTPTLAETVVVSAHSLDKTSHSSTTGLAFSLSAPSSSSSPGAGVSSYISQPGGLHPLVIPSVIASTPILPQAAGPTSTPLLPQVPSIPPLVQPVANVPAVQQTLIHSQPQPALLPNQPHTHCPEVDSDTQPKAPGIDDIKTLEEKLRSLFSEHSSSGAQHASVSLETSLVIESTVTPGIPTTAVAPSKLLTSTTSTCLPPTNLPLGTVALPVTPVVTPGQVSTPVSTTTSGVKPGTAPSKPPLTKAPVLPVGTELPAGTLPSEQLPPFPGPSLTQSQQPLEDLDAQLRRTLSPEMITVTSAVGPVSMAAPTAITEAGTQPQKGVSQVKEGPVLATSSGAGVFKMGRFQVSVAADGAQKEGKNKSEDAKSVHFESSTSESSVLSSSSPESTLVKPEPNGITIPGISSDVPESAHKTTASEAKSDTGQPTKVGRFQVTTTANKVGRFSVSKTEDKITDTKKEGPVASPPFMDLEQAVLPAVIPKKEKPELSEPSHLNGPSSDPEAAFLSRDVDDGSGSPHSPHQLSSKSLPSQNLSQSLSNSFNSSYMSSDNESDIEDEDLKLELRRLRDKHLKEIQDLQSRQKHEIESLYTKLGKVPPAVIIPPAAPLSGRRRRPTKSKGSKSSRSSSLGNKSPQLSGNLSGQSAASVLHPQQTLHPPGNIPESGQNQLLQPLKPSPSSDNLYSAFTSDGAISVPSLSAPGQGTSSTNTVGATVNSQAAQAQPPAMTSSRKGTFTDDLHKLVDNWARDAMNLSGRRGSKGHMNYEGPGMARKFSAPGQLCISMTSNLGGSAPISAASATSLGHFTKSMCPPQQYGFPATPFGAQWSGTGGPAPQPLGQFQPVGTASLQNFNISNLQKSISNPPGSNLRTT

SEQ ID NO: 803810 - protein, 1304 aa, Homo sapiens
MSDGNENVPSSSGRHEGRTTKRHYRKSVRSRSRHEKTSRPKLRILNVSNKGDRVVECQLETHNRKMVTFKFDLDGDNPEEIATIMVNNDFILAIERESFVDQVREIIEKADEMLSEDVSVEPEGDQGLESLQGKDDYGFSGSQKLEGEFKQPIPASSMPQQIGIPTSSLTQVVHSAGRRFIVSPVPESRLRESKVFPSEITDTVAASTAQSPGMNLSHSASSLSLQQAFSELRRAQMTEGPNTAPPNFSHTGPTFPVVPPFLSSIAGVPTTAAATAPVPATSSPPNDISTSVIQSEVTVPTEEGIAGVATSTGVVTSGGLPIPPVSESPVLSSVVSSITIPAVVSISTTSPSLQVPTSTSEIVVSSTALYPSVTVSATSASAGGSTATPGPKPPAVVSQQAAGSTTVGATLTSVSTTTSFPSTASQLSIQLSSSTSTPTLAETVVVSAHSLDKTSHSSTTGLAFSLSAPSSSSSPGAGVSSYISQPGGLHPLVIPSVIASTPILPQAAGPTSTPLLPQVPSIPPLVQPVANVPAVQQTLIHSQPQPALLPNQPHTHCPEVDSDTQPKAPGIDDIKTLEEKLRSLFSEHSSSGAQHASVSLETSLVIESTVTPGIPTTAVAPSKLLTSTTSTCLPPTNLPLGTVALPVTPVVTPGQVSTPVSTTTSGVKPGTAPSKPPLTKAPVLPVGTELPAGTLPSEQLPPFPGPSLTQSQQPLEDLDAQLRRTLSPEMITVTSAVGPVSMAAPTAITEAGTQPQKGVSQVKEGPVLATSSGAGVFKMGRFQVSVAADGAQKEGKNKSEDAKSVHFESSTSESSVLSSSSPESTLVKPEPNGITIPGISSDVPESAHKTTASEAKSDTGQPTKVGRFQVTTTANKVGRFSVSKTEDKITDTKKEGPVASPPFMDLEQAVLPAVIPKKEKPELSEPSHLNGPSSDPEAAFLSRDVDDGSGSPHSPHQLSSKSLPSQNLSQSLSNSFNSSYMSSDNESDIEDEDLKLELRRLRDKHLKEIQDLQSRQKHEIESLYTKLGKVPPAVIIPPAAPLSGRRRRPTKSKGSKSSRSSSLGNKSPQLSGNLSGQSAASVLHPQQTLHPPGNIPESGQNQLLQPLKPSPSSDNLYSAFTSDGAISVPSLSAPGQGTSSTNTVGATVNSQAAQAQPPAMTSSRKGTFTDDLHKLVDNWARDAMNLSGRRGSKGHMNYEGPGMARKFSAPGQLCISMTSNLGGSAPISAASATSLGHFTKSMCPPQQYGFPATPFGAQWSGTGGPAPQPLGQFQPVGTASLQNFNISNLQKSISNPPGSNLRTT

SEQ ID NO: 803811 - protein, 1304 aa, Homo sapiens; identical to SEQ ID NO: 803810

SEQ ID NO: 803812 - protein, 1411 aa, Homo sapiens
SKYYLPSSQPIQHPQQQQGIQQTAPPQQTVQYSLSQTSTSSEATTAQPVSQPQAPQVLPQVSAGKQSTQGVSQVAPAEPVAVAQPQATQPTTLASSVDSAHSDVASGMSDGNENVPSSSGRHEGRTTKRHYRKSVRSRSRHEKTSRPKLRILNVSNKGDRVVECQLETHNRKMVTFKFDLDGDNPEEIATIMVNNDFILAIERESFVDQVREIIEKADEMLSEDVSVEPEGDQGLESLQGKDDYGFSGSQKLEGEFKQPIPASSMPQQIGIPTSSLTQVVHSAGRRFIVSPVPESRLRESKVFPSEITDTVAASTAQSPGMNLSHSASSLSLQQAFSELRRAQMTEGPNTAPPNFSHTGPTFPVVPPFLSSIAGVPTTAAATAPVPATSSPPNDISTSVIQSEVTVPTEEGIAGVATSTGVVTSGGLPIPPVSESPVLSSVVSSITIPAVVSISTTSPSLQVPTSTSEIVVSSTALYPSVTVSATSASAGGSTATPGPKPPAVVSQQAAGSTTVGATLTSVSTTTSFPSTASQLSIQLSSSTSTPTLAETVVVSAHSLDKTSHSSTTGLAFSLSAPSSSSSPGAGVSSYISQPGGLHPLVIPSVIASTPILPQAAGPTSTPLLPQVPSIPPLVQPVANVPAVQQTLIHSQPQPALLPNQPHTHCPEVDSDTQPKAPGIDDIKTLEEKLRSLFSEHSSSGAQHASVSLETSLVIESTVTPGIPTTAVAPSKLLTSTTSTCLPPTNLPLGTVALPVTPVVTPGQVSTPVSTTTSGVKPGTAPSKPPLTKAPVLPVGTELPAGTLPSEQLPPFPGPSLTQSQQPLEDLDAQLRRTLSPEMITVTSAVGPVSMAAPTAITEAGTQPQKGVSQVKEGPVLATSSGAGVFKMGRFQVSVAADGAQKEGKNKSEDAKSVHFESSTSESSVLSSSSPESTLVKPEPNGITIPGISSDVPESAHKTTASEAKSDTGQPTKVGRFQVTTTANKVGRFSVSKTEDKITDTKKEGPVASPPFMDLEQAVLPAVIPKKEKPELSEPSHLNGPSSDPEAAFLSRDVDDGSGSPHSPHQLSSKSLPSQNLSQSLSNSFNSSYMSSDNESDIEDEDLKLELRRLRDKHLKEIQDLQSRQKHEIESLYTKLGKVPPAVIIPPAAPLSGRRRRPTKSKGSKSSRSSSLGNKSPQLSGNLSGQSAASVLHPQQTLHPPGNIPESGQNQLLQPLKPSPSSDNLYSAFTSDGAISVPSLSAPGQGTSSTNTVGATVNSQAAQAQPPAMTSSRKGTFTDDLHKLVDNWARDAMNLSGRRGSKGHMNYEGPGMARKFSAPGQLCISMTSNLGGSAPISAASATSLGHFTKSMCPPQQYGFPATPFGAQWSGTGGPAPQPLGQFQPVGTASLQNFNISNLQKSISNPPGSNLRTT

SEQ ID NO: 803813 - protein, 1518 aa, Homo sapiens
MAAGITQPLLTLASSATTAAIPGVSTVVPSQLPTLLQPVTQLPSQVHPQLLQPAVQSMGIPANLGQAAEVPLSSGDVLYQGFPPRLPPQYPGDSNIAPSSNVASVCIHSTVLSPPMPTEVLATPGYFPTVVQPYVESNLLVPMGGVGGQVQVSQPGGSLAQAPTTSSQQAVLESTQGVSQVAPAEPVAVAQPQATQPTTLASSVDSAHSDVASGMSDGNENVPSSSGRHEGRTTKRHYRKSVRSRSRHEKTSRPKLRILNVSNKGDRVVECQLETHNRKMVTFKFDLDGDNPEEIATIMVNNDFILAIERESFVDQVREIIEKADEMLSEDVSVEPEGDQGLESLQGKDDYGFSGSQKLEGEFKQPIPASSMPQQIGIPTSSLTQVVHSAGRRFIVSPVPESRLRESKVFPSEITDTVAASTAQSPGMNLSHSASSLSLQQAFSELRRAQMTEGPNTAPPNFSHTGPTFPVVPPFLSSIAGVPTTAAATAPVPATSSPPNDISTSVIQSEVTVPTEEGIAGVATSTGVVTSGGLPIPPVSESPVLSSVVSSITIPAVVSISTTSPSLQVPTSTSEIVVSSTALYPSVTVSATSASAGGSTATPGPKPPAVVSQQAAGSTTVGATLTSVSTTTSFPSTASQLSIQLSSSTSTPTLAETVVVSAHSLDKTSHSSTTGLAFSLSAPSSSSSPGAGVSSYISQPGGLHPLVIPSVIASTPILPQAAGPTSTPLLPQVPSIPPLVQPVANVPAVQQTLIHSQPQPALLPNQPHTHCPEVDSDTQPKAPGIDDIKTLEEKLRSLFSEHSSSGAQHASVSLETSLVIESTVTPGIPTTAVAPSKLLTSTTSTCLPPTNLPLGTVALPVTPVVTPGQVSTPVSTTTSGVKPGTAPSKPPLTKAPVLPVGTELPAGTLPSEQLPPFPGPSLTQSQQPLEDLDAQLRRTLSPEMITVTSAVGPVSMAAPTAITEAGTQPQKGVSQVKEGPVLATSSGAGVFKMGRFQVSVAADGAQKEGKNKSEDAKSVHFESSTSESSVLSSSSPESTLVKPEPNGITIPGISSDVPESAHKTTASEAKSDTGQPTKVGRFQVTTTANKVGRFSVSKTEDKITDTKKEGPVASPPFMDLEQAVLPAVIPKKEKPELSEPSHLNGPSSDPEAAFLSRDVDDGSGSPHSPHQLSSKSLPSQNLSQSLSNSFNSSYMSSDNESDIEDEDLKLELRRLRDKHLKEIQDLQSRQKHEIESLYTKLGKVPPAVIIPPAAPLSGRRRRPTKSKGSKSSRSSSLGNKSPQLSGNLSGQSAASVLHPQQTLHPPGNIPESGQNQLLQPLKPSPSSDNLYSAFTSDGAISVPSLSAPGQGTSSTNTVGATVNSQAAQAQPPAMTSSRKGTFTDDLHKLVDNWARDAMNLSGRRGSKGHMNYEGPGMARKFSAPGQLCISMTSNLGGSAPISAASATSLGHFTKSMCPPQQYGFPATPFGAQWSGTGGPAPQPLGQFQPVGTASLQNFNISNLQKSISNPPGSNLRTT

SEQ ID NO: 803814 - protein, 1244 aa, Homo sapiens
MLSRVGVEEVFHQPAAEQRCGAWSSSRSTQTVYSAVSHLDGSSSRSRHPPGSPAAGQQPRASERVSGLESLQGKDDYGFSGSQKLEGEFKQPIPASSMPQQIGIPTSSLTQVVHSAGRRFIVSPVPESRLRESKVFPSEITDTVAASTAQSPGMNLSHSASSLSLQQAFSELRRAQMTEGPNTAPPNFSHTGPTFPVVPPFLSSIAGVPTTAAATAPVPATSSPPNDISTSVIQSEVTVPTEEGIAGVATSTGVVTSGGLPIPPVSESPVLSSVVSSITIPAVVSISTTSPSLQVPTSTSEIVVSSTALYPSVTVSATSASAGGSTATPGPKPPAVVSQQAAGSTTVGATLTSVSTTTSFPSTASQLSIQLSSSTSTPTLAETVVVSAHSLDKTSHSSTTGLAFSLSAPSSSSSPGAGVSSYISQPGGLHPLVIPSVIASTPILPQAAGPTSTPLLPQVPSIPPLVQPVANVPAVQQTLIHSQPQPALLPNQPHTHCPEVDSDTQPKAPGIDDIKTLEEKLRSLFSEHSSSGAQHASVSLETSLVIESTVTPGIPTTAVAPSKLLTSTTSTCLPPTNLPLGTVALPVTPVVTPGQVSTPVSTTTSGVKPGTAPSKPPLTKAPVLPVGTELPAGTLPSEQLPPFPGPSLTQSQQPLEDLDAQLRRTLSPEMITVTSAVGPVSMAAPTAITEAGTQPQKGVSQVKEGPVLATSSGAGVFKMGRFQVSVAADGAQKEGKNKSEDAKSVHFESSTSESSVLSSSSPESTLVKPEPNGITIPGISSDVPESAHKTTASEAKSDTGQPTKVGRFQVTTTANKVGRFSVSKTEDKITDTKKEGPVASPPFMDLEQAVLPAVIPKKEKPELSEPSHLNGPSSDPEAAFLSRDVDDGSGSPHSPHQLSSKSLPSQNLSQSLSNSFNSSYMSSDNESDIEDEDLKLELRRLRDKHLKEIQDLQSRQKHEIESLYTKLGKVPPAVIIPPAAPLSGRRRRPTKSKGSKSSRSSSLGNKSPQLSGNLSGQSAASVLHPQQTLHPPGNIPESGQNQLLQPLKPSPSSDNLYSAFTSDGAISVPSLSAPGQGTSSTNTVGATVNSQAAQAQPPAMTSSRKGTFTDDLHKLVDNWARDAMNLSGRRGSKGHMNYEGPGMARKFSAPGQLCISMTSNLGGSAPISAASATSLGHFTKSMCPPQQYGFPATPFGAQWSGTGGPAPQPLGQFQPVGTASLQNFNISNLQKSISNPPGSNLRTT

SEQ ID NO: 803815 - protein, 982 aa, Homo sapiens
  misc_feature (2)..(2): Xaa can be any naturally occurring amino acid
HXISTPSVTYSVHISHILSTPSVSTPSVTSVRTPSVTSEIVVSSTALYPSVTVSATSASAGGSTATPGPKPPAVVSQQAAGSTTVGATLTSVSTTTSFPSTASQLSIQLSSSTSTPTLAETVVVSAHSLDKTSHSSTTGLAFSLSAPSSSSSPGAGVSSYISQPGGLHPLVIPSVIASTPILPQAAGPTSTPLLPQVPSIPPLVQPVANVPAVQQTLIHSQPQPALLPNQPHTHCPEVDSDTQPKAPGIDDIKTLEEKLRSLFSEHSSSGAQHASVSLETSLVIESTVTPGIPTTAVAPSKLLTSTTSTCLPPTNLPLGTVALPVTPVVTPGQVSTPVSTTTSGVKPGTAPSKPPLTKAPVLPVGTELPAGTLPSEQLPPFPGPSLTQSQQPLEDLDAQLRRTLSPEMITVTSAVGPVSMAAPTAITEAGTQPQKGVSQVKEGPVLATSSGAGVFKMGRFQVSVAADGAQKEGKNKSEDAKSVHFESSTSESSVLSSSSPESTLVKPEPNGITIPGISSDVPESAHKTTASEAKSDTGQPTKVGRFQVTTTANKVGRFSVSKTEDKITDTKKEGPVASPPFMDLEQAVLPAVIPKKEKPELSEPSHLNGPSSDPEAAFLSRDVDDGSGSPHSPHQLSSKSLPSQNLSQSLSNSFNSSYMSSDNESDIEDEDLKLELRRLRDKHLKEIQDLQSRQKHEIESLYTKLGKVPPAVIIPPAAPLSGRRRRPTKSKGSKSSRSSSLGNKSPQLSGNLSGQSAASVLHPQQTLHPPGNIPESGQNQLLQPLKPSPSSDNLYSAFTSDGAISVPSLSAPGQGTSSTNTVGATVNSQAAQAQPPAMTSSRKGTFTDDLHKLVDNWARDAMNLSGRRGSKGHMNYEGPGMARKFSAPGQLCISMTSNLGGSAPISAASATSLGHFTKSMCPPQQYGFPATPFGAQWSGTGGPAPQPLGQFQPVGTASLQNFNISNLQKSISNPPGSNLRTT

SEQ ID NO: 803816 - protein, 931 aa, Homo sapiens
MLIIRLVLYRGSTATPGPKPPAVVSQQAAGSTTVGATLTSVSTTTSFPSTASQLSIQLSSSTSTPTLAETVVVSAHSLDKTSHSSTTGLAFSLSAPSSSSSPGAGVSSYISQPGGLHPLVIPSVIASTPILPQAAGPTSTPLLPQVPSIPPLVQPVANVPAVQQTLIHSQPQPALLPNQPHTHCPEVDSDTQPKAPGIDDIKTLEEKLRSLFSEHSSSGAQHASVSLETSLVIESTVTPGIPTTAVAPSKLLTSTTSTCLPPTNLPLGTVALPVTPVVTPGQVSTPVSTTTSGVKPGTAPSKPPLTKAPVLPVGTELPAGTLPSEQLPPFPGPSLTQSQQPLEDLDAQLRRTLSPEMITVTSAVGPVSMAAPTAITEAGTQPQKGVSQVKEGPVLATSSGAGVFKMGRFQVSVAADGAQKEGKNKSEDAKSVHFESSTSESSVLSSSSPESTLVKPEPNGITIPGISSDVPESAHKTTASEAKSDTGQPTKVGRFQVTTTANKVGRFSVSKTEDKITDTKKEGPVASPPFMDLEQAVLPAVIPKKEKPELSEPSHLNGPSSDPEAAFLSRDVDDGSGSPHSPHQLSSKSLPSQNLSQSLSNSFNSSYMSSDNESDIEDEDLKLELRRLRDKHLKEIQDLQSRQKHEIESLYTKLGKVPPAVIIPPAAPLSGRRRRPTKSKGSKSSRSSSLGNKSPQLSGNLSGQSAASVLHPQQTLHPPGNIPESGQNQLLQPLKPSPSSDNLYSAFTSDGAISVPSLSAPGQGTSSTNTVGATVNSQAAQAQPPAMTSSRKGTFTDDLHKLVDNWARDAMNLSGRRGSKGHMNYEGPGMARKFSAPGQLCISMTSNLGGSAPISAASATSLGHFTKSMCPPQQYGFPATPFGAQWSGTGGPAPQPLGQFQPVGTASLQNFNISNLQKSISNPPGSNLRTT

SEQ ID NO: 803817 - protein, 788 aa, Homo sapiens
HARDPFCTLVQPVANVPAVQQTLIHSQPQPALLPNQPHTHCPEVDSDTQPKAPGIDDIKTLEEKLRSLFSEHSSSGAQHASVSLETSLVIESTVTPGIPTTAVAPSKLLTSTTSTCLPPTNLPLGTVALPVTPVVTPGQVSTPVSTTTSGVKPGTAPSKPPLTKAPVLPVGTELPAGTLPSEQLPPFPGPSLTQSQQPLEDLDAQLRRTLSPEMITVTSAVGPVSMAAPTAITEAGTQPQKGVSQVKEGPVLATSSGAGVFKMGRFQVSVAADGAQKEGKNKSEDAKSVHFESSTSESSVLSSSSPESTLVKPEPNGITIPGISSDVPESAHKTTASEAKSDTGQPTKVGRFQVTTTANKVGRFSVSKTEDKITDTKKEGPVASPPFMDLEQAVLPAVIPKKEKPELSEPSHLNGPSSDPEAAFLSRDVDDGSGSPHSPHQLSSKSLPSQNLSQSLSNSFNSSYMSSDNESDIEDEDLKLELRRLRDKHLKEIQDLQSRQKHEIESLYTKLGKVPPAVIIPPAAPLSGRRRRPTKSKGSKSSRSSSLGNKSPQLSGNLSGQSAASVLHPQQTLHPPGNIPESGQNQLLQPLKPSPSSDNLYSAFTSDGAISVPSLSAPGQGTSSTNTVGATVNSQAAQAQPPAMTSSRKGTFTDDLHKLVDNWARDAMNLSGRRGSKGHMNYEGPGMARKFSAPGQLCISMTSNLGGSAPISAASATSLGHFTKSMCPPQQYGFPATPFGAQWSGTGGPAPQPLGQFQPVGTASLQNFNISNLQKSISNPPGSNLRTT

SEQ ID NO: 803818 - protein, 145 aa, Homo sapiens
MTSSRKGTFTDDLHKLVDNWARDAMNLSGRRGSKGHMNYEGPGMARKFSAPGQLCISMTSNLGGSAPISAASATSLGHFTKSMCPPQQYGFPATPFGAQWSGTGGPAPQPLGQFQPVGTASLQNFNISNLQKSISNPPGSNLRTT

SEQ ID NO: 803819 - protein, 314 aa, Homo sapiens
  misc_feature (31)..(31): Xaa can be any naturally occurring amino acid
  misc_feature (64)..(64): Xaa can be any naturally occurring amino acid
MTSHDIVNLVAPRMTGLLRICTTGKKEQYLXRTTSNKAIEGKDYTLLTISKVEMCHMEEIEKKXPTSLYRGNPCVLGPGVQAIVSRWRPPQGRTRIRNRPWQRIAMSSGQNQLLQPLKPSPSSDNLYSAFTSDGAISVPSLSAPGQGTSSTNTVGATVNSQAAQAQPPAMTSSRKGTFTDDLHKLVDNWARDAMNLSGRRGSKGHMNYEGPGMARKFSAPGQLCISMTSNLGGSAPISAASATSLGHFTKSMCPPQQYGFPATPFGAQWSGTGGPAPQPLGQFQPVGTASLQNFNISNLQKSISNPPGSNLRTT

SEQ ID NO: 803820 - protein, 171 aa, Homo sapiens
  misc_feature (7)..(7): Xaa can be any naturally occurring amino acid
PPPPLMXCHYVGATVNSQAAQAQPPAMTSSRKGTFTDDLHKLVDNWARDAMNLSGRRGSKGHMNYEGPGMARKFSAPGQLCISMTSNLGGSAPISAASATSLGHFTKSMCPPQQYGFPATPFGAQWSGTGGPAPQPLGQFQPVGTASLQNFNISNLQKSISNPPGSNLRTT

SEQ ID NO: 803821 - protein, 2066 aa, Homo sapiens
MSGGAAEKQSSTPGSLFLSPPAPAPKNGSSSDSSVGEKLGAAAADAVTGRTEEYRRRRHTMDKDSRGAAATTTTTEHRFFRRSVICDSNATALELPGLPLSLPQPSIPAAVPQSAPPEPHREETVTATATSQVAQQPPAAAAPGEQAVAGPAPSTVPSSTSKDRPVSQPSLVGSKEEPPPARSGSGGGSAKEPQEERSQQQDDIEELETKAVGMSNDGRFLKFDIEIGRGSFKTVYKGLDTETTVEVAWCELQDRKLTKSERQRFKEEAEMLKGLQHPNIVRFYDSWESTVKGKKCIVLVTELMTSGTLKTYLKRFKVMKIKVLRSWCRQILKGLQFLHTRTPPIIHRDLKCDNIFITGPTGSVKIGDLGLATLKRASFAKSVIGTPEFMAPEMYEEKYDESVDVYAFGMCMLEMATSEYPYSECQNAAQIYRRVTSGVKPASFDKVAIPEVKEIIEGCIRQNKDERYSIKDLLNHAFFQEETGVRVELAEEDDGEKIAIKLWLRIEDIKKLKGKYKDNEAIEFSFDLERDVPEDVAQEMVESGYVCEGDHKTMAKAIKDRVSLIKRKREQRQLVREEQEKKKQEESSLKQQVEQSSASQTGIKQLPSASTGIPTASTTSASVSTQVEPEEPEADQHQQLQYQQPSISVLSDGTVDSGQGSSVFTESRVSSQQTVSYGSQHEQAHSTGTVPGHIPSTVQAQSQPHGVYPPSSVQQGIQQTAPPQQTVQYSLSQTSTSSEATTAQPVSQPQAPQVLPQVSAGKQSTQGVSQVAPAEPVAVAQPQATQPTTLASSVDSAHSDVASGMSDGNENVPSSSGRHEGRTTKRHYRKSVRSRSRHEKTSRPKLRILNVSNKGDRVVECQLETHNRKMVTFKFDLDGDNPEEIATIMVNNDFILAIERESFVDQVREIIEKADEMLSEDVSVEPEGDQGLESLQGKDDYGFSGSQKLEGEFKQPIPASSMPQQIGIPTSSLTQVVHSAGRRFIVSPVPESRLRESKVFPSEITDTVAASTAQSPGMNLSHSASSLSLQQAFSELRRAQMTEGPNTAPPNFSHTGPTFPVVPPFLSSIAGVPTTAAATAPVPATSSPPNDISTSVIQSEVTVPTEEGIAGVATSTGVVTSGGLPIPPVSESPVLSSVVSSITIPAVVSISTTSPSLQVPTSTSEIVVSSTALYPSVTVSATSASAGGSTATPGPKPPAVVSQQAAGSTTVGATLTSVSTTTSFPSTASQLSIQLSSSTSTPTLAETVVVSAHSLDKTSHSSTTGLAFSLSAPSSSSSPGAGVSSYISQPGGLHPLVIPSVIASTPILPQAAGPTSTPLLPQVPSIPPLVQPVANVPAVQQTLIHSQPQPALLPNQPHTHCPEVDSDTQPKAPGIDDIKTLEEKLRSLFSEHSSSGAQHASVSLETSLVIESTVTPGIPTTAVAPSKLLTSTTSTCLPPTNLPLGTVALPVTPVVTPGQVSTPVSTTTSGVKPGTAPSKPPLTKAPVLPVGTELPAGTLPSEQLPPFPGPSLTQSQQPLEDLDAQLRRTLSPEMITVTSAVGPVSMAAPTAITEAGTQPQKGVSQVKEGPVLATSSGAGVFKMGRFQVSVAADGAQKEGKNKSEDAKSVHFESSTSESSVLSSSSPESTLVKPEPNGITIPGISSDVPESAHKTTASEAKSDTGQPTKVGRFQVTTTANKVGRFSVSKTEDKITDTKKEGPVASPPFMDLEQAVLPAVIPKKEKPELSEPSHLNGPSSDPEAAFLSRDVDDGSGSPHSPHQLSSKSLPSQNLSQSLSNSFNSSYMSSDNESDIEDEDLKLELRRLRDKHLKEIQDLQSRQKHEIESLYTKLGKVPPAVIIPPAAPLSGRRRRPTKSKGSKSSRSSSLGNKSPQLSGNLSGQSAASVLHPQQTLHPPGNIPESGQNQLLQPLKPSPSSDNLYSAFTSDGAISVPSLSAPGQGTSSTNTVGATVNSQAAQAQPPAMTSSRKGTFTDDLHKLVDNWARDAMNLSGRRGSKGHMNYEGPGMARKFSAPGQLCISKSETYFIPEEQWSLMQHIIICYLGLIIILTSFHSYTKKVRTGVIYC

SEQ ID NO: 803822 - protein, 1951 aa, Homo sapiens
MSGGAAEKQSSTPGSLFLSPPAPAPKNGSSSDSSVGEKLGAAAADAVTGRTEEYRRRRHTMDKDSRGAAATTTTTEHRFFRRSVICDSNATALELPGLPLSLPQPSIPAAVPQSAPPEPHREETVTATATSQVAQQPPAAAAPGEQAVAGPAPSTVPSSTSKDRPVSQPSLVGSKEEPPPARSGSGGGSAKEPQEERSQQQDDIEELETKAVGMSNDGRFLKFDIEIGRGSFKTVYKGLDTETTVEVAWCELQDRKLTKSERQRFKEEAEMLKGLQHPNIVRFYDSWESTVKGKKCIVLVTELMTSGTLKTYLKRFKVMKIKVLRSWCRQILKGLQFLHTRTPPIIHRDLKCDNIFITGPTGSVKIGDLGLATLKRASFAKSVIGTPEFMAPEMYEEKYDESVDVYAFGMCMLEMATSEYPYSECQNAAQIYRRVTSGVKPASFDKVAIPEVKEIIEGCIRQNKDERYSIKDLLNHAFFQEETGVRVELAEEDDGEKIAIKLWLRIEDIKKLKGKYKDNEAIEFSFDLERDVPEDVAQEMVESGYVCEGDHKTMAKAIKDRVSLIKRKREQRQLVREEQEKKKQEESSLKQQVEQSSASQTGIKQLPSASTGIPTASTTSASVSTQVEPEEPEADQHQQLQYQQPSISVLSDGTVDSGQGSSVFTESRVSSQQTVSYGSQHEQAHSTGTVPGHIPSTVQAQSQPHGVYPPSSVQQGIQQTAPPQQTVQYSLSQTSTSSEATTAQPVSQPQAPQVLPQVSAGKQSTQGVSQVAPAEPVAVAQPQATQPTTLASSVDSAHSDVASGMSDGNENVPSSSGRHEGRTTKRHYRKSVRSRSRHEKTSRPKLRILNVSNKGDRVVECQLETHNRKMVTFKFDLDGDNPEEIATIMVNNDFILAIERESFVDQVREIIEKADEMLSEDVSVEPEGDQGLESLQGKDDYGFSGSQKLEGEFKQPIPASSMPQQIGIPTSSLTQVVHSAGRRFIVSPVPESRLRESKVFPSEITDTVAASTAQSPGMNLSHSASSLSLQQAFSELRRAQMTEGPNTAPPNFSHTGPTFPVVPPFLSSIAGVPTTAAATAPVPATSSPPNDISTSVIQSEVTVPTEEGIAGVATSTGVVTSGGLPIPPVSESPVLSSVVSSITIPAVVSISTTSPSLQVPTSTSEIVVSSTALYPSVTVSATSASAGGSTATPGPKPPAVVSQQAAGSTTVGATLTSVSTTTSFPSTASQLSIQLSSSTSTPTLAETVVVSAHSLDKTSHSSTTGLAFSLSAPSSSSSPGAGVSSYISQPGGLHPLVIPSVIASTPILPQAAGPTSTPLLPQVPSIPPLVQPVANVPAVQQTLIHSQPQPALLPNQPHTHCPEVDSDTQPKAPGIDDIKTLEEKLRSLFSEHSSSGAQHASVSLETSLVIESTVTPGIPTTAVAPSKLLTSTTSTCLPPTNLPLGTVALPVTPVVTPGQVSTPVSTTTSGVKPGTAPSKPPLTKAPVLPVGTELPAGTLPSEQLPPFPGPSLTQSQQPLEDLDAQLRRTLSPEMITVTSAVGPVSMAAPTAITEAGTQPQKGVSQVKEGPVLATSSGAGVFKMGRFQVSVAADGAQKEGKNKSEDAKSVHFESSTSESSVLSSSSPESTLVKPEPNGITIPGISSDVPESAHKTTASEAKSDTGQPTKVGRFQVTTTANKVGRFSVSKTEDKITDTKKEGPVASPPFMDLEQAVLPAVIPKKEKPELSEPSHLNGPSSDPEAAFLSRDVDDGSGSPHSPHQLSSKSLPSQNLSQSLSNSFNSSYMSSDNESDIEDEDLKLELRRLRDKHLKEIQDLQSRQKHEIESLYTKLGKVPPAVIIPPAAPLSGRRRRPTKSKGSKSSRSSSLGNKSPQLSGNLSGQSAASVLHPQQTLHPPGNIPESGQNQLLQPLKPSPSSDNLYSAFTSDGAISVPSLSAPGQGNKATIIVQKQ

SEQ ID NO: 803823 - protein, 2032 aa, Homo sapiens
MSGGAAEKQSSTPGSLFLSPPAPAPKNGSSSDSSVGEKLGAAAADAVTGRTEEYRRRRHTMDKDSRGAAATTTTTEHRFFRRSVICDSNATALELPGLPLSLPQPSIPAAVPQSAPPEPHREETVTATATSQVAQQPPAAAAPGEQAVAGPAPSTVPSSTSKDRPVSQPSLVGSKEEPPPARSGSGGGSAKEPQEERSQQQDDIEELETKAVGMSNDGRFLKFDIEIGRGSFKTVYKGLDTETTVEVAWCELQDRKLTKSERQRFKEEAEMLKGLQHPNIVRFYDSWESTVKGKKCIVLVTELMTSGTLKTYLKRFKVMKIKVLRSWCRQILKGLQFLHTRTPPIIHRDLKCDNIFITGPTGSVKIGDLGLATLKRASFAKSVIGTPEFMAPEMYEEKYDESVDVYAFGMCMLEMATSEYPYSECQNAAQIYRRVTSGVKPASFDKVAIPEVKEIIEGCIRQNKDERYSIKDLLNHAFFQEETGVRVELAEEDDGEKIAIKLWLRIEDIKKLKGKYKDNEAIEFSFDLERDVPEDVAQEMVESGYVCEGDHKTMAKAIKDRVSLIKRKREQRQLVREEQEKKKQEESSLKQQVEQSSASQTGIKQLPSASTGIPTASTTSASVSTQVEPEEPEADQHQQLQYQQPSISVLSDGTVDSGQGSSVFTESRVSSQQTVSYGSQHEQAHSTGTVPGHIPSTVQAQSQPHGVYPPSSVQQGIQQTAPPQQTVQYSLSQTSTSSEATTAQPVSQPQAPQVLPQVSAGKQSTQGVSQVAPAEPVAVAQPQATQPTTLASSVDSAHSDVASGMSDGNENVPSSSGRHEGRTTKRHYRKSVRSRSRHEKTSRPKLRILNVSNKGDRVVECQLETHNRKMVTFKFDLDGDNPEEIATIMVNNDFILAIERESFVDQVREIIEKADEMLSEDVSVEPEGDQGLESLQGKDDYGFSGSQKLEGEFKQPIPASSMPQQIGIPTSSLTQVVHSAGRRFIVSPVPESRLRESKVFPSEITDTVAASTAQSPGMNLSHSASSLSLQQAFSELRRAQMTEGPNTAPPNFSHTGPTFPVVPPFLSSIAGVPTTAAATAPVPATSSPPNDISTSVIQSEVTVPTEEGIAGVATSTGVVTSGGLPIPPVSESPVLSSVVSSITIPAVVSISTTSPSLQVPTSTSEIVVSSTALYPSVTVSATSASAGGSTATPGPKPPAVVSQQAAGSTTVGATLTSVSTTTSFPSTASQLSIQLSSSTSTPTLAETVVVSAHSLDKTSHSSTTGLAFSLSAPSSSSSPGAGVSSYISQPGGLHPLVIPSVIASTPILPQAAGPTSTPLLPQVPSIPPLVQPVANVPAVQQTLIHSQPQPALLPNQPHTHCPEVDSDTQPKAPGIDDIKTLEEKLRSLFSEHSSSGAQHASVSLETSLVIESTVTPGIPTTAVAPSKLLTSTTSTCLPPTNLPLGTVALPVTPVVTPGQVSTPVSTTTSGVKPGTAPSKPPLTKAPVLPVGTELPAGTLPSEQLPPFPGPSLTQSQQPLEDLDAQLRRTLSPEMITVTSAVGPVSMAAPTAITEAGTQPQKGVSQVKEGPVLATSSGAGVFKMGRFQVSVAADGAQKEGKNKSEDAKSVHFESSTSESSVLSSSSPESTLVKPEPNGITIPGISSDVPESAHKTTASEAKSDTGQPTKVGRFQVTTTANKVGRFSVSKTEDKITDTKKEGPVASPPFMDLEQAVLPAVIPKKEKPELSEPSHLNGPSSDPEAAFLSRDVDDGSGSPHSPHQLSSKSLPSQNLSQSLSNSFNSSYMSSDNESDIEDEDLKLELRRLRDKHLKEIQDLQSRQKHEIESLYTKLGKVPPAVIIPPAAPLSGRRRRPTKSKGSKSSRSSSLGNKSPQLSGNLSGQSAASVLHPQQTLHPPGNIPESGQNQLLQPLKPSPSSDNLYSAFTSDGAISVPSLSAPGQGTSSTNTVGATVNSQAAQAQPPAMTSSRKGTFTDDLHKLVDNWARDAMNLSGRRGSKGHMNYEGPGMARKFSAPGQLCISIPITISSIPPQP

SEQ ID NO: 803824 - protein, 2013 aa, Homo sapiens
MSGGAAEKQSSTPGSLFLSPPAPAPKNGSSSDSSVGEKLGAAAADAVTGRTEEYRRRRHTMDKDSRGAAATTTTTEHRFFRRSVICDSNATALELPGLPLSLPQPSIPAAVPQSAPPEPHREETVTATATSQVAQQPPAAAAPGEQAVAGPAPSTVPSSTSKDRPVSQPSLVGSKEEPPPARSGSGGGSAKEPQEERSQQQDDIEELETKAVGMSNDGRFLKFDIEIGRGSFKTVYKGLDTETTVEVAWCELQDRKLTKSERQRFKEEAEMLKGLQHPNIVRFYDSWESTVKGKKCIVLVTELMTSGTLKTYLKRFKVMKIKVLRSWCRQILKGLQFLHTRTPPIIHRDLKCDNIFITGPTGSVKIGDLGLATLKRASFAKSVIGTPEFMAPEMYEEKYDESVDVYAFGMCMLEMATSEYPYSECQNAAQIYRRVTSGVKPASFDKVAIPEVKEIIEGCIRQNKDERYSIKDLLNHAFFQEETGVRVELAEEDDGEKIAIKLWLRIEDIKKLKGKYKDNEAIEFSFDLERDVPEDVAQEMVESGYVCEGDHKTMAKAIKDRVSLIKRKREQRQLVREEQEKKKQEESSLKQQVEQSSASQTGIKQLPSASTGIPTASTTSASVSTQVEPEEPEADQHQQLQYQQPSISVLSDGTVDSGQGSSVFTESRVSSQQTVSYGSQHEQAHSTGTVPGHIPSTVQAQSQPHGVYPPSSVQQGIQQTAPPQQTVQYSLSQTSTSSEATTAQPVSQPQAPQVLPQVSAGKQSTQGVSQVAPAEPVAVAQPQATQPTTLASSVDSAHSDVASGMSDGNENVPSSSGRHEGRTTKRHYRKSVRSRSRHEKTSRPKLRILNVSNKGDRVVECQLETHNRKMVTFKFDLDGDNPEEIATIMVNNDFILAIERESFVDQVREIIEKADEMLSEDVSVEPEGDQGLESLQGKDDYGFSGSQKLEGEFKQPIPASSMPQQIGIPTSSLTQVVHSAGRRFIVSPVPESRLRESKVFPSEITDTVAASTAQSPGMNLSHSASSLSLQQAFSELRRAQMTEGPNTAPPNFSHTGPTFPVVPPFLSSIAGVPTTAAATAPVPATSSPPNDISTSVIQSEVTVPTEEGIAGVATSTGVVTSGGLPIPPVSESPVLSSVVSSITIPAVVSISTTSPSLQVPTSTSEIVVSSTALYPSVTVSATSASAGGSTATPGPKPPAVVSQQAAGSTTVGATLTSVSTTTSFPSTASQLSIQLSSSTSTPTLAETVVVSAHSLDKTSHSSTTGLAFSLSAPSSSSSPGAGVSSYISQPGGLHPLVIPSVIASTPILPQAAGPTSTPLLPQVPSIPPLVQPVANVPAVQQTLIHSQPQPALLPNQPHTHCPEVDSDTQPKAPGIDDIKTLEEKLRSLFSEHSSSGAQHASVSLETSLVIESTVTPGIPTTAVAPSKLLTSTTSTCLPPTNLPLGTVALPVTPVVTPGQVSTPVSTTTSGVKPGTAPSKPPLTKAPVLPVGTELPAGTLPSEQLPPFPGPSLTQSQQPLEDLDAQLRRTLSPEMITVTSAVGPVSMAAPTAITEAGTQPQKGVSQVKEGPVLATSSGAGVFKMGRFQVSVAADGAQKEGKNKSEDAKSVHFESSTSESSVLSSSSPESTLVKPEPNGITIPGISSDVPESAHKTTASEAKSDTGQPTKVGRFQVTTTANKVGRFSVSKTEDKITDTKKEGPVASPPFMDLEQAVLPAVIPKKEKPELSEPSHLNGPSSDPEAAFLSRDVDDGSGSPHSPHQLSSKSLPSQNLSQSLSNSFNSSYMSSDNESDIEDEDLKLELRRLRDKHLKEIQDLQSRQKHEIESLYTKLGKVPPAVIIPPAAPLSGRRRRPTKSKGSKSSRSSSLGNKSPQLSGNLSGQSAASVLHPQQTLHPPGNIPESGQNQLLQPLKPSPSSDNLYSAFTSDGAISVPSLSAPGQGTSSTNTVGATVNSQAAQAQPPAMTSSRKGTFTDDLHKLVDNWARDAMNLSGRRGSKGHMNYEVSLSFAAENP

SEQ ID NO: 803825 - protein, 2003 aa, Homo sapiens
MSGGAAEKQSSTPGSLFLSPPAPAPKNGSSSDSSVGEKLGAAAADAVTGRTEEYRRRRHTMDKDSRGAAATTTTTEHRFFRRSVICDSNATALELPGLPLSLPQPSIPAAVPQSAPPEPHREETVTATATSQVAQQPPAAAAPGEQAVAGPAPSTVPSSTSKDRPVSQPSLVGSKEEPPPARSGSGGGSAKEPQEERSQQQDDIEELETKAVGMSNDGRFLKFDIEIGRGSFKTVYKGLDTETTVEVAWCELQDRKLTKSERQRFKEEAEMLKGLQHPNIVRFYDSWESTVKGKKCIVLVTELMTSGTLKTYLKRFKVMKIKVLRSWCRQILKGLQFLHTRTPPIIHRDLKCDNIFITGPTGSVKIGDLGLATLKRASFAKSVIGTPEFMAPEMYEEKYDESVDVYAFGMCMLEMATSEYPYSECQNAAQIYRRVTSGVKPASFDKVAIPEVKEIIEGCIRQNKDERYSIKDLLNHAFFQEETGVRVELAEEDDGEKIAIKLWLRIEDIKKLKGKYKDNEAIEFSFDLERDVPEDVAQEMVESGYVCEGDHKTMAKAIKDRVSLIKRKREQRQLVREEQEKKKQEESSLKQQVEQSSASQTGIKQLPSASTGIPTASTTSASVSTQVEPEEPEADQHQQLQYQQPSISVLSDGTVDSGQGSSVFTESRVSSQQTVSYGSQHEQAHSTGTVPGHIPSTVQAQSQPHGVYPPSSVQQGIQQTAPPQQTVQYSLSQTSTSSEATTAQPVSQPQAPQVLPQVSAGKQSTQGVSQVAPAEPVAVAQPQATQPTTLASSVDSAHSDVASGMSDGNENVPSSSGRHEGRTTKRHYRKSVRSRSRHEKTSRPKLRILNVSNKGDRVVECQLETHNRKMVTFKFDLDGDNPEEIATIMVNNDFILAIERESFVDQVREIIEKADEMLSEDVSVEPEGDQGLESLQGKDDYGFSGSQKLEGEFKQPIPASSMPQQIGIPTSSLTQVVHSAGRRFIVSPVPESRLRESKVFPSEITDTVAASTAQSPGMNLSHSASSLSLQQAFSELRRAQMTEGPNTAPPNFSHTGPTFPVVPPFLSSIAGVPTTAAATAPVPATSSPPNDISTSVIQSEVTVPTEEGIAGVATSTGVVTSGGLPIPPVSESPVLSSVVSSITIPAVVSISTTSPSLQVPTSTSEIVVSSTALYPSVTVSATSASAGGSTATPGPKPPAVVSQQAAGSTTVGATLTSVSTTTSFPSTASQLSIQLSSSTSTPTLAETVVVSAHSLDKTSHSSTTGLAFSLSAPSSSSSPGAGVSSYISQPGGLHPLVIPSVIASTPILPQAAGPTSTPLLPQVPSIPPLVQPVANVPAVQQTLIHSQPQPALLPNQPHTHCPEVDSDTQPKAPGIDDIKTLEEKLRSLFSEHSSSGAQHASVSLETSLVIESTVTPGIPTTAVAPSKLLTSTTSTCLPPTNLPLGTVALPVTPVVTPGQVSTPVSTTTSGVKPGTAPSKPPLTKAPVLPVGTELPAGTLPSEQLPPFPGPSLTQSQQPLEDLDAQLRRTLSPEMITVTSAVGPVSMAAPTAITEAGTQPQKGVSQVKEGPVLATSSGAGVFKMGRFQVSVAADGAQKEGKNKSEDAKSVHFESSTSESSVLSSSSPESTLVKPEPNGITIPGISSDVPESAHKTTASEAKSDTGQPTKVGRFQVTTTANKVGRFSVSKTEDKITDTKKEGPVASPPFMDLEQAVLPAVIPKKEKPELSEPSHLNGPSSDPEAAFLSRDVDDGSGSPHSPHQLSSKSLPSQNLSQSLSNSFNSSYMSSDNESDIEDEDLKLELRRLRDKHLKEIQDLQSRQKHEIESLYTKLGKVPPAVIIPPAAPLSGRRRRPTKSKGSKSSRSSSLGNKSPQLSGNLSGQSAASVLHPQQTLHPPGNIPESGQNQLLQPLKPSPSSDNLYSAFTSDGAISVPSLSAPGQGTSSTNTVGATVNSQAAQAQPPAMTSSRKGTFTDDLHKLVDKVEPRDKVEPRDKVEPRDKVEP

SEQ ID NO: 803826 - protein, 1990 aa, Homo sapiens
MSGGAAEKQSSTPGSLFLSPPAPAPKNGSSSDSSVGEKLGAAAADAVTGRTEEYRRRRHTMDKDSRGAAATTTTTEHRFFRRSVICDSNATALELPGLPLSLPQPSIPAAVPQSAPPEPHREETVTATATSQVAQQPPAAAAPGEQAVAGPAPSTVPSSTSKDRPVSQPSLVGSKEEPPPARSGSGGGSAKEPQEERSQQQDDIEELETKAVGMSNDGRFLKFDIEIGRGSFKTVYKGLDTETTVEVAWCELQDRKLTKSERQRFKEEAEMLKGLQHPNIVRFYDSWESTVKGKKCIVLVTELMTSGTLKTYLKRFKVMKIKVLRSWCRQILKGLQFLHTRTPPIIHRDLKCDNIFITGPTGSVKIGDLGLATLKRASFAKSVIGTPEFMAPEMYEEKYDESVDVYAFGMCMLEMATSEYPYSECQNAAQIYRRVTSGVKPASFDKVAIPEVKEIIEGCIRQNKDERYSIKDLLNHAFFQEETGVRVELAEEDDGEKIAIKLWLRIEDIKKLKGKYKDNEAIEFSFDLERDVPEDVAQEMVESGYVCEGDHKTMAKAIKDRVSLIKRKREQRQLVREEQEKKKQEESSLKQQVEQSSASQTGIKQLPSASTGIPTASTTSASVSTQVEPEEPEADQHQQLQYQQPSISVLSDGTVDSGQGSSVFTESRVSSQQTVSYGSQHEQAHSTGTVPGHIPSTVQAQSQPHGVYPPSSVQQGIQQTAPPQQTVQYSLSQTSTSSEATTAQPVSQPQAPQVLPQVSAGKQSTQGVSQVAPAEPVAVAQPQATQPTTLASSVDSAHSDVASGMSDGNENVPSSSGRHEGRTTKRHYRKSVRSRSRHEKTSRPKLRILNVSNKGDRVVECQLETHNRKMVTFKFDLDGDNPEEIATIMVNNDFILAIERESFVDQVREIIEKADEMLSEDVSVEPEGDQGLESLQGKDDYGFSGSQKLEGEFKQPIPASSMPQQIGIPTSSLTQVVHSAGRRFIVSPVPESRLRESKVFPSEITDTVAASTAQSPGMNLSHSASSLSLQQAFSELRRAQMTEGPNTAPPNFSHTGPTFPVVPPFLSSIAGVPTTAAATAPVPATSSPPNDISTSVIQSEVTVPTEEGIAGVATSTGVVTSGGLPIPPVSESPVLSSVVSSITIPAVVSISTTSPSLQVPTSTSEIVVSSTALYPSVTVSATSASAGGSTATPGPKPPAVVSQQAAGSTTVGATLTSVSTTTSFPSTASQLSIQLSSSTSTPTLAETVVVSAHSLDKTSHSSTTGLAFSLSAPSSSSSPGAGVSSYISQPGGLHPLVIPSVIASTPILPQAAGPTSTPLLPQVPSIPPLVQPVANVPAVQQTLIHSQPQPALLPNQPHTHCPEVDSDTQPKAPGIDDIKTLEEKLRSLFSEHSSSGAQHASVSLETSLVIESTVTPGIPTTAVAPSKLLTSTTSTCLPPTNLPLGTVALPVTPVVTPGQVSTPVSTTTSGVKPGTAPSKPPLTKAPVLPVGTELPAGTLPSEQLPPFPGPSLTQSQQPLEDLDAQLRRTLSPEMITVTSAVGPVSMAAPTAITEAGTQPQKGVSQVKEGPVLATSSGAGVFKMGRFQVSVAADGAQKEGKNKSEDAKSVHFESSTSESSVLSSSSPESTLVKPEPNGITIPGISSDVPESAHKTTASEAKSDTGQPTKVGRFQVTTTANKVGRFSVSKTEDKITDTKKEGPVASPPFMDLEQAVLPAVIPKKEKPELSEPSHLNGPSSDPEAAFLSRDVDDGSGSPHSPHQLSSKSLPSQNLSQSLSNSFNSSYMSSDNESDIEDEDLKLELRRLRDKHLKEIQDLQSRQKHEIESLYTKLGKVPPAVIIPPAAPLSGRRRRPTKSKGSKSSRSSSLGNKSPQLSGTSSTNTVGATVNSQAAQAQPPAMTSSRKGTFTDDLHKLVDNWARDAMNLSGRRGSKGHMNYEGPGMARKFSAPGQLCISMTSNLGGSAPISAASATSLGHFTKSMCPRPPRAGR

SEQ ID NO: 803827 - protein, 1439 aa, Homo sapiens
MSGGAAEKQSSTPGSLFLSPPAPAPKNGSSSDSSVGEKLGAAAADAVTGRTEEYRRRRHTMDKDSRGAAATTTTTEHRFFRRSVICDSNATALELPGLPLSLPQPSIPAAVPQSAPPEPHREETVTATATSQVAQQPPAAAAPGEQAVAGPAPSTVPSSTSKDRPVSQPSLVGSKEEPPPARSGSGGGSAKEPQEERSQQQDDIEELETKAVGMSNDGRFLKFDIEIGRGSFKTVYKGLDTETTVEVAWCELQDRKLTKSERQRFKEEAEMLKGLQHPNIVRFYDSWESTVKGKKCIVLVTELMTSGTLKTYLKRFKVMKIKVLRSWCRQILKGLQFLHTRTPPIIHRDLKCDNIFITGPTGSVKIGDLGLATLKRASFAKSVIGTPEFMAPEMYEEKYDESVDVYAFGMCMLEMATSEYPYSECQNAAQIYRRVTSGVKPASFDKVAIPEVKEIIEGCIRQNKDERYSIKDLLNHAFFQEETGVRVELAEEDDGEKIAIKLWLRIEDIKKLKGKYKDNEAIEFSFDLERDVPEDVAQEMVESGYVCEGDHKTMAKAIKDRVSLIKRKREQRQLVREEQEKKKQEESSLKQQVEQSSASQTGIKQLPSASTGIPTASTTSASVSTQVEPEEPEADQHQQLQYQQPSISVLSDGTVDSGQGSSVFTESRVSSQQTVSYGSQHEQAHSTGTVPGHIPSTVQAQSQPHGVYPPSSVQQGIQQTAPPQQTVQYSLSQTSTSSEATTAQPVSQPQAPQVLPQVSAGKQSTQGVSQVAPAEPVAVAQPQATQPTTLASSVDSAHSDVASGMSDGNENVPSSSGRHEGRTTKRHYRKSVRSRSRHEKTSRPKLRILNVSNKGDRVVECQLETHNRKMVTFKFDLDGDNPEEIATIMVNNDFILAIERESFVDQVREIIEKADEMLSEDVSVEPEGDQGLESLQGKDDYGFSGSQKLEGEFKQPIPASSMPQQIGIPTSSLTQVVHSAGRRFIVSPVPESRLRESKVFPSEITDTVAASTAQSPGMNLSHSASSLSLQQAFSELRRAQMTEGPNTAPPNFSHTGPTFPVVPPFLSSIAGVPTTAAATAPVPATSSPPNDISTSVIQSEVTVPTEEGIAGVATSTGVVTSGGLPIPPVSESPVLSSVVSSITIPAVVSISTTSPSLQVPTSTSEIVVSSTALYPSVTVSATSASAGGSTATPGPKPPAVVSQQAAGSTTVGATLTSVSTTTSFPSTASQLSIQLSSSTSTPTLAETVVVSAHSLDKTSHSSTTGLAFSLSAPSSSSSPGAGVSSYISQPGGLHPLVIPSVIASTPILPQAAGPTSTPLLPQVPSIPPLVQPVANVPAVQQTLIHSQPQPALLPNQPHTHCPEVDSDTQPKAPGIDDIKTLEEKLRSLFSEHSSSGAQHASVSLETSLVIESTVTPGIPTTAVAPSKLLTSTRCKTGPV

SEQ ID NO: 803828 - protein, 983 aa, Homo sapiens
MSGGAAEKQSSTPGSLFLSPPAPAPKNGSSSDSSVGEKLGAAAADAVTGRTEEYRRRRHTMDKDSRGAAATTTTTEHRFFRRSVICDSNATALELPGLPLSLPQPSIPAAVPQSAPPEPHREETVTATATSQVAQQPPAAAAPGEQAVAGPAPSTVPSSTSKDRPVSQPSLVGSKEEPPPARSGSGGGSAKEPQEERSQQQDDIEELETKAVGMSNDGRFLKFDIEIGRGSFKTVYKGLDTETTVEVAWCELQDRKLTKSERQRFKEEAEMLKGLQHPNIVRFYDSWESTVKGKKCIVLVTELMTSGTLKTYLKRFKVMKIKVLRSWCRQILKGLQFLHTRTPPIIHRDLKCDNIFITGPTGSVKIGDLGLATLKRASFAKSVIGTPEFMAPEMYEEKYDESVDVYAFGMCMLEMATSEYPYSECQNAAQIYRRVTSGVKPASFDKVAIPEVKEIIEGCIRQNKDERYSIKDLLNHAFFQEETGVRVELAEEDDGEKIAIKLWLRIEDIKKLKGKYKDNEAIEFSFDLERDVPEDVAQEMVESGYVCEGDHKTMAKAIKDRVSLIKRKREQRQLVREEQEKKKQEESSLKQQVEQSSASQTGIKQLPSASTGIPTASTTSASVSTQVEPEEPEADQHQQLQYQQPSISVLSDGTVDSGQGSSVFTESRVSSQQTVSYGSQHEQAHSTGTVPGHIPSTVQAQSQPHGVYPPSSVQQGIQQTAPPQQTVQYSLSQTSTSSEATTAQPVSQPQAPQVLPQVSAGKQSTQGVSQVAPAEPVAVAQPQATQPTTLASSVDSAHSDVASGMSDGNENVPSSSGRHEGRTTKRHYRKSVRSRSRHEKTSRPKLRILNVSNKGDRVVECQLETHNRKMVTFKFDLDGDNPEEIATIMVNNDFILAIERESFVDQVREIIEKADEMLSEDVSVEPEGDQGLESLQGKDDYGFSGSQKLEGEFKQPIPASSMPQQIGIPTSSSPPLTTTPNTD

SEQ ID NO: 803829 - protein, 393 aa, Homo sapiens
MSGGAAEKQSSTPGSLFLSPPAPAPKNGSSSDSSVGEKLGAAAADAVTGRTEEYRRRRHTMDKDSRGAAATTTTTEHRFFRRSVICDSNATALELPGLPLSLPQPSIPAAVPQSAPPEPHREETVTATATSQVAQQPPAAAAPGEQAVAGPAPSTVPSSTSKDRPVSQPSLVGSKEEPPPARSGSGGGSAKEPQEERSQQQDDIEELETKAVGMSNDGRFLKFDIEIGRGSFKTVYKGLDTETTVEVAWCELQDRKLTKSERQRFKEEAEMLKGLQHPNIVRFYDSWESTVKGKKCIVLVTELMTSGTLKTYLKRFKVMKIKVLRSWCRQILKGLQFLHTRTPPIIHRDLKCDNIFITGPTGSVKIGDLGLATLKRASFAKSVIGMFQVYLGA

SEQ ID NO: 803830 - protein, 102 aa, Homo sapiens
EQEKKKQEESSLKQQVEQSSASQTGIKQLPSASTGIPTASTTSASVSTQVEPEEPEADQHQQLQYQQPSISVLCTYLGKWTDRLMILLIGFFSFLLFCTGFL

SEQ ID NO: 803831 - protein, 289 aa, Homo sapiens
MRHQGTQKSDVPPLTTKGKKATGNIDHKEKSTEINHEIPHCVNKLPKQEDSKRKYEDLSGEEKHLEVQILLENTGRQKDKKEDQEKKNIFVKEEQELPPKIIEVIHPERESNQEDVLVREKFKRSMQRNGVDDTLGKGTAPYTKGPLRQRRHYSFTEATENLHHGLPASGGPANAGNMRYSHSTGKHLSNREEMELEHSDSGYEPSFGKSSRIKVKDTTFRDKKSSLMEELFGSGYVLKTDQSSPGVAKGSEEPLQSKESHPLPPSQASTSHAFGDSKVTVVNSIKPSS

SEQ ID NO: 803832 - protein, 110 aa, Homo sapiens [sequence omitted]

SEQ ID NO: 803833 - protein, 660 aa, Homo sapiens
MSLADLTKTNIDEHFFGVALENNRRSAACKRSPGTGDFSRNSNASNKSVDYSRSQCSCGSLSSQYDYSEDFLCDCSEKAINRNYLKQPVVKEKEKKKYNVSKISQSKGQKEISVEKKHTWNASLFNSQIHMIAQRRDAMAHRILSARLHKIKGLKNELADMHHKLEAILTENQFLKQLQLRHLKAIGKYENSQNNLPQIMAKHQNEVKNLRQLLRKSQEKERTLSRKLRETDSQLLKTKDILQALQKLSEDKNLAEREELTHKLSIITTKMDANDKKIQSLEKQLRLNCRAFSRQLAIETRKTLAAQTATKTLQVEVKHLQQKLKEKDRELEIKNIYSHRILKNLHDTEDYPKVSSTKSVQADRKILPFTSMRHQGTQKSDVPPLTTKGKKATGNIDHKEKSTEINHEIPHCVNKLPKQEDSKRKYEDLSGEEKHLEVQILLENTGRQKDKKEDQEKKNIFVKEEQELPPKIIEVIHPERESNQEDVLVREKFKRSMQRNGVDDTLGKGTAPYTKGPLRQRRHYSFTEATENLHHGLPASGGPANAGNMRYSHSTGKHLSNREEMELEHSDSGYEPSFGKSSRIKVKDTTFRDKKSSLMEELFGSGYVLKTDQSSPGVAKGSEEPLQSKESHPLPPSQASTSHAFGDSKVTVVNSIKPSS

SEQ ID NO: 803834 - protein, 288 aa, Homo sapiens
MSLADLTKTNIDEHFFGVALENNRRSAACKRSPGTGDFSRNSNASNKSVDYSRSQCSCGSLSSQYDYSEDFLCDCSEKAINRNYLKQPVVKEKEKKKYNVSKISQSKGQKEISVEKKHTWNASLFNSQIHMIAQRRDAMAHRILSARLHKIKGLKNELADMHHKLEAILTENQFLKQLQLRHLKAIGKYENSQNNLPQIMAKHQNEVKNLRQLLRKSQEKERTLSRKLRETDSQLLKTKDILQALQKLSEDKNLAEREELTHKLSIITTKMDANDKKIQVCISGAQTV

SEQ ID NO: 803835 - protein, 660 aa, Homo sapiens; identical to SEQ ID NO: 803833

SEQ ID NO: 803836 - protein, 660 aa, Homo sapiens; identical to SEQ ID NO: 803833

SEQ ID NO: 803837 - protein, 660 aa, Homo sapiens; identical to SEQ ID NO: 803833

SEQ ID NO: 803838 - protein, 660 aa, Homo sapiens; identical to SEQ ID NO: 803833

SEQ ID NO: 803839 - protein, 660 aa, Homo sapiens; identical to SEQ ID NO: 803833

SEQ ID NO: 803840 - protein, 461 aa, Homo sapiens
MAKHQNEVKNLRQLLRKSQEKERTLSRKLRETDSQLLKTKDILQALQKLSEDKNLAEREELTHKLSIITTKMDANDKKIQSLEKQLRLNCRAFSRQLAIETRKTLAAQTATKTLQVEVKHLQQKLKEKDRELEIKNIYSHRILKNLHDTEDYPKVSSTKSVQADRKILPFTSMRHQGTQKSDVPPLTTKGKKATGNIDHKEKSTEINHEIPHCVNKLPKQEDSKRKYEDLSGEEKHLEVQILLENTGRQKDKKEDQEKKNIFVKEEQELPPKIIEVIHPERESNQEDVLVREKFKRSMQRNGVDDTLGKGTAPYTKGPLRQRRHYSFTEATENLHHGLPASGGPANAGNMRYSHSTGKHLSNREEMELEHSDSGYEPSFGKSSRIKVKDTTFRDKKSSLMEELFGSGYVLKTDQSSPGVAKGSEEPLQSKESHPLPPSQASTSHAFGDSKVTVVNSIKPSS

SEQ ID NO: 803841 - protein, 522 aa, Homo sapiens
MAHRILSARLHKIKGLKNELADMHHKLEAILTENQFLKQLQLRHLKAIGKYENSQNNLPQIMAKHQNEVKNLRQLLRKSQEKERTLSRKLRETDSQLLKTKDILQALQKLSEDKNLAEREELTHKLSIITTKMDANDKKIQSLEKQLRLNCRAFSRQLAIETRKTLAAQTATKTLQVEVKHLQQKLKEKDRELEIKNIYSHRILKNLHDTEDYPKVSSTKSVQADRKILPFTSMRHQGTQKSDVPPLTTKGKKATGNIDHKEKSTEINHEIPHCVNKLPKQEDSKRKYEDLSGEEKHLEVQILLENTGRQKDKKEDQEKKNIFVKEEQELPPKIIEVIHPERESNQEDVLVREKFKRSMQRNGVDDTLGKGTAPYTKGPLRQRRHYSFTEATENLHHGLPASGGPANAGNMRYSHSTGKHLSNREEMELEHSDSGYEPSFGKSSRIKVKDTTFRDKKSSLMEELFGSGYVLKTDQSSPGVAKGSEEPLQSKESHPLPPSQASTSHAFGDSKVTVVNSIKPSS

SEQ ID NO: 803842 - protein, 660 aa, Homo sapiens; identical to SEQ ID NO: 803833

SEQ ID NO: 803843 - protein, 522 aa, Homo sapiens; identical to SEQ ID NO: 803841

SEQ ID NO: 803844 - protein, 390 aa, Homo sapiens
MDANDKKIQSLEKQLRLNCRAFSRQLAIETRKTLAAQTATKTLQVEVKHLQQKLKEKDRELEIKNIYSHRILKNLHDTEDYPKVSSTKSVQADRKILPFTSMRHQGTQKSDVPPLTTKGKKATGNIDHKEKSTEINHEIPHCVNKLPKQEDSKRKYEDLSGEEKHLEVQILLENTGRQKDKKEDQEKKNIFVKEEQELPPKIIEVIHPERESNQEDVLVREKFKRSMQRNGVDDTLGKGTAPYTKGPLRQRRHYSFTEATENLHHGLPASGGPANAGNMRYSHSTGKHLSNREEMELEHSDSGYEPSFGKSSRIKVKDTTFRDKKSSLMEELFGSGYVLKTDQSSPGVAKGSEEPLQSKESHPLPPSQASTSHAFGDSKVTVVNSIKPSS

SEQ ID NO: 803845 - protein, 660 aa, Homo sapiens; identical to SEQ ID NO: 803833

SEQ ID NO: 803846 - protein, 660 aa, Homo sapiens; identical to SEQ ID NO: 803833

SEQ ID NO: 803847 - protein, 532 aa, Homo sapiens
MAHRILSARLHKIKGLKNLAEIFKAVGNELADMHHKLEAILTENQFLKQLQLRHLKAIGKYENSQNNLPQIMAKHQNEVKNLRQLLRKSQEKERTLSRKLRETDSQLLKTKDILQALQKLSEDKNLAEREELTHKLSIITTKMDANDKKIQSLEKQLRLNCRAFSRQLAIETRKTLAAQTATKTLQVEVKHLQQKLKEKDRELEIKNIYSHRILKNLHDTEDYPKVSSTKSVQADRKILPFTSMRHQGTQKSDVPPLTTKGKKATGNIDHKEKSTEINHEIPHCVNKLPKQEDSKRKYEDLSGEEKHLEVQILLENTGRQKDKKEDQEKKNIFVKEEQELPPKIIEVIHPERESNQEDVLVREKFKRSMQRNGVDDTLGKGTAPYTKGPLRQRRHYSFTEATENLHHGLPASGGPANAGNMRYSHSTGKHLSNREEMELEHSDSGYEPSFGKSSRIKVKDTTFRDKKSSLMEELFGSGYVLKTDQSSPGVAKGSEEPLQSKESHPLPPSQASTSHAFGDSKVTVVNSIKPSS

SEQ ID NO: 803848 - protein, 144 aa, Homo sapiens
SGDAPALRRWRSRGNSAEQVTAPLLPSSPSAGYPVTAPALGPSGPSCYALSGLPVSPVTQSSPLPASLAPRRFLLAAQFAKEQLPRLGSDRALRRHTYSQARWAGGRPGPSLSALPSKCTQNRFTILPFLSTATVTTLVQAPII

SEQ ID NO: 803849 - protein, 410 aa, Homo sapiens
MLENYQNLVWLGLSISKSVISLLEKRKLPWIMAKEEIRGPLPDVPGAEIKELSAKRAINEVLSQFDTVIKCTRNVCKECGNLYCHNMQLTLHKRNHTQKKCNQCLDCGKYFTRQSTLIQHQRIHTGERPYKCNECIKTFNQRAHLTKHERIHTGEKPYKCKECRKTFSQMTHLTQHQTTHTREKFHECSECGKAFSRVSALIDHQRIHSGEKPYECKECGRAFTQSAQLIRHQKTHSGEKPYECSKCKKSFVHLSSLIEHWRIHTGEKPYQCKDCKKTFCRVMQFTLHRRIHTGEKPYECKECGKSFSAHSSLVTHKRTHSGEKPYKCKECGKAFSAHSSLVTHKRTHSGEKPYTCHACGKAFNTSSTLCQHNRIHTGEKPFQCSQCGKSFSCSSHLTRHCRMCNGKFSK

SEQ ID NO: 803850 - protein, 434 aa, Homo sapiens
MLENYQNLVWLGLSISKSVISLLEKRKLPWIMAKEEIRGPLPGYFKVSEMTISQEPKAKTRTLFGKDVPGAEIKELSAKRAINEVLSQFDTVIKCTRNVCKECGNLYCHNMQLTLHKRNHTQKKCNQCLDCGKYFTRQSTLIQHQRIHTGERPYKCNECIKTFNQRAHLTKHERIHTGEKPYKCKECRKTFSQMTHLTQHQTTHTREKFHECSECGKAFSRVSALIDHQRIHSGEKPYECKECGRAFTQSAQLIRHQKTHSGEKPYECSKCKKSFVHLSSLIEHWRIHTGEKPYQCKDCKKTFCRVMQFTLHRRIHTGEKPYECKECGKSFSAHSSLVTHKRTHSGEKPYKCKECGKAFSAHSSLVTHKRTHSGEKPYTCHACGKAFNTSSTLCQHNRIHTGEKPFQCSQCGKSFSCSSHLTRHCRMCNGKFSK

SEQ ID NO: 803851 - protein, 410 aa, Homo sapiens; identical to SEQ ID NO: 803849

SEQ ID NO: 803852 - protein, 241 aa, Homo sapiens
MLENYQNLVWLGLSISKSVISLLEKRKLPWIMAKEEIRGPLPDVPGAEIKELSAKRAINEVLSQFDTVIKCTRNVCKECGNLYCHNMQLTLHKRNHTQKKCNQCLDCGKYFTRQSTLIQHQRIHTGERPYKCNECIKTSAHSSLVTHKRTHSGEKPYKCKECGKAFSAHSSLVTHKRTHSGEKPYTCHACGKAFNTSSTLCQHNRIHTGEKPFQCSQCGKSFSCSSHLTRHCRMCNGKFSK

SEQ ID NO: 803853 - protein, 146 aa, Homo sapiens
MLENYQNLVWLGLSISKSVISLLEKRKLPWIMAKEEIRGPLPDVPGAEIKELSAKRAINEVLSQFDTVIKCTRNVCKECGNLYCHNMQLTLHKRNHTQKKCNQCLDCGKYFTRQSTLIQHQRIHTGERPYKCNECIKTFNQRAHLT

SEQ ID NO: 803854 - protein, 241 aa, Homo sapiens; identical to SEQ ID NO: 803852

SEQ ID NO: 803855 - protein, 102 aa, Homo sapiens
MNAGARTEAQHPGLEVRADALAGPLLELRELPAAGLDDGLDLLLGLLGDGHHAVQVLVHKETHKHLWRHGPWEGLALALPPSHPTCFRPVLTLKALRRSGSM

SEQ ID NO: 803856 - protein, 269 aa, Homo sapiens
MSAALFSLDGPARGAPWPAEPAPFYEPGRAGKPGRGAEPGALGEPGAAAPAMYDDESAIDFSAYIDSMAAVPTLELCHDELFADLFNSNHKAGGAGPLELLPGGPARPLGPGPAAPRLLKREPDWGDGDAPGSLLPAQVAACAQTVVSLAAAGQPTPPTSPEPPRSSPRQTPAPGPAREKSAGKRGPDRGSPEYRQRRERNNIAVRKSRDKAKRRNQEMQQKLVELSAENEKLHQRVEQLTRDLAGLRQFFKQLPSPPFLPAAGTADCR

SEQ ID NO: 803857 - protein, 108 aa, Homo sapiens
  misc_feature (63)..(63): Xaa can be any naturally occurring amino acid
MAALPPCQYRRTMSASRAFSCLQSSSIVPARGPTLGSYGGHCINSSADTHSHDTNKQTALMFXIQRIWLTSRWEVRPYRLAGLPQRLRPNRGAPCVPLAARTCPFSEV

SEQ ID NO: 803858 - protein, 191 aa, Homo sapiens
MSAALFSLDGPARGAPWPAEPAPFYEPGRAGKPGPAAPRLLKREPDWGDGDAPGSLLPAQVAACAQTVVSLAAAGQPTPPTSPEPPRSSPRQTPAPGPAREKSAGKRGPDRGSPEYRQRRERNNIAVRKSRDKAKRRNQEMQQKLVELSAENEKLHQRVEQLTRDLAGLRQFFKQLPSPPFLPAAGTADCR

SEQ ID NO: 803859 - protein, 269 aa, Homo sapiens; identical to SEQ ID NO: 803856

SEQ ID NO: 803860 - protein, 269 aa, Homo sapiens; identical to SEQ ID NO: 803856

SEQ ID NO: 803861 - protein, 269 aa, Homo sapiens; identical to SEQ ID NO: 803856

SEQ ID NO: 803862 - protein, 269 aa, Homo sapiens; identical to SEQ ID NO: 803856

SEQ ID NO: 803863 - protein, 269 aa, Homo sapiens; identical to SEQ ID NO: 803856

SEQ ID NO: 803864 - protein, 269 aa, Homo sapiens; identical to SEQ ID NO: 803856

SEQ ID NO: 803865 - protein, 235 aa, Homo sapiens
MSAALFSLDGPARGAPWPAEPAPFYEPGRAGKPGRGAEPGALGEPGAAAPAMYDDESAIDFSAYIDSMAAVPTLELCHDELFADLFNSNHKAGGAGPLELLPGGPARPLGPGPAAPRLLKREPDWGDGDAPGSLLPAQVAACAQTVVSLAAAGQPTPPTSPEPPRSSPRQTPKSRDKAKRRNQEMQQKLVELSAENEKLHQRVEQLTRDLAGLRQFFKQLPSPPFLPAAGTADCR

SEQ ID NO: 803866 - protein, 109 aa, Homo sapiens
QGRRPSFTGGRQSPVLPGRTGPPGGPAPLNRVLLLGGLRCSWGGRWKSRDKAKRRNQEMQQKLVELSAENEKLHQRVEQLTRDLAGLRQFFKQLPSPPFLPAAGTADCR

SEQ ID NO: 803867 - protein, 282 aa, Homo sapiens
MSAALFSLDGPARGAPWPAEPAPFYEPGRAGKPGRGAEPGALGEPGAAAPAMYDDESAIDFSAYIDSMAAVPTLELCHDELFADLFNSNHKAGGAGPLELLPGGPARPLGPGPAAPRLLKREPDWGDGDAPGSLLPAQVAACAQTVVSLAAAGQPTPPTSPEPPRSSPRQTPAPGPAREKSAGKRGPDRGSPEYRQRRERNNIAVRGRRDSRLPVTRGRGGRDSATTHTSDPTARSGARPALAQPEPPGARCSFLGHRSAKKLQPGLTTTKLREKLNVFIFP

SEQ ID NO: 803868 - protein, 248 aa, Homo sapiens
MSAALFSLDGPARGAPWPAEPAPFYEPGRAGKPGRGAEPGALGEPGAAAPAMYDDESAIDFSAYIDSMAAVPTLELCHDELFADLFNSNHKAGGAGPLELLPGGPARPLGPGPAAPRLLKREPDWGDGDAPGSLLPAQVAACAQTVVSLAAAGQPTPPTSPEPPRSSPRQTPGRRDSRLPVTRGRGGRDSATTHTSDPTARSGARPALAQPEPPGARCSFLGHRSAKKLQPGLTTTKLREKLNVFIFP

SEQ ID NO: 803869 - protein, 276 aa, Homo sapiens
  misc_feature (265)..(265): Xaa can be any naturally occurring amino acid
MSAALFSLDGPARGAPWPAEPAPFYEPGRAGKPGRGAEPGALGEPGAAAPAMYDDESAIDFSAYIDSMAAVPTLELCHDELFADLFNSNHKAGGAGPLELLPGGPARPLGPGPAAPRLLKREPDWGDGDAPGSLLPAQVAACAQTVVSLAAAGQPTPPTSPEPPRSSPRQTPAPGPAREKSAGKRGPDRGSPEYRQRRERNNIAVRKSRDKAKRRNQEMQQKLVELSAENEKLHQRVEQLTRDLAGLRQFFKQLPSPPFLPAKGXKPFGPPGGFLK

SEQ ID NO: 803870 - protein, 274 aa, Homo sapiens
MSAALFSLDGPARGAPWPAEPAPFYEPGRAGKPGRGAEPGALGEPGAAAPAMYDDESAIDFSAYIDSMAAVPTLELCHDELFADLFNSNHKAGGAGPLELLPGGPARPLGPGPAAPRLLKREPDWGDGDAPGSLLPAQVAACAQTVVSLAAAGQPTPPTSPEPPRSSPRQTPAPGPAREKSAGKRGPDRGSPEYRQRRERNNIAVRKSRDKAKRRNQEMQQKLVELSAENEKLHQRVEQLTRDQSRRVPAAVSWDIGAQRSYSLDLPPLNCERS

SEQ ID NO: 803871 - protein, 195 aa, Homo sapiens
MSAALFSLDGPARGAPWPAEPAPFYEPGRAGKPGRGAEPGALGEPGAAAPAMYDDESAIDFSAYIDSMAAVPTLELCHDELFADLFNSNHKAGGAGPLELLPGGPARPLGPGPAAPRLLKREPDWGDGDAPGSLLPAQVAACAQTVVSLAAAGQPTPPTSPEPPRSSPRQTPPERSAPCPGAARAAGCPLQFLGT

SEQ ID NO: 803872 - protein, 257 aa, Homo sapiens
MSAALFSLDGPARGAPWPAEPAPFYEPGRAGKPGRGAEPGALGEPGAAAPAMYDDESAIDFSAYIDSMAAVPTLELCHDELFADLFNSNHKAGGAGPLELLPGGPARPLGPGPAAPRLLKREPDWGDGDAPGSLLPAQVAACAQTVVSLAAAGQPTPPTSPEPPRSSPRQTPAPGPAREKSAGKRGPDRGSPEYRQRRERNNIAVRKSRDKAKRRNQEMPEPPGARCSFLGHRSAKKLQPGLTTTKLREKLNVFIFP

SEQ ID NO: 803873 - protein, 242 aa, Homo sapiens
MSAALFSLDGPARGAPWPAEPAPFYEPGRAGKPGRGAEPGALGEPGAAAPAMYDDESAIDFSAYIDSMAAVPTLELCHDELFADLFNSNHKAGGAGPLELLPGGPARPLGPGPAAPRLLKREPDWGDGDAPGSLLPAQVAACAQTVVSLAAAGQPTPPTSPEPPRSSPRQTPAPGPAREKSAGKRGPDRGSPEYRQRRERNNIAVRKSRDKAKRRNQEMLSWDIGAQRSYSLDLPPLNCERS

SEQ ID NO: 803874 - protein, 83 aa, Homo sapiens
ELLEELPEAGQVPRELLHALVQLLVLSLTAPPTSAREAKRVYFPLNYFCNGSFFYILLLLMQLRYICKKKKNQTFQTNPLYCR

SEQ ID NO: 803875 - protein, 754 aa, Homo sapiens
MLPGCIFLMILLIPQVKEKFILGVEGQQLVRPKKLPLIQKRDTGHTHDDDILKTYEEELLYEIKLNRKTLVLHLLRSREFLGSNYSETFYSMKGEAFTRHPQIMDHCFYQGSIVHEYDSAASISTCNGLRGFFRINDQRYLIEPVKYSDEGEHLVFKYNLRVPYGANYSCTELNFTRKTVPGDNESEEDSKIKGIHDEKYVELFIVADDTVYRRNGHPHNKLRNRIWGMVNFVNMIYKTLNIHVTLVGIEIWTHEDKIELYSNIETTLLRFSFWQEKILKTRKDFDHVVLLSGKWLYSHVQGISYPGGMCLPYYSTSIIKDLLPDTNIIANRMAHQLGHNLGMQHDEFPCTCPSGKCVMDSDGSIPALKFSKCSQNQYHQYLKDYKPTCMLNIPFPYNFHDFQFCGNKKLDEGEECDCGPAQECTNPCCDAHTCVLKPGFTCAEGECCESCQIKKAGSICRPAKDECDFPEMCTGHSPACPKDQFRVNGFPCKNSEGYCFMGKCPTREDQCSELFDDEAIESHDICYKMNTKGNKFGYCKNKENRFLPCEEKDVRCGKIYCTGGELSSLLGEDKTYHLKDPQKNATVKCKTIFLYHDSTDIGLVASGTKCGEGMVCNNGECLNMEKVYISTNCPSQCNENPVDGHGLQCHCEEGQAPVACEETLHVTNITILVVVLVLVIVGIGVLILLVRYRKCIKLKQVQSPPTETLGVENKGYFGDEQQIRTEPILPEIHFLNKPASKDSRGIADPNQSAK

SEQ ID NO: 803876 - protein, 571 aa, Homo sapiens
VGVCPRSYFLEGRGSYSFLSLFSTSPAPYRRNGHPHNKLRNRIWGMVNFVNMIYKTLNIHVTLVGIEIWTHEDKIELYSNIETTLLRFSFWQEKILKTRKDFDHVVLLSGKWLYSHVQGISYPGGMCLPYYSTSIIKDLLPDTNIIANRMAHQLGHNLGMQHDEFPCTCPSGKCVMDSDGSIPALKFSKCSQNQYHQYLKDYKPTCMLNIPFPYNFHDFQFCGNKKLDEGEECDCGPAQECTNPCCDAHTCVLKPGFTCAEGECCESCQIKKAGSICRPAKDECDFPEMCTGHSPACPKDQFRVNGFPCKNSEGYCFMGKCPTREDQCSELFDDEAIESHDICYKMNTKGNKFGYCKNKENRFLPCEEKDVRCGKIYCTGGELSSLLGEDKTYHLKDPQKNATVKCKTIFLYHDSTDIGLVASGTKCGEGMVCNNGECLNMEKVYISTNCPSQCNENPVDGHGLQCHCEEGQAPVACEETLHVTNITILVVVLVLVIVGIGVLILLVRYRKCIKLKQVQSPPTETLGVENKGYFGDEQQIRTEPILPEIHFLNKPASKDSRGIADPNQSAK

SEQ ID NO: 803877 - protein, 200 aa, Homo sapiens
MANIAVQRIKREFKEVLKSEETSKNQIKVDLVDENFTELRGEIAGPPDTPYEGGRYQLEIKIPETYPFNPPKVRFITKIWHPNISSVTGAICLDILKDQWAAAMTLRTVLLSLQALLAAAEPDDPQDAVVANQYKQNPEMFKQTARLWAHVYAGAPVSSPEYTKKIENLCAMGFDRNAVIVALSSKSWDVETATELLLSN

SEQ ID NO: 803878 - protein, 135 aa, Homo sapiens
TGAICLDILKDQCFRPVAGRMWWLMPVIPAVWEAEAAAMTLRTVLLSLQALLAAAEPDDPQDAVVANQYKQNPEMFKQTARLWAHVYAGAPVSSPEYTKKIENLCAMGFDRNAVIVALSSKSWDVETATELLLSN

SEQ ID NO: 803879 - protein, 202 aa, Homo sapiens
  misc_feature (188)..(188): Xaa can be any naturally occurring amino acid
MANIAVQRIKREFKEVLKSEETSKNQIKVDLVDENFTELRGEIAGPPDTPYEGGRYQLEIKIPETYPFNPPKVRFITKIWHPNISSVTGAICLDILKDQWAAAMTLRTVLLSLQALLAAAEPDDPQDAVVANQYKQNPEMFKQTARLWAHVYAGAPVSSPEYTKKIENLCAMGFDRNAYSGLFQIWVXDGQIGLRIGYKRVI

SEQ ID NO: 803880 - protein, 118 aa, Homo sapiens
GGGRSGGGGGGYESAAGGDMANIAVQRIKREFKEVLKSEETSKNQIKVDLVDENFTELRGEIAGPPDTPYEGGRYQLEIKIPETYPFNPPKPVNTKIWHPNIRLEQTKHPTKKNKRII

SEQ ID NO: 803881 - protein, 200 aa, Homo sapiens; identical to SEQ ID NO: 803877

SEQ ID NO: 803882 - protein, 200 aa, Homo sapiens; identical to SEQ ID NO: 803877

SEQ ID NO: 803883 - protein, 200 aa, Homo sapiens; identical to SEQ ID NO: 803877

SEQ ID NO: 803884 - protein, 210 aa, Homo sapiens
MNRGGFKIFIGNTLGVFLADITNIYFLFILKTSKNQIKVDLVDENFTELRGEIAGPPDTPYEGGRYQLEIKIPETYPFNPPKVRFITKIWHPNISSVTGAICLDILKDQWAAAMTLRTVLLSLQALLAAAEPDDPQDAVVANQYKQNPEMFKQTARLWAHVYAGAPVSSPEYTKKIENLCAMGFDRNAVIVALSSKSWDVETATELLLSN

SEQ ID NO: 803885 - protein, 219 aa, Homo sapiens
GGGRSGGGGGGYESAAGGDMANIAVQRIKREFKEVLKSEETSKNQIKVDLVDENFTELRGEIAGPPDTPYEGGRYQLEIKIPETYPFNPPKVRFITKIWHPNISSVTGAICLDILKDQWAAAMTLRTVLLSLQALLAAAEPDDPQDAVVANQYKQNPEMFKQTARLWAHVYAGAPVSSPEYTKKIENLCAMGFDRNAVIVALSSKSWDVETATELLLSN

SEQ ID NO: 803886 - protein, 200 aa, Homo sapiens; identical to SEQ ID NO: 803877

SEQ ID NO: 803887 - protein, 149 aa, Homo sapiens
MANIAVQRIKREFKEVLKSEEVRFITKIWHPNISSVTGAICLDILKDQWAAAMTLRTVLLSLQALLAAAEPDDPQDAVVANQYKQNPEMFKQTARLWAHVYAGAPVSSPEYTKKIENLCAMGFDRNAVIVALSSKSWDVETATELLLSN

SEQ ID NO: 803888 - protein, 198 aa, Homo sapiens
GGGRSGGGGGGYESAAGGDMANIAVQRIKREFKEVLKSEETSKNQIKVDLVDENFTELRGEIAGPPDTPYEGGRYQLEIKIPETYPFNPPKVRFITKIWHPNISSVTGAICLDILKDQWAAAMTLRTVLLSLQALLAAAEPDDPQDAVVANQYKQNPEMFKQTARLWAHVYAGAPVSSPEYTKKIENLCAMGFDRVST

SEQ ID NO: 803889 - protein, 200 aa, Homo sapiens; identical to SEQ ID NO: 803877

SEQ ID NO: 803890 - protein, 200 aa, Homo sapiens; identical to SEQ ID NO: 803877

SEQ ID NO: 803891 - protein, 157 aa, Homo sapiens
MANIAVQRIKREFKEVLKSEETSKNQIKVDLVDENFTELRGEIAGPPDTPYEGGRYQLEIKIPETYPFNPPKVRFITKIWHPNISSVTGAICLDILKDQWAAAMTLRTVLLSLQALLAAAEPDDPQDAVVANQNAVIVALSSKSWDVETATELLLSN

SEQ ID NO: 803892 - protein, 654 aa, Homo sapiens
MAFRDVAVDFTQDEWRLLSPAQRTLYREVMLENYSNLVSLGISFSKPELITQLEQGKETWREEKKCSPATCPADPEPELYLDPFCPPGFSSQKFPMQHVLCNHPPWIFTCLCAEGNIQPGDPGPGDQEKQQQASEGRPWSDQAEGPEGEGAMPLFGRTKKRTLGAFSRPPQRQPVSSRNGLRGVELEASPAQTGNPEETDKLLKRIEVLGFGTVNCGECGLSFSKMTNLLSHQRIHSGEKPYVCGVCEKGFSLKKSLARHQKAHSGEKPIVCRECGRGFNRKSTLIIHERTHSGEKPYMCSECGRGFSQKSNLIIHQRTHSGEKPYVCRECGKGFSQKSAVVRHQRTHLEEKTIVCSDCGLGFSDRSNLISHQRTHSGEKPYACKECGRCFRQRTTLVNHQRTHSKEKPYVCGVCGHSFSQNSTLISHRRTHTGEKPYVCGVCGRGFSLKSHLNRHQNIHSGEKPIVCKDCGRGFSQQSNLIRHQRTHSGEKPMVCGECGRGFSQKSNLVAHQRTHSGERPYVCRECGRGFSHQAGLIRHKRKHSREKPYMCRQCGLGFGNKSALITHKRAHSEEKPCVCRECGQGFLQKSHLTLHQMTHTGEKPYVCKTCGRGFSLKSHLSRHRKTTSVHHRLPVQPDPEPCAGQPSDSLYSL

SEQ ID NO: 803893 - protein, 654 aa, Homo sapiens; identical to SEQ ID NO: 803892

SEQ ID NO: 803894 - protein, 689 aa, Homo sapiens
HASATRRHAVPLEELPSWWLERPLVLWWRCVLQAHMAFRDVAVDFTQDEWRLLSPAQRTLYREVMLENYSNLVSLGISFSKPELITQLEQGKETWREEKKCSPATCPADPEPELYLDPFCPPGFSSQKFPMQHVLCNHPPWIFTCLCAEGNIQPGDPGPGDQEKQQQASEGRPWSDQAEGPEGEGAMPLFGRTKKRTLGAFSRPPQRQPVSSRNGLRGVELEASPAQTGNPEETDKLLKRIEVLGFGTVNCGECGLSFSKMTNLLSHQRIHSGEKPYVCGVCEKGFSLKKSLARHQKAHSGEKPIVCRECGRGFNRKSTLIIHERTHSGEKPYMCSECGRGFSQKSNLIIHQRTHSGEKPYVCRECGKGFSQKSAVVRHQRTHLEEKTIVCSDCGLGFSDRSNLISHQRTHSGEKPYACKECGRCFRQRTTLVNHQRTHSKEKPYVCGVCGHSFSQNSTLISHRRTHTGEKPYVCGVCGRGFSLKSHLNRHQNIHSGEKPIVCKDCGRGFSQQSNLIRHQRTHSGEKPMVCGECGRGFSQKSNLVAHQRTHSGERPYVCRECGRGFSHQAGLIRHKRKHSREKPYMCRQCGLGFGNKSALITHKRAHSEEKPCVCRECGQGFLQKSHLTLHQMTHTGEKPYVCKTCGRGFSLKSHLSRHRKTTSVHHRLPVQPDPEPCAGQPSDSLYSL

SEQ ID NO: 803895 - protein, 414 aa, Homo sapiens
HASATRLPRCPAGGAPQLVAGATPCSLVALFVLQAHMAFRDVAVDFTQDEWRLLSPAQRTLYREVMLENYSNLVSLGISFSKPELITQLEQGKETWREEKKCSPATCPADPEPELYLDPFCPPGFSSQKFPMQHVLCNHPPWIFTCLCAEGNIQPGDPGPGDQEKQQQASEGRPWSDQAEGPEGEGAMPLFGRTKKRTLGAFSRPPQRQPVSSRNGLRGVELEASPAQTGNPEETDKLLKRIEVLGFGTVNCGECGLSFSKMTNLLSHQRIHSGEKPYVCGVCEKGFSLKKSLARHQKAHSGEKPIVCRECGRGFNRKSTLIIHERTHSGEKPYMCSECGRGFSQKSNLIIHQRTHSGEKPYVCRECGKGFSQKSAVVRHLSRHRKTTSVHHRLPVQPDPEPCAGQPSDSLYSL

SEQ ID NO: 803896 - protein, 627 aa, Homo sapiens
MGLLQGLLRVRKLLLVVCVPLLLLPLPVLHPSSEASCAYVLIVTAVYWVSEAVPLGAAALVPAFLYPFFGVLRSNEVAAEYFKNTTLLLVGVICVAAAVEKWNLHKRIALRMVLMAGAKPGMLLLCFMCCTTLLSMWLSNTSTTAMVMPIVEAVLQELVSAEDEQLVAGNSNTEEAEPISLDVKNSQPSLELIFVNEDRSNADLTTLMHNENLNGVPSITNPIKTANQHQGKKQHPSQEKPQVLTPSPRKQKLNRKYRSHHDQMICKCLSLSISYSATIGGLTTIIGTSTSLIFLEHFNNQYPAAEVVNFGTWFLFSFPISLIMLVVSWFWMHWLFLGCNFKETCSLSKKKKTKREQLSEKRIQEEYEKLGDISYPEMVTGFFFILMTVLWFTREPGFVPGWDSFFEKKGYRTDATVSVFLGFLLFLIPAKKPCFGKKNDGENQEHSLGTEPIITWKDFQKTMPWEIVILVGGGYALASGSKSSGLSTWIGNQMLSLSSLPPWAVTLLACILVSIVTEFVSNPATITIFLPILCSLSETLHINPLYTLIPVTMCISFAVMLPVGNPPNAIVFSYGHCQIKDMVKAGLGVNVIGLVIVMVAINTWGVSLFHLDTYPAWARVSNITDQA

SEQ ID NO: 803897 - protein, 47 aa, Homo sapiens
MCCTTLLSMWLSNTSTTAMVMPIVEAVLQELVSRVKTPRKILLSHFK

SEQ ID NO: 803898 - protein, 581 aa, Homo sapiens
MGLLQGLLRVRKLLLVVCVPLLLLPLPVLHPSSEASCAYVLIVTAVYWVSEAVPLGAAALVPAFLYPFFGVLRSNEVAAEYFKNTTLLLVGVICVAAAVEKWNLHKRIALRMVLMAGAKPGMLLLCFMCCTTLLSMWLSNTSTTAMVMPIVEAVLQELVSAEDEQLVAGNSNTEEAEPISLDVKNSQPSLELIFVNEDRSNADLTTLMHNENLNGVPSITNPIKTANQHQGKKQHPSQEKPQVLTPSPRKQKLNRKYRSHHDQMICKCLSLSISYSATIGGLTTIIGTSTSLIFLEHFNNQYPAAEVVNFGTWFLFSFPISLIMLVVSWFWMHWLFLGCNFKETCSLSKKKKTKREQLSEKRIQEEYEKLGDISYPEMVTGFFFILMTVLWFTREPGFVPGWDSFFEKKGYRTDATVSVFLGFLLFLIPAKKPCFGKKNDGENQEHSLGTEPIITWKDFQKTMPWEIVILVGGGYALASGSKSSGLSTWIGNQMLSLSSLPPWAVTLLACILVSIVTEFVSNPATITIFLPILCSLVKAGLGVNVIGLVIVMVAINTWGVSLFHLDTYPAWARVSNITDQA

SEQ ID NO: 803899 - protein, 627 aa, Homo sapiens; identical to SEQ ID NO: 803896

SEQ ID NO: 803900 - protein, 374 aa, Homo sapiens
MGLLQGLLRVRKLLLVVCVPLLLLPLPVLHPSSEASCAYVLIVTAVYWVSEAVPLGAAALVPAFLYPFFGVLRSNEVAAEYFKNTTLLLVGVICVAAAVEKWNLHKRIALRMVLMAGAKPGMLLLCFMCCTTLLSMWLSNTSTTAMVMPIVEAVLQELVSAEDEQLVAGNSNTEEAEPISLDVKNSQPSLELIFVNEDRSNADLTTLMHNENLNGVPSITNPIKTANQHQGKKQHPSQEKPQVLTPSPRKQKLNRKYRSHHDQMICKCLSLSISYSATIGGLTTIIGTSTSLIFLEHFNNQYPAAEVVNFGTWFLFSFPISLIMLVVSWFWMHWLFLGCNFKETCSLSKKKKTKREQLSEKRIQEEYEKLGDIR

SEQ ID NO: 803901 - protein, 254 aa, Homo sapiens
MGLLQGLLRVRKLLLVVCVPLLLLPLPVLHPSSEASCAYVLIVTAVYWVSEAVPLGAAALVPAFLYPFFGVLRSNEVAAEYFKNTTLLLVGVICVAAAVEKWNLHKRIALRMVLMAGAKPGMLLLCFMCCTTLLSMWLSNTSTTAMVMPIVEAVLQELVSAEDEQLVAGNSNTEEAEPISLDVKNSQPSLELIFVNEDRSNADLTTLMHNENLNGVPSITNPRPTPEGIPPPEDSATSSELQESSNNHKHMLRC

SEQ ID NO: 803902 - protein, 204 aa, Homo sapiens
MVTGFFFILMTVLWFTREPGFVPGWDSFFEKKGYRTDATVSVFLGFLLFLIPAKKPCFGKKNDGENQEHSLGTEPIITWKDFQKTMPWEIVILVGGGYALASGSKSSGLSTWIGNQMLSLSSLPPWAVTLLACILVSIVTEFVSNPATITIFLPILCSLVKAGLGVNVIGLVIVMVAINTWGVSLFHLDTYPAWARVSNITDQA

SEQ ID NO: 803903 - protein, 204 aa, Homo sapiens; identical to SEQ ID NO: 803902

SEQ ID NO: 803904 - protein, 581 aa, Homo sapiens; identical to SEQ ID NO: 803898

SEQ ID NO: 803905 - protein, 396 aa, Homo sapiens
MTRWSFSRHLAHHFLFLIVRWPLSQQNLNGVPSITNPIKTANQHQGKKQHPSQEKPQVLTPSPRKQKLNRKYRSHHDQMICKCLSLSISYSATIGGLTTIIGTSTSLIFLEHFNNQYPAAEVVNFGTWFLFSFPISLIMLVVSWFWMHWLFLGCNFKETCSLSKKKKTKREQLSEKRIQEEYEKLGDISYPEMVTGFFFILMTVLWFTREPGFVPGWDSFFEKKGYRTDATVSVFLGFLLFLIPAKKPCFGKKNDGENQEHSLGTEPIITWKDFQKTMPWEIVILVGGGYALASGSKSSGLSTWIGNQMLSLSSLPPWAVTLLACILVSIVTEFVSNPATITIFLPILCSLVKAGLGVNVIGLVIVMVAINTWGVSLFHLDTYPAWARVSNITDQA

SEQ ID NO: 803906 - protein, 258 aa, Homo sapiens
MLVVSWFWMHWLFLGCNFKETCSLSKKKKTKREQLSEKRIQEEYEKLGDISYPEMVTGFFFILMTVLWFTREPGFVPGWDSFFEKKGYRTDATVSVFLGFLLFLIPAKKPCFGKKNDGENQEHSLGTEPIITWKDFQKTMPWEIVILVGGGYALASGSKSSGLSTWIGNQMLSLSSLPPWAVTLLACILVSIVTEFVSNPATITIFLPILCSLVKAGLGVNVIGLVIVMVAINTWGVSLFHLDTYPAWARVSNITDQA

SEQ ID NO: 803907 - protein, 111 aa, Homo sapiens
LPSQESASLTWLLCPLLGSSRSNADLTTLMHNEVWPWGFSVLWNHLKIPQHFFMETQDSEPDFQQLQIHLRVPFSEDSIDKMLLLKRTHWLGVVAHACTPSTLGGHSRRTT

SEQ ID NO: 803908 - protein, 242 aa, Homo sapiens
MVSGRFYLSCLLLGSLGSMCILFTIYWMQYWRGGFAWNGSIYMFNWHPVLMVAGMVVFYGGASLVYRLPQSWVGPKLPWKLLHAALHLMAFVLTVVGLVAVFTFHNHGRTANLYSLHSWLGITTVFLFACQWFLGFAVFLLPWASMWLRSLLKPIHVFFGAAILSLSIASVISGINEKLFFSLKNTTRPYHSLPSEAVFANSTGMLVVAFGLLVLYILLASSWKRPEPGILTDRQPLLHDGE

SEQ ID NO: 803909 - protein, 242 aa, Homo sapiens; identical to SEQ ID NO: 803908

SEQ ID NO: 803910 - protein, 242 aa, Homo sapiens; identical to SEQ ID NO: 803908

SEQ ID NO: 803911 - protein, 242 aa, Homo sapiens; identical to SEQ ID NO: 803908

SEQ ID NO: 803912 - protein, 242 aa, Homo sapiens; identical to SEQ ID NO: 803908

SEQ ID NO: 803913 - protein, 242 aa, Homo sapiens; identical to SEQ ID NO: 803908

SEQ ID NO: 803914 - protein, 259 aa, Homo sapiens
MGKNFSDSFLSRECVIRMVSGRFYLSCLLLGSLGSMCILFTIYWMQYWRGGFAWNGSIYMFNWHPVLMVAGMVVFYGGASLVYRLPQSWVGPKLPWKLLHAALHLMAFVLTVVGLVAVFTFHNHGRTANLYSLHSWLGITTVFLFACQWFLGFAVFLLPWASMWLRSLLKPIHVFFGAAILSLSIASVISGINEKLFFSLKNTTRPYHSLPSEAVFANSTGMLVVAFGLLVLYILLASSWKRPEPGILTDRQPLLHDGE

SEQ ID NO: 803915 - protein, 242 aa, Homo sapiens; identical to SEQ ID NO: 803908

SEQ ID NO: 803916 - protein, 242 aa, Homo sapiens; identical to SEQ ID NO: 803908

SEQ ID NO: 803917 - protein, 263 aa, Homo sapiens
MVSGRFYLSCLLLGSLGSMCILFTIYWMQYWRGGFAWNGSIYMFNWHPVLMVAGMVVFYGGASLVYRLPQSWVGPKLPWKLLHAALHLMAFVLTVVGLVAVFTFHNHGRTANLYSLHSWLGITTVFLFACQWFLGFAVFLLPWASMWLRSLLKPIHVFFGAAILSLSIASVISGINEKLFFSLKNTTRPYHSLPSEAVFANSTGMLVVAFGLLVLYILLASSWKRPEPGILTDRQLLLQLRPGSRPFPVTYVSVTGRQPYKSW

SEQ ID NO: 803918 - protein, 154 aa, Homo sapiens
MAFVLTVVGLVAVFTFHNHGRTANLYSLHSWLGITTVFLFACQWFLGFAVFLLPWASMWLRSLLKPIHVFFGAAILSLSIASVISGINEKLFFSLKNTTRPYHSLPSEAVFANSTGMLVVAFGLLVLYILLASSWKRPEPGILTDRQPLLHDGE

SEQ ID NO: 803919 - protein, 242 aa, Homo sapiens; identical to SEQ ID NO: 803908

SEQ ID NO: 803920 - protein, 140 aa, Homo sapiens
MQLMPKLWCPVCSSPGSHCHLQRGSLLRPTLLHLAPPWLLAWPNLAFCAMLELELLLFFRGGNRVESGKGLAPKCCCCGFFAFSKDALPGPKLQTAVLSKQVRSLGFGAHLLSGSISILLLATSGQRPPQPHIARCWQKG

SEQ ID NO: 803921 - protein, 140 aa, Homo sapiens; identical to SEQ ID NO: 803920

SEQ ID NO: 803922 - protein, 183 aa, Homo sapiens
MVSGRFYLSCLLLGSLGSMCILFTIYWMQYWRGGFAWNGSIYMFNWHPVLMVAGMVVFYGGASLVYRLPQSWVGPKLPWKLLHAALHLMAFVLTVVGLVAVFTFHNHGRTANLYSLHSWLGITTVFLFACQWFLGFAVFLLPWASMWLRSLLKPIHVFFGAAILSLSIASVISGINEKLFFSL

SEQ ID NO: 803923 - protein, 125 aa, Homo sapiens
MVSGRFYLSCLLLGSLGSMCILFTIYWMQYWRGGFAWNGSIYMFNWHPVLMVAGMVVFYGGASLVYRLPQSWVGPKLPWKLLHAALHLMAFVLTLPDVGRRANIDRLDWLEPSKPLGCPPGTWVP

SEQ ID NO: 803924 - protein, 1977 aa, Homo sapiens
MAMLPPPGPQSFVHFTKQSLALIEQRIAERKSKEPKEEKKDDDEEAPKPSSDLEAGKQLPFIYGDIPPGMVSEPLEDLDPYYADKKTFIVLNKGKTIFRFNATPALYMLSPFSPLRRISIKILVHSLFSMLIMCTILTNCIFMTMNNPPDWTKNVEYTFTGIYTFESLVKILARGFCVGEFTFLRDPWNWLDFVVIVFAYLTEFVNLGNVSALRTFRVLRALKTISVIPGLKTIVGALIQSVKKLSDVMILTVFCLSVFALIGLQLFMGNLKHKCFRNSLENNETLESIMNTLESEEDFRKYFYYLEGSKDALLCGFSTDSGQCPEGYTCVKIGRNPDYGYTSFDTFSWAFLALFRLMTQDYWENLYQQTLRAAGKTYMIFFVVVIFLGSFYLINLILAVVAMAYEEQNQANIEEAKQKELEFQQMLDRLKKEQEEAEAIAAAAAEYTSIRRSRIMGLSESSSETSKLSSKSAKERRNRRKKKNQKKLSSGEEKGDAEKLSKSESEDSIRRKSFHLGVEGHRRAHEKRLSTPNQSPLSIRGSLFSARRSSRTSLFSFKGRGRDIGSETEFADDEHSIFGDNESRRGSLFVPHRPQERRSSNISQASRSPPMLPVNGKMHSAVDCNGVVSLVDGRSALMLPNGQLLPEGTTNQIHKKRRCSSYLLSEDMLNDPNLRQRAMSRASILTNTVEELEESRQKCPPWWYRFAHKFLIWNCSPYWIKFKKCIYFIVMDPFVDLAITICIVLNTLFMAMEHHPMTEEFKNVLAIGNLVFTGIFAAEMVLKLIAMDPYEYFQVGWNIFDSLIVTLSLVELFLADVEGLSVLRSFRLLRVFKLAKSWPTLNMLIKIIGNSVGALGNLTLVLAIIVFIFAVVGMQLFGKSYKECVCKINDDCTLPRWHMNDFFHSFLIVFRVLCGEWIETMWDCMEVAGQAMCLIVYMMVMVIGNLVVLNLFLALLLSSFSSDNLTAIEEDPDANNLQIAVTRIKKGINYVKQTLREFILKAFSKKPKISREIRQAEDLNTKKENYISNHTLAEMSKGHNFLKEKDKISGFGSSVDKHLMEDSDGQSFIHNPSLTVTVPIAPGESDLENMNAEELSSDSDSEYSKVRLNRSSSSECSTVDNPLPGEGEEAEAEPMNSDEPEACFTDGCVRRFSCCQVNIESGKGKIWWNIRKTCYKIVEHSWFESFIVLMILLSSGALAFEDIYIERKKTIKIILEYADKIFTYIFILEMLLKWIAYGYKTYFTNAWCWLDFLIVDVSLVTLVANTLGYSDLGPIKSLRTLRALRPLRALSRFEGMRVVVNALIGAIPSIMNVLLVCLIFWLIFSIMGVNLFAGKFYECINTTDGSRFPASQVPNRSECFALMNVSQNVRWKNLKVNFDNVGLGYLSLLQVATFKGWTIIMYAAVDSVNVDKQPKYEYSLYMYIYFVVFIIFGSFFTLNLFIGVIIDNFNQQKKKLGGQDIFMTEEQKKYYNAMKKLGSKKPQKPIPRPGNKIQGCIFDLVTNQAFDISIMVLICLNMVTMMVEKEGQSQHMTEVLYWINVVFIILFTGECVLKLISLRHYYFTVGWNIFDFVVVIISIVGMFLADLIETYFVSPTLFRVIRLARIGRILRLVKGAKGIRTLLFALMMSLPALFNIGLLLFLVMFIYAIFGMSNFAYVKKEDGINDMFNFETFGNSMICLFQITTSAGWDGLLAPILNSKPPDCDPKKVHPGSSVEGDCGNPSVGIFYFVSYIIISFLVVVNMYIAVILENFSVATEESTEPLSEDDFEMFYEVWEKFDPDATQFIEFSKLSDFAAALDPPLLIAKPNKVQLIAMDLPMVSGDRIHCLDILFAFTKRVLGESGEMDSLRSQMEERFMSANPSKVSYEPITTTLKRKQEDVSATVIQRAYRRYRLRQNVKNISSIYIKDGDRDDDLLNKKDMAFDNVNENSSPEKTDATSSTTSPPSYDSVTKPDKEKYEQDRTEKEDKGKDSKESKK

SEQ ID NO: 803925 - protein, 396 aa, Homo sapiens [sequence omitted]

SEQ ID NO: 803926 - protein, 168 aa, Homo sapiens [sequence omitted]

SEQ ID NO: 803927 - protein, 100 aa, Homo sapiens
CMLTTTQTNGQGDQQNPAPAGQVDYTKAWEEYYKKMGQAVPAPTGAPPGGQPDYSAAWAEYYRQQAAYYAQTSPQGMPQHPPAPQKLPVCKKKIGLKWLL

SEQ ID NO: 803928 - protein, 84 aa, Homo sapiens
MSRTNNPGQGDQQNPAPAGQVDYTKAWEEYYKKMGQAVPAPTGAPPGGQPDYSAAWAEYYRQQAAYYAQTSPQGMPQHPPAPQV

SEQ ID NO: 803929 - protein, 114 aa, Homo sapiens
HRGMFVVSRCHFRKIPKIISFHFQVEHLTFWLCSIGNKIFVQQLQNIIADVLQFCLYLLTVLFAHLLLLLIPLCFLLNAGDDTPGRAAGAYHILVGNREPGRLQQKLEVMQGHH

SEQ ID NO: 803930 - protein, 644 aa, Homo sapiens
MADYSTVPPPSSGSAGGGGGGGGGGGVNDAFKDALQRARQIAAKIGGDAGTSLNSNDYGYGGQKRPLEDGDQPDAKKVAPQNDSFGTQLPPMHQQQSRSVMTEEYKVPDGMVGFIIGRGGEQISRIQQESGCKIQIAPDSGGLPERSCMLTGTPESVQSAKRLLDQIVEKGRPAPGFHHGDGPGNAVQEIMIPASKAGLVIGKGGETIKQLQERAGVKMVMIQDGPQNTGADKPLRITGDPYKVQQAKEMVLELIRDQGGFREVRNEYGSRIGGNEGIDVPIPRFAVGIVIGRNGEMIKKIQNDAGVRIQFKPDDGTTPERIAQITGPPDRCQHAAEIITDLLRSVQAGNPGGPGPGGRGRGRGQGNWNMGPPGGLQEFNFIVPTGKTGLIIGKGGETIKSISQQSGARIELQRNPPPNADPNMKLFTIRGTPQQIDYARQLIEEKIGGPVNPLGPPVPHGPHGVPGPHGPPGPPGPGTPMGPYNPAPYNPGPPGPAPHGPPAPYAPQGWGNAYPHWQQQAPPDPAKAGTDPNSAAWAAYYAHYYQQQAQPPPAAPAGAPTTTQTNGQGDQQNPAPAGQVDYTKAWEEYYKKMGQAVPAPTGAPPGGQPDYSAAWAEYYRQQAAYYAQTSPQGMPQHPPAPQGQ

SEQ ID NO: 803931 - protein, 383 aa, Homo sapiens
MADYSTVPPPSSGSAGGGGGGGGGGGVNDAFKDALQRARQIAAKIGGDAGTSLNSNDYGYGGQKRPLEDGDQPDAKKVAPQNDSFGTQLPPMHQQQSRSVMTEEYKVPDGMVGFIIGRGGEQISRIQQESGCKIQIAPDSGGLPERSCMLTGTPESVQSAKRLLDQIVEKGRPAPGFHHGDGPGNAVQEIMIPASKAGLVIGKGGETIKQLQERAGVKMVMIQDGPQNTGADKPLRITGDPYKVQQAKEMVLELIRDQGGFREVRNEYGSRIGGNEGIDVPIPRFAVGIVIGRNGEMIKKIQNDAGVRIQFKPDDGTTPERIAQITGPPDRCQHAAEIITDLLRSVQLDLVVEEEVEVKATGTWDHLVDYRNLILLCQLGKLD

SEQ ID NO: 803932 - protein, 594 aa, Homo sapiens
MADYSTVPPPSSGSAGGGGGGGGGGGVNDAFKDALQRARQIAAKIGGDAGTSLNSNDYGYGGQKRPLEDGDQPDAKKVAPQNDSFGTQLPPMHQQQSRSVMTEEYKVPDGMVGFIIGRGGEQISRIQQESGCKIQIAPDSGGLPERSCMLTGTPESVQSAKRLLDQIVEKGRPAPGFHHGDGPGNAVQEIMIPASKAGLVIGKGGETIKQLQERAGVKMVMIQDGPQNTGADKPLRITGDPYKVQQAKEMVLELIRDQGGFREVRNEYGSRIGGNEGIDVPIPRFAVGIVIGRNGEMIKKIQNDAGVRIQFKPDDGTTPERIAQITGPPDRCQHAAEIITDLLRSVQAGNPGGPGPGGRGRGRGQGNWNMGPPGGLQEFNFIVPTGKTGLIIGKGGETIKSISQQSGARIELQRNPPPNADPNMKLFTILVLQPHMLPRDGEMHIHTGSSRLLLIQLRQERIQIQQLGLLITLTIINSKHSHHQQPLQVHQLQLKLMDKEISRIQPQLDRLIIPRLGKSTTRKWVRQFLLRLGLLQVVSQIIVQPGLSIIDNKQPIMPRQVPRECHSILQHLRANNKKWTIQYLLHCVGEKNLC

SEQ ID NO: 803933 - protein, 644 aa, Homo sapiens; identical to SEQ ID NO: 803930

SEQ ID NO: 803934 - protein, 644 aa, Homo sapiens; identical to SEQ ID NO: 803930

SEQ ID NO: 803935 - protein, 644 aa, Homo sapiens; identical to SEQ ID NO: 803930

SEQ ID NO: 803936 - protein, 626 aa, Homo sapiens
MADYSTVPPPSSGSAGGGGGGGGGGGVNDAFKDALQRARQIAAKIGGDAGTSLNSNDYGYGGQKRPLEDGDQPDAKKVAPQNDSFGTQLPPMHQQQSRSVMTEEYKVPDGMVGFIIGRGGEQISRIQQESGCKIQIAPDSGGLPERSCMLTGTPESVQSAKRLLDQIVEKGRPAPGFHHGDGPGNAVQEIMIPASKAGLVIGKGGETIKQLQNALELGLQETHIYVQQAKEMVLELIRDQGGFREVRNEYGSRIGGNEGIDVPIPRFAVGIVIGRNGEMIKKIQNDAGVRIQFKPDDGTTPERIAQITGPPDRCQHAAEIITDLLRSVQAGNPGGPGPGGRGRGRGQGNWNMGPPGGLQEFNFIVPTGKTGLIIGKGGETIKSISQQSGARIELQRNPPPNADPNMKLFTIRGTPQQIDYARQLIEEKIGGPVNPLGPPVPHGPHGVPGPHGPPGPPGPGTPMGPYNPAPYNPGPPGPAPHGPPAPYAPQGWGNAYPHWQQQAPPDPAKAGTDPNSAAWAAYYAHYYQQQAQPPPAAPAGAPTTTQTNGQGDQQNPAPAGQVDYTKAWEEYYKKMGQAVPAPTGAPPGGQPDYSAAWAEYYRQQAAYYAQTSPQGMPQHPPAPQGQ

SEQ ID NO: 803937 - protein, 613 aa, Homo sapiens
SWSTSGSWQIAAKIGGDAGTSLNSNDYGYGGQKRPLEDGDQPDAKKVAPQNDSFGTQLPPMHQQQSRSVMTEEYKVPDGMVGFIIGRGGEQISRIQQESGCKIQIAPDSGGLPERSCMLTGTPESVQSAKRLLDQIVEKGRPAPGFHHGDGPGNAVQEIMIPASKAGLVIGKGGETIKQLQERAGVKMVMIQDGPQNTGADKPLRITGDPYKVQQAKEMVLELIRDQGGFREVRNEYGSRIGGNEGIDVPIPRFAVGIVIGRNGEMIKKIQNDAGVRIQFKPDDGTTPERIAQITGPPDRCQHAAEIITDLLRSVQAGNPGGPGPGGRGRGRGQGNWNMGPPGGLQEFNFIVPTGKTGLIIGKGGETIKSISQQSGARIELQRNPPPNADPNMKLFTIRGTPQQIDYARQLIEEKIGGPVNPLGPPVPHGPHGVPGPHGPPGPPGPGTPMGPYNPAPYNPGPPGPAPHGPPAPYAPQGWGNAYPHWQQQAPPDPAKAGTDPNSAAWAAYYAHYYQQQAQPPPAAPAGAPTTTQTNGQGDQQNPAPAGQVDYTKAWEEYYKKMGQAVPAPTGAPPGGQPDYSAAWAEYYRQQAAYYAQTSPQGMPQHPPAPQGQ

SEQ ID NO: 803938 - protein, 665 aa, Homo sapiens
MADYSTVPPPSSGSAGGGGGGGGGGGVNDAFKDALQRARQIAAKIGGDAGTSLNSNDYGYGGQKRPLEDGDGSWTSPSSTTHWEGMPSPFKDQPDAKKVAPQNDSFGTQLPPMHQQQSRSVMTEEYKVPDGMVGFIIGRGGEQISRIQQESGCKIQIAPDSGGLPERSCMLTGTPESVQSAKRLLDQIVEKGRPAPGFHHGDGPGNAVQEIMIPASKAGLVIGKGGETIKQLQERAGVKMVMIQDGPQNTGADKPLRITGDPYKVQQAKEMVLELIRDQGGFREVRNEYGSRIGGNEGIDVPIPRFAVGIVIGRNGEMIKKIQNDAGVRIQFKPDDGTTPERIAQITGPPDRCQHAAEIITDLLRSVQAGNPGGPGPGGRGRGRGQGNWNMGPPGGLQEFNFIVPTGKTGLIIGKGGETIKSISQQSGARIELQRNPPPNADPNMKLFTIRGTPQQIDYARQLIEEKIGGPVNPLGPPVPHGPHGVPGPHGPPGPPGPGTPMGPYNPAPYNPGPPGPAPHGPPAPYAPQGWGNAYPHWQQQAPPDPAKAGTDPNSAAWAAYYAHYYQQQAQPPPAAPAGAPTTTQTNGQGDQQNPAPAGQVDYTKAWEEYYKKMGQAVPAPTGAPPGGQPDYSAAWAEYYRQQAAYYAQTSPQGMPQHPPAPQGQ

SEQ ID NO: 803939 - protein, 398 aa, Homo sapiens
MNEEIKFKGVTNFYQSDLSDMVELGKDGANFMSVPIPRFAVGIVIGRNGEMIKKIQNDAGVRIQFKPDDGTTPERIAQITGPPDRCQHAAEIITDLLRSVQAGNPGGPGPGGRGRGRGQGNWNMGPPGGLQEFNFIVPTGKTGLIIGKGGETIKSISQQSGARIELQRNPPPNADPNMKLFTIRGTPQQIDYARQLIEEKIGGPVNPLGPPVPHGPHGVPGPHGPPGPPGPGTPMGPYNPAPYNPGPPGPAPHGPPAPYAPQGWGNAYPHWQQQAPPDPAKAGTDPNSAAWAAYYAHYYQQQAQPPPAAPAGAPTTTQTNGQGDQQNPAPAGQVDYTKAWEEYYKKMGQAVPAPTGAPPGGQPDYSAAWAEYYRQQAAYYAQTSPQGMPQHPPAPQGQ

SEQ ID NO: 803940 - protein, 375 aa, Homo sapiens
CCVVLEDPNVVPIPRFAVGIVIGRNGEMIKKIQNDAGVRIQFKPDDGTTPERIAQITGPPDRCQHAAEIITDLLRSVQAGNPGGPGPGGRGRGRGQGNWNMGPPGGLQEFNFIVPTGKTGLIIGKGGETIKSISQQSGARIELQRNPPPNADPNMKLFTIRGTPQQIDYARQLIEEKIGGPVNPLGPPVPHGPHGVPGPHGPPGPPGPGTPMGPYNPAPYNPGPPGPAPHGPPAPYAPQGWGNAYPHWQQQAPPDPAKAGTDPNSAAWAAYYAHYYQQQAQPPPAAPAGAPTTTQTNGQGDQQNPAPAGQVDYTKAWEEYYKKMGQAVPAPTGAPPGGQPDYSAAWAEYYRQQAAYYAQTSPQGMPQHPPAPQGQ

SEQ ID NO: 803941 - protein, 644 aa, Homo sapiens; identical to SEQ ID NO: 803930

SEQ ID NO: 803942 - protein, 644 aa, Homo sapiens; identical to SEQ ID NO: 803930

SEQ ID NO: 803943 - protein, 644 aa, Homo sapiens; identical to SEQ ID NO: 803930

SEQ ID NO: 803944 - protein, 644 aa, Homo sapiens; identical to SEQ ID NO: 803930

SEQ ID NO: 803945 - protein, 644 aa, Homo sapiens; identical to SEQ ID NO: 803930

SEQ ID NO: 803946 - protein, 644 aa, Homo sapiens; identical to SEQ ID NO: 803930

SEQ ID NO: 803947 - protein, 668 aa, Homo sapiens
MADYSTVPPPSSGSAGGGGGGGGGGGVNDAFKDALQRARQIAAKIGGDAGTSLNSNDYGYGGQKRPLEDGDQPDAKKVAPQNDSFGTQLPPMHQQQSRSVMTEEYKVPDGMVGFIIGRGGEQISRIQQESGCKIQIAPDSGGLPERSCMLTGTPESVQSAKRLLDQIVEKGRPAPGFHHGDGPGNAVQEIMIPASKAGLVIGKGGETIKQLQERAGVKMVMIQDGPQNTGADKPLRITGDPYKVQQAKEMVLELIRDQGGFREVRNEYGSRIGGNEGIDVPIPRFAVGIVIGRNGEMIKKIQNDAGVRIQFKPDDGTTPERIAQITGPPDRCQHAAEIITDLLRSVQAGNPGGPGPGGRGRGRGQGNWNMGPPGGLQEFNFIVPTGKTGLIIGKGGETIKSISQQSGARIELQRNPPPNADPNMKLFTIRGTPQQIDYARQLIEEKIGGPVNPLGPPVPHGPHGVPGPHGPPGPPGPGTPMGPYNPAPYNPGPPGPAPHGPPAPYAPQGWGNAYPHWQQQAPPDPAKAGTDPNSAAWAAYYAHYYQQQAQPPPAAPAGAPTTTQTNGQGDQQNPAPAGQVDYTKAWEEYYKKMGQAVPAPTGAPPGGQPDYSAAWAEYYRQQAAYYAQTSPQGMPQHPPAPQCLPRPSTLGSAAKSTRNYPCVKRRLA

SEQ ID NO: 803948 - protein, 643 aa, Homo sapiens
MADYSTVPPPSSGSAGGGGGGGGGGGVNDAFKDALQRARQIAAKIGGDAGTSLNSNDYGYGGQKRPLEDGDQPDAKKVAPQNDSFGTQLPPMHQQQSRSVMTEEYKVPDGMVGFIIGRGGEQISRIQQESGCKIQIAPDSGGLPERSCMLTGTPESVQSAKRLLDQIVEKGRPAPGFHHGDGPGNAVQEIMIPASKAGLVIGKGGETIKQLQERAGVKMVMIQDGPQNTGADKPLRITGDPYKVQQAKEMVLELIRDQGGFREVRNEYGSRIGGNEGIDVPIPRFAVGIVIGRNGEMIKKIQNDAGVRIQFKPDDGTTPERIAQITGPPDRCQHAAEIITDLLRSVQAGNPGGPGPGGRGRGRGQGNWNMGPPGGLQEFNFIVPTGKTGLIIGKGGETIKSISQQSGARIELQRNPPPNADPNMKLFTIRGTPQQIDYARQLIEEKIGGPVNPLGPPVPHGPHGVPGPHGPPGPPGPGTPMGPYNPAPYNPGPPGPAPHGPPAPYAPQGWGNAYPHWQQQAPPDPAKAGTDPNSAAWAAYYAHYYQQQAQPPPAAPAGAPTTTQTNGQGDQQNPAPAGQVDYTKAWEEYYKKMGQAVPAPTGAPPGGQPDYSAAWAEYYRQQAAYYAQTSPQGMPQHPPAPQV

SEQ ID NO: 803949 - protein, 452 aa, Homo sapiens [sequence omitted]

SEQ ID NO: 803950 - protein, 463 aa, Homo sapiens
MADYSTVPPPSSGSAGGGGGGGGGGGVNDAFKDALQRARQIAAKIGGDAGTSLNSNDYGYGGQKRPLEDGDQPDAKKVAPQNDSFGTQLPPMHQQQSRSVMTEEYKVPDGMVGFIIGRGGEQISRIQQESGCKIQIAPDSGGLPERSCMLTGTPESVQSAKRLLDQIVEKGRPAPGFHHGDGPGNAVQEIMIPASKAGLVIGKGGETIKQLQERAGVKMVMIQDGPQNTGADKPLRITGDPYKVQQAKEMVLELIRDQGGFREVRNEYGSRIGGNEGIDVPIPRFAVGIVIGRNGEMIKKIQNDAGVRIQFKPDDGTTPERIAQITGPPDRCQHAAEIITDLLRSVQAGNPGGPGPGGRGRGRGQGNWNMGPPGGLQEFNFIVPTGKTGLIIGKGGETIKSISQQSGARIELQRNPPPNADPNMKLFTIRGTPQQIDYARQLIEEKIGGPVNPLGPLTPWSHR

SEQ ID NO: 803951 - protein, 217 aa, Homo sapiens
MADYSTVPPPSSGSAGGGGGGGGGGGVNDAFKDALQRARQIAAKIGGDAGTSLNSNDYGYGGQKRPLEDGDQPDAKKVAPQNDSFGTQLPPMHQQQSRSVMTEEYKVPDGMVGFIIGRGGEQISRIQQESGCKIQIAPDSGGLPERSCMLTGTPESVQSAKRLLDQIVEKGRPAPGFHHGDGPGNAVQEIMIPASKAGLVIGKGGETIKQLQVLLFL

SEQ ID NO: 803952 - protein, 765 aa, Homo sapiens
MAGFKRGYDGKIAGLYDLDKTLGRGHFAVVKLARHVFTGEKVAVKVIDKTKLDTLATGHLFQEVRCMKLVQHPNIVRLYEVIDTQTKLYLILELGDGGDMFDYIMKHEEGLNEDLAKKYFAQIVHAISYCHKLHVVHRDLKPENVVFFEKQGLVKLTDFGFSNKFQPGKKLTTSCGSLAYSAPEILLGDEYDAPAVDIWSLGVILFMLVCGQPPFQEANDSETLTMIMDCKYTVPSHVSKECKDLITRMLQRDPKRRASLEEIENHPWLQGVDPSPATKYNIPLVSYKNLSEEEHNSIIQRMVLGDIADRDAIVEALETNRYNHITATYFLLAERILREKQEKEIQTRSASPSNIKAQFRQSWPTKIDVPQDLEDDLTATPLSHATVPQSPARAADSVLNGHRSKGLCDSAKKDDLPELAGPALSTVPPASLKPTASGRKCLFRVEEDEEEDEEDKKPMSLSTQVVLRRKPSVTNRLTSRKSAPVLNQIFEEGESDDEFDMDENLPPKLSRLKMNIASPGTVHKRYHRRKSQGRGSSCSSSETSDDDSESRRRLDKDSGFTYSWHRRDSSEGPPGSEGDGGGQSKPSNASGGVDKASPSENNAGGGSPSSGSGGNPTNTSGTTRRCAGPSNSMQLASRSAGELVESLKLMSLCLGSQLHGSTKYIIDPQNGLSFSSVKVQEKSTWKMCISSTGNAGQVPAVGGIKFFSDHMADTTTELERIKSKNLKNNVLQLPLCEKTISVNIQRNPKEGLLCASSPASCCHVI

SEQ ID NO: 803953 - protein, 765 aa, Homo sapiens; identical to SEQ ID NO: 803952

SEQ ID NO: 803954 - protein, 765 aa, Homo sapiens; identical to SEQ ID NO: 803952

SEQ ID NO: 803955 - protein, 417 aa, Homo sapiens [sequence omitted]

SEQ ID NO: 803956 - protein, 116 aa, Homo sapiens
PVDYYSDSLWCSTKYIIDPQNGLSFSSVKVQEKSTWKMCISSTGNAGQVPAVGGIKFFSDHMADTTTELERIKSKNLKNNVLQLPLCEKTISVNIQRNPKEGLLCASSPASCCHVI

SEQ ID NO: 803957 - protein, 244 aa, Homo sapiens
MAGFKRGYDGKIAGLYDLDKTLGRGHFAVVKLARHVFTGEKVAVKVIDKTKLDTLATGHLFQEVRCMKLVQHPNIVRLYEVIDTQTKLYLILELGDGGDMFDYIMKHEEGLNEDLAKKYFAQIVHAISYCHKLHVVHRDLKPENVVFFEKQGLVKLTDFGFSNKFQPGKKLTTSCGSLAYSAPEILLGDEYDAPAVDIWSLGVILFMLVCGQPPFQEANDSETLTMIMDCKYTVPSHVSKECKE

SEQ ID NO: 803958 - protein, 765 aa, Homo sapiens; identical to SEQ ID NO: 803952

SEQ ID NO: 803959 - protein, 376 aa, Homo sapiens
MAGFKRGYDGKIAGLYDLDKTLGRGHFAVVKLARHVFTGEKVAVKVIDKTKLDTLATGHLFQEVRCMKLVQHPNIVRLYEVIDTQTKLYLILELGDGGDMFDYIMKHEEGLNEDLAKKYFAQIVHAISYCHKLHVVHRDLKPENVVFFEKQGLVKLTDFGFSNKFQPGKKLTTSCGSLAYSAPEILLGDEYDAPAVDIWSLGVILFMLVCGQPPFQEANDSETLTMIMDCKYTVPSHVSKECKDLITRMLQRDPKRRASLEEIENHPWLQGVDPSPATKYNIPLVSYKNLSEEEHNSIIQRMVLGDIADRDAIVEALETNRYNHITATYFLLAERILREKQEKEIQTRSASPSNIKAQFRGSAGLDLLKLCLHFLQ

SEQ ID NO: 803960 - protein, 156 aa, Homo sapiens
STDCSKLRQTMQIHVLLEEALPSGDHRGGVTVADHVGRGAGGLAPARGGLRAAGCSVLGRFDLEPRVTQSFGKVVVHGARDGHGVGCRLGLLVILAQAPAEMLLHHGVTGGGSARWPPVAGRPGRGLVPNSARGGFGGREGVVGAAAAADGRSPAG

SEQ ID NO: 803961 - protein, 399 aa, Homo sapiens
MPQLSGGGGGGGGDPELCATDEMIPFKDEGDPQKEKIFAEISHPEEEGDLADIKSSLVNESEIIPASNGHEVARQAQTSQEPYHDKAREHPDDGKHPDGGLYNKGPSYSSYSGYIMMPNMNNDPYMSNGSLSPPIPRTSNKVPVVQPSHAVHPLTPLITYSDEHFSPGSHPSHIPSDVNSKQGMSRHPPAPDIPTFYPLSPGGVGQITPPLGWQGQPVYPITGGFRQPYPSSLSVDTSMSRFSHHMIPGPPGPHTTGIPHPAIVTPQVKQEHPHTDSDLMHVKPQHEQRKEQEPKRPHIKKPLNAFMLYMKEMRANVVAECTLKESAAINQILGRRWHALSREEQAKYYELARKERQLHMQLYPGWSARDNYGKKKKRKREKLQESASGTGPRMTAAYI

SEQ ID NO: 803962 - protein, 371 aa, Homo sapiens
MPQLSGGGGGGGGDPELCATDEMIPFKDEGDPQKEKIFAEISHPEEEGDLADIKSSLVNESEIIPASNGHEVARQAQTSQEPYHDKAREHPDDGKHPDGGLYNKGPSYSSYSGYIMMPNMNNDPYMSNGSLSPPIPRTSNKVPVVQPSHAVHPLTPLITYSDEHFSPGSHPSHIPSDVNSKQGMSRHPPAPDIPTFYPLSPGGVGQITPPLGWFSHHMIPGPPGPHTTGIPHPAIVTPQVKQEHPHTDSDLMHVKPQHEQRKEQEPKRPHIKKPLNAFMLYMKEMRANVVAECTLKESAAINQILGRRWHALSREEQAKYYELARKERQLHMQLYPGWSARDNYGKKKKRKREKLQESASGTGPRMTAAYI

SEQ ID NO: 803963 - protein, 329 aa, Homo sapiens
MPQLSGGGGGGGGDPELCATDEMIPFKDEGDPQKEKIFAEISHPEEEGDLADIKSSLVNESEIIPASNGHEVARQAQTSQEPYHDKAREHPDDGKHPDGGLYNKGPSYSSYSGYIMMPNMNNDPYMSNGSLSPPIPRTSNKVPVVQPSHAVHPLTPLITYSDEHFSPGSHPSHIPSDVNSKQGMSRHPPAPDIPTFYPLSPGGVGQITPPLGWQGQPVYPITGGFRQPYPSSLSVDTSMSRFSHHMIPGPPGPHTTGIPHPAIVTPQVKQEHPHTDSDLMHVCSAFLLPHPFLIPSTPSPNHHHHHLLGSLSMNRERSRSQKDLTLRSL

SEQ ID NO: 803964 - protein, 399 aa, Homo sapiens; identical to SEQ ID NO: 803961

SEQ ID NO: 803965 - protein, 414 aa, Homo sapiens
MPQLSGGGGGGGGDPELCATDEMIPFKDEGDPQKEKIFAEISHPEEEGDLADIKSSLVNESEIIPASNGHEVARQAQTSQEPYHDKAREHPDDGKHPDGGLYNKGPSYSSYSGYIMMPNMNNDPYMSNGSLSPPIPRTSNKVPVVQPSHAVHPLTPLITYSDEHFSPGSHPSHIPSDVNSKQGMSRHPPAPDIPTFYPLSPGGVGQITPPLGWQGQPVYPITGGFRQPYPSSLSVDTSMSRFSHHMIPGPPGPHTTGIPHPAIVTPQVKQEHPHTDSDLMHVKPQHEQRKEQEPKRPHIKKPLNAFMLYMKEMRANVVAECTLKESAAINQILGRRWHALSREEQAKYYELARKERQLHMQLYPGWSARDNYGKKKKRKREKLQESASGGKRSSFPTCKAKAATPGPLLEMEAC

SEQ ID NO: 803966 - protein, 338 aa, Homo sapiens
RSAFSIPMAEVARQAQTSQEPYHDKAREHPDDGKHPDGGLYNKGPSYSSYSGYIMMPNMNNDPYMSNGSLSPPIPRTSNKVPVVQPSHAVHPLTPLITYSDEHFSPGSHPSHIPSDVNSKQGMSRHPPAPDIPTFYPLSPGGVGQITPPLGWQGQPVYPITGGFRQPYPSSLSVDTSMSRFSHHMIPGPPGPHTTGIPHPAIVTPQVKQEHPHTDSDLMHVKPQHEQRKEQEPKRPHIKKPLNAFMLYMKEMRANVVAECTLKESAAINQILGRRWHALSREEQAKYYELARKERQLHMQLYPGWSARDNYGKKKKRKREKLQESASGTGPRMTAAYI

SEQ ID NO: 803967 - protein, 399 aa, Homo sapiens; identical to SEQ ID NO: 803961

SEQ ID NO: 803968 - protein, 363 aa, Homo sapiens
MPQLSGGGGGGGGDPELCATDEMIPFKDEGDPQKEKIFAEISHPEEEGDLADIKSSLVNESEIIPASNGHEVARQAQTSQEPYHDKAREHPDDGKHPDGGLYNKGPSYSSYSGYIMMPNMNNDPYMSNGSLSPPIPRTSNKVPVVQPSHAVHPLTPLITYSDEHFSPGSHPSHIPSDVNSKQGMSRHPPAPDIPTFYPLSPGGVGQITPPLGWQGQPVYPITGGFRQPYPSSLSVDTSMSRFSHHMIPGPPGPHTTGIPHPAIVTPQVKQEHPHTDSDLMHVKPQHEQRKEQEPKRPHIKKPLNAFMLYMKEMRANVVAECTLKESAAINQILGRRGKKKKRKREKLQESASGTGPRMTAAYI

SEQ ID NO: 803969 - protein, 371 aa, Homo sapiens; identical to SEQ ID NO: 803962

SEQ ID NO: 803970 - protein, 155 aa, Homo sapiens
MMFPFVSSLVFLPMKVCNTRAAMNGKESHSLQWEGSKMGSSTPESWGRAGAGRLPADRLCVHTDGSPWKVLLADPGIGEVGKIHEHCLLGTGWHALSREEQAKYYELARKERQLHMQLYPGWSARDNYGKKKKRKREKLQESASGTGPRMTAAYI

SEQ ID NO: 803971 - protein, 103 aa, Homo sapiens
MGKNLIACNGKEAKWEAPHLRVGGEQEQGGSQLTDCVCTQWHALSREEQAKYYELARKERQLHMQLYPGWSARDNYGKKKKRKREKLQESASGTGPRMTAAYI

SEQ ID NO: 803972 - protein, 235 aa, Homo sapiens
MPQLSGGGGGGGGDPELCATDEMIPFKDEGDPQKEKIFAEISHPEEEGDLADIKSSLVNESEIIPASNGHEVARQAQTSQEPYHDKAREHPDDGKHPDGGLYNKGPSYSSYSGYIMMPNMNNDPYMSNGSLSPPIPRTFPIFRVNSLKRSGCQYAGSLTSTSPVSLPKRAHFTSLENSQPSKSTPASLSFRGQDKEEKKKLGEERGRETEEFHDSLTVYGFHWCLGNCGTSGCLR

SEQ ID NO: 803973 - protein, 438 aa, Homo sapiens
MPQLSGGGGGGGGDPELCATDEMIPFKDEGDPQKEKIFAEISHPEEEGDLADIKSSLVNESEIIPASNGHEVARQAQTSQEPYHDKAREHPDDGKHPDGGLYNKGPSYSSYSGYIMMPNMNNDPYMSNGSLSPPIPRTSNKVPVVQPSHAVHPLTPLITYSDEHFSPGSHPSHIPSDVNSKQGMSRHPPAPDIPTFYPLSPGGVGQITPPLGWQGQPVYPITGGFRQPYPSSLSVDTSMSRFSHHMIPGPPGPHTTGIPHPAIVTPQVKQEHPHTDSDLMHVKPQHEQRKEQEPKRPHIKKPLNAFMLYMKEMRANVVAECTLKESAAINQILGRRWHALSREEQAKYYELARKERQLHMQLYPGWSARDNYVSPSSIPVALHSHSFALLRSRRKCVLGVYNAGTTYFLEVNELCNKDFMDILHYESFELSFFFCYGC

SEQ ID NO: 803974 - protein, 147 aa, Homo sapiens
MPQLSGGGGGGGGDPELCATDEMIPFKDEGDPQKEKIFAEISHPEEEGDLADIKSSLVNESEIIPASNGHEVARQAQTSQEPYHDKAREHPDDGKHPDGGLYNKGPSYSSYSGYIMMPNMNNDPYMSNGSLSPPIPRTEFFCLFWWH

SEQ ID NO: 803975 - protein, 79 aa, Homo sapiens
RTALASSPRSRYTVTNGRGGSSAADYGLIAWCFEIRSRYPVSTQLCVEHVHAWVPGFNLIFPNSMTLTCPHEDAPGHGT

SEQ ID NO: 803976 - protein, 157 aa, Homo sapiens
  misc_feature (60)..(60): Xaa can be any naturally occurring amino acid
  misc_feature (80)..(80): Xaa can be any naturally occurring amino acid
  misc_feature (140)..(140): Xaa can be any naturally occurring amino acid
MLDGRQRRGIECSHIRHAWDHAKSVRQNLAEMGLAVDPNRAVPLRKRKRSRQQQGSQGPXWQGLGTIKARHDRPLKLCSXLGKRGKRAPLNGWALREDENPLWGQGAPRPQGPPRPPFFPKGKHTPGEQPRRTTTQIITXPPWVFPFPAGGKTPPFP

SEQ ID NO: 803977 - protein, 154 aa, Homo sapiens
MLDGRQRRGIECSHIRHAWDHAKSVRQNLAEMGLAVDPNRAVPLRKRKVKAMEVDIEERPKELVRKPYVLNDLEAEASLPEKKGNTLSRDLIDYVRYMVENHGEDYKAMARDEKNYYQDTPKQIRSKINVYKRFYPAEWQDFLDSLQKRKMEVE

SEQ ID NO: 803978 - protein, 110 aa, Homo sapiens
KTVVGGAMFFIGFTALVIMWQKPYVLNDLEAEASLPEKKGNTLSRDLIDYVRYMVENHGEDYKAMARDEKNYYQDTPKQIRSKINVYKRFYPAEWQDFLDSLQKRKMEVE

SEQ ID NO: 803979 - protein, 126 aa, Homo sapiens
MLDGRQRRGIECSHIRHAWDHAKSVRQNLAEMGLAVDPNRAVPLRKRKVKAMEVDIEERPKELVRKPYVLNDLEAEASLPEKKGNTLSRDLIDYVRYMVENHGEDYKVSGSGPVGWLGRRPGPFAA

SEQ ID NO: 803980 - protein, 214 aa, Homo sapiens
MLDGRQRRGIECSHIRHAWDHAKSVRQNLAEMGLAVDPNRAVPLRKRKVKAMEVDIEERPKELVRKPYVLNDLEAEASLPEKKGNTLSRDLIDYVRYMVENHGEDYKAMARDEKNYYQDTPKQIRSKINVYKRFYPAEWQDFLDSLQKRKMEVLCGSRGAGQVPWNQKVTHTRAHSPLWGRNCSQRLQFIFIWGFTEKPEPAVFRVGDVNIVCT

SEQ ID NO: 803981 - protein, 124 aa, Homo sapiens
MLDGRQRRGIECSHIRHAWDHAKSVRQNLAEMGLAVDPNRAVPLRKRKVKAMEVDIEERPKELVRKPYVLNDLEAEASLPEKKGNTLSRDLIDYVRYMVENHGEDYKEWQDFLDSLQKRKMEVE

SEQ ID NO: 803982 - protein, 154 aa, Homo sapiens; identical to SEQ ID NO: 803977

SEQ ID NO: 803983 - protein, 208 aa, Homo sapiens
MPKAKGKTRRQKFGYSVNRKRLNRNARRKAAPRDRMVRGLGFRVAVGLGRDGPRDDGSAMSLFAGSSHIRHAWDHAKSVRQNLAEMGLAVDPNRAVPLRKRKVKAMEVDIEERPKELVRKPYVLNDLEAEASLPEKKGNTLSRDLIDYVRYMVENHGEDYKAMARDEKNYYQDTPKQIRSKINVYKRFYPAEWQDFLDSLQKRKMEVE

SEQ ID NO: 803984 - protein, 124 aa, Homo sapiens; identical to SEQ ID NO: 803981

SEQ ID NO: 803985 - protein, 154 aa, Homo sapiens; identical to SEQ ID NO: 803977

SEQ ID NO: 803986 - protein, 130 aa, Homo sapiens
MVQRGPPESQGRESPCPGHSSRRKSGLRPQPPGEGHERGGETNKLSLVRRRKCSLHPGSRSAQHGSATKGLHFPKCPQSLVHAFRKEFVTRGLRDRGSVFELLVRWSARCPRPRAKPGGRSLVTVSTESV

SEQ ID NO: 803987 - protein, 102 aa, Homo sapiens
TQDIYVWGRTTRLGNDCNYVEVSSCEEVSMAPASGRPMTTKHHGTSVSIFKFPSSVSFFGCIPLCLLQECWAPAAVVDGPQIWLVQAPLLQGFKRPLQSVCF

SEQ ID NO: 803988 - protein, 194 aa, Homo sapiens
  misc_feature (10)..(10): Xaa can be any naturally occurring amino acid
TPGGIMKEPXRKMFLSKFAEKMHIEAEEEVSEALHDVDFQQLKIENAQFLETIEARNQELTQLKLSSGNTLQVLNAYKSKLHKAMEIYLNLDKEILLRKELLEKIEKETLQVEEDRAKAEAVNKRLRKQLAEFRAPQVMTYVREKILNADLEKSIRMWERKVEIAEMSLKGHRKAWNRMKITNEQLQADYLAGK

SEQ ID NO: 803989 - protein, 80 aa, Homo sapiens
ASRVSPVVNKRLRKQLAEFRAPQVMTYVREKILNADLEKSIRMWERKVEIAEMSLKGHRKAWNRMKITNEQLQADYLAGK

SEQ ID NO: 803990 - protein, 224 aa, Homo sapiens
MSAVGAATPYLHHPGDSHSGRVSFLGAQLPPEVAAMARLLGDLDRSTFRKLLKFVVSSLQGEDCREAVQRLGVSANLPEEQLGALLAGMHTLLQQALRLPPTSLKPDTFRDQLQELCIPQDLVGDLASVVFGSQRPLLDSVAQQQGAWLPHVADFRWRVDVAISTSALARSLQPSVLMQLKLSDGSAYRFEVPTAKFQELRYSVALVLKEMADLEKRCERRLQD

SEQ ID NO: 803991 - protein, 268 aa, Homo sapiens
RKWLSGRFRGPGPLLAASAGDCRRQASASGTDLLGWLIKEEAAAMSAVGAATPYLHHPGDSHSGRVSFLGAQLPPEVAAMARLLGDLDRSTFRKLLKFVVSSLQGEDCREAVQRLGVSANLPEEQLGALLAGMHTLLQQALRLPPTSLKPDTFRDQLQELCIPQDLVGDLASVVFGSQRPLLDSVAQQQGAWLPHVADFRWRVDVAISTSALARSLQPSVLMQLKLSDGSAYRFEVPTAKFQELRYSVALVLKEMADLEKRCERRLQD

SEQ ID NO: 803992 - protein, 224 aa, Homo sapiens; identical to SEQ ID NO: 803990

SEQ ID NO: 803993 - protein, 224 aa, Homo sapiens; identical to SEQ ID NO: 803990

SEQ ID NO: 803994 - protein, 224 aa, Homo sapiens; identical to SEQ ID NO: 803990

SEQ ID NO: 803995 - protein, 224 aa, Homo sapiens; identical to SEQ ID NO: 803990

SEQ ID NO: 803996 - protein, 268 aa, Homo sapiens; identical to SEQ ID NO: 803991

SEQ ID NO: 803997 - protein, 268 aa, Homo sapiens; identical to SEQ ID NO: 803991

SEQ ID NO: 803998 - protein, 268 aa, Homo sapiens; identical to SEQ ID NO: 803991

SEQ ID NO: 803999 - protein, 201 aa, Homo sapiens
MSAVGAATPYLHHPGDSHSGRVSFLGAQLPPEVAAMARLLGDLDRSTFRKLLKFVVSSLQGEDCREAVQRLGVSANLPEEQLGALLAGMHTLLQQALRLPPTSLKPDTFRDQLQELCIPQDLVGDLASVVFGSQRPLLDSVAQQQGAWLPHVADFRWRVDVAISTSALARSLQPSVLMQLKLSDGSAYADLEKRCERRLQD

SEQ ID NO: 804000 - protein, 207 aa, Homo sapiens
MSAVGAATPYLHHPGDSHSGRVSFLGAQLPPEVAAMARLLGDLDRSTFRKLLKFVVSSLQGEDCREAVQRLGVSANLPEEQLGALLAGMHTLLQQALRLPPTSLKPDTFRDQLQELCIPQDLVGDLASVVFGSQRPLLDSVAQQQGAWLPHVADFRWRVDVAISTSALARSRFEVPTAKFQELRYSVALVLKEMADLEKRCERRLQD

SEQ ID NO: 804001 - protein, 225 aa, Homo sapiens
MSAVGAATPYLHHPGDSHSGRVSFLGAQLPPEVAAMARLLGDLDRSTFRKLLKFVVSSLQGEDCREAVQRLGVSANLPEEQLGALLAGMHTLLQQALRLPPTSLKPDTFRDQLQELCIPQDLVGDLASVVFGSQRPLLDSVAQQQGAWLPHVADFRWRVDVAISTSALARSLQPSVLMQLKLSDGSAYRFEVPTAKFQELRYSVALVLKEMTGISHHTRPEVGYS

SEQ ID NO: 804002 - protein, 163 aa, Homo sapiens
RLGGVRVGRGKGWGFDPFLPLTGPTPPPRGRALKMLSSSSVQGGAEGRMQREKQVSSWNPRNLQPLPTHLPSRISIPQPLAPSTPPAPPTRPYSPPAPGEGWGRAAVSQPRAARLTWPSLRWGRRPRLPGPPQLRQAPQGPGPSGRALRSLSSSAPCGPENSP

SEQ ID NO: 804003 - protein, 199 aa, Homo sapiens
METFPLLLLSLGLVLAEASESTMKIIKEEFTDEEMQYDMAKSGQEKQTIEILMNPILLVKNTSLSMSKDDMSSTLLTFRSLHYNDPKGNSSGNDKECCNDMTVWRKVSEANGSCKWSNNFIRSSTEVMRRVHRAPSCKFVQNPGISCCESLELENTVCQFTTGKQFPRCQYHSVTSLEKILTVLTGHSLMSWLVCGSKL

SEQ ID NO: 804004 - protein, 199 aa, Homo sapiens; identical to SEQ ID NO: 804003

SEQ ID NO: 804005 - protein, 199 aa, Homo sapiens; identical to SEQ ID NO: 804003

SEQ ID NO: 804006 - protein, 199 aa, Homo sapiens; identical to SEQ ID NO: 804003

SEQ ID NO: 804007 - protein, 199 aa, Homo sapiens; identical to SEQ ID NO: 804003

SEQ ID NO: 804008 - protein, 199 aa, Homo sapiens; identical to SEQ ID NO: 804003

SEQ ID NO: 804009 - protein, 253 aa, Homo sapiens
MSWIPFKIGQPKKQIVPKTVERDFEREYGKLQQLEEQTRRLQKDMKKSTDADLAMSKSAVKISLDLLSNPLCEQDQDLLNMVTALDTAMKRMDAFNQEKVNQIQKTVIEPLKKFGSVFPSLNMAVKRREQALQDYRRLQAKVEKYEEKEKTGPVLAKLHQAREELRPVREDFEAKNRQLLEEMPRFYGSRLDYFQPSFESLIRAQVVYYSEMHKIFGDLSHQLDQPGHSDEQRERENEAKLSELRALSIVADD

SEQ ID NO: 804010 - protein, 253 aa, Homo sapiens; identical to SEQ ID NO: 804009

SEQ ID NO: 804011 - protein, 199 aa, Homo sapiens
MSKSAVKISLDLLSNPLCEQDQDLLNMVTALDTAMKRMDAFNQEKVNQIQKTVIEPLKKFGSVFPSLNMAVKRREQALQDYRRLQAKVEKYEEKEKTGPVLAKLHQAREELRPVREDFEAKNRQLLEEMPRFYGSRLDYFQPSFESLIRAQVVYYSEMHKIFGDLSHQLDQPGHSDEQRERENEAKLSELRALSIVADD

SEQ ID NO: 804012 - protein, 392 aa, Homo sapiens
MASSPTDNCCHCLWIRNHLTEGTARLRALHGQVKRSLGVSVEGRKRPQRFPSSPVAACVSKRLARARESPARETPRRARSSRRVNAPGSASQPPLPGREAGFTSLPGDWLNPEVTLEKRVVAEDPGGRRRFGTMSWIPFKIGQPKKQIVPKTVERDFEREYGKLQQLEEQTRRLQKDMKKSTDADLAMSKSAVKISLDLLSNPLCEQDQDLLNMVTALDTAMKRMDAFNQEKVNQIQKTVIEPLKKFGSVFPSLNMAVKRREQALQDYRRLQAKVEKYEEKEKTGPVLAKLHQAREELRPVREDFEAKNRQLLEEMPRFYGSRLDYFQPSFESLIRAQEEATGCQAPACPGGADGRPGMPFNQAALLGAVDCLLGPSLPLARPAAISHGEVS

SEQ ID NO: 804013 - protein, 149 aa, Homo sapiens
MSWIPFKIGQPKKQIVPKTVERDFEREYGKLQQLEEQTRRLQKDMKKSTDADLAMSKSAVKISLDLLSNPLCEQDQDLLNMVTALDTAMKRMDAFNQEKVNQIQKTVIEPLKKRNQLFWSWVTSEWPQSHELPGLRSLILDTAGLWLAW

SEQ ID NO: 804014 - protein, 199 aa, Homo sapiens; identical to SEQ ID NO: 804011

SEQ ID NO: 804015 - protein, 209 aa, Homo sapiens
MKKSTDADLAMSKSAVKISLDLLSNPLCEQDQDLLNMVTALDTAMKRMDAFNQEKVNQIQKTVIEPLKKFGSVFPSLNMAVKRREQALQDYRRLQAKVEKYEEKEKTGPVLAKLHQAREELRPVREDFEAKNRQLLEEMPRFYGSRLDYFQPSFESLIRAQVVYYSEMHKIFGDLSHQLDQPGHSDEQRERENEAKLSELRALSIVADD

SEQ ID NO: 804016 - protein, 199 aa, Homo sapiens; identical to SEQ ID NO: 804011

SEQ ID NO: 804017 - protein, 191 aa, Homo sapiens
MRKKGFGEDFKQLESFYIQTLLDIVSSYGKGYVVWQEVFDNKVKIQPDTIIQVWREDIPVNYMKELELVTKAGFRALLSAPWYLNRISYGPDWKDFYVVEPLAFEGTPEQKALVIGGEACMWGEYVDNTNLVPRLWPRAGAVAERLWSNKLTSDLTFAYERLSHFRCELLRRGVQAQPLNVGFCEQEFEQT

SEQ ID NO: 804018 - protein, 529 aa, Homo sapiens
MTSSRLWFSLLLAAAFAGRATALWPWPQNFQTSDQRYVLYPNNFQFQYDVSSAAQPGCSVLDEAFQRYRDLLFGSGSWPRPYLTGKRHTLEKNVLVVSVVTPGCNQLPTLESVENYTLTINDDQCLLLSETVWGALRGLETFSQLVWKSAEGTFFINKTEIEDFPRFPHRGLLLDTSRHYLPLSSILDTLDVMAYNKLNVFHWHLVDDPSFPYESFTFPELMRKGSYNPVTHIYTAQDVKEVIEYARLRGIRVLAEFDTPGHTLSWGPGIPGLLTPCYSGSEPSGTFGPVNPSLNNTYEFMSTFFLEVSSVFPDFYLHLGGDEVDFTCWKSNPEIQDFMRKKGFGEDFKQLESFYIQTLLDIVSSYGKGYVVWQEVFDNKVKIQPDTIIQVWREDIPVNYMKELELVTKAGFRALLSAPWYLNRISYGPDWKDFYVVEPLAFEGTPEQKALVIGGEACMWGEYVDNTNLVPRLWPRAGAVAERLWSNKLTSDLTFAYERLSHFRCELLRRGVQAQPLNVGFCEQEFEQT

SEQ ID NO: 804019 - protein, 529 aa, Homo sapiens; identical to SEQ ID NO: 804018

SEQ ID NO: 804020 - protein, 529 aa, Homo sapiens; identical to SEQ ID NO: 804018

SEQ ID NO: 804021 - protein, 474 aa, Homo sapiens [sequence omitted]

SEQ ID NO: 804022 - protein, 529 aa, Homo sapiens; identical to SEQ ID NO: 804018

SEQ ID NO: 804023 - protein, 474 aa, Homo sapiens [sequence omitted]

SEQ ID NO: 804024 - protein, 390 aa, Homo sapiens
MTSSRLWFSLLLAAAFAGRATALWPWPQNFQTSDQRYVLYPNNFQFQYDVSSAAQPGCSVLDEAFQRYRDLLFGSGSWPRPYLTGKRHTLEKNVLVVSVVTPGCNQLPTLESVENYTLTINDDQCLLLSETVWGALRGLETFSQLVWKSAEGTFFINKTEIEDFPRFPHRGLLLDTSRHYLPLSSILDTLDVMAYNKLNVFHWHLVDDPSFPYESFTFPELMRKGSYNPVTHIYTAQDVKEVIEYARLRGIRVLAEFDTPGHTLSWGPGIPGLLTPCYSGSEPSGTFGPVNPSLNNTYEFMSTFFLEVSSVFPDFYLHLGGDEVDFTCWKSNPEIQDFMRKKGFGEDFKQLESFYIQTLLDIVSSYGKGYVVWQEVFDNKVKVPLSRRLW

SEQ ID NO: 804025 - protein, 474 aa, Homo sapiens [sequence omitted]

SEQ ID NO: 804026 - protein, 458 aa, Homo sapiens
MTSSRLWFSLLLAAAFAGRATALWPWPQNFQTSDQRYVLYPNNFQFQYDVSSAAQPGCSVLDEAFQRYRDLLFGSGSWPRPYLTGKRHTLEKNVLVVSVVTPGCNQLPTLESVENYTLTINDDQCLLLSETVWGALRGLETFSQLVWKSAEGTFFINKTEIEDFPRFPHRGLLLDTSRHYLPLSSILDTLDVMAYNKLNVFHWHLVDDPSFPYESFTFPELMRKGSYNPVTHIYTAQDVKEVIEYARLRGIRVLAEFDTPGHTLSWGPGIPGLLTPCYSGSEPSGTFGPVNPSLNNTYEFMSTFFLEVSSVFPDFYLHLGGDEVDFTCWKSNPEIQDFMRKKGFGEDFKQLESFYIQTLLDIVSSYGKGYVVWQEVFDNKVKIQPDTIIQVWREDIPVNYMKELELVTKAGFRALLSAPWYLNRISYGPDWKDFYVVEPLAFEGPEQGLLPKGCGATS

SEQ ID NO: 804027 - protein, 540 aa, Homo sapiens
MTSSRLWFSLLLAAAFAGRATALWPWPQNFQTSDQRYVLYPNNFQFQYDVSSAAQPGCSVLDEAFQRYRDLLFGSGSWPRPYLTGKRHTLEKNVLVVSVVTPGCNQLPTLESVENYTLTINDDQCLLLSETVWGALRGLETFSQLVWKSAEGTFFINKTEIEDFPRFPHRGLLLDTSRHYLPLSSILDTLDVMAYNKLNVFHWHLVDDPSFPYESFTFPELMRKGSYNPVTHIYTAQDVKEVIEYARLRGIRVLAEFDTPGHTLSWGPGIPGLLTPCYSGSEPSGTFGPVNPSLNNTYEFMSTFFLEVSSVFPDFYLHLGGDEVDFTCWKSNPEIQDFMRKKGFGEDFKQLESFYIQTLLDIVSSYGKGYVVWQEVFDNKVKIQPDTIIQVWREDIPVNYMKELELVTKAGFRALLSAPWYLNRISYGPDWKDFYVVEPLAFEGTPEQKALVIGGEACMWGEYVDNTNLVPRLWPRAGAVAERLWSNKLTSDLTFAYERLSHFRCELLRVSKLWGLRKAEQARSRAGEPLRERKTIINNS

SEQ ID NO: 804028 - protein, 537 aa, Homo sapiens
FSASEVTSAWQVLYLPVGLASCITTFKIHPRAIWETFFSRSPCVLASPPRSSRVWYDVSSAAQPGCSVLDEAFQRYRDLLFGSGSWPRPYLTGKRHTLEKNVLVVSVVTPGCNQLPTLESVENYTLTINDDQCLLLSETVWGALRGLETFSQLVWKSAEGTFFINKTEIEDFPRFPHRGLLLDTSRHYLPLSSILDTLDVMAYNKLNVFHWHLVDDPSFPYESFTFPELMRKGSYNPVTHIYTAQDVKEVIEYARLRGIRVLAEFDTPGHTLSWGPGIPGLLTPCYSGSEPSGTFGPVNPSLNNTYEFMSTFFLEVSSVFPDFYLHLGGDEVDFTCWKSNPEIQDFMRKKGFGEDFKQLESFYIQTLLDIVSSYGKGYVVWQEVFDNKVKIQPDTIIQVWREDIPVNYMKELELVTKAGFRALLSAPWYLNRISYGPDWKDFYVVEPLAFEGTPEQKALVIGGEACMWGEYVDNTNLVPRLWPRAGAVAERLWSNKLTSDLTFAYERLSHFRCELLRRGVQAQPLNVGFCEQEFEQT

SEQ ID NO: 804029 - protein, 474 aa, Homo sapiens [sequence omitted]

SEQ ID NO: 804030 - protein, 474 aa, Homo sapiens [sequence omitted]

SEQ ID NO: 804031 - protein, 474 aa, Homo sapiens [sequence omitted]

SEQ ID NO: 804032 - protein, 459 aa, Homo sapiens
MTSSRLWFSLLLAAAFAGRATALWPWPQNFQTSDQRYVLYPNNFQFQYDVSSAAQPGCSVLDEAFQRYRDLLFGSGSWPRPYLTGKRHTLEKNVLVVSVVTPGCNQLPTLESVENYTLTINDDQCLLLSETVWGALRGLETFSQLVWKSAEGTFFINKTEIEDFPRFPHRGLLLDTSRHYLPLSSILDTLDVMAYNKLNVFHWHLVDDPSFPYESFTFPELMRKGSYNPVTHIYTAQDVKEVIEYARLRGIRVLAEFDTPGHTLSWGPGIPGLLTPCYSGSEPSGTFGPVNPSLNNTYEFMSTFFLEVSSVFPDFYLHLGGDEVDFTCWKSNPEIQDFMRKKGFGEDFKQLESFYIQTLLDIVSSYGKGYVVWQEVFDNKVKIQPDTIIQVWREDIPVNYMKELELVTKAGFRALLSAPWYLNRISYERLSHFRCELLRRGVQAQPLNVGFCEQEFEQT

SEQ ID NO: 804033 - protein, 419 aa, Homo sapiens
MTSSRLWFSLLLAAAFAGRATALWPWPQNFQTSDQRYVLYPNNFQFQYDVSSAAQPGCSVLDEAFQRYRDLLFGSGSWPRPYLTGKRHTLEKNVLVVSVVTPGCNQLPTLESVENYTLTINDDQCLLLSETVWGALRGLETFSQLVWKSAEGTFFINKTEIEDFPRFPHRGLLLDTSRHYLPLSSILDTLDVMAYNKLNVFHWHLVDDPSFPYESFTFPELMRKGSYNPVTHIYTAQDVKEVIEYARLRGIRVLAEFDTPGHTLSWGPGIPGLLTPCYSGSEPSGTFGPVNPSLNNTYEFMSTFFLEVSSVFPDFYLHLGGDEVDFTCWKSNPEIQDFMRKKGFGEDFKQLESFYIQTLLDIVSSYGKGYVVWQEVFDNKVKDSGNHLRVGGFRTIRREASASAFCPEKEQARGKTPCP

SEQ ID NO: 804034 - protein, 328 aa, Homo sapiens
MTSSRLWFSLLLAAAFAGRATALWPWPQNFQTSDQRYVLYPNNFQFQYDVSSAAQPGCSVLDEAFQRYRDLLFGSGSWPRPYLTGKRHTLEKNVLVVSVVTPGCNQLPTLESVENYTLTINDDQCLLLSETVWGALRGLETFSQLVWKSAEGTFFINKTEIEDFPRFPHRGLLLDTSRHYLPLSSILDTLDVMAYNKLNVFHWHLVDDPSFPYESFTFPELMRKGSYNPVTHIYTAQDVKEVIEYARLRGIRVLAEFDTPGHTLSWGPGIPGLLTPCYSGSEPSGTFGPVNPSLNNTYEFMSTFFLEVSSVFPGPEQGLLPKGCGATS

SEQ ID NO: 804035 - protein, 393 aa, Homo sapiens
MMTSVYSSLRLSGELSEFFINKTEIEDFPRFPHRGLLLDTSRHYLPLSSILDTLDVMAYNKLNVFHWHLVDDPSFPYESFTFPELMRKGSYNPVTHIYTAQDVKEVIEYARLRGIRVLAEFDTPGHTLSWGPGIPGLLTPCYSGSEPSGTFGPVNPSLNNTYEFMSTFFLEVSSVFPDFYLHLGGDEVDFTCWKSNPEIQDFMRKKGFGEDFKQLESFYIQTLLDIVSSYGKGYVVWQEVFDNKVKIQPDTIIQVWREDIPVNYMKELELVTKAGFRALLSAPWYLNRISYGPDWKDFYVVEPLAFEGTPEQKALVIGGEACMWGEYVDNTNLVPRLWPRAGAVAERLWSNKLTSDLTFAYERLSHFRCELLRRGVQAQPLNVGFCEQEFEQT

SEQ ID NO: 804036 - protein, 360 aa, Homo sapiens
MTSSRLWFSLLLAAAFAGRATALWPWPQNFQTSDQRYVLYPNNFQFQYDVSSAAQPGCSVLDEAFQRYRDLLFGSGSWPRPYLTGKRHTLEKNVLVVSVVTPGCNQLPTLESVENYTLTINDDQCLLLSETVWGALRGLETFSQLVWKSAEGTFFINKTEIEDFPRFPHRGLLLDTSRHYLPLSSILDTLDVMAYNKLNVFHWHLVDDPSFPYESFTFPELMRKGSYNPVTHIYTAQDVKEVIEYARLRGIRVLAEFDTPGHTLSWGPGIPGLLTPCYSGSEPSGTFGPVNPSLNNTYEFMSTFFLEVSSVFPDFYLHLGGDEVDFTCWKSNPEIQDFMRKKGFGEDFKQLESFYIQTYP

SEQ ID NO: 804037 - protein, 393 aa, Homo sapiens; identical to SEQ ID NO: 804035

SEQ ID NO: 804038 - protein, 350 aa, Homo sapiens
DAWVRPTRSALDVMAYNKLNVFHWHLVDDPSFPYESFTFPELMRKGSYNPVTHIYTAQDVKEVIEYARLRGIRVLAEFDTPGHTLSWGPGIPGLLTPCYSGSEPSGTFGPVNPSLNNTYEFMSTFFLEVSSVFPDFYLHLGGDEVDFTCWKSNPEIQDFMRKKGFGEDFKQLESFYIQTLLDIVSSYGKGYVVWQEVFDNKVKIQPDTIIQVWREDIPVNYMKELELVTKAGFRALLSAPWYLNRISYGPDWKDFYVVEPLAFEGTPEQKALVIGGEACMWGEYVDNTNLVPRLWPRAGAVAERLWSNKLTSDLTFAYERLSHFRCELLRRGVQAQPLNVGFCEQEFEQT

SEQ ID NO: 804039 - protein, 337 aa, Homo sapiens
DLEDPPNWIHWHLVDDPSFPYESFTFPELMRKGSYNPVTHIYTAQDVKEVIEYARLRGIRVLAEFDTPGHTLSWGPGIPGLLTPCYSGSEPSGTFGPVNPSLNNTYEFMSTFFLEVSSVFPDFYLHLGGDEVDFTCWKSNPEIQDFMRKKGFGEDFKQLESFYIQTLLDIVSSYGKGYVVWQEVFDNKVKIQPDTIIQVWREDIPVNYMKELELVTKAGFRALLSAPWYLNRISYGPDWKDFYVVEPLAFEGTPEQKALVIGGEACMWGEYVDNTNLVPRLWPRAGAVAERLWSNKLTSDLTFAYERLSHFRCELLRRGVQAQPLNVGFCEQEFEQT

SEQ ID NO: 804040 - protein, 300 aa, Homo sapiens
MTSSRLWFSLLLAAAFAGRATALWPWPQNFQTSDQRYVLYPNNFQFQYDVSSAAQPGCSVLDEAFQRYRDLLFGSGSWPRPYLTGKRHTLEKNVLVVSVVTPGCNQLPTLESVENYTLTINDDQCLLLSETVWGALRGLETFSQLVWKSAEGTFFINKTEIEDFPRFPHRGLLLDTSRHYLPLSSILDTLDVMAYNKLNVFHWHLVDDPSFPYESFTFPELMRKGSYNPVTHIYTAQDVKEVIEYARLRGIRVLAEFDTPGHTLSWGPGIPGLLTPCYSGSEPAQSRGCCRKAVEQQVDI

SEQ ID NO: 804041 - protein, 196 aa, Homo sapiens
MTSSRLWFSLLLAAAFAGRATALWPWPQNFQTSDQRYVLYPNNFQFQYDVSSAAQPGCSVLDEAFQRYRDLLFGSGSWPRPYLTGKRHTLEKNVLVVSVVTPGCNQLPTLESVENYTLTINDDQCLLLSETVWGALRGLETFSQLVWKSAEGTFFINKTEIEDSSSWSPSTSRRCWTSSLLMARAMWCGRRCLIIK

SEQ ID NO: 804042 - protein, 254 aa, Homo sapiens
MAGVNRRGSGTFGPVNPSLNNTYEFMSTFFLEVSSVFPDFYLHLGGDEVDFTCWKSNPEIQDFMRKKGFGEDFKQLESFYIQTLLDIVSSYGKGYVVWQEVFDNKVKIQPDTIIQVWREDIPVNYMKELELVTKAGFRALLSAPWYLNRISYGPDWKDFYVVEPLAFEGTPEQKALVIGGEACMWGEYVDNTNLVPRLWPRAGAVAERLWSNKLTSDLTFAYERLSHFRCELLRRGVQAQPLNVGFCEQEFEQT

SEQ ID NO: 804043 - protein, 298 aa, Homo sapiens
MTSSRLWFSLLLAAAFAGRATALWPWPQNFQTSDQRYVLYPNNFQFQYDVSSAAQPGCSVLDEAFQRYRDLLFGSGSWPRPYLTGKRHTLEKNVLVVSVVTPGCNQLPTLESVENYTLTINDDQCLLLSETVWGALRAGDFCQQEVFDNKVIQPDTIIQVWREDIPVNYMKELELVTKAGFRALLSAPWYLNRISYGPDWKDFYVVEPLAFEGTPEQKALVIGGEACMWGEYVDNTNLVPRLWPRAGAVAERLWSNKLTSDLTFAYERLSHFRCELLRRGVQAQPLNVGFCEQEFEQT

SEQ ID NO: 804044 - protein, 275 aa, Homo sapiens
MTSSRLWFSLLLAAAFAGRATALWPWPQNFQTSDQRYVLYPNNFQFQYDVSSAAQPGCSVLDEAFQRYRDLLFGSGSWPRPYLTGKRHTLEKNVLVVSVVTPGCNQLPTLESVENYTLTINDDQCLLLSETVWGALRGLETFSQLVWKSAEGTFFINKTEIEDFPRFPHRGLLLDTSRHYLPLSSILDTLDVMAYNKLNVFHWHLVDDPSFPYESFTFPELMRKGSYNPVTHIYTAQDVKEVIEYARLRGIRVLAEFDTPGPEQGLLPKGCGATS

SEQ ID NO: 804045 - protein, 103 aa, Homo sapiens
MTPNWKDFYVVEPLAFDSTPEQKALVIGGEACMWGEYVDNTNLVPRLWPRAGAVAERLWSNKLTSDLTFAYERLSHFRCELLRRGVQAQPLNVGFCEQEFEQT

SEQ ID NO: 804046 - protein, 283 aa, Homo sapiens
MMTSVYSSLRLSGELSEFFINKTEIEDFPRFPHRGLLLDTSRHYLPLSSILDTLDVMAYNKLNVFHWHLVDDPSFPYESFTFPELMRKGSYNPVTHIYTAQDVKEVIEYARLRGIRVLAEFDTPGHTLSWGPGIPGLLTPCYSGSEPSGTFGPVNPSLNNTYEFMSTFFLEVSSVFPDFYLHLGGDEVDFTCWKSNPEIQDFMRKKGFGEDFKQLESFYIQTLLDIVSSYGKGYVVWQEVFDNKVKDSGNHLRVGGFRTIRREASASAFCPEKEQARGKTPCP

SEQ ID NO: 804047 - protein, 112 aa, Homo sapiens
MTSSRLWFSLLLAAAFAGRATALWPWPQNFQTSDQRYVLYPNNFQFQYDVSSAAQPGCSVLDEAFQRYRDLLFGSGSWPRPYLTGKRHTLEKNVLAQSRGCCRKAVEQQVDI

SEQ ID NO: 804048 - protein, 976 aa, Homo sapiens
DAPLDNGGSEITHYVIDKRDASRKKAEWEEVTNTAVEKRYGIWKLIPNGQYEFRVRAVNKYGISDECKSDKVVIQDPYRLPGPPGKPKVLARTKGSMLVSWTPPLDNGGSPITGYWLEKREEGSPYWSRVSRAPITKVGLKGVEFNVPRLLEGVKYQFRAMAINAAGIGPPSEPSDPEVAGDPIFPPGPPSCPEVKDKTKSSISLGWKPPAKDGGSPIKGYIVEMQEEGTTDWKRVNEPDKLITTCECVVPNLKELRKYRFRVKAVNEAGESEPSDTTGEIPATDIQEEPEVFIDIGAQDCLVCKAGSQIRIPAVIKGRPTPKSSWEFDGKAKKAMKDGVHDIPEDAQLETAENSSVIIIPECKRSHTGKYSITAKNKAGQKTANCRVKVMDVPGPPKDLKVSDITRGSCRLSWKMPDDDGGDRIKGYVIEKRTIDGKAWTKVNPDCGSTTFVVPDLLSEQQYFFRVRAENRFGIGPPVETIQRTTARDPIYPPDPPIKLKMGLITKNTVHLSWKPPKNDGGSPVTHYIVECLAWDPTGTKKEAWRQCNKRDVEELQFTVEDLVEGGEYEFRVKAVNAAGVSKPSATVGPVTVKDQTCPPSIDLKEFMEVEEGTNVNIVAKIKGVPFPTLTWFKAPPKKPDNKEPVLYDTHVNKLVVDDTCTLVIPQSRRSDTGLYTITAVNNLGTASKEMRLNVLGRPGPPVGPIKFESVSADQMTLSWFPPKDDGGSKITNYVIEKREANRKTWVHVSSEPKECTYTIPKLLEGHEYVFRIMAQNKYGIGEPLDSEPETARNLFSVPGAPDKPTVSSVTRNSMTVNWEEPEYDGGSPVTGYWLEMKDTTSKRWKRVNRDPIKAMTLGVSYKVTGLIEGSDYQFRVYAINAAGVGPASLPSDPATARDPIAPPGPPFPKVTDWTKSSADLEWSPPLKDGGSKVTGYIVEYKEEGKEEWEKGKDKEVRGTKLVVTGLKEGAFYKFR

SEQ ID NO: 804049 - protein, 205 aa, Homo sapiens
VIAKNKFGCGPPVEIGPILAVDPLGPPTSPERLTYTERTKSTITLDWKEPRSNGGSPIQGYIIEKRRHDKPDFERVNKRLCPTTSFLVENLDEHQMYEFRVKAVNEIGESEPSLPLNVVIQDDEVPPTIKLRLSVRGDTIKVKAGEPVHIPADVTGLPMPKIEWSKNETVIEKPTDALQITKEEVSRSEAKTELSIPKAVREDKG

SEQ ID NO: 804050 - protein, 127 aa, Homo sapiens
FFKFLIINMIFFTAVPGAPDKPTVSSVTRNSMTVNWEEPEYDGGSPVTGYWLEMKDTTSKRWKRVNRDPIKAMTLGVSYKVTGLIEGSDYQFRVYAINAAGVGPASLPSDPATARDPIGKPGNHSFF

SEQ ID NO: 804051 - protein, 142 aa, Homo sapiens
SLAFPKRSGRTKALTQLLLPIALAQCSEMFTLKYMVSDLLSYIKKASSVCLRIAFSIFSVDSFPDRPSPPRNLAVTDIKAESCYLTWDAPLDNGGSEITHYVIDKRDASRKKAEWEEVTNTAVEKRYGVNSSEYFLIHIKST

SEQ ID NO: 804052 - protein, 151 aa, Homo sapiens
RWKKKLSSSTQEQANNDFFLLAELLSDYIRLLANSRAAFDQRMKTCQRWQDAKATLQKKREAEARLLWANKPDKLQQAKDEILEWESRVTQYERDFERISTVVRKEVIRFEKEKSKDFKNHVIKYLETLLYSQQQLAKYWEAFLPEAKAIS

SEQ ID NO: 804053 - protein, 123 aa, Homo sapiens
FPSLAKSRVAFNQAIKKCKRCQIPKPPFKKNGRPKLGFCGPTNLINVHQAKGQVLRWESRVTQYERDFERISTVVRKEVIRFEKEKSKDFKNHVIKYLETLLYSQQQLAKYWEAFLPEAKAIS

SEQ ID NO: 804054 - protein, 151 aa, Homo sapiens; identical to SEQ ID NO: 804052

SEQ ID NO: 804055 - protein, 151 aa, Homo sapiens; identical to SEQ ID NO: 804052

SEQ ID NO: 804056 - protein, 151 aa, Homo sapiens; identical to SEQ ID NO: 804052

SEQ ID NO: 804057 - protein, 151 aa, Homo sapiens; identical to SEQ ID NO: 804052

SEQ ID NO: 804058 - protein, 151 aa, Homo sapiens; identical to SEQ ID NO: 804052

SEQ ID NO: 804059 - protein, 210 aa, Homo sapiens
AEHPAMAASTASQRPLKGILKDNTSTTSSMVASAEHPRGSVHEQLSKKSQKWDEMNILATYRPADKDYGLMKIDEPSTPYHSTMGDDEDACSDTETTEAMATDSLAKNLAAAEGLEPKYQVQEQESSGEEDSDLSPEEREKKRQFEMRRTLHYNEGLNIKLARQLISKDLHDDDKVEEMLETAHGESMNTEESNQGSTASDQQQNKSRSS

SEQ ID NO: 804060 - protein, 425 aa, Homo sapiens
MADKEAAFDDAVEERVINEEYKIWKKNTPFLYDLVMTHALEWPSLTAQWLPDVTRPEGKDFSIHRLVLGTHTSDEQNHLVIASVQLPNDDAQFDASHYDSEKGEFGGFGSVSGKIEIEIKINHEGEVNRARYMPQNPCIIATKTPSSDVLVFDYTKHPSKPDPSGECNPDLRLRGHQKEGYGLSWNPNLSGHLLSASDDHTICLWDISAVPKEGKVVDAKTIFTGHTAVVEDVSWHLLHESLFGSVADDQKLMIWDTRSNNTSKPSHSVDAHTAEVNCLSFNPYSEFILATGSADKTVALWDLRNLKLKLHSFESHKDEIFQVQWSPHNETILASSGTDRRLNVWDLSKIGEEQSPEDAEDGPPELLFIHGGHTAKISDFSWNPNEPWVICSVSEDNIMQVWQMAENIYNDEDPEGSVDPEGQGS

SEQ ID NO: 804061 - protein, 410 aa, Homo sapiens
MADKEAAFDDAVEERVINEEYKIWKKNTPFLYDLVMTHALEWPSLTAQWLPDVTRPEGKDFSIHRLVLGTHTSDEQNHLVIASVQLPNDDAQFDASHYDSEKGEFGGFGSVSGKIEIEIKINHEGEVNRARYMPQNPCIIATKTPSSDVLVFDYTKHPSKPDPSGECNPDLRLRGHQKEGYGLSWNPNLSGHLLSASDDHTICLWDISAVPKEGKVVDAKTIFTGHTAVVEDVSWHLLHESLFGSVADDQKLMIWDTRSNNTSKPSHSVDAHTAEVNCLSFNPYSEFILATGSADKTVALWDLRNLKLKLHSFESHKDEIFQVQWSPHNETILASSGTDRRLNVWDLSKIGEEQSPEDAEDGPPELLFIHGGHTAKISDFSWNPNEPWVICSVSEDNIMQVWQMELVLDH

SEQ ID NO: 804062 - protein, 284 aa, Homo sapiens
GRPRRAVGAWAEPRPRHGLTVRAGPSLPSAVPAAFDDAVEERVINEEYKIWKKNTPFLYDLVMTHALEWPSLTAQWLPDVTRPEGKDFSIHRLVLGTHTSDEQNHLVIASVQLPNDDAQFDASHYDSEKGEFGGFGSVSGKIEIEIKINHEGEVNRARYMPQNPCIIATKTPSSDVLVFDYTKHPSKPDPSGECNPDLRLRGHQKEGYGLSWNPNLSGHLLSASDDHTIWPVGISAGPKGGKVGECDIFKGIRDYFVPGFIHSFVGQWCDRTMIGRRYNFPALL

SEQ ID NO: 804063 - protein, 69 aa, Homo sapiens
ALPLADVGAKVRESALALGAQETIEAARTERALAASPPLPQRSTPGFPRLACPPWPTRKQPSTTQWKNE

SEQ ID NO: 804064 - protein, 89 aa, Homo sapiens
  misc_feature (5)..(5): Xaa can be any naturally occurring amino acid
  misc_feature (7)..(7): Xaa can be any naturally occurring amino acid
TSSCXGXVWDLSKIGEEQSPEDAEDGPPELLFIHGGHTAKISDFSWNPNEPWVICSVSEDNIMQVWQMAENIYNDEDPEGSVDPEGQGS

SEQ ID NO: 804065 - protein, 425 aa, Homo sapiens; identical to SEQ ID NO: 804060

SEQ ID NO: 804066 - protein, 425 aa, Homo sapiens; identical to SEQ ID NO: 804060

SEQ ID NO: 804067 - protein, 451 aa, Homo sapiens
MYETGVLIGTEDVTLDPRIPPARLPAMADKEAAFDDAVEERVINEEYKIWKKNTPFLYDLVMTHALEWPSLTAQWLPDVTRPEGKDFSIHRLVLGTHTSDEQNHLVIASVQLPNDDAQFDASHYDSEKGEFGGFGSVSGKIEIEIKINHEGEVNRARYMPQNPCIIATKTPSSDVLVFDYTKHPSKPDPSGECNPDLRLRGHQKEGYGLSWNPNLSGHLLSASDDHTICLWDISAVPKEGKVVDAKTIFTGHTAVVEDVSWHLLHESLFGSVADDQKLMIWDTRSNNTSKPSHSVDAHTAEVNCLSFNPYSEFILATGSADKTVALWDLRNLKLKLHSFESHKDEIFQVQWSPHNETILASSGTDRRLNVWDLSKIGEEQSPEDAEDGPPELLFIHGGHTAKISDFSWNPNEPWVICSVSEDNIMQVWQMAENIYNDEDPEGSVDPEGQGS

SEQ ID NO: 804068 - protein, 452 aa, Homo sapiens
GRPRRAVGAWAEPRPRHGLTVRAGPSLPSAVPAAFDDAVEERVINEEYKIWKKNTPFLYDLVMTHALEWPSLTAQWLPDVTRPEGKDFSIHRLVLGTHTSDEQNHLVIASVQLPNDDAQFDASHYDSEKGEFGGFGSVSGKIEIEIKINHEGEVNRARYMPQNPCIIATKTPSSDVLVFDYTKHPSKPDPSGECNPDLRLRGHQKEGYGLSWNPNLSGHLLSASDDHTICLWDISAVPKEGKVVDAKTIFTGHTAVVEDVSWHLLHESLFGSVADDQKLMIWDTRSNNTSKPSHSVDAHTAEVNCLSFNPYSEFILATGSADKTVALWDLRNLKLKLHSFESHKDEIFQVQWSPHNETILASSGTDRRLNVWDLSKIGEEQSPEDAEDGPPELLFIHGGHTAKISDFSWNPNEPWVICSVSEDNIMQVWQMAENIYNDEDPEGSVDPEGQGS

SEQ ID NO: 804069 - protein, 534 aa, Homo sapiens
RQFPGTDFGRSWRSQRWGPRPVFVSLPASDIGFSASVPSVGTPLPTHKARSSGLLVGLVSFGAHERAPKAWLAPWPGTGNGVFGGDGPRSFGAAKVESVDASAVGIYDKSPPFHAAFDDAVEERVINEEYKIWKKNTPFLYDLVMTHALEWPSLTAQWLPDVTRPEGKDFSIHRLVLGTHTSDEQNHLVIASVQLPNDDAQFDASHYDSEKGEFGGFGSVSGKIEIEIKINHEGEVNRARYMPQNPCIIATKTPSSDVLVFDYTKHPSKPDPSGECNPDLRLRGHQKEGYGLSWNPNLSGHLLSASDDHTICLWDISAVPKEGKVVDAKTIFTGHTAVVEDVSWHLLHESLFGSVADDQKLMIWDTRSNNTSKPSHSVDAHTAEVNCLSFNPYSEFILATGSADKTVALWDLRNLKLKLHSFESHKDEIFQVQWSPHNETILASSGTDRRLNVWDLSKIGEEQSPEDAEDGPPELLFIHGGHTAKISDFSWNPNEPWVICSVSEDNIMQVWQMAENIYNDEDPEGSVDPEGQGS

SEQ ID NO: 804070 - protein, 425 aa, Homo sapiens; identical to SEQ ID NO: 804060

SEQ ID NO: 804071 - protein, 502 aa, Homo sapiens
MADKEAAFDDAVEERVINEEYKIWKKNTPFLYDLVMTHALEWPSLTAQWLPDVTRPEGKDFSIHRLVLGTHTSDEQNHLVIASVQLPNDDAQFDASHYDSEKGEFGGFGSVSGKIEIEIKINHEGEVNRARYMPQNPCIIATKTPSSDVLVFDYTKHPSKPDPSGECNPDLRLRGHQKEGYGLSWNPNLSGHLLSASDDHTICLWDISAVPKEGKVVDAKTIFTGHTAVVEDVSWHLLHESLFGSVADDQKLMIWDTRSNNTSKPSHSVDAHTAEVNCLSFNPYSEFILATGSADKTVALWDLRNLKLKLHSFESHKDEIFQVQWSPHNETILASSGTDRRLNVWDLSKIGEEQSPEDAEDGPPELLFIHGGHTAKISDFSWNPNEPWVICSVSEDNIMQVWQMMVSHFFTQAGVQWCNLGSLQLPPPRFDRFSCLSLLSSWDYRQRTFIMMKTLKEAWIQKDKGPRYVFTCCDFRLPFFLLNPESDLTLVLRQTLFSYPSI

SEQ ID NO: 804072 - protein, 415 aa, Homo sapiens
MADKEAAFDDAVEERVINEEYKIWKKNTPFLYDLVMTHALEWPSLTAQWLPDVTRPEGKDFSIHRLVLGTHTSDEQNHLVIASVQLPNDDAQFDASHYDSEKGEFGGFGSVSGKIEIEIKINHEGEVNRARYMPQNPCIIATKTPSSDVLVFDYTKHPSKPDPSGECNPDLRLRGHQKEGYGLSWNPNLSGHLLSASDDHTICLWDISAVPKEGKVVDAKTIFTGHTAVVEDVSWHLLHESLFGSVADDQKLMIWDTRSNNTSKPSHSVDAHTAEVNCLSFNPYSEFILATGSADKTVALWDLRNLKLKLHSFESHKDEIFQVQWSPHNETILASSGTDRRLNVWDLSKIGEEQSPEDAEDGPPELLFIHGGHTAKISDFSWNPNEPWVICSVSEDNIMQVWQMVVSGYFHPRVE

SEQ ID NO: 804073 - protein, 386 aa, Homo sapiens
VHWPVANCRLDWRKSSPEGKDFSIHRLVLGTHTSDEQNHLVIASVQLPNDDAQFDASHYDSEKGEFGGFGSVSGKIEIEIKINHEGEVNRARYMPQNPCIIATKTPSSDVLVFDYTKHPSKPDPSGECNPDLRLRGHQKEGYGLSWNPNLSGHLLSASDDHTICLWDISAVPKEGKVVDAKTIFTGHTAVVEDVSWHLLHESLFGSVADDQKLMIWDTRSNNTSKPSHSVDAHTAEVNCLSFNPYSEFILATGSADKTVALWDLRNLKLKLHSFESHKDEIFQVQWSPHNETILASSGTDRRLNVWDLSKIGEEQSPEDAEDGPPELLFIHGGHTAKISDFSWNPNEPWVICSVSEDNIMQVWQMAENIYNDEDPEGSVDPEGQGS

SEQ ID NO: 804074 - protein, 435 aa, Homo sapiens
SVYTRNLKEGNPNEVNMVTQKSVVKELEWKPKLLSKWEKKRKHESKQITQGNPGQMLTLALSRKPPEGKDFSIHRLVLGTHTSDEQNHLVIASVQLPNDDAQFDASHYDSEKGEFGGFGSVSGKIEIEIKINHEGEVNRARYMPQNPCIIATKTPSSDVLVFDYTKHPSKPDPSGECNPDLRLRGHQKEGYGLSWNPNLSGHLLSASDDHTICLWDISAVPKEGKVVDAKTIFTGHTAVVEDVSWHLLHESLFGSVADDQKLMIWDTRSNNTSKPSHSVDAHTAEVNCLSFNPYSEFILATGSADKTVALWDLRNLKLKLHSFESHKDEIFQVQWSPHNETILASSGTDRRLNVWDLSKIGEEQSPEDAEDGPPELLFIHGGHTAKISDFSWNPNEPWVICSVSEDNIMQVWQMAENIYNDEDPEGSVDPEGQGS

SEQ ID NO: 804075 - protein, 456 aa, Homo sapiens
MADKEAAFDDAVEERVINEEYKIWKKNTPFLYDLVMTHALEWPSLTAQWLPDVTRPEGKDFSIHRLVLGTHTSDEQNHLVIASVQLPNDDAQFDASHYDSEKGELSAVVRSHCSLRLLGSSDSPASASWVAGITEFGGFGSVSGKIEIEIKINHEGEVNRARYMPQNPCIIATKTPSSDVLVFDYTKHPSKPDPSGECNPDLRLRGHQKEGYGLSWNPNLSGHLLSASDDHTICLWDISAVPKEGKVVDAKTIFTGHTAVVEDVSWHLLHESLFGSVADDQKLMIWDTRSNNTSKPSHSVDAHTAEVNCLSFNPYSEFILATGSADKTVALWDLRNLKLKLHSFESHKDEIFQVQWSPHNETILASSGTDRRLNVWDLSKIGEEQSPEDAEDGPPELLFIHGGHTAKISDFSWNPNEPWVICSVSEDNIMQVWQMAENIYNDEDPEGSVDPEGQGS

SEQ ID NO: 804076 - protein, 293 aa, Homo sapiens
MPQNPCIIATKTPSSDVLVFDYTKHPSKPDPSGECNPDLRLRGHQKEGYGLSWNPNLSGHLLSASDDHTICLWDISAVPKEGKVVDAKTIFTGHTAVVEDVSWHLLHESLFGSVADDQKLMIWDTRSNNTSKPSHSVDAHTAEVNCLSFNPYSEFILATGSADKTVALWDLRNLKLKLHSFESHKDEIFQVQWSPHNETILASSGTDRRLNVWDLSKIGEEQSPEDAEDGPPELLFIHGGHTAKISDFSWNPNEPWVICSVSEDNIMQVWQMAENIYNDEDPEGSVDPEGQGS

SEQ ID NO: 804077 - protein, 340 aa, Homo sapiens
TLQDLLYQADAYTTTVRKEFGGFGSVSGKIEIEIKINHEGEVNRARYMPQNPCIIATKTPSSDVLVFDYTKHPSKPDPSGECNPDLRLRGHQKEGYGLSWNPNLSGHLLSASDDHTICLWDISAVPKEGKVVDAKTIFTGHTAVVEDVSWHLLHESLFGSVADDQKLMIWDTRSNNTSKPSHSVDAHTAEVNCLSFNPYSEFILATGSADKTVALWDLRNLKLKLHSFESHKDEIFQVQWSPHNETILASSGTDRRLNVWDLSKIGEEQSPEDAEDGPPELLFIHGGHTAKISDFSWNPNEPWVICSVSEDNIMQVWQMAENIYNDEDPEGSVDPEGQGS

SEQ ID NO: 804078 - protein, 327 aa, Homo sapiens
NQLGPLLPTTLTLTGKIEIEIKINHEGEVNRARYMPQNPCIIATKTPSSDVLVFDYTKHPSKPDPSGECNPDLRLRGHQKEGYGLSWNPNLSGHLLSASDDHTICLWDISAVPKEGKVVDAKTIFTGHTAVVEDVSWHLLHESLFGSVADDQKLMIWDTRSNNTSKPSHSVDAHTAEVNCLSFNPYSEFILATGSADKTVALWDLRNLKLKLHSFESHKDEIFQVQWSPHNETILASSGTDRRLNVWDLSKIGEEQSPEDAEDGPPELLFIHGGHTAKISDFSWNPNEPWVICSVSEDNIMQVWQMAENIYNDEDPEGSVDPEGQGS

SEQ ID NO: 804079 - protein, 362 aa, Homo sapiens
MADKEAAFDDAVEERVINEEYKIWKKNTPFLYDLVMTHALEWPSLTAQWLPDVTRPEGKDFSIHRLVLGTHTSDEQNHLVIASVQLPNDDAQFDASHYDSEKGEFGGFGSVSGKIEIEIKINHEGEVNRARYMPQNPCIIATKTPSSDVLVFDYTKHPSKPGHTAVVEDVSWHLLHESLFGSVADDQKLMIWDTRSNNTSKPSHSVDAHTAEVNCLSFNPYSEFILATGSADKTVALWDLRNLKLKLHSFESHKDEIFQVQWSPHNETILASSGTDRRLNVWDLSKIGEEQSPEDAEDGPPELLFIHGGHTAKISDFSWNPNEPWVICSVSEDNIMQVWQMAENIYNDEDPEGSVDPEGQGS

SEQ ID NO: 804080 - protein, 425 aa, Homo sapiens; identical to SEQ ID NO: 804060

SEQ ID NO: 804081 - protein, 412 aa, Homo sapiens
  misc_feature (412)..(412): Xaa can be any naturally occurring amino acid
MADKEAAFDDAVEERVINEEYKIWKKNTPFLYDLVMTHALEWPSLTAQWLPDVTRPEGKDFSIHRLVLGTHTSDEQNHLVIASVQLPNDDAQFDASHYDSEKGEFGGFGSVSGKIEIEIKINHEGEVNRARYMPQNPCIIATKTPSSDVLVFDYTKHPSKPDPSGECNPDLRLRGHQKEGYGLSWNPNLSGHLLSASDDHTICLWDISAVPKEGKVVDAKTIFTGHTAVVEDVSWHLLHESLFGSVADDQKLMIWDTRSNNTSKPSHSVDAHTAEVNCLSFNPYSEFILATGSADKTVALWDLRNLKLKLHSFESHKDEIFQVQWSPHNETILASSGTDRRLNVWDLSKIGEEQSPEDAEDGPPELLFIHGGHTAKISDFSWNPNEPWVICSVSEDNIMQVWQMWARKTFFX

SEQ ID NO: 804082 - protein, 416 aa, Homo sapiens
MADKEAAFDDAVEERVINEEYKIWKKNTPFLYDLVMTHALEWPSLTAQWLPDVTRPEGKDFSIHRLVLGTHTSDEQNHLVIASVQLPNDDAQFDASHYDSEKGEFGGFGSVSGKIEIEIKINHEGEVNRARYMPQNPCIIATKTPSSDVLVFDYTKHPSKPDPSGECNPDLRLRGHQKEGYGLSWNPNLSGHLLSASDDHTICLWDISAVPKEGKVVDAKTIFTGHTAVVEDVSWHLLHESLFGSVADDQKLMIWDTRSNNTSKPSHSVDAHTAEVNCLSFNPYSEFILATGSADKTVALWDLRNLKLKLHSFESHKDEIFQVQWSPHNETILASSGTDRRLNVWDLSKIGEEQSPEDAEDGPPELLFIHGGHTAKISDFSWNPNEPWVICSVSEDNIMQVWQMGKGLVIYFGEVK

SEQ ID NO: 804083 - protein, 152 aa, Homo sapiens
VSTQSRHYGRDSEFILATGSADKTVALWDLRNLKLKLHSFESHKDEIFQVQWSPHNETILASSGTDRRLNVWDLSKIGEEQSPEDAEDGPPELLFIHGGHTAKISDFSWNPNEPWVICSVSEDNIMQVWQMAENIYNDEDPEGSVDPEGQGS

SEQ ID NO: 804084 - protein, 304 aa, Homo sapiens
MADKEAAFDDAVEERVINEEYKIWKKNTPFLYDLVMTHALEWPSLTAQWLPDVTRPEGKDFSIHRLVLGTHTSDEQNHLVIASVQLPNDDAQFDASHYDSEKGEFGGFGSVSGKIEIEIKINHEGEVNRARYMPQNPCIIATKTPSSDVLVFDYTKHPSKPDPSGECNPDLRLRGHQKEGYGLSWNPNLSGHLLSASDDHTICLWDISAVPKEGKVVDAKTIFTGHTAVVEDVSWHLLHESLFGSVADDQKLMIWDTRSNNTSKPSHSVDAHTAEVNCLSFNPYSEFILATGSADKTVACGNWA

SEQ ID NO: 804085 - protein, 89 aa, Homo sapiens; identical to SEQ ID NO: 804064
  misc_feature (5)..(5): Xaa can be any naturally occurring amino acid
  misc_feature (7)..(7): Xaa can be any naturally occurring amino acid

SEQ ID NO: 804086 - protein, 257 aa, Homo sapiens
MADKEAAFDDAVEERVINEEYKIWKKNTPFLYDLVMTHALEWPSLTAQWLPDVTRPEGKDFSIHRLVLGTHTSDEQNHLVIASVQLPNDDAQFDASHYDSEKGEFGGFGSVSGKIEIEIKINHEGEVNRARYMPQNPCIIATKTPSSDVLVFDYTKHPSKPDPSGECNPDLRLRGHQKEGYGLSWNPNLSGHLLSASDDHTICLWDISAGPKGGKVGECDIFKGIRDYFVPGFIHSFVGQWCDRTMIGRRYNFPALL

SEQ ID NO: 804087 - protein, 808 aa, Homo sapiens
GPRRLGESNVEQGGGWCGVPSGLTPNRRPSRTVPRRCREPGAALCGLGETRGVCLSPLFYKMWGFLKRPVVVTADINLSLVALTGMGLLSRLWRLTYPRAVVFDEVYYGQYISFYMKQIFFLDDSGPPFGHMVLALGGYLGGFDGNFLWNRIGAEYSSNVPVWSLRLLPALAGALSVPMAYQIVLELHFSHCAAMGAALLMLIENALITQSRLMLLESVLIFFNLLAVLSYLKFFNCQKHSPFSLSWWFWLTLTGVACSCAVGIKYMGVFTYVLVLGVAAVHAWHLLGDQTLSNVGADVQCCMRPACMGQMRMSQGVCVFCHLLARAVALLVIPVVLYLLFFYVHLILVFRSGPHDQIMSSAFQASLEGGLARITQGQPLEVAFGSQVTLRNVFGKPVPCWLHSHQDTYPMIYENGRGSSHQQQVTCYPFKDVNNWWIVKDPRRHQLVVSSPPRPVRHGDMVQLVHGMTTRSLNTHDVAAPLSPHSQEVSCYIDYNISMPAQNLWRLEIVNRGSDTDVWKTILSEVRFVHVNTSAVLKLSGAHLPDWGYRQLEIVGEKLSRGYHGSTVWNVEEHRYGASQEQRERERELHSPAQVDVSRNLSFMARFSELQWRMLALRSDDSEHKYSSSPLEWVTLDTNIAYWLHPRTSAQIHLLGNIVIWVSGSLALAIYALLSLWYLLRRRRNVHDLPQDAWLRWVLAGALCAGGWAVNYLPFFLMEKTLFLYHYLPALTFQILLLPVVLQHISDHLCRSQLQRSIFSALVVAWYSSACHVSNTLRPLTYGDKSLSPHELKALRWKDSWDILIRKH

SEQ ID NO: 804088 - protein, 786 aa, Homo sapiens
GPRRLGESNVEQGGGWCGVPSGLTPNRRPSRTVPRRCREPGAALCGLGETRGVCLSPLFYKMWGFLKRPVVVTADINLSLVALTGMGLLSRLWRLTYPRAVVFDEVYYGQYISFYMKQIFFLDDSGPPFGHMVLALGGYLGGFDGNFLWNRIGAEYSSNVPVWSLRLLPALAGALSVPMAYQIVLELHFSHCAAMGAALLMLIENALITQSRLMLLESVLIFFNLLAVLSYLKFFNCQKHSPFSLSWWFWLTLTGVACSCAVGIKYMGVFTYVLVLGVAAVHAWHLLGDQTLSNVCVFCHLLARAVALLVIPVVLYLLFFYVHLILVFRSGPHDQIMSSAFQASLEGGLARITQGQPLEVAFGSQVTLRNVFGKPVPCWLHSHQDTYPMIYENGRGSSHQQQVTCYPFKDVNNWWIVKDPRRHQLVVSSPPRPVRHGDMVQLVHGMTTRSLNTHDVAAPLSPHSQEVSCYIDYNISMPAQNLWRLEIVNRGSDTDVWKTILSEVRFVHVNTSAVLKLSGAHLPDWGYRQLEIVGEKLSRGYHGSTVWNVEEHRYGASQEQRERERELHSPAQVDVSRNLSFMARFSELQWRMLALRSDDSEHKYSSSPLEWVTLDTNIAYWLHPRTSAQIHLLGNIVIWVSGSLALAIYALLSLWYLLRRRRNVHDLPQDAWLRWVLAGALCAGGWAVNYLPFFLMEKTLFLYHYLPALTFQILLLPVVLQHISDHLCRSQLQRSIFSALVVAWYSSACHVSNTLRPLTYGDKSLSPHELKALRWKDSWDILIRKH

SEQ ID NO: 804089 - protein, 735 aa, Homo sapiens
GPAGSVNRTLSRAVGGAECRAASPPTVGPVGRFRGVAGSRARLCVDSEKRGFDEVYYGQYISFYMKQIFFLDDSGPPFGHMVLALGGYLGGFDGNFLWNRIGAEYSSNVPVWSLRLLPALAGALSVPMAYQIVLELHFSHCAAMGAALLMLIENALITQSRLMLLESVLIFFNLLAVLSYLKFFNCQKHSPFSLSWWFWLTLTGVACSCAVGIKYMGVFTYVLVLGVAAVHAWHLLGDQTLSNVCVFCHLLARAVALLVIPVVLYLLFFYVHLILVFRSGPHDQIMSSAFQASLEGGLARITQGQPLEVAFGSQVTLRNVFGKPVPCWLHSHQDTYPMIYENGRGSSHQQQVTCYPFKDVNNWWIVKDPRRHQLVVSSPPRPVRHGDMVQLVHGMTTRSLNTHDVAAPLSPHSQEVSCYIDYNISMPAQNLWRLEIVNRGSDTDVWKTILSEVRFVHVNTSAVLKLSGAHLPDWGYRQLEIVGEKLSRGYHGSTVWNVEEHRYGASQEQRERERELHSPAQVDVSRNLSFMARFSELQWRMLALRSDDSEHKYSSSPLEWVTLDTNIAYWLHPRTSAQIHLLGNIVIWVSGSLALAIYALLSLWYLLRRRRNVHDLPQDAWLRWVLAGALCAGGWAVNYLPFFLMEKTLFLYHYLPALTFQILLLPVVLQHISDHLCRSQLQRSIFSALVVAWYSSACHVSNTLRPLTYGDKSLSPHELKALRWKDSWDILIRKH

SEQ ID NO: 804090 - protein, 874 aa, Homo sapiens
GPRRLGESNVEQGGGWCGVPSGLTPNRRPSRTVPRRCREPGAALCGLGETRGVCLSPLFYKMWGFLKRPVVVTADINLSLVALTGMGLLSRLWRLTYPRAVVFDEVYYGQYISFYMKQIFFLDDSGPPFGHMVLALGGYLGGFDGNFLWNRIGAEYSSNVPVWSLRLLPALAGALSVPMAYQIVLELHFSHCAAMGAALLMLIENALITQSRLMLLESVLIFFNLLAVLSYLKFFNCQKHSPFSLSWWFWLTLTGVACSCAVGIKYMGVFTYVLVLGVAAVHAWHLLGDQTLSNVGADVQCCMRPACMGQMRMSQGVLGEKTPILNVLEAGRPGQPRLLASAGASVWEARVSVTNFFYSSQCLEVGALFHAVEHDFSLNLWQVCVFCHLLARAVALLVIPVVLYLLFFYVHLILVFRSGPHDQIMSSAFQASLEGGLARITQGQPLEVAFGSQVTLRNVFGKPVPCWLHSHQDTYPMIYENGRGSSHQQQVTCYPFKDVNNWWIVKDPRRHQLVVSSPPRPVRHGDMVQLVHGMTTRSLNTHDVAAPLSPHSQEVSCYIDYNISMPAQNLWRLEIVNRGSDTDVWKTILSEVRFVHVNTSAVLKLSGAHLPDWGYRQLEIVGEKLSRGYHGSTVWNVEEHRYGASQEQRERERELHSPAQVDVSRNLSFMARFSELQWRMLALRSDDSEHKYSSSPLEWVTLDTNIAYWLHPRTSAQIHLLGNIVIWVSGSLALAIYALLSLWYLLRRRRNVHDLPQDAWLRWVLAGALCAGGWAVNYLPFFLMEKTLFLYHYLPALTFQILLLPVVLQHISDHLCRSQLQRSIFSALVVAWYSSACHVSNTLRPLTYGDKSLSPHELKALRWKDSWDILIRKH

SEQ ID NO: 804091 - protein, 608 aa, Homo sapiens
MAYQIVLELHFSHCAAMGAALLMLIENALITQSRLMLLESVLIFFNLLAVLSYLKFFNCQKHSPFSLSWWFWLTLTGVACSCAVGIKYMGVFTYVLVLGVAAVHAWHLLGDQTLSNVCVFCHLLARAVALLVIPVVLYLLFFYVHLILVFRSGPHDQIMSSAFQASLEGGLARITQGQPLEVAFGSQVTLRNVFGKPVPCWLHSHQDTYPMIYENGRGSSHQQQVTCYPFKDVNNWWIVKDPRRHQLVVSSPPRPVRHGDMVQLVHGMTTRSLNTHDVAAPLSPHSQEVSCYIDYNISMPAQNLWRLEIVNRGSDTDVWKTILSEVRFVHVNTSAVLKLSGAHLPDWGYRQLEIVGEKLSRGYHGSTVWNVEEHRYGASQEQRERERELHSPAQVDVSRNLSFMARFSELQWRMLALRSDDSEHKYSSSPLEWVTLDTNIAYWLHPRTSAQIHLLGNIVIWVSGSLALAIYALLSLWYLLRRRRNVHDLPQDAWLRWVLAGALCAGGWAVNYLPFFLMEKTLFLYHYLPALTFQILLLPVVLQHISDHLCRSQLQRSIFSALVVAWYSSACHVSNTLRPLTYGDKSLSPHELKALRWKDSWDILIRKH

SEQ ID NO: 804092 - protein, 757 aa, Homo sapiens
GPAGSVNRTLSRAVGGAECRAASPPTVGPVGRFRGVAGSRARLCVDSEKRGFDEVYYGQYISFYMKQIFFLDDSGPPFGHMVLALGGYLGGFDGNFLWNRIGAEYSSNVPVWSLRLLPALAGALSVPMAYQIVLELHFSHCAAMGAALLMLIENALITQSRLMLLESVLIFFNLLAVLSYLKFFNCQKHSPFSLSWWFWLTLTGVACSCAVGIKYMGVFTYVLVLGVAAVHAWHLLGDQTLSNVGADVQCCMRPACMGQMRMSQGVCVFCHLLARAVALLVIPVVLYLLFFYVHLILVFRSGPHDQIMSSAFQASLEGGLARITQGQPLEVAFGSQVTLRNVFGKPVPCWLHSHQDTYPMIYENGRGSSHQQQVTCYPFKDVNNWWIVKDPRRHQLVVSSPPRPVRHGDMVQLVHGMTTRSLNTHDVAAPLSPHSQEVSCYIDYNISMPAQNLWRLEIVNRGSDTDVWKTILSEVRFVHVNTSAVLKLSGAHLPDWGYRQLEIVGEKLSRGYHGSTVWNVEEHRYGASQEQRERERELHSPAQVDVSRNLSFMARFSELQWRMLALRSDDSEHKYSSSPLEWVTLDTNIAYWLHPRTSAQIHLLGNIVIWVSGSLALAIYALLSLWYLLRRRRNVHDLPQDAWLRWVLAGALCAGGWAVNYLPFFLMEKTLFLYHYLPALTFQILLLPVVLQHISDHLCRSQLQRSIFSALVVAWYSSACHVSNTLRPLTYGDKSLSPHELKALRWKDSWDILIRKH

SEQ ID NO: 804093 - protein, 630 aa, Homo sapiens
MAYQIVLELHFSHCAAMGAALLMLIENALITQSRLMLLESVLIFFNLLAVLSYLKFFNCQKHSPFSLSWWFWLTLTGVACSCAVGIKYMGVFTYVLVLGVAAVHAWHLLGDQTLSNVGADVQCCMRPACMGQMRMSQGVCVFCHLLARAVALLVIPVVLYLLFFYVHLILVFRSGPHDQIMSSAFQASLEGGLARITQGQPLEVAFGSQVTLRNVFGKPVPCWLHSHQDTYPMIYENGRGSSHQQQVTCYPFKDVNNWWIVKDPRRHQLVVSSPPRPVRHGDMVQLVHGMTTRSLNTHDVAAPLSPHSQEVSCYIDYNISMPAQNLWRLEIVNRGSDTDVWKTILSEVRFVHVNTSAVLKLSGAHLPDWGYRQLEIVGEKLSRGYHGSTVWNVEEHRYGASQEQRERERELHSPAQVDVSRNLSFMARFSELQWRMLALRSDDSEHKYSSSPLEWVTLDTNIAYWLHPRTSAQIHLLGNIVIWVSGSLALAIYALLSLWYLLRRRRNVHDLPQDAWLRWVLAGALCAGGWAVNYLPFFLMEKTLFLYHYLPALTFQILLLPVVLQHISDHLCRSQLQRSIFSALVVAWYSSACHVSNTLRPLTYGDKSLSPHELKALRWKDSWDILIRKH

SEQ ID NO: 804094 - protein, 786 aa, Homo sapiens; identical to SEQ ID NO: 804088

SEQ ID NO: 804095 - protein, 347 aa, Homo sapiens
PWRGGGCTSPATLGAARGAVGIGKEGQYQPLIASLTWGLVPLSQAQEIVNRGSDTDVWKTILSEVRFVHVNTSAVLKLSGAHLPDWGYRQLEIVGEKLSRGYHGSTVWNVEEHRYGASQEQRERERELHSPAQVDVSRNLSFMARFSELQWRMLALRSDDSEHKYSSSPLEWVTLDTNIAYWLHPRTSAQIHLLGNIVIWVSGSLALAIYALLSLWYLLRRRRNVHDLPQDAWLRWVLAGALCAGGWAVNYLPFFLMEKTLFLYHYLPALTFQILLLPVVLQHISDHLCRSQLQRSIFSALVVAWYSSACHVSNTLRPLTYGDKSLSPHELKALRWKDSWDILIRKH

SEQ ID NO: 804096 - protein, 293 aa, Homo sapiens
SNPSGHGSHGLPITPFTLLRCHQLSGAHLPDWGYRQLEIVGEKLSRGYHGSTVWNVEEHRYGASQEQRERERELHSPAQVDVSRNLSFMARFSELQWRMLALRSDDSEHKYSSSPLEWVTLDTNIAYWLHPRTSAQIHLLGNIVIWVSGSLALAIYALLSLWYLLRRRRNVHDLPQDAWLRWVLAGALCAGGWAVNYLPFFLMEKTLFLYHYLPALTFQILLLPVVLQHISDHLCRSQLQRSIFSALVVAWYSSACHVSNTLRPLTYGDKSLSPHELKALRWKDSWDILIRKH

SEQ ID NO: 804097 - protein, 289 aa, Homo sapiens
  misc_feature (6)..(6): Xaa can be any naturally occurring amino acid
RERERXRLVPHVNTSAVLKLSGAHLPDWGYRQLEIVGEKLSRGYHGSTVWNVEEHRYGASQEQRERERELHSPAQVDVSRNLSFMARFSELQWRMLALRSDDSEHKYSSSPLEWVTLDTNIAYWLHPRTSAQIHLLGNIVIWVSGSLALAIYALLSLWYLLRRRRNVHDLPQDAWLRWVLAGALCAGGWAVNYLPFFLMEKTLFLYHYLPALTFQILLLPVVLQHISDHLCRSQLQRSIFSALVVAWYSSACHVSNTLRPLTYGDKSLSPHELKALRWKDSWDILIRKH

SEQ ID NO: 804098 - protein, 786 aa, Homo sapiens; identical to SEQ ID NO: 804088

SEQ ID NO: 804099 - protein, 786 aa, Homo sapiens; identical to SEQ ID NO: 804088

SEQ ID NO: 804100 - protein, 786 aa, Homo sapiens; identical to SEQ ID NO: 804088

SEQ ID NO: 804101 - protein, 582 aa, Homo sapiens
GPRRLGESNVEQGGGWCGVPSGLTPNRRPSRTVPRRCREPGAALCGLGETRGVCLSPLFYKMWGFLKRPVVVTADINLSLVALTGMGLLSRLWRLTYPRAVVFDEVYYGQYISFYMKQIFFLDDSGPPFGHMVLALGGYLGGFDGNFLWNRIGAEYSSNVPVWSLRLLPALAGALSVPMAYQIVLELHFSHCAAMGAALLMLIENALITQSRLMLLESVLIFFNLLAVLSYLKFFNCQKHSPFSLSWWFWLTLTGVACSCAVGIKYMGVFTYVLVLGVAAVHAWHLLGDQTLSNVCVFCHLLARAVALLVIPVVLYLLFFYVHLILVFRSGPHDQIMSSAFQASLEGGLARITQGQPLEVAFGSQVTLRNVFGKPVPCWLHSHQDTYPMIYENGRGSSHQQQVTCYPFKDVNNWWIVKDPRRHQLVVSSPPRPVRHGDMVQLVHGMTTRSLNTHDVAAPLSPHSQEVSCYIDYNISMPAQNLWRLEIVNRGSDTDVWKTILSEVRFVHVNTSAVLKTRSSFMNTQQPEQVPALPSASPAGVPGQLSVGGPPEPRARAGACMSLSMTASRLALGTVLCGNPPL

SEQ ID NO: 804102 - protein, 219 aa, Homo sapiens
GPRRLGESNVEQGGGWCGVPSGLTPNRRPSRTVPRRCREPGAALCGLGETRGVCLSPLFYKMWGFLKRPVVVTADINLSLVALTGMGLLSRLWRLTYPRAVVFDEVYYGQYISFYMKQIFFLDDSGPPFGHMVLALGGYLGGFDGNFLWNRIGAEYSSNVPVWSLRLLPALAGALSVPMAYQIVLELHFSHCAAMGAALLMLIGKTCAPACSCCHAGKN

SEQ ID NO: 804103 - protein, 105 aa, Homo sapiens
MLTPFLSCLCSIKYMGVFTYVLVLGVAAVHAWHLLGDQTLSNVGADVQCCMRPACMGQMRMSQGVLGEKTPILNVLEAGRPGQPRLLASAGASVWEARVSVTNFF

SEQ ID NO: 804104 - protein, 136 aa, Homo sapiens
RGSLKECGPPEDSLHSSSITSLPPVAAGIPEDSGPGSTQSSSRPGNTSSSSRPPPPPPPPPPRRFLLRLPASFAPSRPRSASGPPAGQLLSGAPTQAHGSMKQEEEAERERSRPPQPRLGQDKSKTIFLLLSVMMY

SEQ ID NO: 804105 - protein, 136 aa, Homo sapiens; identical to SEQ ID NO: 804104

SEQ ID NO: 804106 - protein, 136 aa, Homo sapiens; identical to SEQ ID NO: 804104

SEQ ID NO: 804107 - protein, 136 aa, Homo sapiens; identical to SEQ ID NO: 804104

SEQ ID NO: 804108 - protein, 136 aa, Homo sapiens; identical to SEQ ID NO: 804104

SEQ ID NO: 804109 - protein, 136 aa, Homo sapiens; identical to SEQ ID NO: 804104

SEQ ID NO: 804110 - protein, 136 aa, Homo sapiens; identical to SEQ ID NO: 804104

SEQ ID NO: 804111 - protein, 136 aa, Homo sapiens; identical to SEQ ID NO: 804104

SEQ ID NO: 804112 - protein, 136 aa, Homo sapiens; identical to SEQ ID NO: 804104

SEQ ID NO: 804113 - protein, 136 aa, Homo sapiens; identical to SEQ ID NO: 804104

SEQ ID NO: 804114 - protein, 136 aa, Homo sapiens; identical to SEQ ID NO: 804104

SEQ ID NO: 804115 - protein, 781 aa, Homo sapiens
PWRRTGRSRGSQKRWEKRRRTPRRRRRRRPGSERSRKVQRRLRAPSPGLAADEPAGPLRGAAQPGRLWSRGSRRPPGARDPPGRCARVTPPPRAVPAPGSQLPATADRARRPRRRKKPGPRSLPRTAALHPAAQRSRLPPAPARPGCSRLLPAMGSCARLLLLWGCTVVAAGLSGVAGVSSRCEKACNPRMGNLALGRKLWADTTCGQNATELYCFYSENTDLTCRQPKCDKCNAAYPHLAHLPSAMADSSFRFPRTWWQSAEDVHREKIQLDLEAEFYFTHLIVMFKSPRPAAMVLDRSQDFGKTWKPYKYFATNCSATFGLEDDVVKKGAICTSKYSSPFPCTGGEVIFKALSPPYDTENPYSAKVQEQLKITNLRVQLLKRQSCPCQRNDLNEEPQHFTHYAIYDFIVKGSCFCNGHADQCIPVHGFRPVKAPGTFHMVHGKCMCKHNTAGSHCQHCAPLYNDRPWEAADGKTGAPNECRTCKCNGHADTCHFDVNVWEASGNRSGGVCDDCQHNTEGQYCQRCKPGFYRDLRRPFSAPDACKPCSCHPVGSAVLPANSVTFCDPSNGDCPCKPGVAGRRCDRCMVGYWGFGDYGCRPCDCAGSCDPITGDCISSHTDIDWYHEVPDFRPVHNKSEPAWEWEDAQGFSALLHSGKCECKEQTLGNAKAFCGMKYSYVLKIKILSAHDKGTHVEVNVKIKKVLKSTKLKIFRGKRTLYPESWTDRGCTCPILNPGLEYLVAGHEDIRTGKLIVNMKSFVQHWKPSLGRKVMDILKRECK

SEQ ID NO: 804116 - protein, 591 aa, Homo sapiens
MGNLALGRKLWADTTCGQNATELYCFYSENTDLTCRQPKCDKCNAAYPHLAHLPSAMADSSFRFPRTWWQSAEDVHREKIQLDLEAEFYFTHLIVMFKSPRPAAMVLDRSQDFGKTWKPYKYFATNCSATFGLEDDVVKKGAICTSKYSSPFPCTGGEVIFKALSPPYDTENPYSAKVQEQLKITNLRVQLLKRQSCPCQRNDLNEEPQHFTHYAIYDFIVKGSCFCNGHADQCIPVHGFRPVKAPGTFHMVHGKCMCKHNTAGSHCQHCAPLYNDRPWEAADGKTGAPNECRTCKCNGHADTCHFDVNVWEASGNRSGGVCDDCQHNTEGQYCQRCKPGFYRDLRRPFSAPDACKPCSCHPVGSAVLPANSVTFCDPSNGDCPCKPGVAGRRCDRCMVGYWGFGDYGCRPCDCAGSCDPITGDCISSHTDIDWYHEVPDFRPVHNKSEPAWEWEDAQGFSALLHSGKCECKEQTLGNAKAFCGMKYSYVLKIKILSAHDKGTHVEVNVKIKKVLKSTKLKIFRGKRTLYPESWTDRGCTCPILNPGLEYLVAGHEDIRTGKLIVNMKSFVQHWKPSLGRKVMDILKRECK

SEQ ID NO: 804117 - protein, 781 aa, Homo sapiens; identical to SEQ ID NO: 804115

SEQ ID NO: 804118 - protein, 777 aa, Homo sapiens
PWRRTGRSRGSQKRWEKRRRTPRRRRRRRPGSERSRKVQRRLRAPSPGLAADEPAGPLRGAAQPGRLWSRGSRRPPGARDPPGRCARVTPPPRAVPAPGSQLPATADRARRPRRRKKPGPRSLPRTAALHPAAQRSRLPPAPARPGCSRLLPAMGSCARLLLLWGCTVVAAGLSGVAGVSSRCEKACNPRMGNLALGRKLWADTTCGQNATELYCFYSENTDLTCRQPKCDKCNAAYPHLAHLPSAMADSSFRFPRTWWQSAEDVHREKIQLDLEAEFYFTHLIVMFKSPRPAAMVLDRSQDFGKTWKPYKYFATNCSATFGLEDDVVKKGAICTSKYSSPFPCTGGEVIFKALSPPYDTENPYSAKVQEQLKITNLRVQLLKRQSCPCQRNDLNEEPQHFTHYAIYDFIVKGSCFCNGHADQCIPVHGFRPVKAPGTFHMVHGKCMCKHNTAGSHCQHCAPLYNDRPWEAADGKTGAPNECRTCKCNGHADTCHFDVNVWEASGNRSGGVCDDCQHNTEGQYCQRCKPGFYRDLRRPFSAPDACKPCSCHPVGSAVLPANSVTFCDPSNGDCPCKPGVAGRRCDRCMVGYWGFGDYGCRPCDCAGSCDPITGDCISSHTDIDWYHEVPDFRPVHNKSEPAWEWEDAQGFSALLHSGKCECKEQTLGNAKAFCGMKYSYVLKIKILSAHDKGTHVEVNVKIKKVLKSTKLKIFRGKRTLYPESWTDRGCTCPILNPVQQPRPKKADKKTETLHANLLPWLLWKRNNPIGYPCIFIHS

SEQ ID NO: 804119 - protein, 353 aa, Homo sapiens
PWRRTGRSRGSQKRWEKRRRTPRRRRRRRPGSERSRKVQRRLRAPSPGLAADEPAGPLRGAAQPGRLWSRGSRRPPGARDPPGRCARVTPPPRAVPAPGSQLPATADRARRPRRRKKPGPRSLPRTAALHPAAQRSRLPPAPARPGCSRLLPAMGSCARLLLLWGCTVVAAGLSGVAGVSSRCEKACNPRMGNLALGRKLWADTTCGQNATELYCFYSENTDLTCRQPKCDKCNAAYPHLAHLPSAMADSSFRFPRTWWQSAEDVHREKIQLDLEAEFYFTHLIVMFKSPRPAAMVLDRSQDFGKTWKPYKYFATNCSATFGLEDDVVKKGAICTSKYSSPFPCTGGEVRAPV

SEQ ID NO: 804120 - protein, 499 aa, Homo sapiens
MSFGSEHYLCSSSSYRKVFGDGSRLSARLSGAGGAGGFRSQSLSRSNVASSAACSSASSLGLGLAYRRPPASDGLDLSQAAARTNEYKIIRTNEKEQLQGLNDRFAVFIEKVHQLETQNRALEAELAALRQRHAEPSRVGELFQRELRDLRAQLEEASSARSQALLERDGLAEEVQRLRARCEEESRGREGAERALKAQQRDVDGATLARLDLEKKVESLLDELAFVRQVHDEEVAELLATLQASSQAAAEVDVTVAKPDLTSALREIRAQYESLAAKNLQSAEEWYKSKFANLNEQAARSTEAIRASREEIHEYRRQLQARTIEIEGLRGANESLERQILELEERHSAEVAGYQDSIGQLENDLRNTKSEMARHLREYQDLLNVKMALDIEIAAYRKLLEGEETRFSTSGLSISGLNPLPNPSYLLPPRILSATTSKVSSTGLSLKKEEEEEEASKVASKKTSQIGESFEEILEETVISTKKTEKSNIEETTISSQKI

SEQ ID NO: 804121 - protein, 499 aa, Homo sapiens; identical to SEQ ID NO: 804120

SEQ ID NO: 804122 - protein, 187 aa, Homo sapiens
RGREGAERALKAQQRDVDGATLARLDLEKKVESLLDELAFVRQVHDEEVAELLATLQASSQAAAEVDVTVAKPDLTSALREIRAQYESLAAKNLQSAEEWYKSKFANLNEQAARSTEAIRASREEIHEYRRQLQARTIEIEGLRGANESLERQILELEERHSAEVAGYQVRAGAGRGEGCPALFRAY

SEQ ID NO: 804123 - protein, 92 aa, Homo sapiens
TSLHFPKMKLEKKQSIQIWKWLLEGSGTHSSNMQFITAHQSWQATGHSGALSKSACRDTHSRPHKKQWPQVQTEENDCTRNETLRPGREMFR

SEQ ID NO: 804124 - protein, 309 aa, Homo sapiens
MLFEKSPKTKQQAQCPFLLSFPGIGPPSQPTPWGSQGDSWRGGAQGGLRGGGALGPPAHAPGSPADCGLAPAALTRIVGGSAAGRGEWPWQVSLWLRRREHRCGAVLVAERWLLSAAHCFDVYGDPKQWAAFLGTPFLSGAEGQLERVARIYKHPFYNLYTLDYDVALLELAGPVRRSRLVRPICLPEPAPRPPDGTRCVITGWGSVREGGSMARQLQKAAVRLLSEQTCRRFYPVQISSRMLCAGFPQGGVDSCSGDAGGPLACREPSGRWVLTGVTSWGYGCGRPHFPGVYTRVAAVRGWIGQHIQE

SEQ ID NO: 804125 - protein, 122 aa, Homo sapiens [sequence omitted]

SEQ ID NO: 804126 - protein, 560 aa, Homo sapiens
MVPHAILARGRDVCRRNGLLILSVLSVIVGCLLGFFLRTRRLSPQEISYFQFPGELLMRMLKMMILPLVVSSLMSGLASLDAKTSSRLGVLTVAYYLWTTFMAVIVGIFMVSIIHPGSAAQKETTEQSGKPIMSSADALLDLIRNMFPANLVEATFKQYRTKTTPVVKSPKVAPEEAPPRRILIYGVQEENGSHVQNFALDLTPPPEVVYKSEPGTSDGMNVLGIVFFSATMGIMLGRMGDSGAPLVSFCQCLNESVMKIVAVAVWYFPFGIVFLIAGKILEMDDPRAVGKKLGFYSVTVVCGLVLHGLFILPLLYFFITKKNPIVFIRGILQALLIALATSSSSATLPITFKCLLENNHIDRRIARFVLPVGATINMDGTALYEAVAAIFIAQVNNYELDFGQIITISITATAASIGAAGIPQAGLVTMVIVLTSVGLPTDDITLIIAVDWALDRFRTMINVLGDALAAGIMAHICRKDFARDTGTEKLLPCETKPVSLQEIVAAQQNGCVKSVAEASELTLGPTCPHHVPVQVERDEELPAASLNHCTIQISELETNV

SEQ ID NO: 804127 - protein, 158 aa, Homo sapiens
MVPHAILARGRDVCRRNGLLILSVLSVIVGCLLGFFLRTRRLSPQEISYFQFPGELLMRMLKMMILPLVVSSLMSGLASLDAKTSSRLGVLTVAYYLWTTFMAVIVGIFMVSIIHPGSAAQKETTEQSGKPIMSSADALLDLIRQKEESWRNGPKGPG

SEQ ID NO: 804128 - protein, 560 aa, Homo sapiens; identical to SEQ ID NO: 804126

SEQ ID NO: 804129 - protein, 260 aa, Homo sapiens
AGAALQRHKHSWRGGCLGRGELPDRGPSHPGGGCWADTGPSNRSSATLPITFKCLLENNHIDRRIARFVLPVGATINMDGTALYEAVAAIFIAQVNNYELDFGQIITISITATAASIGAAGIPQAGLVTMVIVLTSVGLPTDDITLIIAVDWALDRFRTMINVLGDALAAGIMAHICRKDFARDTGTEKLLPCETKPVSLQEIVAAQQNGCVKSVAEASELTLGPTCPHHVPVQVERDEELPAASLNHCTIQISELETNV

SEQ ID NO: 804130 - protein, 477 aa, Homo sapiens
AFLQRGDKEGGGRLAALSAARSAVQGLRSPRAGAGVGVGPGAQETFRGRGCGSAGFPTGRVSRQLPESGGARGGPAFHKVHAYSRAAGSPPAAQARSLSGVTRPPGPRDARGRQGRTTSLRPCPCAPPGLPRGAAQPTRPSWPEGAAPGLAGKPEPPGPSRAFSDFPPGVLDLLRPSWASSGFLDPPQAFPEASRPFPGPLQAELSATWPVGLWDPGPGPPASTLHSHRLLTSSQEHRPDEHAGFRTNTWAIVTLRMPGNEEIRKLVPLHLGDGGKLARTTAHPIHSSCSQFVLLCDTTSITRTASSSSSVIKFSLLDKCKKPENCAQPEVLCRPFEMLSNLHELLPNHLMETLYSRKSEEDKKKCENPELSGLERILARHQLPKEINLTPKPNRMPPWKRKIINNVTDGWKKCHLLKRNTKEPPMSTIVVRKLIQKNVPRRHSLRNTSRKLRNLPTTAKGTQTGKSQCLLGISEPT

SEQ ID NO: 804131 - protein, 475 aa, Homo sapiens
AFLQRGDKEGGGRLAALSAARSAVQGLRSPRAGAGVGVGPGAQETFRGRGCGSAGFPTGRVSRQLPESGGARGGPAFHKVHAYSRAAGSPPAAQARSLSGVTRPPGPRDARGRQGRTTSLRPCPCAPPGLPRGAAQPTRPSWPEGAAPGLAGKPEPPGPSRAFSDFPPGVLDLLRPSWASSGFLDPPQAFPEASRPFPGPLQAELSATWPVGLWDPGPGPPASTLHSHRLLTSSQEHRPDEHAGFRTNTWAIVTLRMPGNEEIRKLVPLHLGDGGKLARTTAHPIHSSCSQFVLLCDTTSITRTASSSSSVIKFSLLDKCKKPENCAQPEVLCRPFEMLSNLHELLPNHLMETLYSRKSEEDKKKCENPELSGLERILARHQLPKEINLTPKPNRMPPWKRKIINNVTDGWKKCHLLKRNTKEPPMSTIVVRKLIQKNVPRRHSLRNTSRKLRNLPTTAKGTQTVKSHETSRMNR

SEQ ID NO: 804132 - protein, 349 aa, Homo sapiens
AFLQRGDKEGGGRLAALSAARSAVQGLRSPRAGAGVGVGPGAQRDLPGPGLRLRGLPHRPGLPATTRERGRPGRPGVPQGPRVFAGRGVAAGRPGAEPLGGHPAAGPAGRTGPARGGQQASGPVPAPRPASPAGLRSPLGHPGLKGPPPASRESLSLPGLLGPSRTFPQASWTFFGLPGPPRASLTLPRPSPRPPGPSLGLSRLSSPRHGQWASGTRGPAHPPPPPFPPPAHIKPGAPPGENPELSGLERILARHQLPKEINLTPKPNRMPPWKRKIINNVTDGWKKCHLLKRNTKEPPMSTIVVRKLIQKNVPRRHSLRNTSRKLRNLPTTAKGTQTVKSHETSRMNR

SEQ ID NO: 804133 - protein, 456 aa, Homo sapiens
AFLQRGDKEGGGRLAALSAARSAVQGLRSPRAGAGVGVGPGAQETFRGRGCGSAGFPTGRVSRQLPESGGARGGPAFHKVHAYSRAAGSPPAAQARSLSGVTRPPGPRDARGRQGRTTSLRPCPCAPPGLPRGAAQPTRPSWPEGAAPGLAGKPEPPGPSRAFSDFPPGVLDLLRPSWASSGFLDPPQAFPEASRPFPGPLQAELSATWPVGLWDPGPGPPASTLHSHRLLTSSQEHRPDEHAGFRTNTWAIVTLRMPGNEEIRKLVPLHLGDGGKLARTTAHPIHSSCSQFVLLCDTTSITRTASSSSSVIKFSLLDKCKKPENCAQPEVLCRPFEMLSNLHELLPNHLMETLYSRKSEEDKKKCENPELSGLERILARHQLPKEINLTPKPNRMPPWKRKIINNVTDGWKKCHLLKRNTKEPPMSTIVVREVLFTFFGIRSGIQATLILLLMLS

SEQ ID NO: 804134 - protein, 276 aa, Homo sapiens
MSPCSGKSGWQGPRVVQRVPGDSAVPRGMHGSFIIVTRHGWGLKAAILMTQGTLEAQVLLMAEPPVGASRERELRGPMAWSPCGLAQPSSSRPSLTRACRRNLPRVSGQQPVPAGVPPEPPAQQLRPREAQGAEDPALSVQPRLLLLPAHPQTQLCLHPGSCSYAGTPRSLCTGTDVTGRYGGEQELGTHTGLGDRVSAGPSRLLGPRCKGMAPRPGGSTTGFRNEDTARCGTAGGEEEDGEPSNPQRPEGSAAHENTGRAAEGKGDNEKGQQHRT

SEQ ID NO: 804135 - protein, 655 aa, Homo sapiens
MSPCSGKSGWQGPRVVQRVPGDSAVPRGMHGSFIIVTRHGWGLKAAILMTQGTLEAQVLLMAEPPVGASRERELRGPMAWSPCGLAQPSSSRPSLTRACRRNLPRVSGQQPVPAGVPPEPPAQQLRPREAQGAEDPALSVQPRLLLLPAHPQTQLCLHPGSCSFCRAPRSSAREQLVPEGSRGRAGLGEHPVLGHRVAAGSLPASGDPACHRHGLPGQAAQHPPGFGYSKEHGRTGSAGEAFLSTIQKAAEVVASAMRPGPESPSTRRLLPRGDTYQPAMMPSASHGPPTLGNLLPGAIPGPRAVRHQPGQAGGGWDELDSGPSSQNSSQNSDLSRVSDSGSHSGSDSHSGASREPGDLAERVEVVALSDCQQELSLVRTVTRGPRAFLSREEAQHFIKACRCGLLNCEAVLQLLTCHLRGTSECTQLRALCAIASLGSSDLLPQEHILLRTRPWLQELSMGSPGPVTNKATKILRHFEASCGQLSPARGTSAEPGPTAALPGPSDLLTDAVPLPGSQVFLQPLSSTPVSSRSPAPSSGMPSSPVPTPPPDASPIPAPGDPSEAEARLAESRRWRPERIPGGTDSPKRGPSSCVWSRDSLFAGMELVACPRLVGAGAAAGESCPDAPRAPQTSSQRTAAKEPPGSEPSAFAFLNA

SEQ ID NO: 804136 - protein, 443 aa, Homo sapiens
MGSQARPHSTLQGFGYSKEHGRTGSAGEAFLSTIQKAAEVVASAMRPGPESPSTRRLLPRGDTYQPAMMPSASHGPPTLGNLLPGAIPGPRAVRHQPGQAGGGWDELDSGPSSQNSSQNSDLSRVSDSGSHSGSDSHSGASREPGDLAERVEVVALSDCQQELSLVRTVTRGPRAFLSREEAQHFIKACRCGLLNCEAVLQLLTCHLRGTSECTQLRALCAIASLGSSDLLPQEHILLRTRPWLQELSMGSPGPVTNKATKILRHFEASCGQLSPARGTSAEPGPTAALPGPSDLLTDAVPLPGSQVFLQPLSSTPVSSRSPAPSSGMPSSPVPTPPPDASPIPAPGDPSEAEARLAESRRWRPERIPGGTDSPKRGPSSCVWSRDSLFAGMELVACPRLVGAGAAAGESCPDAPRAPQTSSQRTAAKEPPGSEPSAFAFLNA

SEQ ID NO: 804137 - protein, 588 aa, Homo sapiens
MVGALVPFQLPILLKGTSDDDVPCPGYLFEEIAKISHESPGSSQCLLEYLLSRLHSSSGHGKLKVLKILLYLCSHGSSFFLLILKRNSAFIQEAAAFAGPPDPLHGNSLYQKVRAAAQDLGSTLFSDTVLPLAPSQPLGTPPATGMGSQARPHSTLQGFGYSKEHGRTGSAGEAFLSTIQKAAEVVASAMRPGPESPSTRRLLPRGDTYQPAMMPSASHGPPTLGNLLPGAIPGPRAVRHQPGQAGGGWDELDSGPSSQNSSQNSDLSRVSDSGSHSGSDSHSGASREPGDLAERVEVVALSDCQQELSLVRTVTRGPRAFLSREEAQHFIKACRCGLLNCEAVLQLLTCHLRGTSECTQLRALCAIASLGSSDLLPQEHILLRTRPWLQELSMGSPGPVTNKATKILRHFEASCGQLSPARGTSAEPGPTAALPGPSDLLTDAVPLPGSQVFLQPLSSTPVSSRSPAPSSGMPSSPVPTPPPDASPIPAPGDPSEAEARLAESRRWRPERIPGGTDSPKRGPSSCVWSRDSLFAGMELVACPRLVGAGAAAGESCPDAPRAPQTSSQRTAAKEPPGSEPSAFAFLNA

SEQ ID NO: 804138 - protein, 655 aa, Homo sapiens; identical to SEQ ID NO: 804135

SEQ ID NO: 804139 - protein, 443 aa, Homo sapiens; identical to SEQ ID NO: 804136

SEQ ID NO: 804140 - protein, 443 aa, Homo sapiens; identical to SEQ ID NO: 804136

SEQ ID NO: 804141 - protein, 527 aa, Homo sapiens
MAAAPPLRDRLSFLHRLPILLKGTSDDDVPCPGYLFEEIAKISHESPGSSQCLLEYLLSRLHSSSGHGKLKVLKILLYLCSHGSSFFLLILKRNSAFIQEAAAFAGPPDPLHGNSLYQKVRAAAQDLGSTLFSDTVLPLAPSQPLGTPPATGMGSQARPHSTLQGFGYSKEHGRTAVRHQPGQAGGGWDELDSGPSSQNSSQNSDLSRVSDSGSHSGSDSHSGASREPGDLAERVEVVALSDCQQELSLVRTVTRGPRAFLSREEAQHFIKACRCGLLNCEAVLQLLTCHLRGTSECTQLRALCAIASLGSSDLLPQEHILLRTRPWLQELSMGSPGPVTNKATKILRHFEASCGQLSPARGTSAEPGPTAALPGPSDLLTDAVPLPGSQVFLQPLSSTPVSSRSPAPSSGMPSSPVPTPPPDASPIPAPGDPSEAEARLAESRRWRPERIPGGTDSPKRGPSSCVWSRDSLFAGMELVACPRLVGAGAAAGESCPDAPRAPQTSSQRTAAKEPPGSEPSAFAFLNA

SEQ ID NO: 804142 - protein, 254 aa, Homo sapiens
PGGSGADREGTWIMAAAPPLRDRLSFLHRVSEGGPPGPRSHGSSRAPHSPDSPRAGAIDLASPRRVAAPGPFARADAPELPARRAVPGPSKPGLPSRTRRAQGRWAQPDPGGTNRPRPAFSGLRREGRSGGPGGRGAAVSVLLAPRWAGSPPSSLTVAFQRTPVLERHPWVAENTDVSKGQRRTHHCKPLLVNPLRSRGRGEFPGVVLSKLPSFVSPELSWAGPQRGLGGPRTRPWAARSHARVGQGSQCKVST

SEQ ID NO: 804143 - protein, 443 aa, Homo sapiens; identical to SEQ ID NO: 804136

SEQ ID NO: 804144 - protein, 443 aa, Homo sapiens; identical to SEQ ID NO: 804136

SEQ ID NO: 804145 - protein, 254 aa, Homo sapiens; identical to SEQ ID NO: 804142

SEQ ID NO: 804146 - protein, 708 aa, Homo sapiens
GAAAGAARGGAAPAARSGPARPGAAAAAAAAAAATPEPVGAVREAAAEARPQRREAWGPEVAAAAMPLLFLERFPWPSLRTYTGLSGLALLGTIISAYRALSQPEAGPGEPDQLTASLQPEPPAPARPSAGGPRARDVAQYLLSDSLFVWVLVNTACCVLMLVAKLIQCIVFGPLRVSERQHLKDKFWNFIFYKFIFIFGVLNVQTVEEVVMWCLWFAGLVFLHLMVQLCKDRFEYLSFSPTTPMSSHGRVLSLLVAMLLSCCGLAAVCSITGYTHGMHTLAFMAAESLLVTVRTAHVILRYVIHLWDLNHEGTWEGKGTYVYYTDFVMELTLLSLDLMHHIHMLLFGNIWLSMASLVIFMQLRYLFHEVQRRIRRHKNYLRVVGNMEARFAVATPEELAVNNDDCAICWDSMQAARKLPCGHLFHNSCLRSWLEQDTSCPTCRMSLNIADNNRVREEHQGENLDENLVPVAAAEGRPRLNQHNHFFHFDGSRIASWLPSFSVEVMHTTNILGITQASNSQLNAMAHQIQEMFPQVPYHLVLQDLQLTRSVEITTDNILEGRIQVPFPTQRSDSIRPALNSPVERPSSDQEEGETSAQTERVPLDLSPRLEETLDFGEVEVEPSEVEDFEARGSRFSKSADERQRMLVQRKDELLQQARKRFLNKSSEDDAASESFLPSEGASSDPVTLRRRMLAAAAERRLQKQQTS

SEQ ID NO: 804147 - protein, 708 aa, Homo sapiens; identical to SEQ ID NO: 804146

SEQ ID NO: 804148 - protein, 439 aa, Homo sapiens
GAAAGAARGGAAPAARSGPARPGAAAAAAAAAAATPEPVGAVREAAAEARPQRREAWGPEVAAAAMPLLFLERFPWPSLRTYTGLSGLALLGTIISAYRALSQPEAGPGEPDQLTASLQPEPPAPARPSAGGPRARDVAQYLLSDSLFVWVLVNTACCVLMLVAKLIQCIVFGPLRVSERQHLKDKFWNFIFYKFIFIFGVLNVQTVEEVVMWCLWFAGLVFLHLMVQLCKDRFEYLSFSPTTPMSSHGRVLSLLVAMLLSCCGLAAVCSITGYTHGMHTLAFMAAESLLVTVRTAHVILRYVIHLWDLNHEGTWEGKGTYVYYTDFVMELTLLSLDLMHHIHMLLFGNIWLSMASLVIFMQLRYLFHEVQRRIRRHKNYLRVVGNMEARFAVATPEELAVNNDDCAICWDSMQAARKLPCGHLFHKVSDCELAAEFFG

SEQ ID NO: 804149 - protein, 708 aa, Homo sapiens; identical to SEQ ID NO: 804146

SEQ ID NO: 804150 - protein, 754 aa, Homo sapiens
GAAAGAARGGAAPAARSGPARPGAAAAAAAAAAATPEPVGAVREAAAEARPQRREAWGPEVAAAAMPLLFLERFPWPSLRTYTGLSGLALLGTIISAYRALSQPEAGPGEPDQLTASLQPEPPAPARPSAGGPRARDVAQYLLSDSLFVWVLVNTACCVLMLVAKLIQCIVFGPLRVSERQHLKDKFWNFIFYKFIFIFGVLNVQTVEEVVMWCLWFAGLVFLHLMVQLCKDRFEYLSFSPTTPMSSHGRVLSLLVAMLLSCCGLAAVCSITGYTHGMHTLAFMAAESLLVTVRTAHVILRYVIHLWDLNHEGTWEGKGTYVYYTDFVMELTLLSLDLMHHIHMLLFGNIWLSMASLVIFMQLRYLFHEVQRRIRRHKNYLRVVGNMEARFAVATPEELAVNNDDCAICWDSMQAARKLPCGHLFHNSCLRSWLEQDTSCPTCRMSLNIADNNRVREEHQGENLDENLVPVAAAEGRPRLNQHNHFFHFDGSRIASWLPSFSVEVMHTTNILGITQASNSQLNAMAHQIQEMFPQVPYHLVLQDLQLTRSVEITTDNILEGRIQVPFPTQRSDSIRPALNSPVERPSSDQEEGETSAQTERVPLDLSPRLEETLDFGEVEVEPSEVEDFEARGSRFSKSADERQRMLVQRKDEGLSQFCPLHGKAGLTALPLYKACGLIVFGQLINLILLCNTFYVTFLFPLETLQILTVGMISSGVDWTAWGGGRSGGSEQSPACSRQLLLLPHAYVPQMQVS

SEQ ID NO: 804151 - protein, 712 aa, Homo sapiens
GAAAGAARGGAAPAARSGPARPGAAAAAAAAAAATPEPVGAVREAAAEARPQRREAWGPEVAAAAMPLLFLERFPWPSLRTYTGLSGLALLGTIISAYRALSQPEAGPGEPDQLTASLQPEPPAPARPSAGGPRARDVAQYLLSDSLFVWVLVNTACCVLMLVAKLIQCIVFGPLRVSERQHLKDKFWNFIFYKFIFIFGVLNVQTVEEVVMWCLWFAGLVFLHLMVQLCKDRFEYLSFSPTTPMSSHGRVLSLLVAMLLSCCGLAAVCSITGYTHGMHTLAFMAAESLLVTVRTAHVILRYVIHLWDLNHEGTWEGKGTYVYYTDFVMELTLLSLDLMHHIHMLLFGNIWLSMASLVIFMQLRYLFHEVQRRIRRHKNYLRVVGNMEARFAVATPEELAVNNDDCAICWDSMQAARKLPCGHLFHNSCLRSWLEQDTSCPTCRMSLNIADNNRVREEHQGENLDENLVPVAAAEGRPRLNQHNHFFHFDGSRIASWLPSFSVEVMHTTNILGITQASNSQLNAMAHQIQEMFPQVPYHLVLQDLQLTRSVEITTDNILEGRIQVPFPTQRSDSIRPALNSPVERPSSDQEEGETSAQTERVPLDLSPRLEGLSQFCPLHGKAGLTALPLYKACGLIVFGQLINLILLCNTFYVTFLFPLETLQILTVGMISSGVDWTAWGGGRSGGSEQSPACSRQLLLLPHAYVPQMQVS

SEQ ID NO: 804152 - protein, 708 aa, Homo sapiens; identical to SEQ ID NO: 804146

SEQ ID NO: 804153 - protein, 419 aa, Homo sapiens
GAAAGAARGGAAPAARSGPARPGAAAAAAAAAAATPEPVGAVREAAAEARPQRREAWGPEVAAAAMPLLFLERFPWPSLRTYTGLSGLALLGTIISAYRALSQPEAGPGEPDQLTASLQPEPPAPARPSAGGPRARDVAQYLLSDSLFVWVLVNTACCVLMLVAKLIQCIVFGPLRVSERQHLKDKFWNFIFYKFIFIFGVLNVQTVEEVVMWCLWFAGLVFLHLMVQLCKDRFEYLSFSPTTPMSSHGRVLSLLVAMLLSCCGLAAVCSITGYTHGMHTLAFMAAESLLVTVRTAHVILRYVIHLWDLNHEGTWEGKGTYVYYTDFVMELTLLSLDLMHHIHMLLFGNIWLSMASLVIFMQLRYLFHEVQRRIRRHKNYLRVVGNMEARFAVATPEELAVNNDDCAICWDSMQAARKS

SEQ ID NO: 804154 - protein, 439 aa, Homo sapiens; identical to SEQ ID NO: 804148

SEQ ID NO: 804155 - protein, 353 aa, Homo sapiens
GAAAGAARGGAAPAARSGPARPGAAAAAAAAAAATPEPVGAVREAAAEARPQRREAWGPEVAAAAMPLLFLERFPWPSLRTYTGLSGLALLGTIISAYRALSQPEAGPGEPDQLTASLQPEPPAPARPSAGGPRARDVAQYLLSDSLFVWVLVNTACCVLMLVAKLIQCIVFGPLRVSERQHLKDKFWNFIFYKFIFIFGVLNVQTVEEVVMWCLWFAGLVFLHLMVQLCKDRFEYLSFSPTTPMSSHGRVLSLLVAMLLSCCGLAAVCSITGYTHGMHTLAFMAAESLLVTVRTAHVILRYVIHLWDLNHEGTWEGKGTYVYYTDFVMELTLLSLDLMHHIHMLVSFLQKEL

SEQ ID NO: 804156 - protein, 548 aa, Homo sapiens
MLVAKLIQCIVFGPLRVSERQHLKDKFWNFIFYKFIFIFGVLNVQTVEEVVMWCLWFAGLVFLHLMVQLCKDRFEYLSFSPTTPMSSHGRVLSLLVAMLLSCCGLAAVCSITGYTHGMHTLAFMAAESLLVTVRTAHVILRYVIHLWDLNHEGTWEGKGTYVYYTDFVMELTLLSLDLMHHIHMLLFGNIWLSMASLVIFMQLRYLFHEVQRRIRRHKNYLRVVGNMEARFAVATPEELAVNNDDCAICWDSMQAARKLPCGHLFHNSCLRSWLEQDTSCPTCRMSLNIADNNRVREEHQGENLDENLVPVAAAEGRPRLNQHNHFFHFDGSRIASWLPSFSVEVMHTTNILGITQASNSQLNAMAHQIQEMFPQVPYHLVLQDLQLTRSVEITTDNILEGRIQVPFPTQRSDSIRPALNSPVERPSSDQEEGETSAQTERVPLDLSPRLEETLDFGEVEVEPSEVEDFEARGSRFSKSADERQRMLVQRKDELLQQARKRFLNKSSEDDAASESFLPSEGASSDPVTLRRRMLAAAAERRLQKQQTS

SEQ ID NO: 804157 - protein, 740 aa, Homo sapiens
GAAAGAARGGAAPAARSGPARPGAAAAAAAAAAATPEPVGAVREAAAEARPQRREAWGPEVAAAAMPLLFLERFPWPSLRTYTGLSGLALLGTIISAYRALSQPEAGPGEPDQLTASLQPEPPAPARPSAGGPRARDVAQYLLSDSLFVWVLVNTACCVLMLVAKLIQCIVFGPLRVSERQHLKDKFWNFIFYKFIFIFGVLNVQTVEEVVMWCLWFAGLVFLHLMVQLCKDRFEYLSFSPTTPMSSHGRVLSLLVAMLLSCCGLAAVCSITGYTHGMHTLAFMAAESLLVTVRTAHVILRYVIHLWDLNHEGTWEGKGTYVYYTDFVMELTLLSLDLMHHIHMLLFGNIWLSMASLVIFMQLRYLFHEVQRRIRRHKNYLRVVGNMEARFAVATPEELAVNNDDCAICWDSMQAARKLPCGHLFHNSCLRSWLEQDTSCPTCRMSLNIADNNRVREEHQGENLDENLVPVAAAEGRPRLNQHNHFFHFDGDDSSMRVTAPEDVPVGQEVEVVDSDTDAPDLWSRIASWLPSFSVEVMHTTNILGITQASNSQLNAMAHQIQEMFPQVPYHLVLQDLQLTRSVEITTDNILEGRIQVPFPTQRSDSIRPALNSPVERPSSDQEEGETSAQTERVPLDLSPRLEETLDFGEVEVEPSEVEDFEARGSRFSKSADERQRMLVQRKDELLQQARKRFLNKSSEDDAASESFLPSEGASSDPVTLRRRMLAAAAERRLQKQQTS

SEQ ID NO: 804158 - protein, 708 aa, Homo sapiens; identical to SEQ ID NO: 804146

SEQ ID NO: 804159 - protein, 708 aa, Homo sapiens; identical to SEQ ID NO: 804146

SEQ ID NO: 804160 - protein, 143 aa, Homo sapiens
RARYPAHAEAPTQWEECGGGAQCEPAPTSWGNICYQTAVVVVEACRLCQRPDPRAHAPLSQQGILEKELLVRYLEQRRGKSRAIGCDEVTPFCPTTSGTDFPSLQSKAGLISVNSGAPASHECAPWVPSPLSISLSRLDLGSG

SEQ ID NO: 804161 - protein, 570 aa, Homo sapiens
GAAAGAARGGAAPAARSGPARPGAAAAAAAAAAATPEPVGAVREAAAEARPQRREAWGPEVAAAAMPLLFLERFPWPSLRTYTGLSGLALLGTIISAYRALSQPEAGPGEPDQLTASLQPEPPAPARPSAGGPRARDVAQYLLSDSLFVWVLVNTACCVLMLVAKLIQCIVFGPLRVSERQHLKDKFWNFIFYKFIFIFGVLNVQTVEEVVMWCLWFAGLVFLHLMVQLCKDRFEYLSFSPTTPMSSHGRVLSLLVAMLLSCCGLAAVCSITGYTHGMHTLAFMAAESLLVTVRTAHVILRYVIHLWDLNHEGTWEGKGTYVYYTDFVMELTLLSLDLMHHIHMLLFGNIWLSMASLVIFMQLRYLFHEVQRRIRRHKNYLRVVGNMEARFAVATPEELAVNNDDCAICWDSMQAARKLPCGHLFHNSCLRSWLEQDTSCPTCRMSLNIADNNRVREEHQGENLDENLVPVAAAEGRPRLNQHNHFFHFDGDDSSMRVTAPEDVPVGQEVEVVDSDTDAPDLWSRIASWLPSFSVEVMHTTNILGITQASNSQLNAMVRSASCFKKITGN

SEQ ID NO: 804162 - protein, 152 aa, Homo sapiens
LLHCPDWSQTPGFSCPASASQSAGITGMSHHTRTLGVVLSPQQGAPAGPGGGLGTPYHSHPCKPRDRSRGCCFNATTRREAEGLCRARVLREGVTSTLAVLQADSSLGVSSTRRTAAGGAARAAAHGQSCPRATPATTPSPGSPRQGRLSME

SEQ ID NO: 804163 - protein, 809 aa, Homo sapiens
CSSITPPPFPKDNLQESSGGGELRLKEWIMTHEEHHAAKTLGIGKAIAVLTSGGDAQGMNAAVRAVVRVGIFTGARVFFVHEGYQGLVDGGDHIKEATWESVSMMLQLGGTVIGSARCKDFREREGRLRAAYNLVKRGITNLCVIGGDGSLTGADTFRSEWSDLLSDLQKAGKITDEEATKSSYLNIVGLVGSIDNDFCGTDMTIGTDSALHRIMEIVDAITTTAQSHQRTFVLEVMGRHCGYLALVTSLSCGADWVFIPECPPDDDWEEHLCRRLSETRTRGSRLNIIIVAEGAIDKNGKPITSEDIKNLVVKRLGYDTRVTVLGHVQRGGTPSAFDRILGSRMGVEAVMALLEGTPDTPACVVSLSGNQAVRLPLMECVQVTKDVTKAMDEKKFDEALKLRGRSFMNNWEVYKLLAHVRPPVSKSGSHTVAVMNVGAPAAGMNAAVRSTVRIGLIQGNRVLVVHDGFEGLAKGQIEEAGWSYVGGWTGQGGSKLGTKRTLPKKSFEQISANITKFNIQGLVIIGGFEAYTGGLELMEGRKQFDELCIPFVVIPATVSNNVPGSDFSVGADTALNTICTTCDRIKQSAAGTKRRVFIIETMGGYCGYLATMAGLAAGADAAYIFEEPFTIRDLQANVEHLVQKMKTTVKRGLVLRNEKCNENYTTDFIFNLYSEEGKGIFDSRKNVLGHMQQGGSPTPFDRNFATKMGAKAMNWMSGKIKESYRNGRIFANTPDSGCVLGMRKRALVFQPVAELKDQTDFEHRIPKEQWWLKLRPILKILAKYEIDLDTSDHAHLEHITRKRSGEAAV

SEQ ID NO: 804164 - protein, 534 aa, Homo sapiens
MTTGRNTFVADSARQGPVVLVSTSSLWLRVQLTRMENQSPQKTSRIWWLSVWDMTPGLLSWGMCRGGSRMGVEAVMALLEGTPDTPACVVSLSGNQAVRLPLMECVQVTKDVTKAMDEKKFDEALKLRGRSFMNNWEVYKLLAHVRPPVSKSGSHTVAVMNVGAPAAGMNAAVRSTVRIGLIQGNRVLVVHDGFEGLAKGQIEEAGWSYVGGWTGQGGSKLGTKRTLPKKSFEQISANITKFNIQGLVIIGGFEAYTGGLELMEGRKQFDELCIPFVVIPATVSNNVPGSDFSVGADTALNTICTTCDRIKQSAAGTKRRVFIIETMGGYCGYLATMAGLAAGADAAYIFEEPFTIRDLQANVEHLVQKMKTTVKRGLVLRNEKCNENYTTDFIFNLYSEEGKGIFDSRKNVLGHMQQGGSPTPFDRNFATKMGAKAMNWMSGKIKESYRNGRIFANTPDSGCVLGMRKRALVFQPVAELKDQTDFEHRIPKEQWWLKLRPILKILAKYEIDLDTSDHAHLEHITRKRSGEAAV

SEQ ID NO: 804165 - protein, 653 aa, Homo sapiens
CSSITPPPFPKDNLQESSGGGELRLKEWIMTHEEHHAAKTLGIGKAIAVLTSGGDAQGMNAAVRAVVRVGIFTGARVFFVHEGYQGLVDGGDHIKEATWESVSMMLQLGGTVIGSARCKDFREREGRLRAAYNLVKRGITNLCVIGGDGSLTGADTFRSEWSDLLSDLQKAGKITDEEATKSSYLNIVGLVGSIDNDFCGTDMTIGTDSALHRIMEIVDAITTTAQSHQRTFVLEVMGRHCGYLALVTSLSCGADWVFIPECPPDDDWEEHLCRRLSETRTRGSRLNIIIVAEGAIDKNGKPITSEDIKNLVVKRLGYDTRVTVLGHVQRGGTPSAFDRILTKRTLPKKSFEQISANITKFNIQGLVIIGGFEAYTGGLELMEGRKQFDELCIPFVVIPATVSNNVPGSDFSVGADTALNTICTTCDRIKQSAAGTKRRVFIIETMGGYCGYLATMAGLAAGADAAYIFEEPFTIRDLQANVEHLVQKMKTTVKRGLVLRNEKCNENYTTDFIFNLYSEEGKGIFDSRKNVLGHMQQGGSPTPFDRNFATKMGAKAMNWMSGKIKESYRNGRIFANTPDSGCVLGMRKRALVFQPVAELKDQTDFEHRIPKEQWWLKLRPILKILAKYEIDLDTSDHAHLEHITRKRSGEAAV

SEQ ID NO: 804166 - protein, 749 aa, Homo sapiens
MTHEEHHAAKTLGIGKAIAVLTSGGDAQGMNAAVRAVVRVGIFTGARVFFVHEGYQGLVDGGDHIKEATWESVSMMLQLGGTVIGSARCKDFREREGRLRAAYNLVKRGITNLCVIGGDGSLTGADTFRSEWSDLLSDLQKAGKITDEEATKSSYLNIVGLVGSIDNDFCGTDMTIGTDSALHRIMEIVDAITTTAQSHQRTFVLEVMGRHCGYLALVTSLSCGADWVFIPECPPDDDWEEHLCRRLSETRTRGSRLNIIIVAEGAIDKNGKPITSEDIKNGSRMGVEAVMALLEGTPDTPACVVSLSGNQAVRLPLMECVQVTKDVTKAMDEKKFDEALKLRGRSFMNNWEVYKLLAHVRPPVSKSGSHTVAVMNVGAPAAGMNAAVRSTVRIGLIQGNRVLVVHDGFEGLAKGQIEEAGWSYVGGWTGQGGSKLGTKRTLPKKSFEQISANITKFNIQGLVIIGGFEAYTGGLELMEGRKQFDELCIPFVVIPATVSNNVPGSDFSVGADTALNTICTTCDRIKQSAAGTKRRVFIIETMGGYCGYLATMAGLAAGADAAYIFEEPFTIRDLQANVEHLVQKMKTTVKRGLVLRNEKCNENYTTDFIFNLYSEEGKGIFDSRKNVLGHMQQGGSPTPFDRNFATKMGAKAMNWMSGKIKESYRNGRIFANTPDSGCVLGMRKRALVFQPVAELKDQTDFEHRIPKEQWWLKLRPILKILAKYEIDLDTSDHAHLEHITRKRSGEAAV

SEQ ID NO: 804167 - protein, 727 aa, Homo sapiens
MHKDEFHLKFFMCVIQSRQLVRTPQRTAGEASTSSMLIPKPPPKTDILKSLDTMDDPDTVGSIPVFKTEWIMTHEEHHAAKTLGIGKAIAVLTSGGDAQGMNAAVRAVVRVGIFTGARVFFVHEGYQGLVDGGDHIKEATWESVSMMLQLGGTVIGSARCKDFREREGRLRAAYNLVKRGITNLCVIGGDGSLTGADTFRSEWSDLLSDLQKADDDWEEHLCRRLSETRTRGSRLNIIIVAEGAIDKNGKPITSEDIKNGSRMGVEAVMALLEGTPDTPACVVSLSGNQAVRLPLMECVQVTKDVTKAMDEKKFDEALKLRGRSFMNNWEVYKLLAHVRPPVSKSGSHTVAVMNVGAPAAGMNAAVRSTVRIGLIQGNRVLVVHDGFEGLAKGQIEEAGWSYVGGWTGQGGSKLGTKRTLPKKSFEQISANITKFNIQGLVIIGGFEAYTGGLELMEGRKQFDELCIPFVVIPATVSNNVPGSDFSVGADTALNTICTTCDRIKQSAAGTKRRVFIIETMGGYCGYLATMAGLAAGADAAYIFEEPFTIRDLQANVEHLVQKMKTTVKRGLVLRNEKCNENYTTDFIFNLYSEEGKGIFDSRKNVLGHMQQGGSPTPFDRNFATKMGAKAMNWMSGKIKESYRNGRIFANTPDSGCVLGMRKRALVFQPVAELKDQTDFEHRIPKEQWWLKLRPILKILAKYEIDLDTSDHAHLEHITRKRSGEAAV

SEQ ID NO: 804168 - protein, 465 aa, Homo sapiens [sequence omitted]

SEQ ID NO: 804169 - protein, 523 aa, Homo sapiens
AHQPQPAAQLHRTTNFFIDNILRPDFGCKKEQPPRSFWWLRRPEKAQEEEADRILGSRMGVEAVMALLEGTPDTPACVVSLSGNQAVRLPLMECVQVTKDVTKAMDEKKFDEALKLRGRSFMNNWEVYKLLAHVRPPVSKSGSHTVAVMNVGAPAAGMNAAVRSTVRIGLIQGNRVLVVHDGFEGLAKGQIEEAGWSYVGGWTGQGGSKLGTKRTLPKKSFEQISANITKFNIQGLVIIGGFEAYTGGLELMEGRKQFDELCIPFVVIPATVSNNVPGSDFSVGADTALNTICTTCDRIKQSAAGTKRRVFIIETMGGYCGYLATMAGLAAGADAAYIFEEPFTIRDLQANVEHLVQKMKTTVKRGLVLRNEKCNENYTTDFIFNLYSEEGKGIFDSRKNVLGHMQQGGSPTPFDRNFATKMGAKAMNWMSGKIKESYRNGRIFANTPDSGCVLGMRKRALVFQPVAELKDQTDFEHRIPKEQWWLKLRPILKILAKYEIDLDTSDHAHLEHITRKRSGEAAV

SEQ ID NO: 804170 - protein, 798 aa, Homo sapiens
QERDGSRELPGGDEPEWIMTHEEHHAAKTLGIGKAIAVLTSGGDAQGMNAAVRAVVRVGIFTGARVFFVHEGYQGLVDGGDHIKEATWESVSMMLQLGGTVIGSARCKDFREREGRLRAAYNLVKRGITNLCVIGGDGSLTGADTFRSEWSDLLSDLQKAGKITDEEATKSSYLNIVGLVGSIDNDFCGTDMTIGTDSALHRIMEIVDAITTTAQSHQRTFVLEVMGRHCGYLALVTSLSCGADWVFIPECPPDDDWEEHLCRRLSETRTRGSRLNIIIVAEGAIDKNGKPITSEDIKNLVVKRLGYDTRVTVLGHVQRGGTPSAFDRILGSRMGVEAVMALLEGTPDTPACVVSLSGNQAVRLPLMECVQVTKDVTKAMDEKKFDEALKLRGRSFMNNWEVYKLLAHVRPPVSKSGSHTVAVMNVGAPAAGMNAAVRSTVRIGLIQGNRVLVVHDGFEGLAKGQIEEAGWSYVGGWTGQGGSKLGTKRTLPKKSFEQISANITKFNIQGLVIIGGFEAYTGGLELMEGRKQFDELCIPFVVIPATVSNNVPGSDFSVGADTALNTICTTCDRIKQSAAGTKRRVFIIETMGGYCGYLATMAGLAAGADAAYIFEEPFTIRDLQANVEHLVQKMKTTVKRGLVLRNEKCNENYTTDFIFNLYSEEGKGIFDSRKNVLGHMQQGGSPTPFDRNFATKMGAKAMNWMSGKIKESYRNGRIFANTPDSGCVLGMRKRALVFQPVAELKDQTDFEHRIPKEQWWLKLRPILKILAKYEIDLDTSDHAHLEHITRKRSGEAAV

SEQ ID NO: 804171 - protein, 814 aa, Homo sapiens
WLGTRPGVNRPRPFPKDNLQESSGGGELRLKEWIMTHEEHHAAKTLGIGKAIAVLTSGGDAQGMNAAVRAVVRVGIFTGARVFFVHEGYQGLVDGGDHIKEATWESVSMMLQLGGTVIGSARCKDFREREGRLRAAYNLVKRGITNLCVIGGDGSLTGADTFRSEWSDLLSDLQKAGKITDEEATKSSYLNIVGLVGSIDNDFCGTDMTIGTDSALHRIMEIVDAITTTAQSHQRTFVLEVMGRHCGYLALVTSLSCGADWVFIPECPPDDDWEEHLCRRLSETRTRGSRLNIIIVAEGAIDKNGKPITSEDIKNLVVKRLGYDTRVTVLGHVQRGGTPSAFDRILGSRMGVEAVMALLEGTPDTPACVVSLSGNQAVRLPLMECVQVTKDVTKAMDEKKFDEALKLRGRSFMNNWEVYKLLAHVRPPVSKSGSHTVAVMNVGAPAAGMNAAVRSTVRIGLIQGNRVLVVHDGFEGLAKGQIEEAGWSYVGGWTGQGGSKLGTKRTLPKKSFEQISANITKFNIQGLVIIGGFEAYTGGLELMEGRKQFDELCIPFVVIPATVSNNVPGSDFSVGADTALNTICTTCDRIKQSAAGTKRRVFIIETMGGYCGYLATMAGLAAGADAAYIFEEPFTIRDLQANVEHLVQKMKTTVKRGLVLRNEKCNENYTTDFIFNLYSEEGKGIFDSRKNVLGHMQQGGSPTPFDRNFATKMGAKAMNWMSGKIKESYRNGRIFANTPDSGCVLGMRKRALVFQPVAELKDQTDFEHRIPKEQWWLKLRPILKILAKYEIDLDTSDHAHLEHITRKRSGEAAV

SEQ ID NO: 804172 - protein, 778 aa, Homo sapiens
CSSITPPPFPKDNLQESSGGGELRLKEWIMTHEEHHAAKTLGIGKAIAVLTSGGDAQGMNAAVRAVVRVGIFTGARVFFVHEGYQGLVDGGDHIKEATWESVSMMLQLGGTVIGSARCKDFREREGRLRAAYNLVKRGITNLCVIGGDGSLTGADTFRSEWSDLLSDLQKAGKITDEEATKSSYLNIVGLVGSIDNDFCGTDMTIGTDSALHRIMEIVDAITTTAQSHQRTFVLEVMGRHCGYLALVTSLSCGADWVFIPECPPDDDWEEHLCRRLSETRTRGSRLNIIIVAEGAIDKNGKPITSEDIKNGSRMGVEAVMALLEGTPDTPACVVSLSGNQAVRLPLMECVQVTKDVTKAMDEKKFDEALKLRGRSFMNNWEVYKLLAHVRPPVSKSGSHTVAVMNVGAPAAGMNAAVRSTVRIGLIQGNRVLVVHDGFEGLAKGQIEEAGWSYVGGWTGQGGSKLGTKRTLPKKSFEQISANITKFNIQGLVIIGGFEAYTGGLELMEGRKQFDELCIPFVVIPATVSNNVPGSDFSVGADTALNTICTTCDRIKQSAAGTKRRVFIIETMGGYCGYLATMAGLAAGADAAYIFEEPFTIRDLQANVEHLVQKMKTTVKRGLVLRNEKCNENYTTDFIFNLYSEEGKGIFDSRKNVLGHMQQGGSPTPFDRNFATKMGAKAMNWMSGKIKESYRNGRIFANTPDSGCVLGMRKRALVFQPVAELKDQTDFEHRIPKEQWWLKLRPILKILAKYEIDLDTSDHAHLEHITRKRSGEAAV

SEQ ID NO: 804173 - protein, 893 aa, Homo sapiens
CSSITPPPFPKDNLQESSGGGELRLKEWIMTHEEHHAAKTLGIGKAIAVLTSGGDAQGMNAAVRAVVRVGIFTGARVFFVHEGYQGLVDGGDHIKEATWESVSMMLQLGGTVIGSARCKDFREREGRLRAAYNLVKRGITNLCVIGGDGSLTGADTFRSEWSDLLSDLQKAGKITDEEATKSSYLNIVGLVGSIDNDFCGTDMTIGTDSALHRIMEIVDAITTTAQSHQRTFVLEVMGRHCGYLALVTSLSCGADWVFIPECPPDDDWEEHLCRRLSETRTRGSRLNIIIVAEGAIDKNGKPITSEDIKNVRMNEAREALESIAHSLLASESPDIASPLGPSAHLSLVSLPLIASHKEPLQDKRLSCPWFTQVSACFLPLTLVTLSLSLCWSLQLVVKRLGYDTRVTVLGHVQRGGTPSAFDRILGSRMGVEAVMALLEGTPDTPACVVSLSGNQAVRLPLMECVQVTKDVTKAMDEKKFDEALKLRGRSFMNNWEVYKLLAHVRPPVSKSGSHTVAVMNVGAPAAGMNAAVRSTVRIGLIQGNRVLVVHDGFEGLAKGQIEEAGWSYVGGWTGQGGSKLGTKRTLPKKSFEQISANITKFNIQGLVIIGGFEAYTGGLELMEGRKQFDELCIPFVVIPATVSNNVPGSDFSVGADTALNTICTTCDRIKQSAAGTKRRVFIIETMGGYCGYLATMAGLAAGADAAYIFEEPFTIRDLQANVEHLVQKMKTTVKRGLVLRNEKCNENYTTDFIFNLYSEEGKGIFDSRKNVLGHMQQGGSPTPFDRNFATKMGAKAMNWMSGKIKESYRNGRIFANTPDSGCVLGMRKRALVFQPVAELKDQTDFEHRIPKEQWWLKLRPILKILAKYEIDLDTSDHAHLEHITRKRSGEAAV

SEQ ID NO: 804174 - protein, 767 aa, Homo sapiens
CSSITPPPFPKDNLQESSGGGELRLKEWIMTHEEHHAAKTLGIGKAIAVLTSGGDAQGMNAAVRAVVRVGIFTGARVFFVHEGYQGLVDGGDHIKEATWESVSMMLQLGGTVIGSARCKDFREREGRLRAAYNLVKRGITNLCVIGGDGSLTGADTFRSEWSDLLSDLQKAGKITDEEATKSSYLNIVGLVGSIDNDFCGTDMTIGTDSALHRIMEIVDAITTTAQSHQRTFVLEVMGRHCGYLALVTSLSCGADWVFIPECPPDDDWEEHLCRRLSETRTRGSRLNIIIVAEGAIDKNGKPITSEDIKNLVVKRLGYDTRVTVLGHVQRGGTPSAFDRILTKDVTKAMDEKKFDEALKLRGRSFMNNWEVYKLLAHVRPPVSKSGSHTVAVMNVGAPAAGMNAAVRSTVRIGLIQGNRVLVVHDGFEGLAKGQIEEAGWSYVGGWTGQGGSKLGTKRTLPKKSFEQISANITKFNIQGLVIIGGFEAYTGGLELMEGRKQFDELCIPFVVIPATVSNNVPGSDFSVGADTALNTICTTCDRIKQSAAGTKRRVFIIETMGGYCGYLATMAGLAAGADAAYIFEEPFTIRDLQANVEHLVQKMKTTVKRGLVLRNEKCNENYTTDFIFNLYSEEGKGIFDSRKNVLGHMQQGGSPTPFDRNFATKMGAKAMNWMSGKIKESYRNGRIFANTPDSGCVLGMRKRALVFQPVAELKDQTDFEHRIPKEQWWLKLRPILKILAKYEIDLDTSDHAHLEHITRKRSGEAAV

SEQ ID NO: 804175 - protein, 820 aa, Homo sapiens
MHKDEFHLKFFMCVIQSRQLVRTPQRTAGEASTSSMLIPKPPPKTDILKSLDTMDDPDTVGSIPVFKTEWIMTHEEHHAAKTLGIGKAIAVLTSGGDAQGMNAAVRAVVRVGIFTGARVFFVHEGYQGLVDGGDHIKEATWESVSMMLQLGGTVIGSARCKDFREREGRLRAAYNLVKRGITNLCVIGGDGSLTGADTFRSEWSDLLSDLQKAGKITDEEATKSSYLNIVGLVGSIDNDFCGTDMTIGTDSALHRIMEIVDAITTTAQSHQRTFVLEVMGRHCGYLALVTSLSCGADWVFIPECPPDDDWEEHLCRRLSETRTRGSRLNIIIVAEGAIDKNGKPITSEDIKNGSRMGVEAVMALLEGTPDTPACVVSLSGNQAVRLPLMECVQVTKDVTKAMDEKKFDEALKLRGRSFMNNWEVYKLLAHVRPPVSKSGSHTVAVMNVGAPAAGMNAAVRSTVRIGLIQGNRVLVVHDGFEGLAKGQIEEAGWSYVGGWTGQGGSKLGTKRTLPKKSFEQISANITKFNIQGLVIIGGFEAYTGGLELMEGRKQFDELCIPFVVIPATVSNNVPGSDFSVGADTALNTICTTCDRIKQSAAGTKRRVFIIETMGGYCGYLATMAGLAAGADAAYIFEEPFTIRDLQANVEHLVQKMKTTVKRGLVLRNEKCNENYTTDFIFNLYSEEGKGIFDSRKNVLGHMQQGGSPTPFDRNFATKMGAKAMNWMSGKIKESYRNGRIFANTPDSGCVLGMRKRALVFQPVAELKDQTDFEHRIPKEQWWLKLRPILKILAKYEIDLDTSDHAHLEHITRKRSGEAAV

SEQ ID NO: 804176 - protein, 858 aa, Homo sapiens
RCGEAREAKGAFKTSRNFSVPFSVWAFSLSRTRNTEAAMHKDEFHLKFFMCVIQSRQLVRTPQRTAGEASTSSMLIPKPPPKTDILKSLDTMDDPDTVGSIPVFKTEWIMTHEEHHAAKTLGIGKAIAVLTSGGDAQGMNAAVRAVVRVGIFTGARVFFVHEGYQGLVDGGDHIKEATWESVSMMLQLGGTVIGSARCKDFREREGRLRAAYNLVKRGITNLCVIGGDGSLTGADTFRSEWSDLLSDLQKAGKITDEEATKSSYLNIVGLVGSIDNDFCGTDMTIGTDSALHRIMEIVDAITTTAQSHQRTFVLEVMGRHCGYLALVTSLSCGADWVFIPECPPDDDWEEHLCRRLSETRTRGSRLNIIIVAEGAIDKNGKPITSEDIKNGSRMGVEAVMALLEGTPDTPACVVSLSGNQAVRLPLMECVQVTKDVTKAMDEKKFDEALKLRGRSFMNNWEVYKLLAHVRPPVSKSGSHTVAVMNVGAPAAGMNAAVRSTVRIGLIQGNRVLVVHDGFEGLAKGQIEEAGWSYVGGWTGQGGSKLGTKRTLPKKSFEQISANITKFNIQGLVIIGGFEAYTGGLELMEGRKQFDELCIPFVVIPATVSNNVPGSDFSVGADTALNTICTTCDRIKQSAAGTKRRVFIIETMGGYCGYLATMAGLAAGADAAYIFEEPFTIRDLQANVEHLVQKMKTTVKRGLVLRNEKCNENYTTDFIFNLYSEEGKGIFDSRKNVLGHMQQGGSPTPFDRNFATKMGAKAMNWMSGKIKESYRNGRIFANTPDSGCVLGMRKRALVFQPVAELKDQTDFEHRIPKEQWWLKLRPILKILAKYEIDLDTSDHAHLEHITRKRSGEAAV

SEQ ID NO: 804177 - protein, 687 aa, Homo sapiens
CSSITPPPFPKDNLQESSGGGELRLKEWIMTHEEHHAAKTLGIGKAIAVLTSGGDAQGMNAAVRAVVRVGIFTGARVFFVHEGYQGLVDGGDHIKEATWESVSMMLQLGGTVIGSARCKDFREREGRLRAAYNLVKRGITNLCVIGGDGSLTGADTFRSEWSDLLSDLQKAGKITDEEATKSSYLNIVGLVGSIDNDFCGTDMTIGTDSALHRIMEIVDGSRMGVEAVMALLEGTPDTPACVVSLSGNQAVRLPLMECVQVTKDVTKAMDEKKFDEALKLRGRSFMNNWEVYKLLAHVRPPVSKSGSHTVAVMNVGAPAAGMNAAVRSTVRIGLIQGNRVLVVHDGFEGLAKGQIEEAGWSYVGGWTGQGGSKLGTKRTLPKKSFEQISANITKFNIQGLVIIGGFEAYTGGLELMEGRKQFDELCIPFVVIPATVSNNVPGSDFSVGADTALNTICTTCDRIKQSAAGTKRRVFIIETMGGYCGYLATMAGLAAGADAAYIFEEPFTIRDLQANVEHLVQKMKTTVKRGLVLRNEKCNENYTTDFIFNLYSEEGKGIFDSRKNVLGHMQQGGSPTPFDRNFATKMGAKAMNWMSGKIKESYRNGRIFANTPDSGCVLGMRKRALVFQPVAELKDQTDFEHRIPKEQWWLKLRPILKILAKYEIDLDTSDHAHLEHITRKRSGEAAV

SEQ ID NO: 804178 - protein, 214 aa, Homo sapiens
RCGEAREAKGAFKTSRNFSVPFSVWAFSLSRTRNTEAAMHKDEFHLKFFMCVIQSRQLVRTPQRTAGEASTSSMLIPKPPPKTDILKSLDTMDDPDTVGSIPVFKTEWIMTHEEHHAAKTLGIGKAIAVLTSGGDAQGMNAAVRAVVRVGIFTGARVFFVHEGYQGLVDGGDHIKEATWESVSMMLQLVCSRELPVPYLLCPCFIPLCFGLMVS

SEQ ID NO: 804179 - protein, 642 aa, Homo sapiens
MDDSEVESTASILASVKEQEAQFEKLTRALEEERRHVSAQLERVRVSPQDANPLMANGTLTRRHQNGRFVGDADLERQKFSDLKLNGPQDHSHLLYSTIPRMQEPGQIVETYTEEDPEGAMSVVSVETSDDGTTRRTETTVKKVVKTVTTRTVQPVAMGPDGLPVDASSVSNNYIQTLGRDFRKNGNGGPGPYVGQAGTATLPRNFHYPPDGYSRHYEDGYPGGSDNYGSLSRVTRIEERYRPSMEGYRAPSRQDVYGPQPQVRVGGSSVDLHRFHPEPYGLEDDQRSMGYDDLDYGMMSDYGTARRTGTPSDPRRRLRSYEDMIGEEVPSDQYYWAPLAQHERGSLASLDSLRKGGPPPPNWRQPELPEVIAMLGFRLDAVKSNAAAYLQHLCYRNDKVKTDVRKLKGIPVLVGLLDHPKKEVHLGACGALKNISFGRDQDNKIAIKNCDGVPALVRLLRKARDMDLTEVITGTLWNLSSHDSIKMEIVDHALHALTDEVIIPHSGWEREPNEDCKPRHIEWESVLTNTAGCLRNVSSERSEARRKLRECDGLVDALIFIVQAEIGQKDSDSKLVENCVCLLRNLSYQVHREIPQAERYQEAAPNVANNTGPHAASCFGAKKGKVEEKTYRGSSKRYSGFP

SEQ ID NO: 804180 - protein, 157 aa, Homo sapiens
TQLHPLTAAAYLQHLCYRNDKVKTDVRKLKGIPVLVGLLDHPKKEVHLGACGALKNISFGRDQDNKIAIKNCDGVPALVRLLRKARDMDLTEVITGTLWNLSSHDSIKMEIVDHALHALTDEVIIPHSGWEREPNEDCKPRHIEWESVLTNTAGCLR

SEQ ID NO: 804181 - protein, 99 aa, Homo sapiens
PVPGKVRGIHPGTAGLKPIRAVQTLWGKNNTMYTAKLPCLWLGATSILGVGSEGEKKERGRERERRAGKIPKGGRGGEKSTALLDLSFSAPWRSLGFLS

SEQ ID NO: 804182 - protein, 642 aa, Homo sapiens; identical to SEQ ID NO: 804179

SEQ ID NO: 804183 - protein, 329 aa, Homo sapiens
MLPTILGHMLPVALGPRRAKWRKKPIEDPANDTVDFPKRTSPARGYELLFQPEVVRIYISLLKESKTPAILEASAGAIQNLCAGRWTYGRYIRSALRQEKALSAIADLLTNEHERVVKAASGALRNLAVDARNKELIGKHAIPNLVKNLPGGQQNSSWNFSEDTVISILNTINEVIAENLEAAKKLRETQGIEKLVLINKSGNRSEKEVRAAALVLQTIWGYKELRKPLEKEGWKKSDFQVNLNNASRSQSSHSYDDSTLPLIDRNQKSDKKPDREEIQMSNMGSNTKSLDNNYSTPNERGDHNRTLDRSGDLGDMEPLKGTTPLMQKI

SEQ ID NO: 804184 - protein, 588 aa, Homo sapiens
MANGTLTRRHQNGRFVGDADLERQKFSDLKLNGPQDHSHLLYSTIPRMQEPGQIVETYTEEDPEGAMSVVSVETSDDGTTRRTETTVKKVVKTVTTRTVQPVAMGPDGLPVDASSVSNNYIQTLGRDFRKNGNGGPGPYVGQAGTATLPRNFHYPPDGYSRHYEDGYPGGSDNYGSLSRVTRIEERYRPSMEGYRAPSRQDVYGPQPQVRVGGSSVDLHRFHPEPYGLEDDQRSMGYDDLDYGMMSDYGTARRTGTPSDPRRRLRSYEDMIGEEVPSDQYYWAPLAQHERGSLASLDSLRKGGPPPPNWRQPELPEVIAMLGFRLDAVKSNAAAYLQHLCYRNDKVKTDVRKLKGIPVLVGLLDHPKKEVHLGACGALKNISFGRDQDNKIAIKNCDGVPALVRLLRKARDMDLTEVITGTLWNLSSHDSIKMEIVDHALHALTDEVIIPHSGWEREPNEDCKPRHIEWESVLTNTAGCLRNVSSERSEARRKLRECDGLVDALIFIVQAEIGQKDSDSKLVENCVCLLRNLSYQVHREIPQAERYQEAAPNVANNTGPHAASCFGAKKGKVEEKTYRGSSKRYSGFP

SEQ ID NO: 804185 - protein, 588 aa, Homo sapiens; identical to SEQ ID NO: 804184

SEQ ID NO: 804186 - protein, 642 aa, Homo sapiens; identical to SEQ ID NO: 804179

SEQ ID NO: 804187 - protein, 541 aa, Homo sapiens
MQEPGQIVETYTEEDPEGAMSVVSVETSDDGTTRRTETTVKKVVKTVTTRTVQPVAMGPDGLPVDASSVSNNYIQTLGRDFRKNGNGGPGPYVGQAGTATLPRNFHYPPDGYSRHYEDGYPGGSDNYGSLSRVTRIEERYRPSMEGYRAPSRQDVYGPQPQVRVGGSSVDLHRFHPEPYGLEDDQRSMGYDDLDYGMMSDYGTARRTGTPSDPRRRLRSYEDMIGEEVPSDQYYWAPLAQHERGSLASLDSLRKGGPPPPNWRQPELPEVIAMLGFRLDAVKSNAAAYLQHLCYRNDKVKTDVRKLKGIPVLVGLLDHPKKEVHLGACGALKNISFGRDQDNKIAIKNCDGVPALVRLLRKARDMDLTEVITGTLWNLSSHDSIKMEIVDHALHALTDEVIIPHSGWEREPNEDCKPRHIEWESVLTNTAGCLRNVSSERSEARRKLRECDGLVDALIFIVQAEIGQKDSDSKLVENCVCLLRNLSYQVHREIPQAERYQEAAPNVANNTGPHAASCFGAKKGKVEEKTYRGSSKRYSGFP

SEQ ID NO: 804188 - protein, 588 aa, Homo sapiens; identical to SEQ ID NO: 804184

SEQ ID NO: 804189 - protein, 358 aa, Homo sapiens
MLPTILGHMLPVALGPRRAKWRKKPIEDPANDTVDFPKRTSPARGYELLFQPEVVRIYISLLKESKTPAILEASAGAIQNLCAGRWTYGRYIRSALRQEKALSAIADLLTNEHERVVKAASGALRNLAVDARNKELIGKHAIPNLVKNLPGGQQNSSWNFSEDTVISILNTINEVIAENLEAAKKLRETQGIEKLVLINKSGNRSEKEVRAAALVLQTIWGYKELRKPLEKEGWKKSDFQVNLNNASRSQSSHSYDDSTLPLIDRNQKSDKKPDREEIQMSNMGSNTKSLDNNYSTPNERGDHNRTLDRSGDLGDMEPLKGTTPLMQDEGQESLEEELDVLVLDDEGGQVSYPSMQKI

SEQ ID NO: 804190 - protein, 588 aa, Homo sapiens; identical to SEQ ID NO: 804184

SEQ ID NO: 804191 - protein, 588 aa, Homo sapiens; identical to SEQ ID NO: 804184

SEQ ID NO: 804192 - protein, 541 aa, Homo sapiens; identical to SEQ ID NO: 804187

SEQ ID NO: 804193 - protein, 541 aa, Homo sapiens; identical to SEQ ID NO: 804187

SEQ ID NO: 804194 - protein, 329 aa, Homo sapiens; identical to SEQ ID NO: 804183

SEQ ID NO: 804195 - protein, 337 aa, Homo sapiens
MLPTILGHMLPVALGPRRAKWRKKPIEDPANDTVDFPKRTSPARGYELLFQPEVVRIYISLLKESKTPAILEASAGAIQNLCAGRWTYGRYIRSALRQEKALSAIADLLTNEHERVVKAASGALRNLAVDARNKELIGKHAIPNLVKNLPGGQQNSSWNFSEDTVISILNTINEVIAENLEAAKKLRETQGIEKLVLINKSGNRSEKEVRAAALVLQTIWGYKELRKPLEKEGWKKSDFQVNLNNASRSQSSHSYDDSTLPLIDRNQKSDNNYSTPNERGDHNRTLDRSGDLGDMEPLKGTTPLMQDEGQESLEEELDVLVLDDEGGQVSYPSMQKI

SEQ ID NO: 804196 - protein, 642 aa, Homo sapiens; identical to SEQ ID NO: 804179

SEQ ID NO: 804197 - protein, 642 aa, Homo sapiens; identical to SEQ ID NO: 804179

SEQ ID NO: 804198 - protein, 642 aa, Homo sapiens; identical to SEQ ID NO: 804179

SEQ ID NO: 804199 - protein, 588 aa, Homo sapiens; identical to SEQ ID NO: 804184

SEQ ID NO: 804200 - protein, 325 aa, Homo sapiens
QERCRAVPFYFIPGGVRCRLLVLGLQLQYSGFPKRTSPARGYELLFQPEVVRIYISLLKESKTPAILEASAGAIQNLCAGRWTYGRYIRSALRQEKALSAIADLLTNEHERVVKAASGALRNLAVDARNKELIGKHAIPNLVKNLPGGQQNSSWNFSEDTVISILNTINEVIAENLEAAKKLRETQGIEKLVLINKSGNRSEKEVRAAALVLQTIWGYKELRKPLEKEGWKKSDFQVNLNNASRSQSSHSYDDSTLPLIDRNQKSDKKPDREEIQMSNMGSNTKSLDNNYSTPNERGDHNRTLDRSGDLGDMEPLKGTTPLMQKI

SEQ ID NO: 804201 - protein, 642 aa, Homo sapiens; identical to SEQ ID NO: 804179

SEQ ID NO: 804202 - protein, 642 aa, Homo sapiens; identical to SEQ ID NO: 804179

SEQ ID NO: 804203 - protein, 126 aa, Homo sapiens
MIQSSSYPAALVLQTIWGYKELRKPLEKEGWKKSDFQVNLNNASRSQSSHSYDDSTLPLIDRNQKSDKKPDREEIQMSNMGSNTKSLDNNYSTPNERGDHNRTLDRSGDLGDMEPLKGTTPLMQKI

SEQ ID NO: 804204 - protein, 642 aa, Homo sapiens; identical to SEQ ID NO: 804179

SEQ ID NO: 804205 - protein, 642 aa, Homo sapiens; identical to SEQ ID NO: 804179

SEQ ID NO: 804206 - protein, 642 aa, Homo sapiens; identical to SEQ ID NO: 804179

SEQ ID NO: 804207 - protein, 535 aa, Homo sapiens
MDDSEVESTASILASVKEQEAQFEKLTRALEEERRHVSAQLERVRVSPQDANPLMANGTLTRRHQNGRFVGDADLERQKFSDLKLNGPQDHSHLLYSTIPRMQEPGQIVETYTEEDPEGAMSVVSVETSDDGTTRRTETTVKKVVKTVTTRTVQPVAMGPDGLPVDASSVSNNYIQTLGRDFRKNGNGGPGPYVGQAGTATLPRNFHYPPDGYSRHYEDGYPGGSDNYGSLSRVTRIEERYRPSMEGYRAPSRQDVYGPQPQVRVGGSSVDLHRFHPEPYGLEDDQRSMGYDDLDYGMMSDYGTARRTGTPSDPRRRLRSYEDMIGEEVPSDQYYWAPLAQHERGSLASLDSLRKGGPPPPNWRQPELPEVIAMLGFRLDAVKSNAAAYLQHLCYRNDKVKTDVRKLKGIPVLVGLLDHPKKEVHLGACGALKNISFGRDQDNKIAIKNCDGVPALVRLLRKARDMDLTEVITGTLWNLSSHDSIKMEIVDHALHALTDEVIIPHSGWEREPNEDCKPRHIEWESVLTNTAGCLR

SEQ ID NO: 804208 - protein, 635 aa, Homo sapiens
MDDSEVESTASILASVKEQEAQFEKLTRALEEERRHVSAQLERVRVSPQDANPLMANGTLTRRHQNGRFVGDADLERQKFSDLKLNGPQDHSHLLYSTIPRMQEPGQIVETYTEEDPEGAMSVVSVETSDDGTTRRTETTVKKVVKTVTTRTVQPVAMGPDGLPVDASSVSNNYIQTLGRDFRKNGNGGPGPYVGQAGTATLPRNFHYPPDGYSRHYEDGYPGGSDNYGSLSRVTRIEERYRPSMEGYRAPSRQDVYGPQPQVRVGGSSVDLHRFHPEPYGLEDDQRSMGYDDLDYGMMSDYGTARRTGTPSDPRRRLRSYEDMIGEEVPSDQYYWAPLAQHERGSLASLDSLRKGGPPPPNWRQPELPEVIAMLGFRLDAVKSNAAAYLQHLCYRNDKVKTDVRKLKGIPVLVGLLDHPKKEVHLGACGALKNISFGRDQDNKIAIKNCDGVPALVRLLRKARDMDLTEVITGTLWNLSSHDSIKMEIVDHALHALTDEVIIPHSGWEREPNEDCKPRHIEWESVLTNTAGCLRNVSSERSEARRKLRECDGLVDALIFIVQAEIGQKDSDSKLVENCVCLLRNLSYQVHREIPQAERYQEAAPNVANNTGPHAASCFGAKKGKVESWFLFLSL

SEQ ID NO: 804209 - protein, 99 aa, Homo sapiens; identical to SEQ ID NO: 804181

SEQ ID NO: 804210 - protein, 84 aa, Homo sapiens
SLTFFRHIVLNAQEPSDELSLPGTLWNLSSHDSIKMEIVDHALHALTDEVIIPHSGWEREPNEDCKPRHIEWESVLTNTAGCLR

SEQ ID NO: 804211 - protein, 588 aa, Homo sapiens; identical to SEQ ID NO: 804184

SEQ ID NO: 804212 - protein, 642 aa, Homo sapiens; identical to SEQ ID NO: 804179

SEQ ID NO: 804213 - protein, 642 aa, Homo sapiens; identical to SEQ ID NO: 804179

SEQ ID NO: 804214 - protein, 541 aa, Homo sapiens; identical to SEQ ID NO: 804187

SEQ ID NO: 804215 - protein, 541 aa, Homo sapiens; identical to SEQ ID NO: 804187

SEQ ID NO: 804216 - protein, 541 aa, Homo sapiens; identical to SEQ ID NO: 804187

SEQ ID NO: 804217 - protein, 642 aa, Homo sapiens; identical to SEQ ID NO: 804179

SEQ ID NO: 804218 - protein, 642 aa, Homo sapiens; identical to SEQ ID NO: 804179

SEQ ID NO: 804219 - protein, 642 aa, Homo sapiens; identical to SEQ ID NO: 804179

SEQ ID NO: 804220 - protein, 642 aa, Homo sapiens; identical to SEQ ID NO: 804179

SEQ ID NO: 804221 - protein, 329 aa, Homo sapiens; identical to SEQ ID NO: 804183

SEQ ID NO: 804222 - protein, 642 aa, Homo sapiens; identical to SEQ ID NO: 804179

SEQ ID NO: 804223 - protein, 642 aa, Homo sapiens; identical to SEQ ID NO: 804179

SEQ ID NO: 804224 - protein, 642 aa, Homo sapiens; identical to SEQ ID NO: 804179

SEQ ID NO: 804225 - protein, 642 aa, Homo sapiens; identical to SEQ ID NO: 804179

SEQ ID NO: 804226 - protein, 356 aa, Homo sapiens
MDTQGPVSQPFQQPEKPGRVRRRKTRRERNKALVGSRRPLAHHDPPVAIRDPPVVPTASKLVVITQGRLSREHRGLFNHEVKSLDVARLLSSGTLVPGSPTLPAKPSPSPGRAQEPAPRSRDKENQVPGGSGPGPPSSPELSGVGQLLAELQCQLSLPQAFPRRNLIQDARDAIVHTLQACHGCVPDLALVLRGCQPPLPGAKPGVSERKMTPFWINSPDQVPEQERQRKQQGTKEFTFPMPYTSSMPTAHRGSLAPPRGPWPPYFPSLSSPSGTAWGPPTAFDLLKSIWLVATPPPPRPWGVGLPQPLPQPSSPLLPRTSVLDWSPSPPSPLPSLSWVVAQSSPEAWSFPPMRLY

SEQ ID NO: 804227 - protein, 388 aa, Homo sapiens
FESWGHRGKEAIAPHSYVKWEGPGFVGAREDTMDTQGPVSQPFQQPEKPGRVRRRKTRRERNKALVGSRRPLAHHDPPVAIRDPPVVPTASKLVVITQGRLSREHRGLFNHEVKSLDVARLLSSGTLVPGSPTLPAKPSPSPGRAQEPAPRSRDKENQVPGGSGPGPPSSPELSGVGQLLAELQCQLSLPQAFPRRNLIQDARDAIVHTLQACHGCVPDLALVLRGCQPPLPGAKPGVSERKMTPFWINSPDQVPEQERQRKQQGTKEFTFPMPYTSSMPTAHRGSLAPPRGPWPPYFPSLSSPSGTAWGPPTAFDLLKSIWLVATPPPPRPWGVGLPQPLPQPSSPLLPRTSVLDWSPSPPSPLPSLSWVVAQSSPEAWSFPPMRLY

SEQ ID NO: 804228 - protein, 216 aa, Homo sapiens
MPGMPSCTPCRPVMVVCLTLPWCFGAASHPCQVSVPPAPVLPFPLSALAQLASMLLSSVPGAKPGVSERKMTPFWINSPDQVPEQERQRKQQGTKEFTFPMPYTSSMPTAHRGSLAPPRGPWPPYFPSLSSPSGTAWGPPTAFDLLKSIWLVATPPPPRPWGVGLPQPLPQPSSPLLPRTSVLDWSPSPPSPLPSLSWVVAQSSPEAWSFPPMRLY

SEQ ID NO: 804229 - protein, 351 aa, Homo sapiens
MAPVLPLVLPLQPRIRLAQGLWLLSWLLALAGGVILLCSGHLLVQLRHLGTFLAPSCQFPVLPQAALAAGAVALGTGLVGVGASRASLNAALYPPWRGVLGPLLVAGTAGGGGLLVVALGLALALPGSLDEALEEGLVTALAHYKDTEVPGHCQAKRLVDELQLRYHCCGRHGYKDWFGVQWVSSRYLDPGDRDVADRIQSNVEGLYLTDGVPFSCCNPHSPRPCLQNRLSDSYAHPLFDPRQPNQNLWAQGCHEVLLEHLQDLAGTLGSMLAVTFLLQALVLLGLRYLQTALEGLGGVIDAGGETQGYLFPSGLKDMLKTAWLQGGVACRPAPEEAPPGEAPPKEDLSEA

SEQ ID NO: 804230 - protein, 166 aa, Homo sapiens
DSCSDSLISTAHRIQSNVEGLYLTDGVPFSCCNPHSPRPCLQNRLSDSYAHPLFDPRQPNQNLWAQGCHEVLLEHLQDLAGTLGSMLAVTFLLQALVLLGLRYLQTALEGLGGVIDAGGETQGYLFPSGLKDMLKTAWLQGGVACRPAPEEAPPGEAPPKEDLSEA

SEQ ID NO: 804231 - protein, 319 aa, Homo sapiens
MAPVLPLVLPLQPRIRLAQGLWLLSWLLALAGGVILLCSGHLLVQLRHLGTFLAPSCQFPVLPQAALAAGAVALGTGLVGVGASRASLNAALYPPWRGVLGPLLVAGTAGGGGLLVVALGLALALPGSLDEALEEGLVTALAHYKDTEVPGHCQAKRLVDELQLSRIQSNVEGLYLTDGVPFSCCNPHSPRPCLQNRLSDSYAHPLFDPRQPNQNLWAQGCHEVLLEHLQDLAGTLGSMLAVTFLLQALVLLGLRYLQTALEGLGGVIDAGGETQGYLFPSGLKDMLKTAWLQGGVACRPAPEEAPPGEAPPKEDLSEA

SEQ ID NO: 804232 - protein, 220 aa, Homo sapiens [sequence omitted]

SEQ ID NO: 804233 - protein, 111 aa, Homo sapiens
GRSQSLPARAEAPKSKRERLGLSSCPRVLLCCLGWSAVVQARLTAALTSWDQGLAGGLLNLFIFSKTRSLAGCGCPHLSSQHFGRLRQEDRLNPRVGDQPGQHREILSLKK

SEQ ID NO: 804234 - protein, 40 aa, Homo sapiens
MSATNPPFRESLRRRDGSTGTGCTADSAQKNAHLSCNRAD

SEQ ID NO: 804235 - protein, 85 aa, Homo sapiens
LATRMAFVTRASPIRPILGPYTASFSHAHRKGSVDGALSMTSLGKIKCSSFLRAGGCSWAAPSSQKQYLSWRKSVVLQDIVNLGF

SEQ ID NO: 804236 - protein, 117 aa, Homo sapiens
MFASISPSHLTPSSASQNIPWYLRPFQFPPGFVGGRIKKKLHCSHPHSYSHFIKQKSSLEPLQNKIPATTPLFSFRLQLFILAKKLQSAPPRRKEYPVLMGVHRRLQAAPLQRLTSR

SEQ ID NO: 804237 - protein, 167 aa, Homo sapiens
MGRMWLVLGESYSLCWSQTALHCRKLLFQWPWLGPSTPSLCPRPLSPFRAIRDSRRAVDNRISSELGNSRFKISVENERHSRLTRASGLPRTSSPSPTGWNSVAIAPYSDGSLCQISSIFGDSSSKTAGEENGLKDSSVGCRIDSETYTSSLSPEKSSSCGSLSLAA

SEQ ID NO: 804238 - protein, 390 aa, Homo sapiens
MDFWLWPLYFLPVSGALRILPEVKVEGELGGSVTIKCPLPEMHVRIYLCREMAGSGTCGTVVSTTNFIKAEYKGRVTLKQYPRKNLFLVEVTQLTESDSGVYACGAGMNTDRGKTQKVTLNVHSEYEPSWEEQPMPETPKWFHLPYLFQMPAYASSSKFVTRVTTPAQRGKVPPVHHSSPTTQITHRPRVSRASSVAGDKPRTFLPSTTASKISALEGLLKPQTPSYNHHTRLHRQRALDYGSQSGREGQGFHILIPTILGLFLLALLGLVVKRAVERRKALSRRARRLAVRMRALESSQRPRGSPRPRSQNNIYSACPRRARGADAAGTGEAPVPGPGAPLPPAPLQVSESPWLHAPSLKTSCEYVSLYHQPAAMMEDSDSDDYINVPA

SEQ ID NO: 804239 - protein, 390 aa, Homo sapiens; identical to SEQ ID NO: 804238

SEQ ID NO: 804240 - protein, 299 aa, Homo sapiens
MWYRGIHHQLHQGRIQGPSYSEAIPTQESVPSGEYEPSWEEQPMPETPKWFHLPYLFQMPAYASSSKFVTRVTTPAQRGKVPPVHHSSPTTQITHRPRVSRASSVAGDKPRTFLPSTTASKISALEGLLKPQTPSYNHHTRLHRQRALDYGSQSGREGQGFHILIPTILGLFLLALLGLVVKRAVERRKALSRRARRLAVRMRALESSQRPRGSPRPRSQNNIYSACPRRARGADAAGTGEAPVPGPGAPLPPAPLQVSESPWLHAPSLKTSCEYVSLYHQPAAMMEDSDSDDYINVPA

SEQ ID NO: 804241 - protein, 135 aa, Homo sapiens
QPFVWGGWHGPLMPFSSLFPWLCGEALSRRARRLAVRMRALESSQRPRGSPRPRSQNNIYSACPRRARGADAAGTGEAPVPGPGAPLPPAPLQVSESPWLHAPSLKTSCEYVSLYHQPAAMMEDSDSDDYINVPA

SEQ ID NO: 804242 - protein, 129 aa, Homo sapiens
MDFWLWPLYFLPVSGALRILPEVKVEGELGGSVTIKCPLPEMHVRIYLCREMAGSGTCGTVVSTTNFIKAEYKGRVTLKQYPRKNLFLVEVTQLTESDSGVYACGAGMNTDRGKTQKVTLNVHSGRFLR

SEQ ID NO: 804243 - protein, 1106 aa, Homo sapiens
MFNSMTPPPISSYGEPCCLRPLPSQGAPSVGTEGLSGPPFCHQANLMSGPHSYGPARETNSCTEGPLFSSPRSAVKLTKKRALSISPLSDASLDLQTVIRTSPSSLVAFINSRCTSPGGSYGHLSIGTMSPSLGFPAQMNHQKGPSPSFGVQPCGPHDSARGGMIPHPQSRGPFPTCQLKSELDMLVGKCREEPLEGDMSSPNSTGIQDPLLGMLDGREDLEREEKREPESVYETDCRWDGCSQEFDSQEQLVHHINSEHIHGERKEFVCHWGGCSRELRPFKAQYMLVVHMRRHTGEKPHKCTFEGCRKSYSRLENLKTHLRSHTGEKPYMCEHEGCSKAFSNASDRAKHQNRTHSNEKPYVCKLPGCTKRYTDPSSLRKHVKTVHGPDAHVTKRHRGDGPLPRAPSISTVEPKREREGGPIREESRLTVPEGAMKPQPSPGAQSSCSSDHSPAGSAANTDSGVEMTGNAGGSTEDLSSLDEGPCIAGTGLSTLRRLENLRLDQLHQLRPIGTRGLKLPSLSHTGTTVSRRVGPPVSLERRSSSSSSISSAYTVSRRSSLASPFPPGSPPENGASSLPGLMPAQHYLLRARYASARGGGTSPTAASSLDRIGGLPMPPWRSRAEYPGYNPNAGVTRRASDPAQAADRPAPARVQRFKSLGCVHTPPTVAGGGQNFDPYLPTSVYSPQPPSITENAAMDARGLQEEPEVGTSMVGSGLNPYMDFPPTDTLGYGGPEGAAAEPYGARGPGSLPLGPGPPTNYGPNPCPQQASYPDPTQETWGEFPSHSGLYPGPKALGGTYSQCPRLEHYGQVQVKPEQGCPVGSDSTGLAPCLNAHPSEGPPHPQPLFSHYPQPSPPQYLQSGPYTQPPPDYLPSEPRPCLDFDSPTHSTGQLKAQLVCNYVQSQQELLWEGGGREDAPAQEPSYQSPKFLGGSQVSPSRAKAPVNTYGPGFGPNLPNHKSGSYPTPSPCHENFVVGANRASHRAAAPPRLLPPLPTCYGPLKVGGTNPSCGHPEVGRLGGGPALYPPPEGQVCNPLDSLDLDNTQLDFVAILDEPQGLSPPPSHDQRGSSGHTPPPSGPPNMAVGNMSVLLRSLPGETEFLNSSA

SEQ ID NO: 804244 - protein, 858 aa, Homo sapiens
MFNSMTPPPISSYGEPCCLRPLPSQGAPSVGTEGLSGPPFCHQANLMSGPHSYGPARETNSCTEGPLFSSPRSAVKLTKKRALSISPLSDASLDLQTVIRTSPSSLVAFINSRCTSPGGSYGHLSIGTMSPSLGFPAQMNHQKGPSPSFGVQPCGPHDSARGGMIPHPQSRGPFPTCQLKSELDMLVGKCREEPLEGDMSSPNSTGIQDPLLGMLDGREDLEREEKREPESVYETDCRWDGCSQEFDSQEQLVHHINSEHIHGERKEFVCHWGGCSRELRPFKAQYMLVVHMRRHTGEKPHKCTFEGCRKSYSRLENLKTHLRSHTGEKPYMCEHEGCSKAFSNASDRAKHQNRTHSNEKPYVCKLPGCTKRYTDPSSLRKHVKTVHGPDAHVTKRHRGDGPLPRAPSISTVEPKREREGGPIREESRLTVPEGAMKPQPSPGAQSSCSSDHSPAGSAANTDSGVEMTGNAGGSTEDLSSLDEGPCIAGTGLSTLRRLENLRLDQLHQLRPIGTRGLKLPSLSHTGTTVSRRVGPPVSLERRSSSSSSISSAYTVSRRSSLASPFPPGSPPENGASSLPGLMPAQHYLLRARYASARGGGTSPTAASSLDRIGGLPMPPWRSRAEYPGYNPNAGVTRRASDPAQAADRPAPARVQRFKSLGCVHTPPTVAGGGQNFDPYLPTSVYSPQPPSITENAAMDARGLQEEPEVGTSMVGSGLNPYMDFPPTDTLGYGGPEGAAAEPYGARGPGSLPLGPGPPTNYGPNPCPQQASYPDPTQETWGEFPSHSGLYPGPKALGGTYSQCPRLEHYGQVQVKPEQGCPVGSDSTGLAPCLNAHHGCGQHECLTEIPTWGNRIPQL

SEQ ID NO: 804245 - protein, 1106 aa, Homo sapiens; identical to SEQ ID NO: 804243

SEQ ID NO: 804246 - protein, 154 aa, Homo sapiens
MFNSMTPPPISSYGEPCCLRPLPSQGAPSVGTEGLSGPPFCHQANLMSGPHSYGPARETNSCTEGPLFSSPRSAVKLTKKRALSISPLSDASLDLQTVIRTSPSSLVAFINSRCTSPGGSYGHLSIGTMRCSQPRAKRPLKPLPKSIKSLKPSN

SEQ ID NO: 804247 - protein, 46 aa, Homo sapiens
MERSAFMEQDAGSGLVMRLHERPALLVSSTPGQSWMPPPRHGLNEK

SEQ ID NO: 804248 - protein, 215 aa, Homo sapiens
NSLPYQVSLNSGSHFCGGSLISEQWVVSAAHCYKTRIQVRLGEHNIKVLEGNEQFINAAKIIRHPKYNRDTLDNDIMLIKLSSPAVINARVSTISLPTAPPAAGTECLISGWGNTLSFGADYPDELKCLDAPVLTQAECKASYPGKITNSMFCVGFLEGGKDSCQRDSGGPVVCNGQLQGVVSWGHGCAWKNRPGVYTKVYNYVDWIKDTIAANS

SEQ ID NO: 804249 - protein, 127 aa, Homo sapiens
MSQKKEEKKTAPPAAGTECLISGWGNTLSFGADYPDELKCLDAPVLTQAECKASYPGKITNSMFCVGFLEGGKDSCQRDSGGPVVCNGQLQGVVSWGHGCAWKNRPGVYTKVYNYVDWIKDTIAANS

SEQ ID NO: 804250 - protein, 113 aa, Homo sapiens
LALLTTGAFALFGVFALASISSVPLCPLRLGSSALTTQYGAAFWVTLATGVLCLFLGGAVVSLQYVRPSALRTLLDQSAKDCSQERGGSPLILGDPLHKQAALPDLKCITTNL

SEQ ID NO: 804251 - protein, 298 aa, Homo sapiens
EAVLRLMAVPTELDGGSVKETAAEEESRVLAPGAAPFGNFPHYSRFHPPEQRLRLLPPELLRQLFPESPENGPILGLDVGCNSGDLSVALYKHFLSLPDGETCSDASREFRLLCCDIDPVLVKRAEKECPFPDALTFITLDFMNQRTRKVLLSSFLSQFGRSVFDIGFCMSITMWIHLNHGDHGLWEFLAHLSSLCHYLLVEPQPWKCYRAAARRLRKLGLHDFDHFHSLAIRGDMPNQIVQILTQDHGMELICCFGNTSWDRSLLLFRAKQTIETHPIPESLIEKGKEKNRLSFQKQ

SEQ ID NO: 804252 - protein, 298 aa, Homo sapiens; identical to SEQ ID NO: 804251

SEQ ID NO: 804253 - protein, 228 aa, Homo sapiens
  misc_feature (29)..(30): Xaa can be any naturally occurring amino acid
  misc_feature (33)..(34): Xaa can be any naturally occurring amino acid
  misc_feature (39)..(40): Xaa can be any naturally occurring amino acid
  misc_feature (44)..(44): Xaa can be any naturally occurring amino acid
PPPPRLSRFLSPDAIGPTGEPGSMGQKKXXPPXXSFFFXXILLXAQHDPVLVKRAEKECPFPDALTFITLDFMNQRTRKVLLSSFLSQFGRSVFDIGFCMSITMWIHLNHGDHGLWEFLAHLSSLCHYLLVEPQPWKCYRAAARRLRKLGLHDFDHFHSLAIRGDMPNQIVQILTQDHGMELICCFGNTSWDRSLLLFRAKQTIETHPIPESLIEKGKEKNRLSFQKQ

SEQ ID NO: 804254 - protein, 97 aa, Homo sapiens
ACPGDLARPGLCQPSLLGTTEVARARLRKAAGLEALGSESELAPLAPGGERVGERPRSSSVENAPLPAFCKAYLGAERQASCHVISSPLRGPCDVKE

SEQ ID NO: 804255 - protein, 186 aa, Homo sapiens
AAREYAWTLWNAGPPRAPPLSGSCRETRPVGKPAEPQPRPRKVSLGPGPDSHPCAGPRASQALHCRPGCAQGRQPPAALFVPPLQEGRGRGGALQAVSHARGGARASGRRTGEHAGEDTWAFARILRKQSNSYNKMGRRNENCANSLRVSNISQENLSHWNLDSEVPVSENKNLPAGRDGAAGGKN

SEQ ID NO: 804256 - protein, 206 aa, Homo sapiens
MSSVSPIQIPSRLPLLLTHEGVLLPGSTMRTSVDSARNLQLVRSRLLKGTSLQSTILGVIPNTPDPASDAQDLPPLHRIGTAALAVQVVGSNWPKPHYTLLITGLCRFQIVQVLKEKPYPIAEVEQLDRLEEFPNTCKMREELGELSEQFYKYAVQLVEMLDMSVPAVAKLRRLLDSLPREALPDILTSIIRTSNKEKLQVQCSLL

SEQ ID NO: 804257 - protein, 213 aa, Homo sapiens
MPSRKQTGVFGVKIAVVTKRERSKVPYIMRQCVEEIERRGMEEITEDVSVMMSEMDVNAIAGTLKLYFRELPEPLFTDEFYPNFAEGIVVAEKEAVNKMSLHNLATVFGPTLLRPSEKESKLPANPSQPVTMTDSRSLEVMSQGPRAGGCFGSTATSYPPPASTACVVAKPVWGWGTQRSPGGDPALLLQCRRRPRCQCDLPQGVASRLPGRK

SEQ ID NO: 804258 - protein, 82 aa, Homo sapiens
MRQCVEEIERRGMEEVGIYRVSGVATDIQALKAGFNVSECRPAQDGMEVWAVVSAMRSQSAPWPRHVTSFSVSFLHLLFYYF

SEQ ID NO: 804259 - protein, 412 aa, Homo sapiens
MGLHLRPYRVGLLPDGLLFLLLLLMLLADPALPAGRHPPVVLVPGDLGNQLEAKLDKPTVVHYLCSKKTESYFTIWLNLELLLPVIIDCWIDNIRLVYNKTSRATQFPDGVDVRVPGFGKTFSLEFLDPSKSSVGSYFHTMVESLVGWGYTRGEDVRGAPYDWRRAPNENGPYFLALREMIEEMYQLYGGPVVLVAHSMGNMYTLYFLQRQPQAWKDKYIRAFVSLGAPWGGVAKTLRVLASGDNNRIPVIGPLKIREQQRSAVSTSWLLPYNYTWSPEKVFVQTPTINYTLRDYRKFFQDIGFEDGWLMRQDTEGLVEATMPPGVQLHCLYGTGVPTPDSFYYESFPDRDPKICFGDGDGTVNLKSALQCQAWQSRQEHQVLLQELPGSEHIEMLANATTLAYLKRVLLGP

SEQ ID NO: 804260 - protein, 444 aa, Homo sapiens
MGLHLRPYRVGLLPDGLLFLLLLLMLLADPALPAGRHPPVVLVPGDLGNQLEAKLDKPTVVHYLCSKKTESYFTIWLNLELLLPVIIDCWIDNIRLECSGAISAHYTSASQAQALLLPQTPDNWDYRLVYNKTSRATQFPDGVDVRVPGFGKTFSLEFLDPSKSSVGSYFHTMVESLVGWGYTRGEDVRGAPYDWRRAPNENGPYFLALREMIEEMYQLYGGPVVLVAHSMGNMYTLYFLQRQPQAWKDKYIRAFVSLGAPWGGVAKTLRVLASGDNNRIPVIGPLKIREQQRSAVSTSWLLPYNYTWSPEKVFVQTPTINYTLRDYRKFFQDIGFEDGWLMRQDTEGLVEATMPPGVQLHCLYGTGVPTPDSFYYESFPDRDPKICFGDGDGTVNLKSALQCQAWQSRQEHQVLLQELPGSEHIEMLANATTLAYLKRVLLGP

SEQ ID NO: 804261 - protein, 154 aa, Homo sapiens
  misc_feature (4)..(4): Xaa can be any naturally occurring amino acid
QAGXLRVTGWLLPYNYTWSPEKVFVQTPTINYTLRDYRKFFQDIGFEDGWLMRQDTEGLVEATMPPGVQLHCLYGTGVPTPDSFYYESFPDRDPKICFGDGDGTVNLKSALQCQAWQSRQEHQVLLQELPGSEHIEMLANATTLAYLKRVLLGP

SEQ ID NO: 804262 - protein, 108 aa, Homo sapiens [sequence omitted]

SEQ ID NO: 804263 - protein, 68 aa, Homo sapiens
VCSPGLPFPAFRLQRPPAPARCPKQNGRHVQCLSDRLKWRLRNYVRRQIRARLEGGKDLSYACAEYPA

SEQ ID NO: 804264 - protein, 123 aa, Homo sapiens
MHLDLFLNKTLPQIRGVESEQSSRLHPLPDPRGDRHRMADNLPMEIHGSSATSSGKPSDFNQAAVDGAGERGGKEVLGGTLDVLPQAGPCSTCGWLCWLSPNRPRKFDTSGLGSSSLLLPRCL

SEQ ID NO: 804265 - protein, 119 aa, Homo sapiens
MADPGGRLEIIFSSWAPRSLPQSQLRQEFRKELWMIEQQRVQECVTGWTEKRMPLPAPPAAPQGVVSACTKPVLEQGVRDAPFQDPCHRETGAGRICGVLGSALCPAAAEERSALTKVS

SEQ ID NO: 804266 - protein, 112 aa, Homo sapiens
MADPGGRLEIIFSSWAPRSLPQSQLRQEFRKELWMIEQQRVQECVTGWTEKRMPLPAPPAAPQGVVSACTKPVLEQGVRDAPFQDPCHRETGAGRICGVLGSALCPAAAEER

SEQ ID NO: 804267 - protein, 123 aa, Homo sapiens; identical to SEQ ID NO: 804264

SEQ ID NO: 804268 - protein, 34 aa, Homo sapiens
MGWAGPEDSYVGDEAQSKRGILTLKYPIEHGIVT

SEQ ID NO: 804269 - protein, 119 aa, Homo sapiens; identical to SEQ ID NO: 804265

SEQ ID NO: 804270 - protein, 112 aa, Homo sapiens; identical to SEQ ID NO: 804266

SEQ ID NO: 804271 - protein, 75 aa, Homo sapiens
MVVAQQAAPNDGQSITSNDGDRRSLTTDRAASTQPAPHASTNTTPSVGDTQRNSPPHNQAARATNTACCRHHTAR

SEQ ID NO: 804272 - protein, 80 aa, Homo sapiens
MAAEPLTELEESIETVVTTFFTFARQEGRKDSLSVNEFKELVTQQLPHLLKDVGSLDEKMKSLDVNQVQMQEFNELKHLD

SEQ ID NO: 804273 - protein, 132 aa, Homo sapiens
MAAEPLTELEESIETVVTTFFTFARQEGRKDSLSVNEFKELVTQQLPHLLKDVGSLDEKMKSLDVNQDSQLKHNLRTVDSIVELMHHLLILIHLSFISLPELSSKNKYNYTTTPYPYTLIYACNTLSTITPP

SEQ ID NO: 804274 - protein, 258 aa, Homo sapiens
RTQVGQVPVTPAPSAPGVVQTCPGVLLTSRAGRSWRRITSPLPASCSMKADRSMAGSSGSELKGRKKPCERPQSRPRTQNGHLLPWQGLQAPNGWGAQPHQQHQATPANRGMGLLSLILFLGAKVTTANKTDSFLFSTGLTVLSSPGLKMRVLGCPPTPPQLTQGHTSGYVDLHKGPFLSPMRHPRGHTGPQILPQAWEPIGRRVRQCRGPQTFLKGPESKYFRLCRPDVLCCKTQFCYCSSKAAIDNSEVNECVVSQ

SEQ ID NO: 804275 - protein, 129 aa, Homo sapiens
MAPPRPANHSRGPIQKWLSVHEDHLQHPCDCTPNQPAARTYCLVTSPLFPQLSLKKSGFQIFRETDLGPAPGRKAACISSVREQMRQQDSKSRKRASRKTSTSEDGERGHLGTTLQLRQTRTLPVYRRL

SEQ ID NO: 804276 - protein, 258 aa, Homo sapiens; identical to SEQ ID NO: 804274

SEQ ID NO: 804277 - protein, 441 aa, Homo sapiens
CGRGLQERGEALAAYLDGREPVLRFRPREEEALLGEIVRAAAAGSGDLPPLGPATLLALCVQHSARELELGHLPRLLGRLARLIKEAVWEKIKEIGDRQPENHPEGVPEVPLTPEAVSVELRPLMLWMANTTELLSFVQEKVLEMEKEADQEDPQLCNDLELCDEAMALLDEVIMCTFQQSVYYLTKTLYSTLPALLDSNPFTAGAELPGPGAELGAMPPGLRPTLGVFQAALELTSQCELHPDLVSQTFGYLFFFSNASLLNSLMERGQGRPFYQWSRAVQIRTNLDLVLDWLQGAGLGDIATEFFRKLSMAVNLLCVPRTSLLKASWSSLRTDHPTLTPAQLHHLLSHYQLGPGRGPPAAWDPPPAEREAVDTGDIFESFSSHPPLILPLGSSRLRLTGPVTDDALHRELRRLRRLLWDLEQQELPANYRHGPPVATSP

SEQ ID NO: 804278 - protein, 715 aa, Homo sapiens
AGPTLPRSPPPGLVSSQDAPSPLFLPGFLLPFPVPHPVLGAVAEARAVELTQASGARASGCAGPEAGAMLSGERKEGGSPRFGKLHLPVGLWINSPRKQLAKLGRRWPSAASVKSSSSDTGSRSSEPLPPPPPHVELRRVGAVKAAGGASGSRAKRISQLFRGSGTGTTGSSGAGGPGTPGGAQRWASEKKLPELAAGVAPEPPLATRATAPPGVLKIFGAGLASGANYKSVLATARSTARELVAEALERYGLAGSPGGGPGESSCVDAFALCDALGRPAAAGVGSGEWRAEHLRVLGDSERPLLVQELWRARPGWARRFELRGREEARRLEQEAFGAADSEGTGAPSWRPQKNRSRAASGGAALASPGPGTGSGAPAGSGGKERSENLSLRRSVSELSLQGRRRRQQERRQQALSMAPGAADAQIGTADPGDFDQLTQCLIQAPSNRPYFLLLQGYQDAQTLYSTLPALLDSNPFTAGAELPGPGAELGAMPPGLRPTLGVFQAALELTSQCELHPDLVSQTFGYLFFFSNASLLNSLMERGQGRPFYQWSRAVQIRTNLDLVLDWLQGAGLGDIATEFFRKLSMAVNLLCVPRTSLLKASWSSLRTDHPTLTPAQLHHLLSHYQLGPGRGPPAAWDPPPAEREAVDTGDIFESFSSHPPLILPLGSSRLRLTGPVTDDALHRELRRLRRLLWDLEQQELPANYRHGPPVATSP

SEQ ID NO: 804279 - protein, 725 aa, Homo sapiens
AGPTLPRSPPPGLVSSQDAPSPLFLPGFLLPFPVPHPVLGAVAEARAVELTQASGARASGCAGPEAGAMLSGERKEGGSPRFGKLHLPVGLWINSPRKQLAKLGRRWPSAASVKSSSSDTGSRSSEPLPPPPPHVELRRVGAVKAAGGASGSRAKRISQLFRGSGTGTTGSSGAGGPGTPGGAQRWASEKKLPELAAGVAPEPPLATRATAPPGVLKIFGAGLASGANYKSVLATARSTARELVAEALERYGLAGSPGGGPGESSCVDAFALCDALGRPAAAGVGSGEWRAEHLRVLGDSERPLLVQELWRARPGWARRFELRGREEARRLEQEAFGAADSEGTGAPSWRPQKNRSRAASGGAALASPGPGTGSGAPAGSGGKERSENLSLRRSVSELSLQGRRRRQQERRQQALSMAPGAADAQIGTADPGDFDQLTQCLIQAPSNRPYFLLLQGYQDAQTLYSTLPALLDSNPFTAGAELPGPGAELGAMPPGLRPTLGVFQAALELTSQCELHPDLVSQTFGYLFFFSNASLLNSLMERGQGRPFYQWSRAVQIRTNLDLVLDWLQGAGLGDIATEFFRKLSMAVNLLCVPRTSLLKASWSSLRTDHPTLTPAQLHHLLSHYQLGPGRGPPAAWDPPPAEREAVDTDSNRAAFGLTGDIFESFSSHPPLILPLGSSRLRLTGPVTDDALHRELRRLRRLLWDLEQQELPANYRHGPPVATSP

SEQ ID NO: 804280 - protein, 627 aa, Homo sapiens
AGPTLPRSPPPGLVSSQDAPSPLFLPGFLLPFPVPHPVLGAVAEARAVELTQASGARASGCAGPEAGAMLSGERKEGGSPRFGKLHLPVGLWINSPRKQLAKLGRRWPSAASVKSSSSDTGSRSSEPLPPPPPHVELRRVGAVKAAGGASGSRAKRISQLFRGSGTGTTGSSGAGGPGTPGGAQRWASEKKLPELAAGVAPEPPLATRATAPPGVLKIFGAGLASGANYKSVLATARSTARELVAEALERYGLAGSPGGGPGESSCVDAFALCDALGRPAAAGVGSGEWRAEHLRVLGDSERPLLVQELWRARPGWARRFELRGREEARRLEQEAFGAADSEGTGAPSWRPQKNRSRAASGGAALASPGPGTGSGAPAGSGGKERSENLSLRRSVSELSLQGRRRRQQERRQQALSMAPGAADAQIGTADPGDFDQLTQCLIQAPSNRPYFLLLQGYQDAQTLYSTLPALLDSNPFTAGAELPGPGAELGAMPPGLRPTLGVFQAALELTSQCELHPDLVSQTFGYLFFFSNASLLNSLMERGQGRPFYQWSRAVQIRTNLDLVLDWLQGAGLGDIATEFFRKLSMAVNLLCVPRTSLLKGTSSKASPRTRPSSSPWGARACASLVQ

SEQ ID NO: 804281 - protein, 715 aa, Homo sapiens; identical to SEQ ID NO: 804278

SEQ ID NO: 804282 - protein, 269 aa, Homo sapiens
GVVVQSLVSTSLFSQTLYSTLPALLDSNPFTAGAELPGPGAELGAMPPGLRPTLGVFQAALELTSQCELHPDLVSQTFGYLFFFSNASLLNSLMERGQGRPFYQWSRAVQIRTNLDLVLDWLQGAGLGDIATEFFRKLSMAVNLLCVPRTSLLKASWSSLRTDHPTLTPAQLHHLLSHYQLGPGRGPPAAWDPPPAEREAVDTGDIFESFSSHPPLILPLGSSRLRLTGPVTDDALHRELRRLRRLLWDLEQQELPANYRHGPPVATSP

SEQ ID NO: 804283 - protein, 612 aa, Homo sapiens
AGPTLPRSPPPGLVSSQDAPSPLFLPGFLLPFPVPHPVLGAVAEARAVELTQASGARASGCAGPEAGAMLSGERKEGGSPRFGKLHLPVGLWINSPRKQLAKLGRRWPSAASVKSSSSDTGSRSSEPLPPPPPHVELRRVGAVKAAGGASGSRAKRISQLFRGSGTGTTGSSGAGGPGTPGGAQRWASEKKLPELAAGVAPEPPLATRATAPPGVLKIFGAGLASGANYKSVLATARSTARELVAEALERYGLAGSPGGGPGESSCVDAFALCDALGRPAAAGVGSGEWRAEHLRVLGDSERPLLVQELWRARPGWARRFELRGREEARRLEQEAFGAADSEGTGAPSWRPQKNRSRAASGGAALASPGPGTGSGAPAGSGGKERSENLSLRRSVSELSLQGRRRRQQERRQQALSMAPGAADAQIGTADPGDFDQLTQCLIQAPSNRPYFLLLQGYQDAQTLYSTLPALLDSNPFTAGAELPGPGAELGAMPPGLRPTLGVFQAALELTSQCELHPDLVSQTFGYLFFFSNASLLNSLMERGQGRPFYQWSRAVQIRTNLDLVLDWLQGAGLGDIATEFFRKLSMAVNLLCVPRTSLLKVTPGQLYLTPDL

SEQ ID NO: 804284 - protein, 465 aa, Homo sapiens
LAGESEAPPTRLGKLGVALAGGGAGGGFLAEGGADVGYRVCQPNPEQRRWRWWPSPVAPVLLALELVAMEELQEPLRGQLRLCFTQAARTSLLLLRLNDAALRALQECQRQQVRPVIAFQGHRGYLRLPGPGWSCLFSFIVSQCCQEGAGGSLDLVCQRFLRSGPNSLHCLGSLRERLIIWAAMDSIPAPSSVQGHNLTEDARHPESWQNTGGYSEGDAVSQPQMALEEVSVSDPLASNQGQSLPGSSREHMAQWEVRSQTHVPNREPVQALPSSASRKRLDKKRSVPVATVELEEKRFRTLPLVPSPLQGLTNQDLQEGEDWEQEDEDMDPRLEHSSSVQEDSESPSPEDIPDYLLQYRAIHSAEQQHAYEQDFETDYAEYRILHARVGTASQRFIELGAEIKRVRRGTPEYKVLEDKIIQEYKKFRKQYPSYREEKRRCEYLHQKLSHIKGLILEFEEKNRGS

SEQ ID NO: 804285 - protein, 484 aa, Homo sapiens
TLKGLQVQLSLRDSNSKFRVAGETKAGLGTLSERSDAGRGLFLPRTGDSSSDSPKRFMRILEESAERRWRWWPSPVAPVLLALELVAMEELQEPLRGQLRLCFTQAARTSLLLLRLNDAALRALQECQRQQVRPVIAFQGHRGYLRLPGPGWSCLFSFIVSQCCQEGAGGSLDLVCQRFLRSGPNSLHCLGSLRERLIIWAAMDSIPAPSSVQGHNLTEDARHPESWQNTGGYSEGDAVSQPQMALEEVSVSDPLASNQGQSLPGSSREHMAQWEVRSQTHVPNREPVQALPSSASRKRLDKKRSVPVATVELEEKRFRTLPLVPSPLQGLTNQDLQEGEDWEQEDEDMDPRLEHSSSVQEDSESPSPEDIPDYLLQYRAIHSAEQQHAYEQDFETDYAEYRILHARVGTASQRFIELGAEIKRVRRGTPEYKVLEDKIIQEYKKFRKQYPSYREEKRRCEYLHQKLSHIKGLILEFEEKNRGS

SEQ ID NO: 804286 - protein, 540 aa, Homo sapiens
LAGESEAPPTRLGKLGVALAGGGAGGGFLAEGGADVGYRVCQPNPEQRRWRWWPSPVAPVLLALELVAMEELQEPLRGQLRLCFTQAARTSLLLLRLNDAALRALQECQRQQVRPAPFFSSHCPQGPWASAGDPGEGAGERERLPQALASPPLQVKPARQVIPGSGRRILGTLLHLRSTVTSSLSPQVRPVIAFQGHRGYLRLPGPGWSCLFSFIVSQCCQEGAGGSLDLVCQRFLRSGPNSLHCLGSLRERLIIWAAMDSIPAPSSVQGHNLTEDARHPESWQNTGGYSEGDAVSQPQMALEEVSVSDPLASNQGQSLPGSSREHMAQWEVRSQTHVPNREPVQALPSSASRKRLDKKRSVPVATVELEEKRFRTLPLVPSPLQGLTNQDLQEGEDWEQEDEDMDPRLEHSSSVQEDSESPSPEDIPDYLLQYRAIHSAEQQHAYEQDFETDYAEYRILHARVGTASQRFIELGAEIKRVRRGTPEYKVLEDKIIQEYKKFRKQYPSYREEKRRCEYLHQKLSHIKGLILEFEEKNRGS

SEQ ID NO: 804287 - protein, 376 aa, Homo sapiens
TLKGLQVQLSLRDSNSKFRVAGETKAGLGTLSERSDAGRGLFLPRTGDSSSDSPKRFMRILEESAERRWRWWPSPVAPVLLALELVAMEELQEPLRGQLRLCFTQAARTSLLLLRLNDAALRALQECQRQQVRPVIAFQGHRGYLRLPGPGWSCLFSFIVSQCCQEGAGGSLDLVCQRFLRSGPNSLHCLGSLRERLIIWAAMDSIPAPSSVQGHNLTEDARHPESWQNTGGYSEGDAVSQPQMALEEVSVSDPLASNQGQSLPGSSREHMAQWEVRSQTHVPNREPVQALPSSASRKRLDKKRSVPVATVELEEKRFRTLPLVPSPLQGLTNQDLQEGEDWEQEDEDMDPRLEHSSSVQEDSESPSPEDIPDYLL

SEQ ID NO: 804288 - protein, 401 aa, Homo sapiens
QGKKEERRRGGSGNNGGGARPGWSRTSLLLLRLNDAALRALQECQRQQVRPVIAFQGHRGYLRLPGPGWSCLFSFIVSQCCQEGAGGSLDLVCQRFLRSGPNSLHCLGSLRERLIIWAAMDSIPAPSSVQGHNLTEDARHPESWQNTGGYSEGDAVSQPQMALEEVSVSDPLASNQGQSLPGSSREHMAQWEVRSQTHVPNREPVQALPSSASRKRLDKKRSVPVATVELEEKRFRTLPLVPSPLQGLTNQDLQEGEDWEQEDEDMDPRLEHSSSVQEDSESPSPEDIPDYLLQYRAIHSAEQQHAYEQDFETDYAEYRILHARVGTASQRFIELGAEIKRVRRGTPEYKVLEDKIIQEYKKFRKQYPSYREEKRRCEYLHQKLSHIKGLILEFEEKNRGS

SEQ ID NO: 804289 - protein, 282 aa, Homo sapiens [sequence omitted]

SEQ ID NO: 804290 - protein, 140 aa, Homo sapiens
MPLESSSSMPLSFPSLLPSVPHNTNPSPPLMSYITSQEMKCILHWFANWSGPQRERFLEDLVAKAVPEKLQPLLDSLEQLSVSGADRPPSIFECQLHLWDQWFRGWAEQERNEFVRQLEFSEPDFVAKFYQAVAATAGKD

SEQ ID NO: 804291 - protein, 140 aa, Homo sapiens; identical to SEQ ID NO: 804290

SEQ ID NO: 804292 - protein, 140 aa, Homo sapiens; identical to SEQ ID NO: 804290

SEQ ID NO: 804293 - protein, 125 aa, Homo sapiens
MPLESSSSMPLSFPSLLPSVPHNTNPSPPLMSYITSQEMKCILHWFANWSGPQRERFLEDLVAKAVPEKLQPLLDSLEQLSVSGADRPPSIFECQLHLWDQWFRGWAEQERNEMLEGAIRCWKGS

SEQ ID NO: 804294 - protein, 140 aa, Homo sapiens; identical to SEQ ID NO: 804290

SEQ ID NO: 804295 - protein, 125 aa, Homo sapiens
MPLESSSSMPLSFPSLLPSVPHNTNPSPPLMSYITSQEMKCILHWFANWSGPQRERFLEDLVAKAVPEKLHRPPSIFECQLHLWDQWFRGWAEQERNEFVRQLEFSEPDFVAKFYQAVAATAGKD

SEQ ID NO: 804296 - protein, 152 aa, Homo sapiens
MDWPLRVNPLSVARLSHVVIVHHIPMQVTTRMTNTCALLTSGWCFTVSQEMKCILHWFANWSGPQRERFLEDLVAKAVPEKLQPLLDSLEQLSVSGADRPPSIFECQLHLWDQWFRGWAEQERNEFVRQLEFSEPDFVAKFYQAVAATAGKD

SEQ ID NO: 804297 - protein, 102 aa, Homo sapiens [sequence omitted]

SEQ ID NO: 804298 - protein, 104 aa, Homo sapiens
SPGMGVPSVVSTGVRSKTLEWLSGGVVYAVESNSQPLLDSLEQLSVSGADRPPSIFECQLHLWDQWFRGWAEQERNEFVRQLEFSEPDFVAKFYQAVAATAGKD

SEQ ID NO: 804299 - protein, 140 aa, Homo sapiens; identical to SEQ ID NO: 804290

SEQ ID NO: 804300 - protein, 727 aa, Homo sapiens
MTPPPPPPPPPGPDPAADPAADPCPWPGSLVVLFGATAGALGRDLGSDETDLILLVWQVVEPRSRQVGTLHKSLVRAEAAALSTQCREASGLSADSLARAEPLDKVLQQFSQLVNGDVALLGGGPYMLCTDGQQLLRQVLHPEASRKNLVLPDMFFSFYDLRREFHMQHPSTCPARDLTVATMAQGLGLETDATEDDFGVWEVKTMVAVILHLLKEPSSQLFSKPEVIKQKYETGPCSDSTVPCPYSSKADVVDSETVVRARGLPWQSSDQDVARFFKGLNVARGGVALCLNAQGRRNGEALIRFVDSEQRDLALQRHKHHMGVRYIEVYKATGEEFVKIAGGTSLEVARFLSREDQVILRLRGLPFSAGPTDVLGFLGPECPVTGGTEGLLFVRHPDGRPTGDAFALFACEELAQAALRRHKGMLGKRYIELFRSTAAEVQQVLNRYASGPLLPTLTAPLLPIPFPLAPGTGRDCVRLRGLPYTATIEDILSFLGEAAADIRPHGVHMVLNQQGRPSGDAFIQMTSAERALAAAQRCHKKVMKERYVEVVPCSTEEMSRVLMGGTLGRSGMSPPPCKLPCLSPPTYTTFQATPTLIPTETAALYPSSALLPAARVPAAPTPVAYYPGPATQLYLNYTAYYPSPPVSPTTVGYLTTPTAALASAPTSVLSQSGALVRMQGVPYTAGMKDLLSVFQAYQLPADDYTSLMPVGDPPRTVLQAPKEWVCL

SEQ ID NO: 804301 - protein, 171 aa, Homo sapiens
MLGKRYIELFRSTAAEVQQVLNRYASGPLLPTLTAPLLPIPFPLAPGTGRDCVRLRGLPYTATIEDILSFLGEAAADIRPHGVHMVLNQQGRPSGDAFIQMTSAERALAAAQRCHKKASHHLPTPPSKPPQRSFPRRRQLYTPLQHCSQLPGCLLPPPLLPTIQGQPLNST

SEQ ID NO: 804302 - protein, 717 aa, Homo sapiens
MTPPPPPPPPPGPDPAADPAADPCPWPGSLVVLFGATAGALGRDLGSDETDLILLVWQVVEPRSRQVGTLHKSLVRAEAAALSTQCREASGLSADSLARAEPLDKVLQQFSQLVNGDVALLGGGPYMLCTDGQQLLRQVLHPEASRKNLVLPDMFFSFYDLRREFHMQHPSTCPARDLTVATMAQGLGLETDATEDDFGVWEVKTMVAVILHLLKEPSSQLFSKPEVIKQKYETGPCSKADVVDSETVVRARGLPWQSSDQDVARFFKGLNVARGGVALCLNAQGRRNGEALIRFVDSEQRDLALQRHKHHMGVRYIEVYKATGEEFVKIAGGTSLEVARFLSREDQVILRLRGLPFSAGPTDVLGFLGPECPVTGGTEGLLFVRHPDGRPTGDAFALFACEELAQAALRRHKGMLGKRYIELFRSTAAEVQQVLNRYASGPLLPTLTAPLLPIPFPLAPGTGRDCVRLRGLPYTATIEDILSFLGEAAADIRPHGVHMVLNQQGRPSGDAFIQMTSAERALAAAQRCHKKVMKERYVEVVPCSTEEMSRVLMGGTLGRSGMSPPPCKLPCLSPPTYTTFQATPTLIPTETAALYPSSALLPAARVPAAPTPVAYYPGPATQLYLNYTAYYPSPPVSPTTVGYLTTPTAALASAPTSVLSQSGALVRMQGVPYTAGMKDLLSVFQAYQLPADDYTSLMPVGDPPRTVLQAPKEWVCL

SEQ ID NO: 804303 - protein, 717 aa, Homo sapiens; identical to SEQ ID NO: 804302

SEQ ID NO: 804304 - protein, 303 aa, Homo sapiens
MLGKRYIELFRSTAAEVQQVLNRYASGPLLPTLTAPLLPIPFPLAPGTGRDCVRLRGLPYTATIEDILSFLGEAAADIRPHGVHMVLNQQGRPSGDAFIQMTSAERALAAAQRCHKKVMKERYVEVVPCSTEEMSRVLMGGTLGRSGMSPPPCKLPCLSPPTYTTFQATPTLIPTETAALYPSSALLPAARVPAAPTPVAYYPGPATQLYLNYTAYYPSPPVSPTTVGYLTTPTAALASAPTSVLSQSGALVRMQGVPYTAGMKDLLSVFQAYQLPADDYTSLMPVGDPPRTVLQAPKEWVCL

SEQ ID NO: 804305 - protein, 282 aa, Homo sapiens
MTPPPPPPPPPGPDPAADPAADPCPWPGSLVVLFGATAGALGRDLGSDETDLILLVWQVVEPRSRQVGTLHKSLVRAEAAALSTQCREASGLSADSLARAEPLDKVLQQFSQLVNGDVALLGGGPYMLCTDGQQLLRQVLHPEASRKNLVLPDMFFSFYDLRREFHMQHPSTCPARDLTVATMAQGLGLETDATEDDFGVWEVKTMVAVILHSTLPELHSLLPKPPSLPHHCGLPHYTHCCPGLCSHLSVVPVRSLGPHAGCPIHGWYEGSAQRLPGLPATR

SEQ ID NO: 804306 - protein, 643 aa, Homo sapiens
MTPPPPPPPPPGPDPAADPAADPCPWPGSLVVLFGATAGALGRDLGSDETDLILLVWQVVEPRSRQVGTLHKSLVRAEAAALSTQCREASGLSADSLARAEPLDKVLQQFSQLVNGDVALLGGGPYMLCTDGQQLLRQVLHPEASRKNLVLPDMFFSFYDLRREFHMQHPSTCPARDLTVATMAQGLGLETDATEDDFGVWEVKTMVAVILHLLKEPSSQLFSKPEVIKQKYETGPCSKADVVDSETVVRARGLPWQSSDQDVARFFKGLNVARGGVALCLNAQGRRNGEALIRFVDSEQRDLALQRHKHHMGVRYIEVYKATGEEFVKIAGGTSLEVARFLSREDQVILRLRGLPFSAGPTDVLGFLGPECPVTGGTEGLLFVRHPDGRPTGDAFALFACEELAQAALRRHKGMLGKRYIELFRSTAAEVQQVLNRYASGPLLPTLTAPLLPIPFPLAPGTGRDCVRLRGLPYTATIEDILSFLGEAAADIRPHGVHMVLNQQGRPSGDAFIQMTSAERALAAAQRCHKKVMKERYVEVVPCSTEEMSRVLMGGTLGRSGMSPPPCKLPCLSPPTYTTFQATPTLIPTETAALYPSSALLPAARVPAAPTPVAYYPGPATQLYLNYTAYYPSPVPHMWVLIN

SEQ ID NO: 804307 - protein, 462 aa, Homo sapiens
MTPPPPPPPPPGPDPAADPAADPCPWPGSLVVLFGATAGALGRDLGSDETDLILLVWQVVEPRSRQVGTLHKSLVRAEAAALSTQCREASGLSADSLARAEPLDKVLQQFSQLVNGDVALLGGGPYMLCTDGQQLLRQVLHPEASRKNLVLPDMFFSFYDLRREFHMQHPSTCPARDLTVATMAQGLGLETDATEDDFGVWEVKTMVAVILHLLKEPSSQLFSKPEVIKQKYETGPCSKADVVDSETVVRARGLPWQSSDQDVARFFKGLNVARGGVALCLNAQGRRNGEALIRFVDSEQRDLALQRHKHHMGVRYIEVYKATGEEFVKIAGGTSLEVARFLSREDQVILRLRGLPFSAGPTDVLGFLGPECPVTGGTEGLLFVRHPDGRPTGDAFALFACEELAQAALRRHKGMLGKRYIELFRSTAAEVQQVSAQGSPPPDVLLLQGGPLCPCPTWHDQP

SEQ ID NO: 804308 - protein, 347 aa, Homo sapiens
MTPPPPPPPPPGPDPAADPAADPCPWPGSLVVLFGATAGALGRDLGSDETDLILLVWQVVEPRSRQVGTLHKSLVRAEAAALSTQCREASGLSADSLARAEPLDKVLQQFSQLVNGDVALLGGGPYMLCTDGQQLLRQVLHPEASRKNLVLPDMFFSFYDLRREFHMQHPSTCPARDLTVATMAQGLGLETDATEDDFGVWEVKTMVAVILHLLKEPSSQLFSKPEVIKQKYETGPCSDSTVPCPYSSKADVVDSETVVRARGLPWQSSDQDVARFFKGLNVARGGVALCLNAQGRRNGEALIRFVDSEQRDLALQRHKHHMGVRYIESMSRLGWRMSSSTQAQQWR

SEQ ID NO: 804309 - protein, 121 aa, Homo sapiens
MTPPPPPPPPPGPDPAADPAADPCPWPGSLVVLFGATAGALGRDLGSDETDLILLVWQVVEPRSRQVGTLHKSLVRAEAAALSTQCREASGLSADSLARAEPLDKVLQQVSAGVGGGMAWT

SEQ ID NO: 804310 - protein, 214 aa, Homo sapiens
MTPPPPPPPPPGPDPAADPAADPCPWPGSLVVLFGATAGALGRDLGSDETDLILLVWQVVEPRSRQVGTLHKSLVRAEAAALSTQCREASGLSADSLARAEPLDKVLQQFSQLVNGDVALLGGGPYMLCTDGQQLLRQVLHPEASRKNLVLPDMFFSFYDLRREFHMQHPSTCPARDLTVATMAQGICDPAGLGWRSHCGYMCLSMCMLWVGNM

SEQ ID NO: 804311 - protein, 150 aa, Homo sapiens
EEEAEETAAVPEEGVVITGYCRSPETSGAGAGPGAPRSSWDTLASRRRGRARAPQRQDRDYTQEGQGAGPDARSGFSPASGLDPASAAGRGSESRNHLPFLAFSRERSRESASSLTRAGKTDGTCRRRTPISIAAARASLSESVKALRGC

SEQ ID NO: 804312 - protein, 42 aa, Homo sapiens
MVSPDPQIIVVAPETELASMQVQRTEDGVTIIQIFGVGRKGE

SEQ ID NO: 804313 - protein, 276 aa, Homo sapiens
MTTAGRGNLGLIPRSTAFQKQEGRLTVKQEPANQTWGQGSSLQKNYPPVCEIFRLHFRQLCYHEMSGPQEALSRLRELCRWWLMPEVHTKEQILELLVLEQFLSILPGELRTWVQLHHPESGEEAVAVVEDFQRHLSGSEEVSAPAQKQEMHFEETTALGTTKESPPTSPLSGGSAPGAHLEPPYDPGTHHLPSGDFAQCTSPVPTLPQVGNSGDQAGATVLRMVRPQDTVAYEDLSVDYTQKKWKSLTLSQRALQWNMMPENHHSMASLGWSTMA

SEQ ID NO: 804314 - protein, 123 aa, Homo sapiens
MTTAGRGNLGLIPRSTAFQKQEGRLTVKQEPANQTWGQGSSLQKNYPPVCEIFRLHFRQLCYHEMSGPQEALSRLRELCRWWLMPEVHTKEQILELLVLEQFLSILPGELRTWVQLHHPLKNC

SEQ ID NO: 804315 - protein, 753 aa, Homo sapiens
MTTAGRGNLGLIPRSTAFQKQEGRLTVKQEPANQTWGQGSSLQKNYPPVCEIFRLHFRQLCYHEMSGPQEALSRLRELCRWWLMPEVHTKEQILELLVLEQFLSILPGELRTWVQLHHPESGEEAVAVVEDFQRHLSGSEEVSAPAQKQEMHFEETTALGTTKESPPTSPLSGGSAPGAHLEPPYDPGTHHLPSGDFAQCTSPVPTLPQVGNSGDQAGATVLRMVRPQDTVAYEDLSVDYTQKKWKSLTLSQRALQWNMMPENHHSMASLGENMMKGSELTPKQEFFKGSESSNRTSGGLFGVVPGAAETGDVCEDTFKELEGQTSDEEGSRLENDFLEITDEDKKKSTKDRYDKYKEVGEHPPLSSSPVEHEGVLKGQKSYRCDECGKAFNRSSHLIGHQRIHTGEKPYECNECGKTFRQTSQLIVHLRTHTGEKPYECSECGKAYRHSSHLIQHQRLHNGEKPYKCNECAKAFTQSSRLIDHQRTHTGEKPYECNECGEAFIRSKSLARHQVLHTGKKPYKCNECGRAFCSNRNLIDHQRIHTGEKPYECSECGKAFSRSKCLIRHQSLHTGEKPYKCSECGKAFNQNSQLIEHERIHTGEKPFECSECGKAFGLSKCLIRHQRLHTGEKPYKCNECGKSFNQNSHLIIHQRIHTGEKPYECNECGKVFSYSSSLMVHQRTHTGEKPYKCNDCGKAFSDSSQLIVHQRVHTGEKPYECSECGKAFSQRSTFNHHQRTHTGEKSSGLAWSVS

SEQ ID NO: 804316 - protein, 753 aa, Homo sapiens; identical to SEQ ID NO: 804315

SEQ ID NO: 804317 - protein, 479 aa, Homo sapiens
MKGSELTPKQEFFKGSESSNRTSGGLFGVVPGAAETGDVCEDTFKELEGQTSDEEGSRLENDFLEITDEDKKKSTKDRYDKYKEVGEHPPLSSSPVEHEGVLKGQKSYRCDECGKAFNRSSHLIGHQRIHTGEKPYECNECGKTFRQTSQLIVHLRTHTGEKPYECSECGKAYRHSSHLIQHQRLHNGEKPYKCNECAKAFTQSSRLIDHQRTHTGEKPYECNECGEAFIRSKSLARHQVLHTGKKPYKCNECGRAFCSNRNLIDHQRIHTGEKPYECSECGKAFSRSKCLIRHQSLHTGEKPYKCSECGKAFNQNSQLIEHERIHTGEKPFECSECGKAFGLSKCLIRHQRLHTGEKPYKCNECGKSFNQNSHLIIHQRIHTGEKPYECNECGKVFSYSSSLMVHQRTHTGEKPYKCNDCGKAFSDSSQLIVHQRVHTGEKPYECSECGKAFSQRSTFNHHQRTHTGEKSSGLAWSVS

SEQ ID NO: 804318 - protein, 144 aa, Homo sapiens [sequence omitted]

SEQ ID NO: 804319 - protein, 276 aa, Homo sapiens
MTTAGRGNLGLIPRSTAFQKQEGRLTVKQEPANQTWGQGSSLQKNYPPVCEIFRLHFRQLCYHEMSGPQEALSRLRELCRWWLMPEVHTKEQILELLVLEQFLSILPGELRTWVQLHHPESGEEAVAVVEDFQRHLSGSEEVSAPAQKQEMHFEETTALGTTKESPPTSPLSGGSAPGAHLEPPYDPGTHHLPSGDFAQCTSPVPTLPQVGNSGDQAGATVLRMVRPQDTVAYEDLSVDYTQKKWKSLTLSQRALQWNMMPENHHSMASLGNDSVS

SEQ ID NO: 804320 - protein, 458 aa, Homo sapiens
RGTGGGRGQQRKLPAAGTGPAQAAYGGRRVGPRVTAGQLGPARSLRVGSPQHKMLSSFLSPQNGTWADTFSLLLALAVALYLGYYWACVLQRPRLVAGPQFLAFLEPHCSITTETFYPTLWCFEGRLQSIFQVLLQSQPLVLYQSDILQTPDGGQLLLDWAKQPDSSQDPDPTTQPIVLLLPGITGSSQETYVLHLVNQALRDGYQAVVFNNRGCRGEELRTHRAFCASNTEDLETVVNHIKHRYPQAPLLAVGISFGGILVLNHLAQARQAAGLVAALTLSACWDSFETTRSLETPLNSLLFNQPLTAGLCQLVERNRKVIEKVVDIDFVLQARTIRQFDERYTSVAFGYQDCVTYYKAASPRTKIDAIRIPVLYLSAADDPFSPVCALPIQAAQHSPYVALLITARGGHIGFLEGLLPWQHWYMSRLLHQYAKAIFQDPEGLPDLRALLPSEDRNS

SEQ ID NO: 804321 - protein, 206 aa, Homo sapiens
RGTGGGRGQQRKLPAAGTGPAQAAYGGRRVGPRVTAGQLGPARSLRVGSPQHKMLSSFLSPQNGTWADTFSLLLALAVALYLGYYWACVLQRPRLVAGPQFLAFLEPHCSITTETFYPTLWCFEGRLQSIFQVLLQSQPLVLYQSDILQTPDGGQLLLDWAKQPDSSQDPDPTTQPIVLLLPGITGSSQETYVLHLVNQALRDGYQ

SEQ ID NO: 804322 - protein, 218 aa, Homo sapiens
MAPGQTPSLCSWLLPLPSTWATTGHVCFSDILQTPDGGQLLLDWAKQPDSSQDPDPTTQPIVLLLPGITGSSQETYVLHLVNQALRDGYQAVVFNNRGCRGEELRTHRAFCASNTEDLETVVNHIKHRYPQAPLLAVGISFGGILVLNHLAQARQAAGLVAALTLSACWDSFETTRSLETPLNSLLFNQPLTAGLCQLVERNRKVIEKVVDIDFVLQV

SEQ ID NO: 804323 - protein, 218 aa, Homo sapiens; identical to SEQ ID NO: 804322

SEQ ID NO: 804324 - protein, 102 aa, Homo sapiens
MAPGQTPSLCSWLLPLPSTWATTGHVCFSDILQTPDGGQLLLDWAKQPDSSQDPDPTTQPIVLLLPGITGSSQETYVLHLVNQALRDGYQPTGLFVPAILKI

SEQ ID NO: 804325 - protein, 161 aa, Homo sapiens
TCTGRLWRAAGGTASYSRPTGASQEPEGRKPPTQDAELLPEPPEWHLGRHLLSALGSCRCPLLGLLLGMCASGGCGSTALASGFGCRGQLPDTGLGPWWELGWLGFPTGEICYHRMESRLCLSSASASHVIPMPAGPFGYRRVLLPIMWTSIWGKVGWKAS

SEQ ID NO: 804326 - protein, 338 aa, Homo sapiens
EGGRKKHLPARLVTEMDSKYQCVKLNDGHFMPVLGFGTYAPAEVPKSKALEATKLAIEAGFRHIDSAHLYNNEEQVGLAIRSKIADGSVKREDIFYTSKLWCNSHRPELVRPALERSLKNLQLDYVDLYLIHFPVSVKPGEEVIPKDENGKILFDTVDLCATWEAVEKCKDAGLAKSIGVSNFNRRQLEMILNKPGLKYKPVCNQVECHPYFNQRKLLDFCKSKDIVLVAYSALGSHREEPWVDPNSPVLLEDPVLCALAKKHKRTPALIALRYQLQRGVVVLAKSYNEQRIRQNVQVFEFQLTSEEMKAIDGLNRNVRYLTLDIFAGPPNYPFSDEY

SEQ ID NO: 804327 - protein, 338 aa, Homo sapiens; identical to SEQ ID NO: 804326

SEQ ID NO: 804328 - protein, 270 aa, Homo sapiens
EGGRKKHLPARLVTEMDSKYQCVKLNDGHFMPVLGFGTYAPAEVPKSKALEATKLAIEAGFRHIDSAHLYNNEEQVGLAIRSKIADGSVKREDIFYTSKLWCNSHRPELVRPALERSLKNLQLDYVDLYLIHFPVSVKPGEEVIPKDENGKILFDTVDLCATWEAVEKCKDAGLAKSIGVSNFNRRQLEMILNKPGLKYKPVCNQVECHPYFNQRKLLDFCKSKDIVLVAYSALGSHREEPWVDPNSPVLLEDPVLCALEGVWSLARASE

SEQ ID NO: 804329 - protein, 302 aa, Homo sapiens
EGGRKKHLPARLVTEMDSKYQCVKLNDGHFMPVLGFGTYAPAEVPKSKALEATKLAIEAGFRHIDSAHLYNNEEQVGLAIRSKIADGSVKREDIFYTSKLWCNSHRPELVRPALERSLKNLQLDYVDLYLIHFPVSVKPGEEVIPKDENGKILFDTVDLCATWEAVEKCKDAGLAKSIGVSNFNRRQLEMILNKPGLKYKPVCNQVECHPYFNQRKLLDFCKSKDIVLVAYSALGSHREEPWVDPNSPVLLEDPVLCALAKKHKRTPALIALRYQLQRGVVVLAKSYNEQRIRQNVQFCWPP

SEQ ID NO: 804330 - protein, 270 aa, Homo sapiens
EGGRKKHLPARLVTEMDSKYQCVKLNDGHFMPVLGFGTYAPAEVPKSKALEATKLAIEAGFRHIDSAHLYNNEEQVGLAIRSKIADGSVKREDIFYTSKLWCNSHRPELVRPALERSLKNLQLDYVDLYLIHFPVSVKPGEEVIPKDENGKILFDTVDLCATWEAVEKCKDAGLAKSIGVSNFNRRQLEMILNKPGLKYKPVCNQVECHPYFNQRKLLDFCKSMGGPELPGALGGPSPLCLGKKAQANPSPDCPALPATAWGCGPGQELQ

SEQ ID NO: 804331 - protein, 306 aa, Homo sapiens
EGGRKKHLPARLVTEMDSKYQCVKLNDGHFMPVLGFGTYAPAEVGLAIRSKIADGSVKREDIFYTSKLWCNSHRPELVRPALERSLKNLQLDYVDLYLIHFPVSVKPGEEVIPKDENGKILFDTVDLCATWEAVEKCKDAGLAKSIGVSNFNRRQLEMILNKPGLKYKPVCNQVECHPYFNQRKLLDFCKSKDIVLVAYSALGSHREEPWVDPNSPVLLEDPVLCALAKKHKRTPALIALRYQLQRGVVVLAKSYNEQRIRQNVQVFEFQLTSEEMKAIDGLNRNVRYLTLDIFAGPPNYPFSDEY

SEQ ID NO: 804332 - protein, 225 aa, Homo sapiens
EGGRKKHLPARLVTEMDSKYQCVKLNDGHFMPVLGFGTYAPAEVPKSKALEATKLAIEAGFRHIDSAHLYNNEEQVGLAIRSKIADGSVKREDIFYTSKLWCNSHRPELVRPALERSLKNLQLDYVDLYLIHFPVSVKPGEEVIPKDENGKILFDTVDLCATWEAVEKCKDAGLAKSIGVSNFNRRQLEMILNKPGLKYIPPADEQDGKASDNPKVTLILKSPKK

SEQ ID NO: 804333 - protein, 169 aa, Homo sapiens
EGGRKKHLPARLVTEMDSKYQCVKLNDGHFMPVLGFGTYAPAEVPKSKALEATKLAIEAGFRHIDSAHLYNNEEQVGLAIRSKIADGSVKREDIFYTSKLWCNSHRPELVRPALERSLKNLQLDYVDLYLIHFPVSVKPGEEVIPKDENGKILFDTVDLCATWEVSVWR

SEQ ID NO: 804334 - protein, 169 aa, Homo sapiens; identical to SEQ ID NO: 804333

SEQ ID NO: 804335 - protein, 175 aa, Homo sapiens
MAVEKCKDAGLAKSIGVSNFNRRQLEMILNKPGLKYKPVCNQVECHPYFNQRKLLDFCKSKDIVLVAYSALGSHREEPWVDPNSPVLLEDPVLCALAKKHKRTPALIALRYQLQRGVVVLAKSYNEQRIRQNVQVFEFQLTSEEMKAIDGLNRNVRYLTLDIFAGPPNYPFSDEY

SEQ ID NO: 804336 - protein, 198 aa, Homo sapiens
EGGRKKHLPARLVTEMDSKYQCVKLNDGHFMPVLGFGTYAPAEVPKSKALEATKLAIEAGFRHIDSAHLYNNEEQVGLAIRSKIADGSVKREDIFYTSKLWCNSHRPELVRPALERSLKNLQLDYVDLYLIHFPVSVKPGEEVIPKDENGKILFDTVDLCATWEPWRSIKRGEYNLPVEYNPAVGYNLPLEYNLPGIL

SEQ ID NO: 804337 - protein, 149 aa, Homo sapiens [sequence omitted]

SEQ ID NO: 804338 - protein, 456 aa, Homo sapiens
SGGVRSRRAARRDGTCGPASWSVPGSPATGSRPRHRLRKMALSAQQIPRWFNSVKLRSLINAAQLTKRFTRPARTLLHGFSAQPQISSDNCFLQWGFKTYRTSSLWNSSQSTSSSSQENNSAQSSLLPSMNEQSQKTQNISSFDSELFLEELDELPPLSPMQPISEEEAIQIIADPPLPPASFTLRDYVDHSETLQKLVLLGVDLSKIEKHPEAANLLLRLDFEKDIKQMLLFLKDVGIEDNQLGAFLTKNHAIFSEDLENLKTRVAYLHSKNFSKADVAQMVRKAPFLLNFSVERLDNRLGFFQKELELSVKKTRDLVVRLPRLLTGSLEPVKENMKVYRLELGFKHNEIQHMITRIPKMLTANKMKLTETFDFVHNVMSIPHHIIVKFPQVFNTRLFKVKERHLFLTYLGRAQYDPAKPNYISLDKLVSIPDEIFCEEIAKASVQDFEKFLKTL

SEQ ID NO: 804339 - protein, 296 aa, Homo sapiens
MQPISEEEAIQIIADPPLPPASFTLRDYVDHSETLQKLVLLGVDLSKIEKHPEAANLLLRLDFEKDIKQMLLFLKDVGIEDNQLGAFLTKNHAIFSEDLENLKTRVAYLHSKNFSKADVAQMVRKAPFLLNFSVERLDNRLGFFQKELELSVKKTRDLVVRLPRLLTGSLEPVKENMKVYRLELGFKHNEIQHMITRIPKMLTANKMKLTETFDFVHNVMSIPHHIIVKFPQVFNTRLFKVKERHLFLTYLGRAQYDPAKPNYISLDKLVSIPDEIFCEEIAKASVQDFEKFLKTL

SEQ ID NO: 804340 - protein, 402 aa, Homo sapiens
SGGVRSRRAARRDGTCGPASWSVPGSPATGSRPRHRLRKMALSAQQIPRWFNSVKLRSLINAAQLTKRFTRPARTLLHGFSAQPQISSDNCFLQWGFKTYRTSSLWNSSQSTSSSSQENNSAQSSLLPSMNEQSQKTQNISSFDSELFLEELDELPPLSPMQPISEEEAIQIIADPPLPPASFTLRDYVDHSETLQKLVLLGVDLSKIEKHPEAANLLLRLDFEKDIKQMLLFLKDVGIEDNQLGAFLTKNHAIFSEDLENLKTRVAYLHSKNFSKADVAQMVRKAPFLLNFSVERLDNRLGFFQKELELSVKKTRDLVVRLPRLLTGSLEPVKENMKVFNTRLFKVKERHLFLTYLGRAQYDPAKPNYISLDKLVSIPDEIFCEEIAKASVQDFEKFLKTL

SEQ ID NO: 804341 - protein, 4367 aa, Homo sapiens
MPSESFCLAAQARLDSKWLKTDIQLAFTRDGLCGLWNEMVKDGEIVYTGTESTQNGELPPRKDDSVEPSGTKKEDLNDKEKKDEEETPAPIYRAKSILDSWVWGKQPDVNELKECLSVLVKEQQALAVQSATTTLSALRLKQRLVILERYFIALNRTVFQENVKVKWKSSGISLPPVDKKSSRPAGKGVEGLARVGSRAALSFAFAFLRRAWRSGEDADLCSELLQESLDALRALPEASLFDESTVSSVWLEVVERATRFLRSVVTGDVHGTPATKGPGSIPLQDQHLALAILLELAVQRGTLSQMLSAILLLLQLWDSGAQETDNERSAQGTSAPLLPLLQRFQSIICRKDAPHSEGDMHLLSGPLSPNESFLRYLTLPQDNELAIDLRQTAVVVMAHLDRLATPCMPPLCSSPTSHKGSLQEVIGWGLIGWKYYANVIGPIQCEGLANLGVTQIACAEKRFLILSRNGRVYTQAYNSDTLAPQLVQGLASRNIVKIAAHSDGHHYLALAATGEVYSWGCGDGGRLGHGDTVPLEEPKVISAFSGKQAGKHVVHIACGSTYSAAITAEGELYTWGRGNYGRLGHGSSEDEAIPMLVAGLKGLKVIDVACGSGDAQTLAVTENGQVWSWGDGDYGKLGRGGSDGCKTPKLIEKLQDLDVVKVRCGSQFSIALTKDGQVYSWGKGDNQRLGHGTEEHVRYPKLLEGLQGKKVIDVAAGSTHCLALTEDSEVHSWGSNDQCQHFDTLRVTKPEPAALPGLDTKHIVGIACGPAQSFAWSSCSEWSIGLRVPFVVDICSMTFEQLDLLLRQVSEGMDGSADWPPPQEKECVAVATLNLLRLQLHAAISHQVDPEFLGLGLGSILLNSLKQTVVTLASSAGVLSTVQSAAQAVLQSGWSVLLPTAEERARALSALLPCAVSGNEVNISPGRRFMIDLLVGSLMADGGLESALHAAITAEIQDIEAKKEAQKEKEIDEQEANASTFHRSRTPLDKDLINTGICESSGKQCLPLVQLIQQLLRNIASQTVARLKDVARRISSCLDFEQHSRERSASLDLLLRFQRLLISKLYPGESIGQTSDISSPELMGVGSLLKKYTALLCTHIGDILPVAASIASTSWRHFAEVAYIVEGDFTGVLLPELVVSIVLLLSKNADLMQEAGAVPLLGGLLEHLDRFNHLAPGKERDDHEELAWPGIMESFFTGQNCRNNEEVTLIRKADLENHNKDGGFWTVIDGKVYDIKDFQTQSLTGNSILAQFAGEDPVVALEAALQFEDTRESMHAFCVGQYLEPDQEIVTIPDLGSLSSPLIDTERNLGLLLGLHASYLAMSTPLSPVEIECAKWLQSSIFSGGLQTSQIHYRYNEEKDEDHCSSPGGTPASKSRLCSHRRALGDHSQAFLQAIADNNIQDHNVKDFLCQIERYCRQCHLTTPIMFPPEHPVEEVGRLLLCCLLKHEDLGHVALSLVHAGALGIEQVKHRTLPKSVVDVCRVVYQAKCSLIKTHQEQGRSYKEVCAPVIERLRFLFNELRPAVCNDLSIMSKFKLLSSLPRWRRIAQKIIRERRKKRVPKKPESMDDEEKIGNEESDLEEACILPHSPINVDKRPIAIKSPKDKWQPLLSTVTGVHKYKWLKQNVQGLYPQSPLLSTIAEFALKEEPVDVEKMRKCLLKQLERAEVRLEGIDTILKLASKNFLLPSVQYAMFCGWQRLIPEGIDIGEPLTDCLKDVDLIPPFNRMLLEVTFGKLYAWAVQNIRNVLMDASAKFKELGIQPVPLQTITNENPSGPSLGTIPQARFLLVMLSMLTLQHGANNLDLLLNSGMLALTQTALRLIGPSCDNVEEDMNASAQGASATVLEETRKETAPVQLPVSGPELAAMMKIGTRVMRGVDWKWGDQDGPPPGLGRVIGELGEDGWIRVQWDTGSTNSYRMGKEGKYDLKLAELPAAAQPSAEDSDTEDDSEAEQTERNIHPTAMMFTSTINLLQTLCLSAGVHAEIMQSEATKTLCGLLRMLVESGTTDKTSSPNRLVYREQHRSWCTLGFVRSIALTPQVCGALSSPQWITLLMKVVEGHAPFTATSLQRQILAVHLLQAVLPSWDKTERARDMKCLVEKLFDFLGSLLTTCSSDVPLLRESTLRRRRVRPQASLTATHSSTLAEEVVALLRTLHSLTQWNGLINKYINSQLRSITHSFVGRPSEGAQLEDYFPDSENPEVGGLMAVLAVIGGIDGRLRLGGQVMHDEFGEGTVTRITPKGKITVQFSDMRTCRVCPLNQLKPLPAVAFNVNNLPFTEPMLSVWAQLVNLAGSKLEKHKIKKSTKQAFAGQVDLDLLRCQQLKLYILKAGRALLSHQDKLRQILSQPAVQETGTVHTDDGAVVSPDLGDMSPEGPQPPMILLQQLLASATQPSPVKAIFDKQELEAAALAVCQCLAVESTHPSSPGFEDCSSSEATTPVAVQHIRPARVKRRKQSPVPALPIVVQLMEMGFSRRNIEFALKSLTGASGNASSLPGVEALVGWLLDHSDIQVTELSDADTVSDEYSDEEVVEDVDDAAYSMSTGAVVTESQTYKKRADFLSNDDYAVYVRENIQVGMMVRCCRAYEEVCEGDVGKVIKLDRDGLHDLNVQCDWQQKGGTYWVRYIHVELIGYPPPSSSSHIKIGDKVRVKASVTTPKYKWGSVTHQSVGVVKAFSANGKDIIVDFPQQSHWTGLLSEMELVPSIHPGVTCDGCQMFPINGSRFKCRNCDDFDFCETCFKTKKHNTRHTFGRINEPGQSAVFCGRSGKQLKRCHSSQPGMLLDSWSRMVKSLNVSSSVNQASRLIDGSEPCWQSSGSQGKHWIRLEIFPDVLVHRLKMIVDPADSSYMPSLVVVSGGNSLNNLIELKTININPSDTTVPLLNDYTEYHRYIEIAIKQCRSSGIDCKIHGLILLGRIRAEEEDLAAVPFLASDNEEEEDEKGNSGSLIRKKAAGLESAATIRTKVFVWGLNDKDQLGGLKGSKIKVPSFSETLSALNVVQVAGGSKSLFAVTVEGKVYACGEATNGRLGLGISSGTVPIPRQITALSSYVVKKVAVHSGGRHATALTVDGKVFSWGEGDDGKLGHFSRMNCDKPRLIEALKTKRIRDIACGSSHSAALTSSGELYTWGLGEYGRLGHGDNTTQLKPKMVKVLLGHRVIQVACGSRDAQTLALTDEGLVFSWGDGDFGKLGRGGSEGCNIPQNIERLNGQGVCQIECGAQFSLALTKSGVVWTWGKGDYFRLGHGSDVHVRKPQVVEGLRGKKIVHVAVGALHCLAVTDSGQVYAWGDNDHGQQGNGTTTVNRKPTLVQGLEGQKITRVACGSSHSVAWTTVDVATPSVHEPVLFQTARDPLGASYLGVPSDADSSAASNKISGASNSKPNRPSLAKILLSLDGNLAKQQALSHILTALQIMYARDAVVGALMPAAMIAPVECPSFSSAAPSDASAMASPMNGEECMLAVDIEDRLSPNPWQEKREIVSSEDAVTPSAVTPSAPSASARPFIPVTDDLGAASIIAETMTKTKEDVESQNKAAGPEPQALDEFTSLLIADDTRVVVDLLKLSVCSRAGDRGRDVLSAVLSGMGTAYPQVADMLLELCVTELEDVATDSQSGRLSSQPVVVESSHPYTDDTSTSGTVKIPGAEGLRVEFDRQCSTERRHDPLTVMDGVNRIVSVRSGREWSDWSSELRIPGDELKWKFISDGSVNGWGWRFTVYPIMPAAGPKELLSDRCVLSCPSMDLVTCLLDFRLNLASNRSIVPRLAASLAACAQLSALAASHRMWALQRLRKLLTTEFGQSININRLLGENDGETRALSFTGSALAALVKGLPEALQRQFEYEDPIVRGGKQLLHSPFFKVLVALACDLELDTLPCCAETHKWAWFRRYCMASRVAVALDKRTPLPRLFLDEVAKKIRELMADSENMDVLHESHDIFKREQDEQLVQWMNRRPDDWTLSAGGSGTIYGWGHNHRGQLGGIEGAKVKVPTPCEALATLRPVQLIGGEQTLFAVTADGKLYATGYGAGGRLGIGGTESVSTPTLLESIQHVFIKKVAVNSGGKHCLALSSEGEVYSWGEAEDGKLGHGNRSPCDRPRVIESLRGIEVVDVAAGGAHSACVTAAGDLYTWGKGRYGRLGHSDSEDQLKPKLVEALQGHRVVDIACGSGDAQTLCLTDDDTVWSWGDGDYGKLGRGGSDGCKVPMKIDSLTGLGVVKVECGSQFSVALTKSGAVYTWGKGDYHRLGHGSDDHVRRPRQVQGLQGKKVIAIATGSLHCVCCTEDGEVYTWGDNDEGQLGDGTTNAIQRPRLVAALQGKKVNRVACGSAHTLAWSTSKPASAGKLPAQVPMEYNHLQEIPIIALRNRLLLLHHLSELFCPCIPMF

SEQ ID NO: 804342 - protein, 109 aa, Homo sapiens
SGRRLSQRLLGGCVRAPARRGGRALRVRPETWEEAGEKMPSESFCLAAQARLDSKWLKTDIQVLSVGRYESPVFRAVLRGRAQWLTPVIPAVWEAEAGGCPEVRSWRPA

SEQ ID NO: 804343 - protein, 118 aa, Homo sapiens
SGRRLSQRLLGGCVRAPARRGGRALRVRPETWEEAGEKMPSESFCLAAQARLDSKWLKTDIQLAFTRDGLCGLWNEMVKDGEIVYTGTESTQNGELPPRKVETGFHRVSQDGLELLTS

SEQ ID NO: 804344 - protein, 4217 aa, Homo sapiens
MHLYFLGQVWSWGDGDYGKLGRGGSDGCKTPKLIEKLQDLDVVKVRCGSQFSIALTKDGQVYSWGKGDNQRLGHGTEEHVRYPKLLEGLQGKKVIDVAAGSTHCLALTEDSEVHSWGSNDQCQHFDTLRVTKPEPAALPGLDTKHIVGIACGPAQSFAWSSCSEWSIGLRVPFVVDICSMTFEQLDLLLRQVSEGMDGSADWPPPQEKECVAVATLNLLRLQLHAAISHQVDPEFLGLGLGSILLNSLKQTVVTLASSAGVLSTVQSAAQAVLQSGWSVLLPTAEERARALSALLPCAVSGNEVNISPGRRFMIDLLVGSLMADGGLESALHAAITAEIQDIEAKKEAQKEKEIDEQEANASTFHRSRTPLDKDLINTGICESSGKQCLPLVQLIQQLLRNIASQTVARLKDVARRISSCLDFEQHSRERSASLDLLLRFQRLLISKLYPGESIGQTSDISSPELMGVGSLLKKYTALLCTHIGDILPVAASIASTSWRHFAEVAYIVEGDFTGVLLPELVVSIVLLLSKNADLMQEAGAVPLLGGLLEHLDRFNHLAPGKERDDHEELAWPGIMESFFTGQNCRNNEEVTLIRKADLENHNKDGGFWTVIDGKVYDIKDFQTQSLTGNSILAQFAGEDPVVALEAALQFEDTRESMHAFCVGQYLEPDQEIVTIPDLGSLSSPLIDTERNLGLLLGLHASYLAMSTPLSPVEIECAKWLQSSIFSGGLQTSQIHYRYNEEKDEDHCSSPGGTPASKSRLCSHRRALGDHSQAFLQAIADNNIQDHNVKDFLCQIERYCRQCHLTTPIMFPPEHPVEEVGRLLLCCLLKHEDLGHVALSLVHAGALGIEQVKHRTLPKSVVDVCRVVYQAKCSLIKTHQEQGRSYKEVCAPVIERLRFLFNELRPAVCNDLSIMSKFKLLSSLPRWRRIAQKIIRERRKKRVPKKPESMDDEEKIGNEESDLEEACILPHSPINVDKRPIAIKSPKDKWQPLLSTVTGVHKYKWLKQNVQGLYPQSPLLSTIAEFALKEEPVDVEKMRKCLLKQLERAEVRLEGIDTILKLASKNFLLPSVQYAMFCGWQRLIPEGIDIGEPLTDCLKDVDLIPPFNRMLLEVTFGKLYAWAVQNIRNVLMDASAKFKELGIQPVPLQTITNENPSGPSLGTIPQARFLLVMLSMLTLQHGANNLDLLLNSGMLALTQTALRLIGPSCDNVEEDMNASAQGASATVLEETRKETAPVQLPVSGPELAAMMKIGTRVMRGVDWKWGDQDGPPPGLGRVIGELGEDGWIRVQWDTGSTNSYRMGKEGKYDLKLAELPAAAQPSAEDSDTEDDSEAEQTERNIHPTAMMFTSTINLLQTLCLSAGVHAEIMQSEATKTLCGLLRMLVESGTTDKTSSPNRLVYREQHRSWCTLGFVRSIALTPQVCGALSSPQWITLLMKVVEGHAPFTATSLQRQILAVHLLQAVLPSWDKTERARDMKCLVEKLFDFLGSLLTTCSSDVPLLRESTLRRRRVRPQASLTATHSSTLAEEVVALLRTLHSLTQWNGLINKYINSQLRSITHSFVGRPSEGAQLEDYFPDSENPEVGGLMAVLAVIGGIDGRLRLGGQVMHDEFGEGTVTRITPKGKITVQFSDMRTCRVCPLNQLKPLPAVAFNVNNLPFTEPMLSVWAQLVNLAGSKLEKHKIKKSTKQAFAGQVDLDLLRCQQLKLYILKAGRALLSHQDKLRQILSQPAVQETGTVHTDDGAVVSPDLGDMSPEGPQPPMILLQQLLASATQPSPVKAIFDKQELEAAALAVCQCLAVESTHPSSPGFEDCSSSEATTPVAVQHIRPARVKRRKQSPVPALPIVVQLMEMGFSRRNIEFALKSLTGASGNASSLPGVEALVGWLLDHSDIQVTELSDADTVSDEYSDEEVVEDVDDAAYSMSTGAVVTESQTYKKRADFLSNDDYAVYVRENIQVGMMVRCCRAYEEVCEGDVGKVIKLDRDGLHDLNVQCDWQQKGGTYWVRYIHVELIGYPPPSSSSHIKIGDKVRVKASVTTPKYKWGSVTHQSVGVVKAFSANGKDIIVDFPQQSHWTGLLSEMELVPSIHPGVTCDGCQMFPINGSRFKCRNCDDFDFCETCFKTKKHNTRHTFGRINEPGQSAVFCGRSGKQLKRCHSSQPGMLLDSWSRMVKSLNVSSSVNQASRLIDGSEPCWQSSGSQGKHWIRLEIFPDVLVHRLKMIVDPADSSYMPSLVVVSGGNSLNNLIELKTININPSDTTVPLLNDYTEYHRYIEIAIKQCRSSGIDCKIHGLILLGRIRAEEEDLAAVPFLASDNEEEEDEKGNSGSLIRKKAAGLESAATIRTKVFVWGLNDKDQLGGLKGSKIKVPSFSETLSALNVVQVAGGSKSLFAVTVEGKVYACGEATNGRLGLGISSGTVPIPRQITALSSYVVKKVAVHSGGRHATALTVDGKVFSWGEGDDGKLGHFSRMNCDKPRLIEALKTKRIRDIACGSSHSAALTSSGELYTWGLGEYGRLGHGDNTTQLKPKMVKVLLGHRVIQVACGSRDAQTLALTDEGLVFSWGDGDFGKLGRGGSEGCNIPQNIERLNGQGVCQIECGAQFSLALTKSGVVWTWGKGDYFRLGHGSDVHVRKPQVVEGLRGKKIVHVAVGALHCLAVTDSGQVYAWGDNDHGQQGNGTTTVNRKPTLVQGLEGQKITRVACGSSHSVAWTTVDVATPSVHEPVLFQTARDPLGASYLGVPSDADSSAASNKISGASNSKPNRPSLAKILLSLDGNLAKQQALSHILTALQIMYARDAVVGALMPAAMIAPVECPSFSSAAPSDASAMASPMNGEECMLAVDIEDRLSPNPWQEKREIVSSEDAVTPSAVTPSAPSASARPFIPVTDDLGAASIIAETMTKTKEDVESQNKAAGPEPQALDEFTSLLIADDTRVVVDLLKLSVCSRAGDRGRDVLSAVLSGMGTAYPQVADMLLELCVTELEDVATDSQSGRLSSQPVVVESSHPYTDDTSTSGTVKIPGAEGLRVEFDRQCSTERRHDPLTVMDGVNRIVSVRSGREWSDWSSELRIPGDELKWKFISDGSVNGWGWRFTVYPIMPAAGPKELLSDRCVLSCPSMDLVTCLLDFRLNLASNRSIVPRLAASLAACAQLSALAASHRMWALQRLRKLLTTEFGQSININRLLGENDGETRALSFTGSALAALVKGLPEALQRQFEYEDPIVRGGKQLLHSPFFKVLVALACDLELDTLPCCAETHKWAWFRRYCMASRVAVALDKRTPLPRLFLDEVAKKIRELMADSENMDVLHESHDIFKREQDEQLVQWMNRRPDDWTLSAGGSGTIYGWGHNHRGQLGGIEGAKVKVPTPCEALATLRPVQLIGGEQTLFAVTADGKLYATGYGAGGRLGIGGTESVSTPTLLESIQHVFIKKVAVNSGGKHCLALSSEGEVYSWGEAEDGKLGHGNRSPCDRPRVIESLRGIEVVDVAAGGAHSACVTAAGDLYTWGKGRYGRLGHSDSEDQLKPKLVEALQGHRVVDIACGSGDAQTLCLTDDDTVWSWGDGDYGKLGRGGSDGCKVPMKIDSLTGLGVVKVECGSQFSVALTKSGAVYTWGKGDYHRLGHGSDDHVRRPRQVQGLQGKKVIAIATGSLHCVCCTEDGEVYTWGDNDEGQLGDGTTNAIQRPRLVAALQGKKVNRVACGSAHTLAWSTSKPASAGKLPAQVPMEYNHLQEIPIIALRNRLLLLHHLSELFCPCIPMFDLEGSLDETGLGPSVGFDTLRGILISQGKEAAFRKVVQATMVRDRQHGPVVELNRIQVKRSRSKGGLAGPDGTKSVFGQMCAKMSSFGPDSLLLPHRVWKVKFVGESVDDCGGGYSESIAEICEELQNGLTPLLIVTPNGRDESGANRDCYLLSPAARAPVHSSMFRFLGVLLGIAIRTGSPLSLNLAEPVWKQLAGMSLTIADLSEVDKDFIPGLMYIRDNEATSEEFEAMSLPFTVPSASGQDIQLSSKHTHITLDNRAEYVRLAINYRLHEFDEQVAAVREGMARVVPVPLLSLFTGYELETMVCGSPDIPLHLLKSVATYKGIEPSASLIQWFWEVMESFSNTERSLFLRFVWGRTRLPRTIADFRGRDFVIQVLDKYNPPDHFLPESYTCFFLLKLPRYSCKQVLEEKLKYAIHFCKSIDTDDYARIALTGEPAADDSSDDSDNEDVDSFASDSTQDYLTGH

SEQ ID NO: 804345 - protein, 1796 aa, Homo sapiens
MHLYFLGQVWSWGDGDYGKLGRGGSDGCKTPKLIEKLQDLDVVKVRCGSQFSIALTKDGQVYSWGKGDNQRLGHGTEEHVRYPKLLEGLQGKKVIDVAAGSTHCLALTEDSEVHSWGSNDQCQHFDTLRVTKPEPAALPGLDTKHIVGIACGPAQSFAWSSCSEWSIGLRVPFVVDICSMTFEQLDLLLRQVSEGMDGSADWPPPQEKECVAVATLNLLRLQLHAAISHQVDPEFLGLGLGSILLNSLKQTVVTLASSAGVLSTVQSAAQAVLQSGWSVLLPTAEERARALSALLPCAVSGNEVNISPGRRFMIDLLVGSLMADGGLESALHAAITAEIQDIEAKKEAQKEKEIDEQEANASTFHRSRTPLDKDLINTGICESSGKQCLPLVQLIQQLLRNIASQTVARLKDVARRISSCLDFEQHSRERSASLDLLLRFQRLLISKLYPGESIGQTSDISSPELMGVGSLLKKYTALLCTHIGDILPVAASIASTSWRHFAEVAYIVEGDFTGVLLPELVVSIVLLLSKNADLMQEAGAVPLLGGLLEHLDRFNHLAPGKERDDHEELAWPGIMESFFTGQNCRNNEEVTLIRKADLENHNKDGGFWTVIDGKVYDIKDFQTQSLTGNSILAQFAGEDPVVALEAALQFEDTRESMHAFCVGQYLEPDQEIVTIPDLGSLSSPLIDTERNLGLLLGLHASYLAMSTPLSPVEIECAKWLQSSIFSGGLQTSQIHYRYNEEKDEDHCSSPGGTPASKSRLCSHRRALGDHSQAFLQAIADNNIQDHNVKDFLCQIERYCRQCHLTTPIMFPPEHPVEEVGRLLLCCLLKHEDLGHVALSLVHAGALGIEQVKHRTLPKSVVDVCRVVYQAKCSLIKTHQEQGRSYKEVCAPVIERLRFLFNELRPAVCNDLSIMSKFKLLSSLPRWRRIAQKIIRERRKKRVPKKPESMDDEEKIGNEESDLEEACILPHSPINVDKRPIAIKSPKDKWQPLLSTVTGVHKYKWLKQNVQGLYPQSPLLSTIAEFALKEEPVDVEKMRKCLLKQLERAEVRLEGIDTILKLASKNFLLPSVQYAMFCGWQRLIPEGIDIGEPLTDCLKDVDLIPPFNRMLLEVTFGKLYAWAVQNIRNVLMDASAKFKELGIQPVPLQTITNENPSGPSLGTIPQARFLLVMLSMLTLQHGANNLDLLLNSGMLALTQTALRLIGPSCDNVEEDMNASAQGASATVLEETRKETAPVQLPVSGPELAAMMKIGTRVMRGVDWKWGDQDGPPPGLGRVIGELGEDGWIRVQWDTGSTNSYRMGKEGKYDLKLAELPAAAQPSAEDSDTEDDSEAEQTERNIHPTAMMFTSTINLLQTLCLSAGVHAEIMQSEATKTLCGLLRMLVESGTTDKTSSPNRLVYREQHRSWCTLGFVRSIALTPQVCGALSSPQWITLLMKVVEGHAPFTATSLQRQILAVHLLQAVLPSWDKTERARDMKCLVEKLFDFLGSLLTTCSSDVPLLRESTLRRRRVRPQASLTATHSSTLAEEVVALLRTLHSLTQWNGLINKYINSQLRSITHSFVGRPSEGAQLEDYFPDSENPEVGGLMAVLAVIGGIDGRLRLGGQVMHDEFGEGTVTRITPKGKITVQFSDMRTCRVCPLNQLKPLPAVAFNVNNLPFTEPMLSVWAQLVNLAGSKLEKHKIKKSTKQAFAGQVDLDLLRCQQLKLYILKAGRALLSHQDKLRQILSQPAVQETGTVHTDDGAVVSPDLGDMSPEGPQPPMILLQQLLASATQPSPVKAIFDKQELEVQPCSLDSF

SEQ ID NO: 804346 - protein, 4366 aa, Homo sapiens
MVKDGEIVYTGTESTQNGELPPRKDDSVEPSGTKKEDLNDKEKKDEEETPAPIYRAKSILDSWVWGKQPDVNELKECLSVLVKEQQALAVQSATTTLSALRLKQRLVILERYFIALNRTVFQENVKVKWKSSGISLPPVDKKSSRPAGKGVEGLARVGSRAALSFAFAFLRRAWRSGEDADLCSELLQESLDALRALPEASLFDESTVSSVWLEVVERATRFLRSVVTGDVHGTPATKGPGSIPLQDQHLALAILLELAVQRGTLSQMLSAILLLLQLWDSGAQETDNERSAQGTSAPLLPLLQRFQSIICRKDAPHSEGDMHLLSGPLSPNESFLRYLTLPQDNELAIDLRQTAVVVMAHLDRLATPCMPPLCSSPTSHKGSLQEVIGWGLIGWKYYANVIGPIQCEGLANLGVTQIACAEKRFLILSRNGRVYTQAYNSDTLAPQLVQGLASRNIVKIAAHSDGHHYLALAATGEVYSWGCGDGGRLGHGDTVPLEEPKVISAFSGKQAGKHVVHIACGSTYSAAITAEGELYTWGRGNYGRLGHGSSEDEAIPMLVAGLKGLKVIDVACGSGDAQTLAVTENGQVWSWGDGDYGKLGRGGSDGCKTPKLIEKLQDLDVVKVRCGSQFSIALTKDGQVYSWGKGDNQRLGHGTEEHVRYPKLLEGLQGKKVIDVAAGSTHCLALTEDSEVHSWGSNDQCQHFDTLRVTKPEPAALPGLDTKHIVGIACGPAQSFAWSSCSEWSIGLRVPFVVDICSMTFEQLDLLLRQVSEGMDGSADWPPPQEKECVAVATLNLLRLQLHAAISHQVDPEFLGLGLGSILLNSLKQTVVTLASSAGVLSTVQSAAQAVLQSGWSVLLPTAEERARALSALLPCAVSGNEVNISPGRRFMIDLLVGSLMADGGLESALHAAITAEIQDIEAKKEAQKEKEIDEQEANASTFHRSRTPLDKDLINTGICESSGKQCLPLVQLIQQLLRNIASQTVARLKDVARRISSCLDFEQHSRERSASLDLLLRFQRLLISKLYPGESIGQTSDISSPELMGVGSLLKKYTALLCTHIGDILPVAASIASTSWRHFAEVAYIVEGDFTGVLLPELVVSIVLLLSKNADLMQEAGAVPLLGGLLEHLDRFNHLAPGKERDDHEELAWPGIMESFFTGQNCRNNEEVTLIRKADLENHNKDGGFWTVIDGKVYDIKDFQTQSLTGNSILAQFAGEDPVVALEAALQFEDTRESMHAFCVGQYLEPDQEIVTIPDLGSLSSPLIDTERNLGLLLGLHASYLAMSTPLSPVEIECAKWLQSSIFSGGLQTSQIHYRYNEEKDEDHCSSPGGTPASKSRLCSHRRALGDHSQAFLQAIADNNIQDHNVKDFLCQIERYCRQCHLTTPIMFPPEHPVEEVGRLLLCCLLKHEDLGHVALSLVHAGALGIEQVKHRTLPKSVVDVCRVVYQAKCSLIKTHQEQGRSYKEVCAPVIERLRFLFNELRPAVCNDLSIMSKFKLLSSLPRWRRIAQKIIRERRKKRVPKKPESMDDEEKIGNEESDLEEACILPHSPINVDKRPIAIKSPKDKWQPLLSTVTGVHKYKWLKQNVQGLYPQSPLLSTIAEFALKEEPVDVEKMRKCLLKQLERAEVRLEGIDTILKLASKNFLLPSVQYAMFCGWQRLIPEGIDIGEPLTDCLKDVDLIPPFNRMLLEVTFGKLYAWAVQNIRNVLMDASAKFKELGIQPVPLQTITNENPSGPSLGTIPQARFLLVMLSMLTLQHGANNLDLLLNSGMLALTQTALRLIGPSCDNVEEDMNASAQGASATVLEETRKETAPVQLPVSGPELAAMMKIGTRVMRGVDWKWGDQDGPPPGLGRVIGELGEDGWIRVQWDTGSTNSYRMGKEGKYDLKLAELPAAAQPSAEDSDTEDDSEAEQTERNIHPTAMMFTSTINLLQTLCLSAGVHAEIMQSEATKTLCGLLRMLVESGTTDKTSSPNRLVYREQHRSWCTLGFVRSIALTPQVCGALSSPQWITLLMKVVEGHAPFTATSLQRQILAVHLLQAVLPSWDKTERARDMKCLVEKLFDFLGSLLTTCSSDVPLLRESTLRRRRVRPQASLTATHSSTLAEEVVALLRTLHSLTQWNGLINKYINSQLRSITHSFVGRPSEGAQLEDYFPDSENPEVGGLMAVLAVIGGIDGRLRLGGQVMHDEFGEGTVTRITPKGKITVQFSDMRTCRVCPLNQLKPLPAVAFNVNNLPFTEPMLSVWAQLVNLAGSKLEKHKIKKSTKQAFAGQVDLDLLRCQQLKLYILKAGRALLSHQDKLRQILSQPAVQETGTVHTDDGAVVSPDLGDMSPEGPQPPMILLQQLLASATQPSPVKAIFDKQELEAAALAVCQCLAVESTHPSSPGFEDCSSSEATTPVAVQHIRPARVKRRKQSPVPALPIVVQLMEMGFSRRNIEFALKSLTGASGNASSLPGVEALVGWLLDHSDIQVTELSDADTVSDEYSDEEVVEDVDDAAYSMSTGAVVTESQTYKKRADFLSNDDYAVYVRENIQVGMMVRCCRAYEEVCEGDVGKVIKLDRDGLHDLNVQCDWQQKGGTYWVRYIHVELIGYPPPSSSSHIKIGDKVRVKASVTTPKYKWGSVTHQSVGVVKAFSANGKDIIVDFPQQSHWTGLLSEMELVPSIHPGVTCDGCQMFPINGSRFKCRNCDDFDFCETCFKTKKHNTRHTFGRINEPGQSAVFCGRSGKQLKRCHSSQPGMLLDSWSRMVKSLNVSSSVNQASRLIDGSEPCWQSSGSQGKHWIRLEIFPDVLVHRLKMIVDPADSSYMPSLVVVSGGNSLNNLIELKTININPSDTTVPLLNDYTEYHRYIEIAIKQCRSSGIDCKIHGLILLGRIRAEEEDLAAVPFLASDNEEEEDEKGNSGSLIRKKAAGLESAATIRTKVFVWGLNDKDQLGGLKGSKIKVPSFSETLSALNVVQVAGGSKSLFAVTVEGKVYACGEATNGRLGLGISSGTVPIPRQITALSSYVVKKVAVHSGGRHATALTVDGKVFSWGEGDDGKLGHFSRMNCDKPRLIEALKTKRIRDIACGSSHSAALTSSGELYTWGLGEYGRLGHGDNTTQLKPKMVKVLLGHRVIQVACGSRDAQTLALTDEGLVFSWGDGDFGKLGRGGSEGCNIPQNIERLNGQGVCQIECGAQFSLALTKSGVVWTWGKGDYFRLGHGSDVHVRKPQVVEGLRGKKIVHVAVGALHCLAVTDSGQVYAWGDNDHGQQGNGTTTVNRKPTLVQGLEGQKITRVACGSSHSVAWTTVDVATPSVHEPVLFQTARDPLGASYLGVPSDADSSAASNKISGASNSKPNRPSLAKILLSLDGNLAKQQALSHILTALQIMYARDAVVGALMPAAMIAPVECPSFSSAAPSDASAMASPMNGEECMLAVDIEDRLSPNPWQEKREIVSSEDAVTPSAVTPSAPSASARPFIPVTDDLGAASIIAETMTKTKEDVESQNKAAGPEPQALDEFTSLLIADDTRVVVDLLKLSVCSRAGDRGRDVLSAVLSGMGTAYPQVADMLLELCVTELEDVATDSQSGRLSSQPVVVESSHPYTDDTSTSGTVKIPGAEGLRVEFDRQCSTERRHDPLTVMDGVNRIVSVRSGREWSDWSSELRIPGDELKWKFISDGSVNGWGWRFTVYPIMPAAGPKELLSDRCVLSCPSMDLVTCLLDFRLNLASNRSIVPRLAASLAACAQLSALAASHRMWALQRLRKLLTTEFGQSININRLLGENDGETRALSFTGSALAALVKGLPEALQRQFEYEDPIVRGGKQLLHSPFFKVLVALACDLELDTLPCCAETHKWAWFRRYCMASRVAVALDKRTPLPRLFLDEVAKKIRELMADSENMDVLHESHDIFKREQDEQLVQWMNRRPDDWTLSAGGSGTIYGWGHNHRGQLGGIEGAKVKVPTPCEALATLRPVQLIGGEQTLFAVTADGKLYATGYGAGGRLGIGGTESVSTPTLLESIQHVFIKKVAVNSGGKHCLALSSEGEVYSWGEAEDGKLGHGNRSPCDRPRVIESLRGIEVVDVAAGGAHSACVTAAGDLYTWGKGRYGRLGHSDSEDQLKPKLVEALQGHRVVDIACGSGDAQTLCLTDDDTVWSWGDGDYGKLGRGGSDGCKVPMKIDSLTGLGVVKVECGSQFSVALTKSGAVYTWGKGDYHRLGHGSDDHVRRPRQVQGLQGKKVIAIATGSLHCVCCTEDGEVYTWGDNDEGQLGDGTTNAIQRPRLVAALQGKKVNRVACGSAHTLAWSTSKPASAGKLPAQVPMEYNHLQEIPIIALRNRLLLLHHLSELFCPCIPMFDLEGSLDETGLGPSVGFDTLRGILISQGKEAAFRKVV

SEQ ID NO: 804347 - protein, 2466 aa, Homo sapiens
MSPEGPQPPMILLQQLLASATQPSPVKAIFDKQELEAAALAVCQCLAVESTHPSSPGFEDCSSSEATTPVAVQHIRPARVKRRKQSPVPALPIVVQLMEMGFSRRNIEFALKSLTGASGNASSLPGVEALVGWLLDHSDIQVTELSDADTVSDEYSDEEVVEDVDDAAYSMSTGAVVTESQTYKKRADFLSNDDYAVYVRENIQVGMMVRCCRAYEEVCEGDVGKVIKLDRDGLHDLNVQCDWQQKGGTYWVRYIHVELIGYPPPSSSSHIKIGDKVRVKASVTTPKYKWGSVTHQSVGVVKAFSANGKDIIVDFPQQSHWTGLLSEMELVPSIHPGVTCDGCQMFPINGSRFKCRNCDDFDFCETCFKTKKHNTRHTFGRINEPGQSAVFCGRSGKQLKRCHSSQPGMLLDSWSRMVKSLNVSSSVNQASRLIDGSEPCWQSSGSQGKHWIRLEIFPDVLVHRLKMIVDPADSSYMPSLVVVSGGNSLNNLIELKTININPSDTTVPLLNDYTEYHRYIEIAIKQCRSSGIDCKIHGLILLGRIRAEEEDLAAVPFLASDNEEEEDEKGNSGSLIRKKAAGLESAATIRTKVFVWGLNDKDQLGGLKGSKIKVPSFSETLSALNVVQVAGGSKSLFAVTVEGKVYACGEATNGRLGLGISSGTVPIPRQITALSSYVVKKVAVHSGGRHATALTVDGKVFSWGEGDDGKLGHFSRMNCDKPRLIEALKTKRIRDIACGSSHSAALTSSGELYTWGLGEYGRLGHGDNTTQLKPKMVKVLLGHRVIQVACGSRDAQTLALTDEGLVFSWGDGDFGKLGRGGSEGCNIPQNIERLNGQGVCQIECGAQFSLALTKSGVVWTWGKGDYFRLGHGSDVHVRKPQVVEGLRGKKIVHVAVGALHCLAVTDSGQVYAWGDNDHGQQGNGTTTVNRKPTLVQGLEGQKITRVACGSSHSVAWTTVDVATPSVHEPVLFQTARDPLGASYLGVPSDADSSAASNKISGASNSKPNRPSLAKILLSLDGNLAKQQALSHILTALQIMYARDAVVGALMPAAMIAPVECPSFSSAAPSDASAMASPMNGEECMLAVDIEDRLSPNPWQEKREIVSSEDAVTPSAVTPSAPSASARPFIPVTDDLGAASIIAETMTKTKEDVESQNKAAGPEPQALDEFTSLLIADDTRVVVDLLKLSVCSRAGDRGRDVLSAVLSGMGTAYPQVADMLLELCVTELEDVATDSQSGRLSSQPVVVESSHPYTDDTSTSGTVKIPGAEGLRVEFDRQCSTERRHDPLTVMDGVNRIVSVRSGREWSDWSSELRIPGDELKWKFISDGSVNGWGWRFTVYPIMPAAGPKELLSDRCVLSCPSMDLVTCLLDFRLNLASNRSIVPRLAASLAACAQLSALAASHRMWALQRLRKLLTTEFGQSININRLLGENDGETRALSFTGSALAALVKGLPEALQRQFEYEDPIVRGGKQLLHSPFFKVLVALACDLELDTLPCCAETHKWAWFRRYCMASRVAVALDKRTPLPRLFLDEVAKKIRELMADSENMDVLHESHDIFKREQDEQLVQWMNRRPDDWTLSAGGSGTIYGWGHNHRGQLGGIEGAKVKVPTPCEALATLRPVQLIGGEQTLFAVTADGKLYATGYGAGGRLGIGGTESVSTPTLLESIQHVFIKKVAVNSGGKHCLALSSEGEVYSWGEAEDGKLGHGNRSPCDRPRVIESLRGIEVVDVAAGGAHSACVTAAGDLYTWGKGRYGRLGHSDSEDQLKPKLVEALQGHRVVDIACGSGDAQTLCLTDDDTVWSWGDGDYGKLGRGGSDGCKVPMKIDSLTGLGVVKVECGSQFSVALTKSGAVYTWGKGDYHRLGHGSDDHVRRPRQVQGLQGKKVIAIATGSLHCVCCTEDGEVYTWGDNDEGQLGDGTTNAIQRPRLVAALQGKKVNRVACGSAHTLAWSTSKPASAGKLPAQVPMEYNHLQEIPIIALRNRLLLLHHLSELFCPCIPMFDLEGSLDETGLGPSVGFDTLRGILISQGKEAAFRKVVQATMVRDRQHGPVVELNRIQVKRSRSKGGLAGPDGTKSVFGQMCAKMSSFGPDSLLLPHRVWKVKFVGESVDDCGGGYSESIAEICEELQNGLTPLLIVTPNGRDESGANRDCYLLSPAARAPVHSSMFRFLGVLLGIAIRTGSPLSLNLAEPVWKQLAGMSLTIADLSEVDKDFIPGLMYIRDNEATSEEFEAMSLPFTVPSASGQDIQLSSKHTHITLDNRAEYVRLAINYRLHEFDEQVAAVREGMARVVPVPLLSLFTGYELETMVCGSPDIPLHLLKSVATYKGIEPSASLIQWFWEVMESFSNTERSLFLRFVWGRTRLPRTIADFRGRDFVIQVLDKYNPPDHFLPESYTCFFLLKLPRYSCKQVLEEKLKYAIHFCKSIDTDDYARIALTGEPAADDSSDDSDNEDVDSFASDSTQDYLTGH

SEQ ID NO: 804348 - protein, 3400 aa, Homo sapiens
PEVHIHPCPSFKCLFTGHVALSLVHAGALGIEQVKHRTLPKSVVDVCRVVYQAKCSLIKTHQEQGRSYKEVCAPVIERLRFLFNELRPAVCNDLSIMSKFKLLSSLPRWRRIAQKIIRERRKKRVPKKPESMDDEEKIGNEESDLEEACILPHSPINVDKRPIAIKSPKDKWQPLLSTVTGVHKYKWLKQNVQGLYPQSPLLSTIAEFALKEEPVDVEKMRKCLLKQLERAEVRLEGIDTILKLASKNFLLPSVQYAMFCGWQRLIPEGIDIGEPLTDCLKDVDLIPPFNRMLLEVTFGKLYAWAVQNIRNVLMDASAKFKELGIQPVPLQTITNENPSGPSLGTIPQARFLLVMLSMLTLQHGANNLDLLLNSGMLALTQTALRLIGPSCDNVEEDMNASAQGASATVLEETRKETAPVQLPVSGPELAAMMKIGTRVMRGVDWKWGDQDGPPPGLGRVIGELGEDGWIRVQWDTGSTNSYRMGKEGKYDLKLAELPAAAQPSAEDSDTEDDSEAEQTERNIHPTAMMFTSTINLLQTLCLSAGVHAEIMQSEATKTLCGLLRMLVESGTTDKTSSPNRLVYREQHRSWCTLGFVRSIALTPQVCGALSSPQWITLLMKVVEGHAPFTATSLQRQILAVHLLQAVLPSWDKTERARDMKCLVEKLFDFLGSLLTTCSSDVPLLRESTLRRRRVRPQASLTATHSSTLAEEVVALLRTLHSLTQWNGLINKYINSQLRSITHSFVGRPSEGAQLEDYFPDSENPEVGGLMAVLAVIGGIDGRLRLGGQVMHDEFGEGTVTRITPKGKITVQFSDMRTCRVCPLNQLKPLPAVAFNVNNLPFTEPMLSVWAQLVNLAGSKLEKHKIKKSTKQAFAGQVDLDLLRCQQLKLYILKAGRALLSHQDKLRQILSQPAVQETGTVHTDDGAVVSPDLGDMSPEGPQPPMILLQQLLASATQPSPVKAIFDKQELEAAALAVCQCLAVESTHPSSPGFEDCSSSEATTPVAVQHIRPARVKRRKQSPVPALPIVVQLMEMGFSRRNIEFALKSLTGASGNASSLPGVEALVGWLLDHSDIQVTELSDADTVSDEYSDEEVVEDVDDAAYSMSTGAVVTESQTYKKRADFLSNDDYAVYVRENIQVGMMVRCCRAYEEVCEGDVGKVIKLDRDGLHDLNVQCDWQQKGGTYWVRYIHVELIGYPPPSSSSHIKIGDKVRVKASVTTPKYKWGSVTHQSVGVVKAFSANGKDIIVDFPQQSHWTGLLSEMELVPSIHPGVTCDGCQMFPINGSRFKCRNCDDFDFCETCFKTKKHNTRHTFGRINEPGQSAVFCGRSGKQLKRCHSSQPGMLLDSWSRMVKSLNVSSSVNQASRLIDGSEPCWQSSGSQGKHWIRLEIFPDVLVHRLKMIVDPADSSYMPSLVVVSGGNSLNNLIELKTININPSDTTVPLLNDYTEYHRYIEIAIKQCRSSGIDCKIHGLILLGRIRAEEEDLAAVPFLASDNEEEEDEKGNSGSLIRKKAAGLESAATIRTKVFVWGLNDKDQLGGLKGSKIKVPSFSETLSALNVVQVAGGSKSLFAVTVEGKVYACGEATNGRLGLGISSGTVPIPRQITALSSYVVKKVAVHSGGRHATALTVDGKVFSWGEGDDGKLGHFSRMNCDKPRLIEALKTKRIRDIACGSSHSAALTSSGELYTWGLGEYGRLGHGDNTTQLKPKMVKVLLGHRVIQVACGSRDAQTLALTDEGLVFSWGDGDFGKLGRGGSEGCNIPQNIERLNGQGVCQIECGAQFSLALTKSGVVWTWGKGDYFRLGHGSDVHVRKPQVVEGLRGKKIVHVAVGALHCLAVTDSGQVYAWGDNDHGQQGNGTTTVNRKPTLVQGLEGQKITRVACGSSHSVAWTTVDVATPSVHEPVLFQTARDPLGASYLGVPSDADSSAASNKISGASNSKPNRPSLAKILLSLDGNLAKQQALSHILTALQIMYARDAVVGALMPAAMIAPVECPSFSSAAPSDASAMASPMNGEECMLAVDIEDRLSPNPWQEKREIVSSEDAVTPSAVTPSAPSASARPFIPVTDDLGAASIIAETMTKTKEDVESQNKAAGPEPQALDEFTSLLIADDTRVVVDLLKLSVCSRAGDRGRDVLSAVLSGMGTAYPQVADMLLELCVTELEDVATDSQSGRLSSQPVVVESSHPYTDDTSTSGTVKIPGAEGLRVEFDRQCSTERRHDPLTVMDGVNRIVSVRSGREWSDWSSELRIPGDELKWKFISDGSVNGWGWRFTVYPIMPAAGPKELLSDRCVLSCPSMDLVTCLLDFRLNLASNRSIVPRLAASLAACAQLSALAASHRMWALQRLRKLLTTEFGQSININRLLGENDGETRALSFTGSALAALVKGLPEALQRQFEYEDPIVRGGKQLLHSPFFKVLVALACDLELDTLPCCAETHKWAWFRRYCMASRVAVALDKRTPLPRLFLDEVAKKIRELMADSENMDVLHESHDIFKREQDEQLVQWMNRRPDDWTLSAGGSGTIYGWGHNHRGQLGGIEGAKVKVPTPCEALATLRPVQLIGGEQTLFAVTADGKLYATGYGAGGRLGIGGTESVSTPTLLESIQHVFIKKVAVNSGGKHCLALSSEGEVYSWGEAEDGKLGHGNRSPCDRPRVIESLRGIEVVDVAAGGAHSACVTAAGDLYTWGKGRYGRLGHSDSEDQLKPKLVEALQGHRVVDIACGSGDAQTLCLTDDDTVWSWGDGDYGKLGRGGSDGCKVPMKIDSLTGLGVVKVECGSQFSVALTKSGAVYTWGKGDYHRLGHGSDDHVRRPRQVQGLQGKKVIAIATGSLHCVCCTEDGEVYTWGDNDEGQLGDGTTNAIQRPRLVAALQGKKVNRVACGSAHTLAWSTSKPASAGKLPAQVPMEYNHLQEIPIIALRNRLLLLHHLSELFCPCIPMFDLEGSLDETGLGPSVGFDTLRGILISQGKEAAFRKVVQATMVRDRQHGPVVELNRIQVKRSRSKGGLAGPDGTKSVFGQMCAKMSSFGPDSLLLPHRVWKVKFVGESVDDCGGGYSESIAEICEELQNGLTPLLIVTPNGRDESGANRDCYLLSPAARAPVHSSMFRFLGVLLGIAIRTGSPLSLNLAEPVWKQLAGMSLTIADLSEVDKDFIPGLMYIRDNEATSEEFEAMSLPFTVPSASGQDIQLSSKHTHITLDNRAEYVRLAINYRLHEFDEQVAAVREGMARVVPVPLLSLFTGYELETMVCGSPDIPLHLLKSVATYKGIEPSASLIQWFWEVMESFSNTERSLFLRFVWGRTRLPRTIADFRGRDFVIQVLDKYNPPDHFLPESYTCFFLLKLPRYSCKQVLEEKLKYAIHFCKSIDTDDYARIALTGEPAADDSSDDSDNEDVDSFASDSTQDYLTGH

SEQ ID NO: 804349 - protein, 3145 aa, Homo sapiens
GGVLEVPHEVEAEGIDIGEPLTDCLKDVDLIPPFNRMLLEVTFGKLYAWAVQNIRNVLMDASAKFKELGIQPVPLQTITNENPSGPSLGTIPQARFLLVMLSMLTLQHGANNLDLLLNSGMLALTQTALRLIGPSCDNVEEDMNASAQGASATVLEETRKETAPVQLPVSGPELAAMMKIGTRVMRGVDWKWGDQDGPPPGLGRVIGELGEDGWIRVQWDTGSTNSYRMGKEGKYDLKLAELPAAAQPSAEDSDTEDDSEAEQTERNIHPTAMMFTSTINLLQTLCLSAGVHAEIMQSEATKTLCGLLRMLVESGTTDKTSSPNRLVYREQHRSWCTLGFVRSIALTPQVCGALSSPQWITLLMKVVEGHAPFTATSLQRQILAVHLLQAVLPSWDKTERARDMKCLVEKLFDFLGSLLTTCSSDVPLLRESTLRRRRVRPQASLTATHSSTLAEEVVALLRTLHSLTQWNGLINKYINSQLRSITHSFVGRPSEGAQLEDYFPDSENPEVGGLMAVLAVIGGIDGRLRLGGQVMHDEFGEGTVTRITPKGKITVQFSDMRTCRVCPLNQLKPLPAVAFNVNNLPFTEPMLSVWAQLVNLAGSKLEKHKIKKSTKQAFAGQVDLDLLRCQQLKLYILKAGRALLSHQDKLRQILSQPAVQETGTVHTDDGAVVSPDLGDMSPEGPQPPMILLQQLLASATQPSPVKAIFDKQELEAAALAVCQCLAVESTHPSSPGFEDCSSSEATTPVAVQHIRPARVKRRKQSPVPALPIVVQLMEMGFSRRNIEFALKSLTGASGNASSLPGVEALVGWLLDHSDIQVTELSDADTVSDEYSDEEVVEDVDDAAYSMSTGAVVTESQTYKKRADFLSNDDYAVYVRENIQVGMMVRCCRAYEEVCEGDVGKVIKLDRDGLHDLNVQCDWQQKGGTYWVRYIHVELIGYPPPSSSSHIKIGDKVRVKASVTTPKYKWGSVTHQSVGVVKAFSANGKDIIVDFPQQSHWTGLLSEMELVPSIHPGVTCDGCQMFPINGSRFKCRNCDDFDFCETCFKTKKHNTRHTFGRINEPGQSAVFCGRSGKQLKRCHSSQPGMLLDSWSRMVKSLNVSSSVNQASRLIDGSEPCWQSSGSQGKHWIRLEIFPDVLVHRLKMIVDPADSSYMPSLVVVSGGNSLNNLIELKTININPSDTTVPLLNDYTEYHRYIEIAIKQCRSSGIDCKIHGLILLGRIRAEEEDLAAVPFLASDNEEEEDEKGNSGSLIRKKAAGLESAATIRTKVFVWGLNDKDQLGGLKGSKIKVPSFSETLSALNVVQVAGGSKSLFAVTVEGKVYACGEATNGRLGLGISSGTVPIPRQITALSSYVVKKVAVHSGGRHATALTVDGKVFSWGEGDDGKLGHFSRMNCDKPRLIEALKTKRIRDIACGSSHSAALTSSGELYTWGLGEYGRLGHGDNTTQLKPKMVKVLLGHRVIQVACGSRDAQTLALTDEGLVFSWGDGDFGKLGRGGSEGCNIPQNIERLNGQGVCQIECGAQFSLALTKSGVVWTWGKGDYFRLGHGSDVHVRKPQVVEGLRGKKIVHVAVGALHCLAVTDSGQVYAWGDNDHGQQGNGTTTVNRKPTLVQGLEGQKITRVACGSSHSVAWTTVDVATPSVHEPVLFQTARDPLGASYLGVPSDADSSAASNKISGASNSKPNRPSLAKILLSLDGNLAKQQALSHILTALQIMYARDAVVGALMPAAMIAPVECPSFSSAAPSDASAMASPMNGEECMLAVDIEDRLSPNPWQEKREIVSSEDAVTPSAVTPSAPSASARPFIPVTDDLGAASIIAETMTKTKEDVESQNKAAGPEPQALDEFTSLLIADDTRVVVDLLKLSVCSRAGDRGRDVLSAVLSGMGTAYPQVADMLLELCVTELEDVATDSQSGRLSSQPVVVESSHPYTDDTSTSGTVKIPGAEGLRVEFDRQCSTERRHDPLTVMDGVNRIVSVRSGREWSDWSSELRIPGDELKWKFISDGSVNGWGWRFTVYPIMPAAGPKELLSDRCVLSCPSMDLVTCLLDFRLNLASNRSIVPRLAASLAACAQLSALAASHRMWALQRLRKLLTTEFGQSININRLLGENDGETRALSFTGSALAALVKGLPEALQRQFEYEDPIVRGGKQLLHSPFFKVLVALACDLELDTLPCCAETHKWAWFRRYCMASRVAVALDKRTPLPRLFLDEVAKKIRELMADSENMDVLHESHDIFKREQDEQLVQWMNRRPDDWTLSAGGSGTIYGWGHNHRGQLGGIEGAKVKVPTPCEALATLRPVQLIGGEQTLFAVTADGKLYATGYGAGGRLGIGGTESVSTPTLLESIQHVFIKKVAVNSGGKHCLALSSEGEVYSWGEAEDGKLGHGNRSPCDRPRVIESLRGIEVVDVAAGGAHSACVTAAGDLYTWGKGRYGRLGHSDSEDQLKPKLVEALQGHRVVDIACGSGDAQTLCLTDDDTVWSWGDGDYGKLGRGGSDGCKVPMKIDSLTGLGVVKVECGSQFSVALTKSGAVYTWGKGDYHRLGHGSDDHVRRPRQVQGLQGKKVIAIATGSLHCVCCTEDGEVYTWGDNDEGQLGDGTTNAIQRPRLVAALQGKKVNRVACGSAHTLAWSTSKPASAGKLPAQVPMEYNHLQEIPIIALRNRLLLLHHLSELFCPCIPMFDLEGSLDETGLGPSVGFDTLRGILISQGKEAAFRKVVQATMVRDRQHGPVVELNRIQVKRSRSKGGLAGPDGTKSVFGQMCAKMSSFGPDSLLLPHRVWKVKFVGESVDDCGGGYSESIAEICEELQNGLTPLLIVTPNGRDESGANRDCYLLSPAARAPVHSSMFRFLGVLLGIAIRTGSPLSLNLAEPVWKQLAGMSLTIADLSEVDKDFIPGLMYIRDNEATSEEFEAMSLPFTVPSASGQDIQLSSKHTHITLDNRAEYVRLAINYRLHEFDEQVAAVREGMARVVPVPLLSLFTGYELETMVCGSPDIPLHLLKSVATYKGIEPSASLIQWFWEVMESFSNTERSLFLRFVWGRTRLPRTIADFRGRDFVIQVLDKYNPPDHFLPESYTCFFLLKLPRYSCKQVLEEKLKYAIHFCKSIDTDDYARIALTGEPAADDSSDDSDNEDVDSFASDSTQDYLTGH

SEQ ID NO: 804350 - protein, 2431 aa, Homo sapiens
KSAIYPLRVSSAFVCHPPSSPGFEDCSSSEATTPVAVQHIRPARVKRRKQSPVPALPIVVQLMEMGFSRRNIEFALKSLTGASGNASSLPGVEALVGWLLDHSDIQVTELSDADTVSDEYSDEEVVEDVDDAAYSMSTGAVVTESQTYKKRADFLSNDDYAVYVRENIQVGMMVRCCRAYEEVCEGDVGKVIKLDRDGLHDLNVQCDWQQKGGTYWVRYIHVELIGYPPPSSSSHIKIGDKVRVKASVTTPKYKWGSVTHQSVGVVKAFSANGKDIIVDFPQQSHWTGLLSEMELVPSIHPGVTCDGCQMFPINGSRFKCRNCDDFDFCETCFKTKKHNTRHTFGRINEPGQSAVFCGRSGKQLKRCHSSQPGMLLDSWSRMVKSLNVSSSVNQASRLIDGSEPCWQSSGSQGKHWIRLEIFPDVLVHRLKMIVDPADSSYMPSLVVVSGGNSLNNLIELKTININPSDTTVPLLNDYTEYHRYIEIAIKQCRSSGIDCKIHGLILLGRIRAEEEDLAAVPFLASDNEEEEDEKGNSGSLIRKKAAGLESAATIRTKVFVWGLNDKDQLGGLKGSKIKVPSFSETLSALNVVQVAGGSKSLFAVTVEGKVYACGEATNGRLGLGISSGTVPIPRQITALSSYVVKKVAVHSGGRHATALTVDGKVFSWGEGDDGKLGHFSRMNCDKPRLIEALKTKRIRDIACGSSHSAALTSSGELYTWGLGEYGRLGHGDNTTQLKPKMVKVLLGHRVIQVACGSRDAQTLALTDEGLVFSWGDGDFGKLGRGGSEGCNIPQNIERLNGQGVCQIECGAQFSLALTKSGVVWTWGKGDYFRLGHGSDVHVRKPQVVEGLRGKKIVHVAVGALHCLAVTDSGQVYAWGDNDHGQQGNGTTTVNRKPTLVQGLEGQKITRVACGSSHSVAWTTVDVATPSVHEPVLFQTARDPLGASYLGVPSDADSSAASNKISGASNSKPNRPSLAKILLSLDGNLAKQQALSHILTALQIMYARDAVVGALMPAAMIAPVECPSFSSAAPSDASAMASPMNGEECMLAVDIEDRLSPNPWQEKREIVSSEDAVTPSAVTPSAPSASARPFIPVTDDLGAASIIAETMTKTKEDVESQNKAAGPEPQALDEFTSLLIADDTRVVVDLLKLSVCSRAGDRGRDVLSAVLSGMGTAYPQVADMLLELCVTELEDVATDSQSGRLSSQPVVVESSHPYTDDTSTSGTVKIPGAEGLRVEFDRQCSTERRHDPLTVMDGVNRIVSVRSGREWSDWSSELRIPGDELKWKFISDGSVNGWGWRFTVYPIMPAAGPKELLSDRCVLSCPSMDLVTCLLDFRLNLASNRSIVPRLAASLAACAQLSALAASHRMWALQRLRKLLTTEFGQSININRLLGENDGETRALSFTGSALAALVKGLPEALQRQFEYEDPIVRGGKQLLHSPFFKVLVALACDLELDTLPCCAETHKWAWFRRYCMASRVAVALDKRTPLPRLFLDEVAKKIRELMADSENMDVLHESHDIFKREQDEQLVQWMNRRPDDWTLSAGGSGTIYGWGHNHRGQLGGIEGAKVKVPTPCEALATLRPVQLIGGEQTLFAVTADGKLYATGYGAGGRLGIGGTESVSTPTLLESIQHVFIKKVAVNSGGKHCLALSSEGEVYSWGEAEDGKLGHGNRSPCDRPRVIESLRGIEVVDVAAGGAHSACVTAAGDLYTWGKGRYGRLGHSDSEDQLKPKLVEALQGHRVVDIACGSGDAQTLCLTDDDTVWSWGDGDYGKLGRGGSDGCKVPMKIDSLTGLGVVKVECGSQFSVALTKSGAVYTWGKGDYHRLGHGSDDHVRRPRQVQGLQGKKVIAIATGSLHCVCCTEDGEVYTWGDNDEGQLGDGTTNAIQRPRLVAALQGKKVNRVACGSAHTLAWSTSKPASAGKLPAQVPMEYNHLQEIPIIALRNRLLLLHHLSELFCPCIPMFDLEGSLDETGLGPSVGFDTLRGILISQGKEAAFRKVVQATMVRDRQHGPVVELNRIQVKRSRSKGGLAGPDGTKSVFGQMCAKMSSFGPDSLLLPHRVWKVKFVGESVDDCGGGYSESIAEICEELQNGLTPLLIVTPNGRDESGANRDCYLLSPAARAPVHSSMFRFLGVLLGIAIRTGSPLSLNLAEPVWKQLAGMSLTIADLSEVDKDFIPGLMYIRDNEATSEEFEAMSLPFTVPSASGQDIQLSSKHTHITLDNRAEYVRLAINYRLHEFDEQVAAVREGMARVVPVPLLSLFTGYELETMVCGSPDIPLHLLKSVATYKGIEPSASLIQWFWEVMESFSNTERSLFLRFVWGRTRLPRTIADFRGRDFVIQVLDKYNPPDHFLPESYTCFFLLKLPRYSCKQVLEEKLKYAIHFCKSIDTDDYARIALTGEPAADDSSDDSDNEDVDSFASDSTQDYLTGH

SEQ ID NO: 804351 - protein, 217 aa, Homo sapiens
FFSGFRECLCKLLKSVRSSAYVFTCRPETWEEAGEKMPSESFCLAAQARLDSKWLKTDIQLAFTRDGLCGLWNEMVKDGEIVYTGTESTQNGELPPRKDDSVEPSGTKKEDLNDKEKKDEEETPAPIYRAKSILDSWVWGKQPDVNELKECLSVLVKEQQALAVQSATTTLSALRLKQRLVILERYFIALNRTVFQENVKVKWKSSGISLPPVDKKR

SEQ ID NO: 804352 - protein, 281 aa, Homo sapiens
FFSGFRECLCKLLKSVRSSAYVFTCRPETWEEAGEKMPSESFCLAAQARLDSKWLKTDIQLAFTRDGLCGLWNEMVKDGEIVYTGTESTQNGELPPRKDDSVEPSGTKKEDLNDKEKKDEEETPAPIYRAKSILDSWVWGKQPDVNELKECLSVLVKEQQALAVQSATTTLSALRLKQRLVILERYFIALNRTVFQENVKVKWKSSGISLPPVDKKSSRPAGKGVEGLARVGSRAALSFAFAFLRRAWRSGTVPGVARCSASLIHQQTGFRTRFSHHVPFG

SEQ ID NO: 804353 - protein, 60 aa, Homo sapiens
DADTVSDEYSDEEVVEDVDDAAYSMVSASHVTARTWAAVRLRSNSLTPWLSLSLERINYI

SEQ ID NO: 804354 - protein, 206 aa, Homo sapiens
PEANGTWTGMVGELIARKADLAVAGLTITAEREKVIDFSKPFMTLGISILYRVHMGRKPGYFSFLDPFSPGVWLFMLLAYLAVSCVLFLVARWAFTLIIISSYTANLAAFLTVQRMDVPIESVDDLADQTAIEYGTIHGGSSMTFFQNSRYQTYQRMWNYMYSKQPSVFVKSTEEGIARVLNSNYAFLLESTMNEYYRQRNCNLTQ

SEQ ID NO: 804355 - protein, 118 aa, Homo sapiens
MKIFVGNVDGADTTPEELAALFAPYGTVMSCAVMKQFAFVHMRENAGALRAIEALHGHELRPGRALVVEMSRPRPLNTWKIFVGNVSAACTSQELRSLFERRGRVIECDVVKGGMCVG

SEQ ID NO: 804356 - protein, 382 aa, Homo sapiens
RQEFGTRALLVSVRALVRMVKLFIGNLPREATEQEIRSLFEQYGKVLECDIIKNYGFVHIEDKTAAEDAIRNLHHYKLHGVNINVEASKNKSKTSTKLHVGNISPTCTNKELRAKFEEYGPVIECDIVKDYAFVHMERAEDAVEAIRGLDNTEFQGKRMHVQLSTSRLRTAPGMGDQSGCYRCGKEGHWSKECPIDRSGRVADLTEQYNEQYGAVRTPYTMSYGDSLYYNNAYGALDAYYKRCRAARSYEAVAAAAASVYNYAEQTLSQLPQVQNTAMASHLTSTSLDPYDRHLLPTSGAAATAAAAAAAAAAVTAASTSYYGRDRSPLRRATAPVPTVGEGYGYGHESELSQASAAARNSLYDMARYEREQYADRARYSAF

SEQ ID NO: 804357 - protein, 90 aa, Homo sapiens
RARYPSSIDIIDSAFESLRWDVCGLKFRAAVVHENTPFVVPHLRDVLGSVRSVPQEPWTLIYLAKFRPSLPFLSFPLLPIFLFFCPSILL

SEQ ID NO: 804358 - protein, 228 aa, Homo sapiens
YNRARYLIGSQDYAFVHMERAEDAVEAIRGLDNTEFQGKRMHVQLSTSRLRTAPGMGDQSGCYRCGKEGHWSKECPIDRSGRVADLTEQYNEQYGAVRTPYTMSYGDSLYYNNAYGALDAYYKRCRAARSYEAVAAAAASVYNYAEQTLSQLPQVQNTAMASHLTSTSLDPYDRHLLPTSGAAATAAAAAAAAAAVTAASTSYYGRDRSPLRRATLKLGNNSLSCSRS

SEQ ID NO: 804359 - protein, 60 aa, Homo sapiens
MRIIWSKIKQKKKTGVFGGKEIRRASVSPLQERARGITDKEEGVMASNGHFLFLLFSPPT

SEQ ID NO: 804360 - protein, 364 aa, Homo sapiens
MVKLFIGNLPREATEQEIRSLFEQYGKVLECDIIKNYGFVHIEDKTAAEDAIRNLHHYKLHGVNINVEASKNKSKTSTKLHVGNISPTCTNKELRAKFEEYGPVIECDIVKDYAFVHMERAEDAVEAIRGLDNTEFQGKRMHVQLSTSRLRTAPGMGDQSGCYRCGKEGHWSKECPIDRSGRVADLTEQYNEQYGAVRTPYTMSYGDSLYYNNAYGALDAYYKRCRAARSYEAVAAAAASVYNYAEQTLSQLPQVQNTAMASHLTSTSLDPYDRHLLPTSGAAATAAAAAAAAAAVTAASTSYYGRDRSPLRRATAPVPTVGEGYGYGHESELSQASAAARNSLYDMARYEREQYADRARYSAF

SEQ ID NO: 804361 - protein, 364 aa, Homo sapiens; identical to SEQ ID NO: 804360

SEQ ID NO: 804362 - protein, 393 aa, Homo sapiens
MPGTPRSYGMKRPRREEEALLVSVRALVRMVKLFIGNLPREATEQEIRSLFEQYGKVLECDIIKNYGFVHIEDKTAAEDAIRNLHHYKLHGVNINVEASKNKSKTSTKLHVGNISPTCTNKELRAKFEEYGPVIECDIVKDYAFVHMERAEDAVEAIRGLDNTEFQGKRMHVQLSTSRLRTAPGMGDQSGCYRCGKEGHWSKECPIDRSGRVADLTEQYNEQYGAVRTPYTMSYGDSLYYNNAYGALDAYYKRCRAARSYEAVAAAAASVYNYAEQTLSQLPQVQNTAMASHLTSTSLDPYDRHLLPTSGAAATAAAAAAAAAAVTAASTSYYGRDRSPLRRATAPVPTVGEGYGYGHESELSQASAAARNSLYDMARYEREQYADRARYSAF

SEQ ID NO: 804363 - protein, 364 aa, Homo sapiens; identical to SEQ ID NO: 804360

SEQ ID NO: 804364 - protein, 364 aa, Homo sapiens; identical to SEQ ID NO: 804360

SEQ ID NO: 804365 - protein, 364 aa, Homo sapiens; identical to SEQ ID NO: 804360

SEQ ID NO: 804366 - protein, 364 aa, Homo sapiens; identical to SEQ ID NO: 804360

SEQ ID NO: 804367 - protein, 364 aa, Homo sapiens; identical to SEQ ID NO: 804360

SEQ ID NO: 804368 - protein, 364 aa, Homo sapiens; identical to SEQ ID NO: 804360

SEQ ID NO: 804369 - protein, 364 aa, Homo sapiens; identical to SEQ ID NO: 804360

SEQ ID NO: 804370 - protein, 364 aa, Homo sapiens; identical to SEQ ID NO: 804360

SEQ ID NO: 804371 - protein, 364 aa, Homo sapiens; identical to SEQ ID NO: 804360

SEQ ID NO: 804372 - protein, 364 aa, Homo sapiens; identical to SEQ ID NO: 804360

SEQ ID NO: 804373 - protein, 384 aa, Homo sapiens
DVGLRFFVRCLVFLSQALVRMVKLFIGNLPREATEQEIRSLFEQYGKVLECDIIKNYGFVHIEDKTAAEDAIRNLHHYKLHGVNINVEASKNKSKTSTKLHVGNISPTCTNKELRAKFEEYGPVIECDIVKDYAFVHMERAEDAVEAIRGLDNTEFQGKRMHVQLSTSRLRTAPGMGDQSGCYRCGKEGHWSKECPIDRSGRVADLTEQYNEQYGAVRTPYTMSYGDSLYYNNAYGALDAYYKRCRAARSYEAVAAAAASVYNYAEQTLSQLPQVQNTAMASHLTSTSLDPYDRHLLPTSGAAATAAAAAAAAAAVTAASTSYYGRDRSPLRRATAPVPTVGEGYGYGHESELSQASAAARNSLYDMARYEREQYADRARYSAF

SEQ ID NO: 804374 - protein, 364 aa, Homo sapiens; identical to SEQ ID NO: 804360

SEQ ID NO: 804375 - protein, 364 aa, Homo sapiens; identical to SEQ ID NO: 804360

SEQ ID NO: 804376 - protein, 346 aa, Homo sapiens
MVKLFIGNLPREATEQEIRSLFEQYGKVLECDIIKNYGFVHIEDKTAAEDAIRNLHHYKLHGVNINVEASKNKSELRAKFEEYGPVIECDIVKDYAFVHMERAEDAVEAIRGLDNTEFQGKRMHVQLSTSRLRTAPGMGDQSGCYRCGKEGHWSKECPIDRSGRVADLTEQYNEQYGAVRTPYTMSYGDSLYYNNAYGALDAYYKRCRAARSYEAVAAAAASVYNYAEQTLSQLPQVQNTAMASHLTSTSLDPYDRHLLPTSGAAATAAAAAAAAAAVTAASTSYYGRDRSPLRRATAPVPTVGEGYGYGHESELSQASAAARNSLYDMARYEREQYADRARYSAF

SEQ ID NO: 804377 - protein, 329 aa, Homo sapiens
MVKLFIGNLPREATEQEIRSLFEQYGKVLECDIIKNYGFVHIEDKTAAEDAIRNLHHYKLHGVNINVEASKNKSKTSTKLHVGNISPTCTNKELRAKFEEYGPVIECDIVKDYAFVHMERAEDAVEAIRGLDNTEFQGKRMHVQLSTSRLRTAPGMGDQSGCYRCGKEGHWSKECPIDRSGRVADLTEQYNEQYGAVRTPYTMSYGDSLYYNNAYGALDAYYKRCRAARSYEAVAAAAASVYNYAEQTLSQLPQVQNTAMASHLTSTSLDPYDRHLLPTSGAAATAAAAAAAAAAVTAASTSYYGRDRSPLRRATVWLSQSQCWEVRYG

SEQ ID NO: 804378 - protein, 339 aa, Homo sapiens
MKIFVGNVDGADTTPEELAALFAPYGTVMSCAVMKQFAFVHMRENAGALRAIEALHGHELRPGRALVVEMSRPRPLNTWKIFVGNVSAACTSQELRSLFERRGRVIECDVVKGKRMHVQLSTSRLRTAPGMGDQSGCYRCGKEGHWSKECPIDRSGRVADLTEQYNEQYGAVRTPYTMSYGDSLYYNNAYGALDAYYKRCRAARSYEAVAAAAASVYNYAEQTLSQLPQVQNTAMASHLTSTSLDPYDRHLLPTSGAAATAAAAAAAAAAVTAASTSYYGRDRSPLRRATAPVPTVGEGYGYGHESELSQASAAARNSLYDMARYEREQYADRARYSAF

SEQ ID NO: 804379 - protein, 264 aa, Homo sapiens
YNRARYLIGSQDYAFVHMERAEDAVEAIRGLDNTEFQGKRMHVQLSTSRLRTAPGMGDQSGCYRCGKEGHWSKECPIDRSGRVADLTEQYNEQYGAVRTPYTMSYGDSLYYNNAYGALDAYYKRCRAARSYEAVAAAAASVYNYAEQTLSQLPQVQNTAMASHLTSTSLDPYDRHLLPTSGAAATAAAAAAAAAAVTAASTSYYGRDRSPLRRATAPVPTVGEGYGYGHESELSQASAAARNSLYDMARYEREQYADRARYSAF

SEQ ID NO: 804380 - protein, 224 aa, Homo sapiens [sequence omitted]

SEQ ID NO: 804381 - protein, 143 aa, Homo sapiens
MVKLFIGNLPREATEQEIRSLFEQYGKVLECDIIKNYGFVHIEDKTAAEDAIRNLHHYKLHGVNINVEASKNKSKTSTKLHVGNISPTCTNKELRAKFEEYGPVIECDIVKDYAFVHMERAEDAVEAIRGLDNTEFQGGMCVG

SEQ ID NO: 804382 - protein, 125 aa, Homo sapiens
MVKLFIGNLPREATEQEIRSLFEQYGKVLECDIIKNYGFVHIEDKTAAEDAIRNLHHYKLHGVNINVEASKNKSELRAKFEEYGPVIECDIVKDYAFVHMERAEDAVEAIRGLDNTEFQGGMCVG

SEQ ID NO: 804383 - protein, 143 aa, Homo sapiens; identical to SEQ ID NO: 804381

SEQ ID NO: 804384 - protein, 177 aa, Homo sapiens
MVKLFIGNLPREATEQEIRSLFEQYGKVLECDIIKNYGFVHIEDKTAAEDAIRNLHHYKLHGVNINVEASKNKSKTSTKLHVGNISPTCTNKELRAKFEEYGPVIECDIVKDYAFVHMERAEDAVEAIRGLDNTEFQGEPPSLGRGLNTRLCAENGWISKRRGLVKITAVGWLVMKK

SEQ ID NO: 804385 - protein, 181 aa, Homo sapiens
MVKLFIGNLPREATEQEIRSLFEQYGKVLECDIIKNYGFVHIEDKTAAEDAIRNLHHYKLHGVNINVEASKNKSKTSTKLHVGNISPTCTNKELRAKFEEYGPVIECDIVKDYAFVHMERAEDAVEAIRGLDNTEFQVGSVRSVPQEPWTLIYLAKFRPSLPFLSFPLLPIFLFFCPSILL

SEQ ID NO: 804386 - protein, 239 aa, Homo sapiens
MVKLFIGNLPREATEQEIRSLFEQYGKVLECDIIKNYGFVHIEDKTAAEDAIRNLHHYKLHGVNINVEASKNKSKTSTKLHVGNISPTCTNKELRAKFEEYGPVIECDIVKDYAFVHMERAEDAVEAIRGLDNTEFQGKRMHVQLSTSRLRTAPGMGDQSGCYRHLLPTSGAAATAAAAAAAAAAVTAASTSYYGRDRSPLRRATAPVPTVGEGYGYGHESELSQASAAARNSRPSILL

SEQ ID NO: 804387 - protein, 150 aa, Homo sapiens
MVKLFIGNLPREATEQEIRSLFEQYGKVLECDIIKNYGFVHIEDKTAAEDAIRNLHHYKLHGVNINVEASKNKSKTSTKLHVGNISPTCTNKELRAKFEEYGPVIECDIVKDYAFVHMERAEDAVEAIRGLDNTEFQDIQLCHPSCSVVA

SEQ ID NO: 804388 - protein, 139 aa, Homo sapiens
MVKLFIGNLPREATEQEIRSLFEQYGKVLECDIIKNYGFVHIEDKTAAEDAIRNLHHYKLHGVNINVEASKNKSKTSTKLHVGNISPTCTNKELRAKFEEYGPVIECDIVKDYAFVHMERAEDAVEAIRGLDNTEFQAR

SEQ ID NO: 804389 - protein, 151 aa, Homo sapiens
MVKLFIGNLPREATEQEIRSLFEQYGKVLECDIIKNYGFVHIEDKTAAEDAIRNLHHYKLHGVNINVEASKNKSKTSTKLHVGNISPTCTNKELRAKFEEYGPVIECDIVKDYAFVHMERAEDAVEAIRGLDNTEFQGGVLLCCLGWSTVV

SEQ ID NO: 804390 - protein, 206 aa, Homo sapiens
MVKLFIGNLPREATEQEIRSLFEQYGKVLECDIIKNYGFVHIEDKTAAEDAIRNLHHYKLHGVNINVEASKNKSKTSTKLHVGNISPTCTNKELRAKFEEYGPVIECDIVKDYAFVHMERAEDAVEAIRGLDNTEFQGSCQDGEAVHRKPPREATEQEIRSLFEQYGKVLECDIIKNYGFVHIEDKTAAEDAIRNLHHYKLHGVNI

SEQ ID NO: 804391 - protein, 622 aa, Homo sapiens
FPAPEPPPGPGQGGPGAPPCCQPRGCGADQVAPAMAAEEEAAAGGKVLREENQCIAPVVSSRVSPGTRPTAMGSFSSHMTEFPRKRKGSDSDPSQEAHSQTEKRRRDKMNNLIEELSAMIPQCNPMARKLDKLTVLRMAVQHLRSLKGLTNSYVGSNYRPSFLQDNELRHLILKTAEGFLFVVGCERGKILFVSKSVSKILNYDQASLTGQSLFDFLHPKDVAKVKEQLSSFDISPREKLIDAKTGLQVHSNLHAGRTRVYSGSRRSFFCRIKSCKISVKEEHGCLPNSKKKEHRKFYTIHCTGYLRSWPPNIVGMEEERNSKKDNSNFTCLVAIGRLQPYIVPQNSGEINVKPTEFITRFAVNGKFVYVDQRATAILGYLPQELLGTSCYEYFHQDDHNNLTDKHKAVLQSKEKILTDSYKFRAKDGSFVTLKSQWFSFTNPWTKELEYIVSVNTLVLGHSEPGEASFLPCSSQSSEESSRQSCMSVPGMSTGTVLGAGSIGTDIANEILDLQRLQSSSYLDDSSPTGLMKDTHTVNCRSMSNKELFPPSPSEMGELEATRQNQSTVAVHSHEPLLSDGAQLDFDALCDNDDTAMAAFMNYLEAEGGLGDPGDFSDIQWTL

SEQ ID NO: 804392 - protein, 656 aa, Homo sapiens
FPAPEPPPGPGQGGPGAPPCCQPRGCGADQVAPAMAAEEEAAAGGKVLREENQCIAPVVSSRVSPGTRPTAMGSFSSHMTEFPRKRKGSDSDPSQSGIMTEKVVEKLSQNPLTYLLSTRIEISASSGSREAHSQTEKRRRDKMNNLIEELSAMIPQCNPMARKLDKLTVLRMAVQHLRSLKGLTNSYVGSNYRPSFLQDNELRHLILKTAEGFLFVVGCERGKILFVSKSVSKILNYDQASLTGQSLFDFLHPKDVAKVKEQLSSFDISPREKLIDAKTGLQVHSNLHAGRTRVYSGSRRSFFCRIKSCKISVKEEHGCLPNSKKKEHRKFYTIHCTGYLRSWPPNIVGMEEERNSKKDNSNFTCLVAIGRLQPYIVPQNSGEINVKPTEFITRFAVNGKFVYVDQRATAILGYLPQELLGTSCYEYFHQDDHNNLTDKHKAVLQSKEKILTDSYKFRAKDGSFVTLKSQWFSFTNPWTKELEYIVSVNTLVLGHSEPGEASFLPCSSQSSEESSRQSCMSVPGMSTGTVLGAGSIGTDIANEILDLQRLQSSSYLDDSSPTGLMKDTHTVNCRSMSNKELFPPSPSEMGELEATRQNQSTVAVHSHEPLLSDGAQLDFDALCDNDDTAMAAFMNYLEAEGGLGDPGDFSDIQWTL

SEQ ID NO: 804393 - protein, 643 aa, Homo sapiens
FPAPEPPPGPGQGGPGAPPCCQPRGCGADQVAPAMAAEEEAAAGGKVLREENQCIAPVVSSRVSPGTRPTAMGSFSSHMTEFPRKRKGSDSDPSHQNPLTYLLSTRIEISASSGSREAHSQTEKRRRDKMNNLIEELSAMIPQCNPMARKLDKLTVLRMAVQHLRSLKGLTNSYVGSNYRPSFLQDNELRHLILKTAEGFLFVVGCERGKILFVSKSVSKILNYDQASLTGQSLFDFLHPKDVAKVKEQLSSFDISPREKLIDAKTGLQVHSNLHAGRTRVYSGSRRSFFCRIKSCKISVKEEHGCLPNSKKKEHRKFYTIHCTGYLRSWPPNIVGMEEERNSKKDNSNFTCLVAIGRLQPYIVPQNSGEINVKPTEFITRFAVNGKFVYVDQRATAILGYLPQELLGTSCYEYFHQDDHNNLTDKHKAVLQSKEKILTDSYKFRAKDGSFVTLKSQWFSFTNPWTKELEYIVSVNTLVLGHSEPGEASFLPCSSQSSEESSRQSCMSVPGMSTGTVLGAGSIGTDIANEILDLQRLQSSSYLDDSSPTGLMKDTHTVNCRSMSNKELFPPSPSEMGELEATRQNQSTVAVHSHEPLLSDGAQLDFDALCDNDDTAMAAFMNYLEAEGGLGDPGDFSDIQWTL

SEQ ID NO: 804394 - protein, 373 aa, Homo sapiens
FPAPEPPPGPGQGGPGAPPCCQPRGCGADQVAPAMAAEEEAAAGGKVLREENQCIAPVVSSRVSPGTRPTAMGSFSSHMTEFPRKRKGSDSDPSQEAHSQTEKRRRDKMNNLIEELSAMIPQCNPMARKLDKLTVLRMAVQHLRSLKGLTNSYVGSNYRPSFLQDNELRHLILKTAEGFLFVVGCERGKILFVSKSVSKILNYDQASLTGQSLFDFLHPKDVAKVKEQLSSFDISPREKLIDAKTGLQVHSNLHAGRTRVYSGSRRSFFCRIKSCKISVKEEHGCLPNSKKKEHRKFYTIHCTGYLRSWPPNIVGMEEERNSKKDNSNFTCLVAIGRLQPYIVPQNSGEINVKPTEFITRFAVNGKFVYVDQR

SEQ ID NO: 804395 - protein, 552 aa, Homo sapiens
FPAPEPPPGPGQGGPGAPPCCQPRGCGADQVAPAMAAEEEAAAGGKVLREENQCIAPVVSSRVSPGTRPTAMGSFSSHMTEFPRKRKGSDSDPSQEAHSQTEKRRRDKMNNLIEELSAMIPQCNPMARKLDKLTVLRMAVQHLRSLKGLTNSYVGSNYRPSFLQDNELRHLILKTAEGFLFVVGCERGKILFVSKSVSKILNYDQASLTGQSLFDFLHPKDVAKVKEQLSSFDISPREKLIDAKTGLQVHSNLHAGRTRVYSGSRRSFFCRIKSCKISVKEEHGCLPNSKKKEHRKFYTIHCTGYLRSWPPNIVGMEEERNSKKDNSNFTCLVAIGRLQPYIVPQNSGEINVKPTEFITRFAVNGKFVYVDQRATAILGYLPQELLGTSCYEYFHQDDHNNLTDKHKAVLQSKEKILTDSYKFRAKDGSFVTLKSQWFSFTNPWTKELEYIVSVNTLVLGHSEPGEASFLPCSSQSSEESSRQSCMSVPGMSTGTVLGAGSIGTDIANEILDLQRLQSSSYLDDSSPTGLMKDTLYGGLGGPARDRTNKHDS

SEQ ID NO: 804396 - protein, 164 aa, Homo sapiens
FPAPEPPPGPGQGGPGAPPCCQPRGCGADQVAPAMAAEEEAAAGGKVLREENQCIAPVVSSRVSPGTRPTAMGSFSSHMTEFPRKRKGSDSDPSQSGIMTEKVVEKLSQNPLTYLLSTRIEISASSGSRVEDGEHQVKMKAFRSWLRESTPSSAVHPGVRSLYP

SEQ ID NO: 804397 - protein, 299 aa, Homo sapiens [sequence omitted]

SEQ ID NO: 804398 - protein, 223 aa, Homo sapiens
MLPESVKSKYQDLLAVEHQGVKLLENRHQQQSTFKPEEILYKTLGFSVAQATSSLISAGKGVFVTKGLVPKGAVVSMYPGTVYQKYEPIFFQSIGNPFIFRCLDGVLIDGNDKGISKVVYRSCNGRDRLGPLEMSDSTWLTSEIHNPLAVGQYVNNCSNDRAANVCYQEFDVPAVFPIELKQYLPNIAYSYDKQSPLRCVVLVALRDINQGEELFSNYYTIVS

SEQ ID NO: 804399 - protein, 273 aa, Homo sapiens
MVGFGLGTLRYVPEESKDKVISDEDVLGTLLKVFQALFLNDFNKQSEILTMLPESVKSKYQDLLAVEHQGVKLLENRHQQQSTFKPEEILYKTLGFSVAQATSSLISAGKGVFVTKGLVPKGAVVSMYPGTVYQKYEPIFFQSIGNPFIFRCLDGVLIDGNDKGISKVVYRSCNGRDRLGPLEMSDSTWLTSEIHNPLAVGQYVNNCSNDRAANVCYQEFDVPAVFPIELKQYLPNIAYSYDKQSPLRCVVLVALRDINQGEELFSNYYTIVS

SEQ ID NO: 804400 - protein, 445 aa, Homo sapiens
MYPNPLIYCTCWDPWNLGPRKLIKTPQLPRKNSTGSSKLTPLLPAPKNHNYLQPTKPVVSPKMKIHSARQEETNKSFYEVINVSPGYQLVRNREQISVTLGDEMFDRKKRWESEIPDKGRFSRTNIISDLEEQISELTAIIEQMNRDHQSAQKLLSSEMDLRCAEMKQNFENKNRELKEAHEAELSELENNYKAALKAEKLAAQEKLEEMGKEYKYLKNMFRTYQDSIYDEMEEKWSKQKAKWKKDEKFERENILLQQKKKMTKKFEMESGEEDKKINESCSAVFENFIQEKEELLKQHQSDTLQLEELRKTKEVPWRRDQINRHWHDVLQQLLLMQVMQEELHAQALILESLNTNLYYTQLELQKEKAIVGNLEKMLQTKFAETEEKYKHTIQILTEENIHLKQKIISKNEEICEGCSGRLASITVSKDDSDTVQDGSKKGQES

SEQ ID NO: 804401 - protein, 412 aa, Homo sapiens
MYPNPLIYCTCWDPWNLGPRKLIKTPQLPRKNSTGSSKLTPLLPAPKNHNYLQPTKPVVSPKMKIHSARQEETNKSFYEVINVSPGYQLVRNREQISVTLGDEMFDRKKRWESEIPDKGRFSRTNIISDLEEQISELTAIIEQMNRDHQSAQKLLSSEMDLRCAEMKQNFENKTEEMGKEYKYLKNMFRTYQDSIYDEMEEKWSKQKAKWKKDEKFERENILLQQKKKMTKKFEMESGEEDKKINESCSAVFENFIQEKEELLKQHQSDTLQLEELRKTKEVPWRRDQINRHWHDVLQQLLLMQVMQEELHAQALILESLNTNLYYTQLELQKEKAIVGNLEKMLQTKFAETEEKYKHTIQILTEENIHLKQKIISKNEEICEGCSGRLASITVSKDDSDTVQDGSKKGQES

SEQ ID NO: 804402 - protein, 196 aa, Homo sapiens
MYPNPLIYCTCWDPWNLGPRKLIKTPQLPRKNSTGSSKLTPLLPAPKNHNYLQPTKPVVSPKMKIHSARQEETNKSFYEVINVSPGYQLVRNREQISVTLGDEMFDRKKRWESEIPDKGRFSRTNIISDLEEQISELTAIIEQMNRDHQSAQKLLSSEMDLRCAEMKQNFENKNRGDGKRIQVFEEYVSYVSGQYL

SEQ ID NO: 804403 - protein, 393 aa, Homo sapiens
MYPNPLIYCTCWDPWNLGPRKLIKTPQLPRKNSTGSSKLTPLLPAPKNHNYLQPTKPVVSPKMKIHSARQEETNKSFYEVINVSPGYQLVRNREQISVTLGDEMFDRKKRWESEIPDKGRFSRELKEAHEAELSELENNYKAALKAEKLAAQEKLEEMGKEYKYLKNMFRTYQDSIYDEMEEKWSKQKAKWKKDEKFERENILLQQKKKMTKKFEMESGEEDKKINESCSAVFENFIQEKEELLKQHQSDTLQLEELRKTKEVPWRRDQINRHWHDVLQQLLLMQVMQEELHAQALILESLNTNLYYTQLELQKEKAIVGNLEKMLQTKFAETEEKYKHTIQILTEENIHLKQKIISKNEEICEGCSGRLASITVSKDDSDTVQDGSKKGQES

SEQ ID NO: 804404 - protein, 82 aa, Homo sapiens
GAWLNGLTRKRDFRVRPLLYQDSILGVKQDNAEGSVQQPCKGVEPQPTQGVSSWLFLANLIPRCSGQKYLHFHSCQVSAWLW

SEQ ID NO: 804405 - protein, 197 aa, Homo sapiens
GAWLNGLTRKRDFRVRPLLYQDSILGVKQDNAEGSVQQPCKGFSSALGRWAVPLPGPPGPPGPPLPEGKHEQPLTWEWRLLRGNCLYTSNVALWDLSGAPTHAGRVFMAFPGQSDTKMQWPEVPALPLLSSLCMAMVRKSSALGKEVGRRVKEMVMLVAPFRQSSSLSRTFSSRKVVKAHASLHGARLSPLSRNIRG

SEQ ID NO: 804406 - protein, 82 aa, Homo sapiens; identical to SEQ ID NO: 804404

SEQ ID NO: 804407 - protein, 241 aa, Homo sapiens
GAWLNGLTRKRDFRVRPLLYQDSILGVKQDNAEGSVQQPCKALCLRFQRADVLWALKSLLLAGVLATWSCWPVSHRVDAQRALDAGFSSALGRWAVPLPGPPGPPGPPLPEGKHEQPLTWEWRLLRGNCLYTSNVALWDLSGAPTHAGRVFMAFPGQSDTKMQWPEVPALPLLSSLCMAMVRKSSALGKEVGRRVKEMVMLVAPFRQSSSLSRTFSSRKVVKAHASLHGARLSPLSRNIRG

SEQ ID NO: 804408 - protein, 97 aa, Homo sapiens
GAWLNGLTRKRDFRVRPLLYQDSILGVKQDNAEGSVQQPCKALCLRFQRADVLWALKSLLLAGVLATWSCWPVSHRVDAQRALDAVYDKDMGVVWSL

SEQ ID NO: 804409 - protein, 144 aa, Homo sapiens
MLMPSQRTTSTFAAQTVPVLATDGRTSDFCKSASQFQLLRPATATTRSLWERHRELMSVADDFCKVHLFQYPCARAKAPSRMYGGHGSHVTSVRFTHDDSHLVSLGGKDASIFQWRVLGAGGAGPAPATPSRTPSLSPASSLDV

SEQ ID NO: 804410 - protein, 215 aa, Homo sapiens
DAWVDPRVKYKKPKFIPCFVFLPDGDILTGDSEGNILTWGRSPSDSKTPGRGGAKETYGIVAQAHAHEGSIFALCLRRDGTVLSGGGRDRRLVQWGPGLVALQEAEIPEHFGAVRAIAEGLGSELLVGTTKNALLRGDLAQGFSPVIQGHTDELWGLCTHPSQNRFLTCGHDRQLCLWDGESHALAWSIDLKETGLCADFHPSGAVVAVGLNTGR

SEQ ID NO: 804411 - protein, 113 aa, Homo sapiens
  misc_feature (4)..(5): Xaa can be any naturally occurring amino acid
EEKXXTILAEVRGWVLQGGPGGGGQRHYRGHTDCVRCLAVHPDGVRVASGQTAGVDKDGKPLQPVVHIWDSETLLKLQEIGLGAFERGVGALAFSAAESKGWPFLLVWVDDSK

SEQ ID NO: 804412 - protein, 928 aa, Homo sapiens
APGCFPFPSPRPWPPRLRRLLRRRRSEQPGGRMDGAAGPGDGPAREALQSLSQRLRVQEQEMELVKAALAEALRLLRLQVPPSSLQGSGTPAPPGDSLAAPPGLPPTCTPSLVSRGTQTETEVELKSSPGPPGLSNGPPAPQGASEEPSGTQSEGGGSSSSGAGSPGPPGILRPLQPPQRADTPRRNSSSSSSPSERPRQKLSRKAISSANLLVRSGSTESRGGKDPLSSPGGPGSRRSNYNLEGISVKMFLRGRPITMYIPSGIRSLEELPSGPPPETLSLDWVYGYRGRDSRSNLFVLRSGEVVYFIACVVVLYRPGGGPGGPGGGGQRHYRGHTDCVRCLAVHPDGVRVASGQTAGVDKDGKPLQPVVHIWDSETLLKLQEIGLGAFERGVGALAFSAADQGAFLCVVDDSNEHMLSVWDCSRGMKLAEIKSTNDSVLAVGFNPRDSSCIVTSGKSHVHFWNWSGGVGVPGNGTLTRKQGVFGKYKKPKFIPCFVFLPDGDILTGDSEGNILTWGRSPSDSKTPGRGGAKETYGIVAQAHAHEGSIFALCLRRDGTVLSGGGRDRRLVQWGPGLVALQEAEIPEHFGAVRAIAEGLGSELLVGTTKNALLRGDLAQGFSPVIQGHTDELWGLCTHPSQNRFLTCGHDRQLCLWDGESHALAWSIDLKETGLCADFHPSGAVVAVGLNTGRWLVLDTETREIVSDVIDGNEQLSVVRYSPDGLYLAIGSHDNVIYIYSVSSDGAKSSRFGRCMGHSSFITHLDWSKDGNFIMSNSGDYEILYWDVAGGCKQLKNRYESRDREWATYTCVLGFHVYGVWPDGSDGTDINSLCRSHNERVVAVADDFCKVHLFQYPCARAKAPSRMYGGHGSHVTSVRFTHDDSHLVSLGGKDASIFQWRVLGAGGAGPAPATPSRTPSLSPASSLDV

SEQ ID NO: 804413 - protein, 620 aa, Homo sapiens
SGSIWRFKVRGWVAGGPGGGGQRHYRGHTDCVRCLAVHPDGVRVASGQTAGVDKDGKPLQPVVHIWDSETLLKLQEIGLGAFERGVGALAFSAADQGAFLCVVDDSNEHMLSVWDCSRGMKLAEIKSTNDSVLAVGFNPRDSSCIVTSGKSHVHFWNWSGGVGVPGNGTLTRKQGVFGKYKKPKFIPCFVFLPDGDILTGDSEGNILTWGRSPSDSKTPGRGGAKETYGIVAQAHAHEGSIFALCLRRDGTVLSGGGRDRRLVQWGPGLVALQEAEIPEHFGAVRAIAEGLGSELLVGTTKNALLRGDLAQGFSPVIQGHTDELWGLCTHPSQNRFLTCGHDRQLCLWDGESHALAWSIDLKETGLCADFHPSGAVVAVGLNTGRWLVLDTETREIVSDVIDGNEQLSVVRYSPDGLYLAIGSHDNVIYIYSVSSDGAKSSRFGRCMGHSSFITHLDWSKDGNFIMSNSGDYEILYWDVAGGCKQLKNRYESRDREWATYTCVLGFHVYGVWPDGSDGTDINSLCRSHNERVVAVADDFCKVHLFQYPCARAKAPSRMYGGHGSHVTSVRFTHDDSHLVSLGGKDASIFQWRVLGAGGAGPAPATPSRTPSLSPASSLDV

SEQ ID NO: 804414 - protein, 785 aa, Homo sapiens
LGTVEAEYQSEGGGSSSSGAGSPGPPGILRPLQPPQRADTPRRNSSSSSSPSERPRQKLSRKAISSANLLVRSGSTESRGGKDPLSSPGGPGSRRSNYNLEGISVKMFLRGRPITMYIPSGIRSLEELPSGPPPETLSLDWVYGYRGRDSRSNLFVLRSGEVVYFIACVVVLYRPGGGPGGPGGGGQRHYRGHTDCVRCLAVHPDGVRVASGQTAGVDKDGKPLQPVVHIWDSETLLKLQEIGLGAFERGVGALAFSAADQGAFLCVVDDSNEHMLSVWDCSRGMKLAEIKSTNDSVLAVGFNPRDSSCIVTSGKSHVHFWNWSGGVGVPGNGTLTRKQGVFGKYKKPKFIPCFVFLPDGDILTGDSEGNILTWGRSPSDSKTPGRGGAKETYGIVAQAHAHEGSIFALCLRRDGTVLSGGGRDRRLVQWGPGLVALQEAEIPEHFGAVRAIAEGLGSELLVGTTKNALLRGDLAQGFSPVIQGHTDELWGLCTHPSQNRFLTCGHDRQLCLWDGESHALAWSIDLKETGLCADFHPSGAVVAVGLNTGRWLVLDTETREIVSDVIDGNEQLSVVRYSPDGLYLAIGSHDNVIYIYSVSSDGAKSSRFGRCMGHSSFITHLDWSKDGNFIMSNSGDYEILYWDVAGGCKQLKNRYESRDREWATYTCVLGFHVYGVWPDGSDGTDINSLCRSHNERVVAVADDFCKVHLFQYPCARAKAPSRMYGGHGSHVTSVRFTHDDSHLVSLGGKDASIFQWRVLGAGGAGPAPATPSRTPSLSPASSLDV

SEQ ID NO: 804415 - protein, 714 aa, Homo sapiens
AFSLPNSRGGKDPLSSPGGPGSRRSNYNLEGISVKMFLRGRPITMYIPSGIRSLEELPSGPPPETLSLDWVYGYRGRDSRSNLFVLRSGEVVYFIACVVVLYRPGGGPGGPGGGGQRHYRGHTDCVRCLAVHPDGVRVASGQTAGVDKDGKPLQPVVHIWDSETLLKLQEIGLGAFERGVGALAFSAADQGAFLCVVDDSNEHMLSVWDCSRGMKLAEIKSTNDSVLAVGFNPRDSSCIVTSGKSHVHFWNWSGGVGVPGNGTLTRKQGVFGKYKKPKFIPCFVFLPDGDILTGDSEGNILTWGRSPSDSKTPGRGGAKETYGIVAQAHAHEGSIFALCLRRDGTVLSGGGRDRRLVQWGPGLVALQEAEIPEHFGAVRAIAEGLGSELLVGTTKNALLRGDLAQGFSPVIQGHTDELWGLCTHPSQNRFLTCGHDRQLCLWDGESHALAWSIDLKETGLCADFHPSGAVVAVGLNTGRWLVLDTETREIVSDVIDGNEQLSVVRYSPDGLYLAIGSHDNVIYIYSVSSDGAKSSRFGRCMGHSSFITHLDWSKDGNFIMSNSGDYEILYWDVAGGCKQLKNRYESRDREWATYTCVLGFHVYGVWPDGSDGTDINSLCRSHNERVVAVADDFCKVHLFQYPCARAKAPSRMYGGHGSHVTSVRFTHDDSHLVSLGGKDASIFQWRVLGAGGAGPAPATPSRTPSLSPASSLDV

SEQ ID NO: 804416 - protein, 622 aa, Homo sapiens
VEKQTRLGSEAWVVPVGGPGGGGQRHYRGHTDCVRCLAVHPDGVRVASGQTAGVDKDGKPLQPVVHIWDSETLLKLQEIGLGAFERGVGALAFSAADQGAFLCVVDDSNEHMLSVWDCSRGMKLAEIKSTNDSVLAVGFNPRDSSCIVTSGKSHVHFWNWSGGVGVPGNGTLTRKQGVFGKYKKPKFIPCFVFLPDGDILTGDSEGNILTWGRSPSDSKTPGRGGAKETYGIVAQAHAHEGSIFALCLRRDGTVLSGGGRDRRLVQWGPGLVALQEAEIPEHFGAVRAIAEGLGSELLVGTTKNALLRGDLAQGFSPVIQGHTDELWGLCTHPSQNRFLTCGHDRQLCLWDGESHALAWSIDLKETGLCADFHPSGAVVAVGLNTGRWLVLDTETREIVSDVIDGNEQLSVVRYSPDGLYLAIGSHDNVIYIYSVSSDGAKSSRFGRCMGHSSFITHLDWSKDGNFIMSNSGDYEILYWDVAGGCKQLKNRYESRDREWATYTCVLGFHVYGVWPDGSDGTDINSLCRSHNERVVAVADDFCKVHLFQYPCARAKAPSRMYGGHGSHVTSVRFTHDDSHLVSLGGKDASIFQWRVLGAGGAGPAPATPSRTPSLSPASSLDV

SEQ ID NO: 804417 - protein, 1014 aa, Homo sapiens
APGCFPFPSPRPWPPRLRRLLRRRRSEQPGGRMDGAAGPGDGPAREALQSLSQRLRVQEQEMELVKAALAEALRLLRLQVPPSSLQGSGTPAPPGDSLAAPPGLPPTCTPSLVSRGTQTETEVELKSSPGPPGLSNGPPAPQGASEEPSGTQSEGGGSSSSGAGSPGPPGILRPLQPPQRADTPRRNSSSSSSPSERPRQKLSRKAISSANLLVRSGSTESRGGKDPLSSPGGPGSRRSNYNLEGISVKMFLRGRPITMYIPSGIRSLEELPSGPPPETLSLDWVYGYRGRDSRSNLFVLRSGEVVYFIACVVVLYRPGGGPGGPGGGGQRHYRGHTDCVRCLAVHPDGVRVASGQTAGVDKDGKPLQPVVHIWDSETLLKLQEIGLGAFERGVGALAFSAADQGAFLCVVDDSNEHMLSVWDCSRGMKLAEIKSTNDSVLAVGFNPRDSSCIVTSGKSHVHFWNWSGGVGVPGNGTLTRKQGVFGKYKKPKFIPCFVFLPDGDILTGDSEGNILTWGRSPSDSKTPGRGGAKETYGIVAQAHAHEGSIFALCLRRDGTVLSGGGRDRRLVQWGPGLVALQEAEIPEHFGAVRAIAEGLGSELLVGTTKNALLRGDLAQGFSPVIQGHTDELWGLCTHPSQNRFLTCGHDRQLCLWDGESHALAWSIDLKETGLCADFHPSGAVVAVGLNTGRWLVLDTETREIVSDVIDGNEQLSVVRYSPDGLYLAIGSHDNVIYIYSVSSDGAKSSRFGRCMGHSSFITHLDWSKDGNFIMSNSGDYEILYWDVAGGCKQLKNRYESRDREWATYTCVLGFHVYGEQGVETCWKGGGQGGAQFGLGTLGVCRWVRVQKPEDPAQEAPRDREGLPGTRQWVPRLPERLKWCSSGPWVAVGEEVGLRPAAVLGVWPDGSDGTDINSLCRSHNERVVAVADDFCKVHLFQYPCARAKAPSRMYGGHGSHVTSVRFTHDDSHLVSLGGKDASIFQWRVLGAGGAGPAPATPSRTPSLSPASSLDV

SEQ ID NO: 804418 - protein, 1041 aa, Homo sapiens
APGCFPFPSPRPWPPRLRRLLRRRRSEQPGGRMDGAAGPGDGPAREALQSLSQRLRVQEQEMELVKAALAEALRLLRLQVPPSSLQGSGTPAPPGDSLAAPPGLPPTCTPSLVSRGTQTETEVELKSSPGPPGLSNGPPAPQGASEEPSGTQSEGGGSSSSGAGSPGPPGILRPLQPPQRADTPRRNSSSSSSPSERPRQKLSRKAISSANLLVRSGSTESRGGKDPLSSPGGPGSRRSNYNLEGISVKMFLRGRPITMYIPSGIRSLEELPSGPPPETLSLDWVYGYRGRDSRSNLFVLRSGEVVYFIACVVVLYRPGGGPGGPGGGGQRHYRGHTDCVRCLAVHPDGVRVASGQTAGVDKDGKPLQPVVHIWDSETLLKLQEIGLGAFERGVGALAFSAADQGAFLCVVDDSNEHMLSVWDCSRGMKLAEIKSTNDSVLAVGFNPRDSSCIVTSGKSHVHFWNWSGGVGVPGNGTLTRKQGVFGKYKKPKFIPCFVFLPDGDILTGDSEGNILTWGRSPSDSKTPGRGGAKETYGIVAQAHAHEGSIFALCLRRDGTVLSGGGRDRRLVQWGPGLVALQEAEIPEHFGAVRAIAEGLGSELLVGTTKNALLRGDLAQGFSPVIQGHTDELWGLCTHPSQNRFLTCGHDRQLCLWDGESHALAWSIDLKETGLCADFHPSGAVVAVGLNTGRWLVLDTETREIVSDVIDGNEQLSVVRYSPDGLYLAIGSHDNVIYIYSVSSDGAKSSRFGRCMGHSSFITHLDWSKDGNFIMSNSGDYEILYWDVAGGCKQLKNRYESRDREWATYTCVLGFHVYGEQGVETCWKGGGQGGAQFGLGTLGVCRWVRVQKPEDPAQEAPRDREGLPGTRQWVAAAAGAPEMDVALGRGWRWVGGRAEAGRCARRLAGRLRWDRHQLPVPLPQRARGGGGRRLLQSASLPVPVRSCQGEAAGIAGVGPVGPRAQPPPQLFPPAQAPSRMYGGHGSHVTSVRFTHDDSHLVSLGGKDASIFQWRVLGAGGAGPAPATPSRTPSLSPASSLDV

SEQ ID NO: 804419 - protein, 515 aa, Homo sapiens
RQCLALSPRLECSAGFHHIGQAGHKLLASGDPPALASQSAGITGMSHCTWPALRLLIFALPFDLYCLLSPPTEKYKKPKFIPCFVFLPDGDILTGDSEGNILTWGRSPSDSKTPGRGGAKETYGIVAQAHAHEGSIFALCLRRDGTVLSGGGRDRRLVQWGPGLVALQEAEIPEHFGAVRAIAEGLGSELLVGTTKNALLRGDLAQGFSPVIQGHTDELWGLCTHPSQNRFLTCGHDRQLCLWDGESHALAWSIDLKETGLCADFHPSGAVVAVGLNTGRWLVLDTETREIVSDVIDGNEQLSVVRYSPDGLYLAIGSHDNVIYIYSVSSDGAKSSRFGRCMGHSSFITHLDWSKDGNFIMSNSGDYEILYWDVAGGCKQLKNRYESRDREWATYTCVLGFHVYGVWPDGSDGTDINSLCRSHNERVVAVADDFCKVHLFQYPCARAKAPSRMYGGHGSHVTSVRFTHDDSHLVSLGGKDASIFQWRVLGAGGAGPAPATPSRTPSLSPASSLDV

SEQ ID NO: 804420 - protein, 928 aa, Homo sapiens; identical to SEQ ID NO: 804412

SEQ ID NO: 804421 - protein, 317 aa, Homo sapiens
ASTDIDARDKFSLSPGHTDELWGLCTHPSQNRFLTCGHDRQLCLWDGESHALAWSIDLKETGLCADFHPSGAVVAVGLNTGRWLVLDTETREIVSDVIDGNEQLSVVRYSPDGLYLAIGSHDNVIYIYSVSSDGAKSSRFGRCMGHSSFITHLDWSKDGNFIMSNSGDYEILYWDVAGGCKQLKNRYESRDREWATYTCVLGFHVYGVWPDGSDGTDINSLCRSHNERVVAVADDFCKVHLFQYPCARAKAPSRMYGGHGSHVTSVRFTHDDSHLVSLGGKDASIFQWRVLGAGGAGPAPATPSRTPSLSPASSLDV

SEQ ID NO: 804422 - protein, 272 aa, Homo sapiens
MKDIILNSPSPLSQETGLCADFHPSGAVVAVGLNTGRWLVLDTETREIVSDVIDGNEQLSVVRYSPDGLYLAIGSHDNVIYIYSVSSDGAKSSRFGRCMGHSSFITHLDWSKDGNFIMSNSGDYEILYWDVAGGCKQLKNRYESRDREWATYTCVLGFHVYGVWPDGSDGTDINSLCRSHNERVVAVADDFCKVHLFQYPCARAKAPSRMYGGHGSHVTSVRFTHDDSHLVSLGGKDASIFQWRVLGAGGAGPAPATPSRTPSLSPASSLDV

SEQ ID NO: 804423 - protein, 289 aa, Homo sapiens
NAVVTCLLHQSLSVCVSELLLFAIPKPTQGGLPGGLLTSCLFVFLSASTSLPSRWLVLDTETREIVSDVIDGNEQLSVVRYSPDGLYLAIGSHDNVIYIYSVSSDGAKSSRFGRCMGHSSFITHLDWSKDGNFIMSNSGDYEILYWDVAGGCKQLKNRYESRDREWATYTCVLGFHVYGVWPDGSDGTDINSLCRSHNERVVAVADDFCKVHLFQYPCARAKAPSRMYGGHGSHVTSVRFTHDDSHLVSLGGKDASIFQWRVLGAGGAGPAPATPSRTPSLSPASSLDV

SEQ ID NO: 804424 - protein, 209 aa, Homo sapiens
MSWYGLYLAIGSHDNVIYIYSVSSDGAKSSRFGRCMGHSSFITHLDWSKDGNFIMSNSGDYEILYWDVAGGCKQLKNRYESRDREWATYTCVLGFHVYGVWPDGSDGTDINSLCRSHNERVVAVADDFCKVHLFQYPCARAKAPSRMYGGHGSHVTSVRFTHDDSHLVSLGGKDASIFQWRVLGAGGAGPAPATPSRTPSLSPASSLDV

SEQ ID NO: 804425 - protein, 693 aa, Homo sapiens
APGCFPFPSPRPWPPRLRRLLRRRRSEQPGGRMDGAAGPGDGPAREALQSLSQRLRVQEQEMELVKAALAEALRLLRLQVPPSSLQGSGTPAPPGDSLAAPPGLPPTCTPSLVSRGTQTETEVELKSSPGPPGLSNGPPAPQGASEEPSGTQSEGGGSSSSGAGSPGPPGILRPLQPPQRADTPRRNSSSSSSPSERPRQKLSRKAISSANLLVRSGSTESRGGKDPLSSPGGPGSRRSNYNLEGISVKMFLRGRPITMYIPSGIRSLEELPSGPPPETLSLDWVYGYRGRDSRSNLFVLRSGEVVYFIACVVVLYRPGGGPGGPGGGGQRHYRGHTDCVRCLAVHPDGVRVASGQTAGVDKDGKPLQPVVHIWDSETLLKLQEIGLGAFERGVGALAFSAADQGAFLCVVDDSNEHMLSVWDCSRGMKLAEIKSTNDSVLAVGFNPRDSSCIVTSGKSHVHFWNWSGGVGVPGNGTLTRKQGVFGKYKKPKFIPCFVFLPDGDILTGDSEGNILTWGRSPSDSKTPGRGGAKETYGIVAQAHAHEGSIFALCLRRDGTVLSGGGRDRRLVQWGPGLVALQEAEIPEHFGAVRAIAEGLGSELLVGTTKNALLRGDLAQGFSPVIQGHTDELWGLCTHPSQNRFLTCGHDRQLCLWDGESHALAWSIDLKETGLCADFHPSGAVVAVGLNTGR

SEQ ID NO: 804426 - protein, 351 aa, Homo sapiens
APGCFPFPSPRPWPPRLRRLLRRRRSEQPGGRMDGAAGPGDGPAREALQSLSQRLRVQEQEMELVKAALAEALRLLRLQVPPSSLQGSGTPAPPGDSLAAPPGLPPTCTPSLVSRGTQTETEVELKSSPGPPGLSNGPPAPQGASEEPSGTQSEGGGSSSSGAGSPGPPGILRPLQPPQRADTPRRNSSSSSSPSERPRQKLSRKAISSANLLVRSGSTESRGGKDPLSSPGGPGSRRSNYNLEGISVKMFLRGRPITMYIPSGIRSLEELPSGPPPETLSLDWVYGYRGRDSRSNLFVLRSGEVVYFIACVVVLYRPGGGPGVLEVAARDITGGTQTAFDALLFTLMVFG

SEQ ID NO: 804427 - protein, 172 aa, Homo sapiens
MKDIILNSPSPLSQETGLCADFHPSGAVVAVGLNTGRWLVLDTETREIVSDVIDGNEQLSVVRYSPDGLYLAIGSHDNVIYIYSVSSDGAKSSRFGRCMGHSSFITHLDWSKDGNFIMSNSGDYEILYWDVAGGCKQLKNRYESRDREWATYTCVLGFHVYGEQGRGNLLEG

SEQ ID NO: 804428 - protein, 119 aa, Homo sapiens
MVKMTKSKTFQAYLPNCHRTYSCIHCRAHLANHDELISKSFQGSQGRAYLFNSVVNVGCGPAEERVLLTGLHAVADIYCENCKTTLGWKYEHAFESSQKYKEGKFIIELAHMIKDNGWE

SEQ ID NO: 804429 - protein, 119 aa, Homo sapiens; identical to SEQ ID NO: 804428

SEQ ID NO: 804430 - protein, 365 aa, Homo sapiens
GRHRLPVCFPPGGSRGLELADSSATGGRSLVSCFHVILSGTGRGGGLRSLSARTTTPASPGGKPPERRRLDGGGALGRSVARAPPTAAFLCWAPEPLRPGARADGGRAQLLPERRRVLVGHTPFLLFTREPSDMVAPGSVTSRLGSVFPFLLVLVDLQYEGAECGVNADVEKHLELGKKLLAAGQLADALSQFHAAVDGDPDNYIAYYRRATVFLAMGKSKAALPDLTKVIQLKMDFTAARLQRGHLLLKQGKLDEAEDDFKKVVFPVPSLLGLQRSLLDDLYLLFWFFLMKKVTFRCLSSAISECLPQSLNLMKFNLLISFLLLWTVRLVSCLRSIHYAVGSKTFLISSKSFMVLCFIFKPIVY

SEQ ID NO: 804431 - protein, 734 aa, Homo sapiens
KLFTKSSWKSERQLPLQGLKSIKTTTEQLKQSEREKEKETTSNIWHLVLSTGFPRAPLGIESKIYWQTLLLNTQEGEPQCLLPTEAALCSQTVGCTAVSQAGVSGLFPSNHPFQEIQQPTRHWASAWLPFPPGRAALGIIPGNLPAPEQKPCWDPFLHQPWCGGCSIALPPPPPQPLATSLHPSLDSPTSQLTHPPAASVWVGSIISSSPCNLFPPQIHPVLLFTREPSDMVAPGSVTSRLGSVFPFLLVLVDLQYEGAECGVNADVEKHLELGKKLLAAGQLADALSQFHAAVDGDPDNYIAYYRRATVFLAMGKSKAALPDLTKVIQLKMDFTAARLQRGHLLLKQGKLDEAEDDFKKVLKSNPSENEEKEAQSQLIKSDEMQRLRSQALNAFGSGDYTAAIAFLDKILEVCVWDAELRELRAECFIKEGEPRKAISDLKAASKLKNDNTEAFYKISTLYYQLGDHELSLSEVRECLKLDQDHKRCFAHYKQVKKLNKLIESAEELIRDGRYTDATSKYESVMKTEPSIAEYTVRSKERICHCFSKDEKPVEAIRVCSEVLQMEPDNVNALKDRAEAYLIEEMYDEAIQDYETAQEHNENDQQIREGLEKAQRLLKQSQKRDYYKILGVKRNAKKQEIIKAYRKLALQWHPDNFQNEEEKKKAEKKFIDIAAAKEVLSDPEMRKKFDDGEDPLDAESQQGGGGNPFHRSWNSWQGFNPFSSGGPFRFKFHFN

SEQ ID NO: 804432 - protein, 637 aa, Homo sapiens
GRHRLPVCFPPGGSRGLELADSSATGGRSLVSCFHVILSGTGRGGGLRSLSARTTTPASPGGKPPERRRLDGGGALGRSVARAPPTAAFLCWAPEPLRPGARADGGRAQLLPERRRVLVGHTPFLLFTREPSDMVAPGSVTSRLGSVFPFLLVLVDLQYEGAECGVNADVEKHLELGKKLLAAGQLADALSQFHAAVDGDPDNYIAYYRRATVFLAMGKSKAALPDLTKVIQLKMDFTAARLQRGHLLLKQGKLDEAEDDFKKVLKSNPSENEEKEAQSQLIKSDEMQRLRSQALNAFGSGDYTAAIAFLDKILEVCVWDAELRELRAECFIKEGEPRKAISDLKAASKLKNDNTEAFYKISTLYYQLGDHELSLSEVRECLKLDQDHKRCFAHYKQVKKLNKLIESAEELIRDGRYTDATSKYESVMKTEPSIAEYTVRSKERICHCFSKDEKPVEAIRVCSEVLQMEPDNVNALKDRAEAYLIEEMYDEAIQDYETAQEHNENDQQIREGLEKAQRLLKQSQKRDYYKILGVKRNAKKQEIIKAYRKLALQWHPDNFQNEEEKKKAEKKFIDIAAAKEVLSDPEMRKKFDDGEDPLDAESQQGGGGNPFHRSWNSWQGFNPFSSGGPFRFKFHFN

SEQ ID NO: 804433 - protein, 407 aa, Homo sapiens
  misc_feature (4)..(4): Xaa can be any naturally occurring amino acid
MSAXSFSIWARLQRGHLLLKQGKLDEAEDDFKKVLKSNPSENEEKEAQSQLIKSDEMQRLRSQALNAFGSGDYTAAIAFLDKILEVCVWDAELRELRAECFIKEGEPRKAISDLKAASKLKNDNTEAFYKISTLYYQLGDHELSLSEVRECLKLDQDHKRCFAHYKQVKKLNKLIESAEELIRDGRYTDATSKYESVMKTEPSIAEYTVRSKERICHCFSKDEKPVEAIRVCSEVLQMEPDNVNALKDRAEAYLIEEMYDEAIQDYETAQEHNENDQQIREGLEKAQRLLKQSQKRDYYKILGVKRNAKKQEIIKAYRKLALQWHPDNFQNEEEKKKAEKKFIDIAAAKEVLSDPEMRKKFDDGEDPLDAESQQGGGGNPFHRSWNSWQGFNPFSSGGPFRFKFHFN

SEQ ID NO: 804434 - protein, 223 aa, Homo sapiens
MCEMLSTREARYRHCTQSFFGELVTRHVLSGLHQNPRLPEGKMFTINCIFHTNSSGMSHSYHGMLGTLLKSGFPNVSTIQDYETAQEHNENDQQIREGLEKAQRLLKQSQKRDYYKILGVKRNAKKQEIIKAYRKLALQWHPDNFQNEEEKKKAEKKFIDIAAAKEVLSDPEMRKKFDDGEDPLDAESQQGGGGNPFHRSWNSWQGFNPFSSGGPFRFKFHFN

SEQ ID NO: 804435 - protein, 734 aa, Homo sapiens; identical to SEQ ID NO: 804431

SEQ ID NO: 804436 - protein, 734 aa, Homo sapiens; identical to SEQ ID NO: 804431

SEQ ID NO: 804437 - protein, 734 aa, Homo sapiens; identical to SEQ ID NO: 804431

SEQ ID NO: 804438 - protein, 384 aa, Homo sapiens
GRHRLPVCFPPGGSRGLELADSSATGGRSLVSCFHVILSGTGRGGGLRSLSARTTTPASPGGKPPERRRLDGGGALGRSVARAPPTAAFLCWAPEPLRPGARADGGRAQLLPERRRVLVGHTPFLLFTREPSDMVAPGSVTSRLGSVFPFLLVLVDLQYEGAECGVNADVEKHLELGKKLLAAGQLADALSQFHAAVDGDPDNYIAYYRRATVFLAMGKSKAALPDLTKVIQLKMDFTAARLQRGHLLLKQGKLDEAEDDFKKVLKSNPSENEEKEAQSQLIKSDEMQRLRSQALNAFGSGDYTAAIAFLDKILEVSFLDTAVDQPDTYCKAHLYTSTCHIPQRPRQEKIRLVLGLLPLKYKIVFLDNKIWTEVFSKCTECAVA

SEQ ID NO: 804439 - protein, 734 aa, Homo sapiens; identical to SEQ ID NO: 804431

SEQ ID NO: 804440 - protein, 734 aa, Homo sapiens; identical to SEQ ID NO: 804431

SEQ ID NO: 804441 - protein, 270 aa, Homo sapiens
MPRDNMASLIQRIARQACLTFRGSGGGRGASDRDAASGPEAPMQPGFPENLSKLKSLLTQLRAEDLNIAPRKATLQPLPPNLPPVTYMHIYETDGFSLGVFLLKSGTSIPLHDHPGMHGMLKVLYGTVRISCMDKLDAGGGQRPRALPPEQQFEPPLQPREREAVRPGVLRSRAEYTEASGPCILTPHRDNLHQIDAVEGPAAFLDILAPPYDPDDGRDCHYYRVLEPVRPKEASSSACDLPREVWLLETPQADDFWCEGEPYPGPKVFP

SEQ ID NO: 804442 - protein, 338 aa, Homo sapiens
RQLEPQYGAPLAVNCGGYFSSLYSRHYRWVSMARASVCGSAHRLGQRRRGRGRRKGGGRSRHAEEQPTMPRDNMASLIQRIARQACLTFRGSGGGRGASDRDAASGPEAPMQPGFPENLSKLKSLLTQLRAEDLNIAPRKATLQPLPPNLPPVTYMHIYETDGFSLGVFLLKSGTSIPLHDHPGMHGMLKVLYGTVRISCMDKLDAGGGQRPRALPPEQQFEPPLQPREREAVRPGVLRSRAEYTEASGPCILTPHRDNLHQIDAVEGPAAFLDILAPPYDPDDGRDCHYYRVLEPVRPKEASSSACDLPREVWLLETPQADDFWCEGEPYPGPKVFP

SEQ ID NO: 804443 - protein, 159 aa, Homo sapiens
MPRDNMASLIQRIARQACLTFRGSGGGRGASDRDAASGPEAPMQPGFPENLSKLKSLLTQLRAEDLNIARAAVRAAAAAPGARSRAAGRAAFAGRVHRGQRPLHPHTAPGQPAPDRRRGRACRLPGHPGPALRPGRWPGLPLLPGAGAGQAQGGLQLGL

SEQ ID NO: 804444 - protein, 270 aa, Homo sapiens; identical to SEQ ID NO: 804441

SEQ ID NO: 804445 - protein, 270 aa, Homo sapiens; identical to SEQ ID NO: 804441

SEQ ID NO: 804446 - protein, 228 aa, Homo sapiens
MQPGFPENLSKLKSLLTQLRAEDLNIAPRKATLQPLPPNLPPVTYMHIYETDGFSLGVFLLKSGTSIPLHDHPGMHGMLKVLYGTVRISCMDKLDAGGGQRPRALPPEQQFEPPLQPREREAVRPGVLRSRAEYTEASGPCILTPHRDNLHQIDAVEGPAAFLDILAPPYDPDDGRDCHYYRVLEPVRPKEASSSACDLPREVWLLETPQADDFWCEGEPYPGPKVFP

SEQ ID NO: 804447 - protein, 238 aa, Homo sapiens
MPRDNMASLIQRIARQACLTFRGSGGGRGASDRDAASGPEAPMQPGFPENLSKLKSLLTQLRAEDLNIAPRKATLQPSTPRPAAPASSHRTGTTCTRSTPWKGLPPSWTSWPRPTTRTMAGTATITGCWSRSGPRRPPARPVTCLERCGSWRPHRPMTSGARENPIQVPRSSLEATGAQERWAEDVPYPTTRAVSLPPSLGVGSTGMSSSRFLGSLGKHGRLDSSRRARLWGRGGRGG

SEQ ID NO: 804448 - protein, 469 aa, Homo sapiens
MEYHQPEDPAPGKAGTAEAVIPENHEVLAGPDEHPQDTDARDADGEAREREPADQALLPSQCGDNLESPLPEASSAPPGPTLGTLPEVETIRACSMPQELPQSPRTRQPEPDFYCVKWIPWKGEQTPIITQSTNGPCPLLAIMNILFLQWKVKLPPQKEVITSDELMAHLGNCLLSIKPQEKSEGLQLNFQQNVDDAMTVLPKLATGLDVNVRFTGVSDFEYTPECSVFDLLGIPLYHGWLVDPQSPEAVRAVGKLSYNQLVERIITCKHSSDTNLVTEGLIAEQFLETTAAQLTYHGLCELTAAAKEGELSVFFRNNHFSTMTKHKSHLYLLVTDQGFLQEEQVVWESLHNVDGDSCFCDSDFHLSHSLGKGPGAEGGSGSPEKQLQVDQDYLIALSLQQQQPRGPLGLTDLELAQQLQQEEYQQQQAAQPVRMRTRVLSLQGRGATSGRPAGERRQRPKHESDCILL

SEQ ID NO: 804449 - protein, 327 aa, Homo sapiens
MNILFLQWKVKLPPQKEVITSDELMAHLGNCLLSIKPQEKSEGLQLNFQQNVDDAMTVLPKLATGLDVNVRFTGVSDFEYTPECSVFDLLGIPLYHGWLVDPQSPEAVRAVGKLSYNQLVERIITCKHSSDTNLVTEGLIAEQFLETTAAQLTYHGLCELTAAAKEGELSVFFRNNHFSTMTKHKSHLYLLVTDQGFLQEEQVVWESLHNVDGDSCFCDSDFHLSHSLGKGPGAEGGSGSPEKQLQVDQDYLIALSLQQQQPRGPLGLTDLELAQQLQQEEYQQQQAAQPVRMRTRVLSLQGRGATSGRPAGERRQRPKHESDCILL

SEQ ID NO: 804450 - protein, 469 aa, Homo sapiens; identical to SEQ ID NO: 804448

SEQ ID NO: 804451 - protein, 469 aa, Homo sapiens; identical to SEQ ID NO: 804448

SEQ ID NO: 804452 - protein, 303 aa, Homo sapiens [sequence omitted]

SEQ ID NO: 804453 - protein, 250 aa, Homo sapiens
MAHLGNCLLSIKPQEKSEGLQLNFQQSPEAVRAVGKLSYNQLVERIITCKHSSDTNLVTEGLIAEQFLETTAAQLTYHGLCELTAAAKEGELSVFFRNNHFSTMTKHKSHLYLLVTDQGFLQEEQVVWESLHNVDGDSCFCDSDFHLSHSLGKGPGAEGGSGSPEKQLQVDQDYLIALSLQQQQPRGPLGLTDLELAQQLQQEEYQQQQAAQPVRMRTRVLSLQGRGATSGRPAGERRQRPKHESDCILL

SEQ ID NO: 804454 - protein, 414 aa, Homo sapiens [sequence omitted]

SEQ ID NO: 804455 - protein, 166 aa, Homo sapiens
GKAGTAEAVIPENHEVLAGPDEHPQDTDARDADGEAREREPADQALLPSQCGDNLESPLPEASSAPPGPTLGTLPEVETIRACSMPQELPQSPRTRQPEPDFYCVKWIPWKGEQTPIITQSTNGPCPLLAIMNILFLQWKVREHAVRGAKNIREYSSLTYFLDHPD

SEQ ID NO: 804456 - protein, 469 aa, Homo sapiens; identical to SEQ ID NO: 804448

SEQ ID NO: 804457 - protein, 469 aa, Homo sapiens; identical to SEQ ID NO: 804448

SEQ ID NO: 804458 - protein, 469 aa, Homo sapiens; identical to SEQ ID NO: 804448

SEQ ID NO: 804459 - protein, 469 aa, Homo sapiens; identical to SEQ ID NO: 804448

SEQ ID NO: 804460 - protein, 469 aa, Homo sapiens; identical to SEQ ID NO: 804448

SEQ ID NO: 804461 - protein, 457 aa, Homo sapiens
MEYHQPEDPAPGKAGTAEAVIPENHEVLAGPDEHPQDTDARDADGEAREREPADQALLPSQCGDNLESPLPEASSAPPGPTLGTLPEVETIRACSMPQELPQSPRTRQPEPDFYCVKWIPWKGEQTPIITQSTNGPCPLLAIMNILFLQWKVKLPPQKEVITSDELMAHLGNCLLSIKPQEKSEGLQLNFQQNVDDAMTVLPKLATGLDVNVRFTGVSDFEYTPECSVFDLLGIPLYHGWLVDPQSPEAVRAVGKLSYNQLVERIITCKHSSDTNLVTEGLIAEQFLETTAAQLTYHGLCELTAAAKEGELSVFFRNNHFSTMTKHKSHLYLLVTDQGFLQEEQVVWESLHNVDGDSCFCDSDFHLSHSLGKGPGAEGGSGSPEKQLQVDQDYLIALSLQQQQPRGPLGLTDLELAQQLQQEEYQQQQAAQPVRMRTRVLSLQGRGATSDAHREFRI

SEQ ID NO: 804462 - protein, 231 aa, Homo sapiens
MEYHQPEDPAPGKAGTAEAVIPENHEVLAGPDEHPQDTDARDADGEAREREPADQALLPSQCGDNLESPLPEASSAPPGPTLGTLPEVETIRACSMPQELPQSPRTRQPEPDFYCVKWIPWKGEQTPIITQSTNGPCPLLAIMNILFLQWKVKLPPQKEVITSDELMAHLGNCLLSIKPQEKSEGLQLNFQQNVDDAMTVLPKLATGHSYPSRRGALKSWRSGVSRGEGLS

SEQ ID NO: 804463 - protein, 97 aa, Homo sapiens
RLSPRRIPGVDLLAASLCLPSCAPFPASRCCWRALAGFFLPRPRDGGECGTEEPGLPTRWARAPKGPLGSERGGSPRGPRPSLASDCATLRSGLTGG

SEQ ID NO: 804464 - protein, 97 aa, Homo sapiens; identical to SEQ ID NO: 804463

SEQ ID NO: 804465 - protein, 97 aa, Homo sapiens; identical to SEQ ID NO: 804463

SEQ ID NO: 804466 - protein, 97 aa, Homo sapiens; identical to SEQ ID NO: 804463

SEQ ID NO: 804467 - protein, 122 aa, Homo sapiens
SALSPRRIPGVDLLAASLCLPSCAPFPASRCCWRALAGFFLPRPRDGGECGTEEPGLPTRWARAPKGPLGSERGGSPRGPRPSLASDCATLRSGLTGECCRQAAGFTEGVGVWEPVSWGMRG

SEQ ID NO: 804468 - protein, 97 aa, Homo sapiens; identical to SEQ ID NO: 804463

SEQ ID NO: 804469 - protein, 97 aa, Homo sapiens; identical to SEQ ID NO: 804463

SEQ ID NO: 804470 - protein, 97 aa, Homo sapiens; identical to SEQ ID NO: 804463

SEQ ID NO: 804471 - protein, 122 aa, Homo sapiens; identical to SEQ ID NO: 804467

SEQ ID NO: 804472 - protein, 97 aa, Homo sapiens; identical to SEQ ID NO: 804463

SEQ ID NO: 804473 - protein, 71 aa, Homo sapiens
SWRPELLFSMVIHSVTSPNYLVTVLAQTTELPFDTNCKFSDPLWIHAQSAYNTQDRSSREKESTFPRQMQH

SEQ ID NO: 804474 - protein, 491 aa, Homo sapiens
MDHTDNELQGTNSSGSLGGLDVRRRIPIKLISKQANKAKPAPRTQRTINRMPAKAPPGDEEGFDYNEEERYDCKGGELFANQRRFPGHLFWDFQINILGEKDDTPVHFCDKCGLPIKIYGRMIPCKHVFCYDCAILHEKKGDKMCPGCSDPVQRIEQCTRGSLFMCSIVQGCKRTYLSQRDLQAHINHRHMRAGKPVTRASLENVHPPIAPPPTEIPERFIMPPDKHHMSHIPPKQHIMMPPPPLQHVPHEHYNQPHEDIRAPPAELSMAPPPPRSVSQETFRISTRKHSNLITVPIQDDSNSGAREPPPPAPAPAHHHPEYQGQPVVSHPHHIMPPQQHYAPPPPPPPPISHPMPHPPQAAGTPHLVYSQAPPPPMTSAPPPITPPPGHIIAQMPPYMNHPPPGPPPPQHGGPPVTAPPPHHYNPNSLPQFTEDQGTLSPPFTQPGGMSPGIWPAPRGPPPPPRLQGPPSQTPLPGPHHPDQTRYRPYYQ

SEQ ID NO: 804475 - protein, 491 aa, Homo sapiens; identical to SEQ ID NO: 804474

SEQ ID NO: 804476 - protein, 370 aa, Homo sapiens
MIPCKHVFCYDCAILHEKKGDKMCPGCSDPVQRIEQCTRGSLFMCSIVQGCKRTYLSQRDLQAHINHRHMRAGKPVTRASLENVHPPIAPPPTEIPERFIMPPDKHHMSHIPPKQHIMMPPPPLQHVPHEHYNQPHEDIRAPPAELSMAPPPPRSVSQETFRISTRKHSNLITVPIQDDSNSGAREPPPPAPAPAHHHPEYQGQPVVSHPHHIMPPQQHYAPPPPPPPPISHPMPHPPQAAGTPHLVYSQAPPPPMTSAPPPITPPPGHIIAQMPPYMNHPPPGPPPPQHGGPPVTAPPPHHYNPNSLPQFTEDQGTLSPPFTQPGGMSPGIWPAPRGPPPPPRLQGPPSQTPLPGPHHPDQTRYRPYYQ

SEQ ID NO: 804477 - protein, 441 aa, Homo sapiens
MPAKAPPGDEEGFDYNEEERYDCKGGELFANQRRFPGHLFWDFQINILGEKDDTPVHFCDKCGLPIKIYGRMIPCKHVFCYDCAILHEKKGDKMCPGCSDPVQRIEQCTRGSLFMCSIVQGCKRTYLSQRDLQAHINHRHMRAGKPVTRASLENVHPPIAPPPTEIPERFIMPPDKHHMSHIPPKQHIMMPPPPLQHVPHEHYNQPHEDIRAPPAELSMAPPPPRSVSQETFRISTRKHSNLITVPIQDDSNSGAREPPPPAPAPAHHHPEYQGQPVVSHPHHIMPPQQHYAPPPPPPPPISHPMPHPPQAAGTPHLVYSQAPPPPMTSAPPPITPPPGHIIAQMPPYMNHPPPGPPPPQHGGPPVTAPPPHHYNPNSLPQFTEDQGTLSPPFTQPGGMSPGIWPAPRGPPPPPRLQGPPSQTPLPGPHHPDQTRYRPYYQ

SEQ ID NO: 804478 - protein, 491 aa, Homo sapiens; identical to SEQ ID NO: 804474

SEQ ID NO: 804479 - protein, 1382 aa, Homo sapiens
MTRKRTYWVPNSSGGLVNRGIDIGDDMVSGLIYKTYTLQDGPWSQQERNPEAPGRAAVPPWGKYDAALRTMIPFRPKPRFPAPQPLDNAGLFSYLTVSWLTPLMIQSLRSRLDENTIPPLSVHDASDKNVQRLHRLWEEEVSRRGIEKASVLLVMLRFQRTRLIFDALLGICFCIASVLGPILIIPKILEYSEEQLGNVVHGVGLCFALFLSECVKSLSFSSSWIINQRTAIRFRAAVSSFAFEKLIQFKSVIHITSGEAISFFTGDVNYLFEGVCYGPLVLITCASLVICSISSYFIIGYTAFIAILCYLLVFPLAVFMTRMAVKAQHHTSEVSDQRIRVTSEVLTCIKLIKMYTWEKPFAKIIEDLRRKERKLLEKCGLVQSLTSITLFIIPTVATAVWVLIHTSLKLKLTASMAFSMLASLNLLRLSVFFVPIAVKGLTNSKSAVMRFKKFFLQESPVFYVQTLQDPSKALVFEEATLSWQQTCPGIVNGALELERNGHASEGMTRPRDALGPEEEGNSLGPELHKINLVVSKGMMLGVCGNTGSGKSSLLSAILEEMHLLEGSVGVQGSLAYVPQQAWIVSGNIRENILMGGAYDKARYLQVLHCCSLNRDLELLPFGDMTEIGERGLNLSGGQKQRISLARAVYSDRQIYLLDDPLSAVDAHVGKHIFEECIKKTLRGKTVVLVTHQLQYLEFCGQIILLENGKICENGTHSELMQKKGKYAQLIQKMHKEATSDMLQDTAKIAEKPKVESQALATSLEESLNGNAVPEHQLTQEEEMEEGSLSWRVYHHYIQAAGGYMVSCIIFFFVVLIVFLTIFSFWWLSYWLEQGSGTNSSRESNGTMADLGNIADNPQLSFYQLVYGLNALLLICVGVCSSGIFTKVTRKASTALHNKLFNKVFRCPMSFFDTIPIGRLLNCFAGDLEQLDQLLPIFSEQFLVLSLMVIAVLLIVSVLSPYILLMGAIIMVICFIYYMMFKKAIGVFKRLENYSRSPLFSHILNSLQGLSSIHVYGKTEDFISQFKRLTDAQNNYLLLFLSSTRWMALRLEIMTNLVTLAVALFVAFGISSTPYSFKVMAVNIVLQLASSFQATARIGLETEAQFTAVERILQYMKMCVSEAPLHMEGTSCPQGWPQHGEIIFQDYHMKYRDNTPTVLHGINLTIRGHEVVGIVGRTGSGKSSLGMALFRLVEPMAGRILIDGVDICSIGLEDLRSKLSVIPQDPVLLSGTIRFNLDPFDRHTDQQIWDALERTFLTKAISKFPKKLHTDVVENGGNFSVGERQLLCIARAVLRNSKIILIDEATASIDMETDTLIQRTIREAFQGCTVLVIAHRVTTVLNCDHILVMGNGKVVEFDRPEVLRKKPGSLFAALMATATSSLR

SEQ ID NO: 804480 - protein, 1382 aa, Homo sapiens; identical to SEQ ID NO: 804479

SEQ ID NO: 804481 - protein, 1250 aa, Homo sapiens
AGYFDLQSSLDCTNGGGGSLPRRKLRHWYRYGEVKILIIPKILEYSEEQLGNVVHGVGLCFALFLSECVKSLSFSSSWIINQRTAIRFRAAVSSFAFEKLIQFKSVIHITSGEAISFFTGDVNYLFEGVCYGPLVLITCASLVICSISSYFIIGYTAFIAILCYLLVFPLAVFMTRMAVKAQHHTSEVSDQRIRVTSEVLTCIKLIKMYTWEKPFAKIIEDLRRKERKLLEKCGLVQSLTSITLFIIPTVATAVWVLIHTSLKLKLTASMAFSMLASLNLLRLSVFFVPIAVKGLTNSKSAVMRFKKFFLQESPVFYVQTLQDPSKALVFEEATLSWQQTCPGIVNGALELERNGHASEGMTRPRDALGPEEEGNSLGPELHKINLVVSKGMMLGVCGNTGSGKSSLLSAILEEMHLLEGSVGVQGSLAYVPQQAWIVSGNIRENILMGGAYDKARYLQVLHCCSLNRDLELLPFGDMTEIGERGLNLSGGQKQRISLARAVYSDRQIYLLDDPLSAVDAHVGKHIFEECIKKTLRGKTVVLVTHQLQYLEFCGQIILLENGKICENGTHSELMQKKGKYAQLIQKMHKEATSDMLQDTAKIAEKPKVESQALATSLEESLNGNAVPEHQLTQEEEMEEGSLSWRVYHHYIQAAGGYMVSCIIFFFVVLIVFLTIFSFWWLSYWLEQGSGTNSSRESNGTMADLGNIADNPQLSFYQLVYGLNALLLICVGVCSSGIFTKVTRKASTALHNKLFNKVFRCPMSFFDTIPIGRLLNCFAGDLEQLDQLLPIFSEQFLVLSLMVIAVLLIVSVLSPYILLMGAIIMVICFIYYMMFKKAIGVFKRLENYSRSPLFSHILNSLQGLSSIHVYGKTEDFISQFKRLTDAQNNYLLLFLSSTRWMALRLEIMTNLVTLAVALFVAFGISSTPYSFKVMAVNIVLQLASSFQATARIGLETEAQFTAVERILQYMKMCVSEAPLHMEGTSCPQGWPQHGEIIFQDYHMKYRDNTPTVLHGINLTIRGHEVVGIVGRTGSVVFTEHLLCAWEPKGKSSLGMALFRLVEPMAGRILIDGVDICSIGLEDLRSKLSVIPQDPVLLSGTIRFNLDPFDRHTDQQIWDALERTFLTKAISKFPKKLHTDVVENGGNFSVGERQLLCIARAVLRNSKIILIDEATASIDMETDTLIQRTIREAFQGCTVLVIAHRVTTVLNCDHILVMGNGKVVEFDRPEVLRKKPGSLFAALMATATSSLR

SEQ ID NO: 804482 - protein, 728 aa, Homo sapiens
MTPRMVLCSDVPFRRRLRTSCRLRAESTLVRMVEPGSRTPSWVSSSGRRLGIWMGLTDDMLAAFRTGGCQKEPDRQLPPACPAVTKPQTRLHASASGYALRSVPGPKSHGFALLSEESLPNWQELKMTRKRTYWVPNSSGGLVNRGIDIGDDMVSGLIYKTYTLQDGPWSQQERNPEAPGRAAVPPWGKYDAALRTMIPFRPKPRFPAPQPLDNAGLFSYLTVSWLTPLMIQSLRSRLDENTIPPLSVHDASDKNVQRLHRLWEEEVSRRGIEKASVLLVMLRFQRTRLIFDALLGICFCIASVLGPILIIPKILEYSEEQLGNVVHGVGLCFALFLSECVKSLSFSSSWIINQRTAIRFRAAVSSFAFEKLIQFKSVIHITSGEAISFFTGDVNYLFEGVCYGPLVLITCASLVICSISSYFIIGYTAFIAILCYLLVFPLAVFMTRMAVKAQHHTSEVSDQRIRVTSEVLTCIKLIKMYTWEKPFAKIIEDLRRKERKLLEKCGLVQSLTSITLFIIPTVATAVWVLIHTSLKLKLTASMAFSMLASLNLLRLSVFFVPIAVKGLTNSKSAVMRFKKFFLQESPVFYVQTLQDPSKALVFEEATLSWQQTCPGIVNGALELERNGHASEGMTRPRDALGPEEEGNSLGPELHKINLVVSKGMMLGVCGNTGSGKSSLLSAILEEVSDLWPHACLSAGSPGPPKLQCPRRGPPLLSSSQGSEQVGFL

SEQ ID NO: 804483 - protein, 1382 aa, Homo sapiens; identical to SEQ ID NO: 804479

SEQ ID NO: 804484 - protein, 1522 aa, Homo sapiens
MTPRMVLCSDVPFRRRLRTSCRLRAESTLVRMVEPGSRTPSWVSSSGRRLGIWMGLTDDMLAAFRTGGCQKEPDRQLPPACPAVTKPQTRLHASASGYALRSVPGPKSHGFALLSEESLPNWQELKMTRKRTYWVPNSSGGLVNRGIDIGDDMVSGLIYKTYTLQDGPWSQQERNPEAPGRAAVPPWGKYDAALRTMIPFRPKPRFPAPQPLDNAGLFSYLTVSWLTPLMIQSLRSRLDENTIPPLSVHDASDKNVQRLHRLWEEEVSRRGIEKASVLLVMLRFQRTRLIFDALLGICFCIASVLGPILIIPKILEYSEEQLGNVVHGVGLCFALFLSECVKSLSFSSSWIINQRTAIRFRAAVSSFAFEKLIQFKSVIHITSGEAISFFTGDVNYLFEGVCYGPLVLITCASLVICSISSYFIIGYTAFIAILCYLLVFPLAVFMTRMAVKAQHHTSEVSDQRIRVTSEVLTCIKLIKMYTWEKPFAKIIEDLRRKERKLLEKCGLVQSLTSITLFIIPTVATAVWVLIHTSLKLKLTASMAFSMLASLNLLRLSVFFVPIAVKGLTNSKSAVMRFKKFFLQESPVFYVQTLQDPSKALVFEEATLSWQQTCPGIVNGALELERNGHASEGMTRPRDALGPEEEGNSLGPELHKINLVVSKGMMLGVCGNTGSGKSSLLSAILEEMHLLEGSVGVQGSLAYVPQQAWIVSGNIRENILMGGAYDKARYLQVLHCCSLNRDLELLPFGDMTEIGERGLNLSGGQKQRISLARAVYSDRQIYLLDDPLSAVDAHVGKHIFEECIKKTLRGKTVVLVTHQLQYLEFCGQIILLENGKICENGTHSELMQKKGKYAQLIQKMHKEATSDMLQDTAKIAEKPKVESQALATSLEESLNGNAVPEHQLTQEEEMEEGSLSWRVYHHYIQAAGGYMVSCIIFFFVVLIVFLTIFSFWWLSYWLEQGSGTNSSRESNGTMADLGNIADNPQLSFYQLVYGLNALLLICVGVCSSGIFTKVTRKASTALHNKLFNKVFRCPMSFFDTIPIGRLLNCFAGDLEQLDQLLPIFSEQFLVLSLMVIAVLLIVSVLSPYILLMGAIIMVICFIYYMMFKKAIGVFKRLENYSRSPLFSHILNSLQGLSSIHVYGKTEDFISQFKRLTDAQNNYLLLFLSSTRWMALRLEIMTNLVTLAVALFVAFGISSTPYSFKVMAVNIVLQLASSFQATARIGLETEAQFTAVERILQYMKMCVSEAPLHMEGTSCPQGWPQHGEIIFQDYHMKYRDNTPTVLHGINLTIRGHEVVGIVGRTGSEVFTEHLLCAWEPKGKSSLGMALFRLVEPMAGRILIDGVDICSIGLEDLRSKLSVIPQDPVLLSGTIRFNLDPFDRHTDQQIWDALERTFLTKAISKFPKKLHTDVVENGGNFSVGERQLLCIARAVLRNSKIILIDEATASIDMETDTLIQRTIREAFQGCTVLVIAHRVTTVLNCDHILVMGNGKVVEFDRPEVLRKKPGSLFAALMATATSSLR

SEQ ID NO: 804485 - protein, 836 aa, Homo sapiens
MHLLEGSVGVQGSLAYVPQQAWIVSGNIRENILMGGAYDKARYLQVLHCCSLNRDLELLPFGDMTEIGERGLNLSGGQKQRISLARAVYSDRQIYLLDDPLSAVDAHVGKHIFEECIKKTLRGKTVVLVTHQLQYLEFCGQIILLENGKICENGTHSELMQKKGKYAQLIQKMHKEATSDMLQDTAKIAEKPKVESQALATSLEESLNGNAVPEHQLTQEEEMEEGSLSWRVYHHYIQAAGGYMVSCIIFFFVVLIVFLTIFSFWWLSYWLEQGSGTNSSRESNGTMADLGNIADNPQLSFYQLVYGLNALLLICVGVCSSGIFTKVTRKASTALHNKLFNKVFRCPMSFFDTIPIGRLLNCFAGDLEQLDQLLPIFSEQFLVLSLMVIAVLLIVSVLSPYILLMGAIIMVICFIYYMMFKKAIGVFKRLENYSRSPLFSHILNSLQGLSSIHVYGKTEDFISQFKRLTDAQNNYLLLFLSSTRWMALRLEIMTNLVTLAVALFVAFGISSTPYSFKVMAVNIVLQLASSFQATARIGLETEAQFTAVERILQYMKMCVSEAPLHMEGTSCPQGWPQHGEIIFQDYHMKYRDNTPTVLHGINLTIRGHEVVGIVGRTGSVVFTEHLLCAWEPKGKSSLGMALFRLVEPMAGRILIDGVDICSIGLEDLRSKLSVIPQDPVLLSGTIRFNLDPFDRHTDQQIWDALERTFLTKAISKFPKKLHTDVVENGGNFSVGERQLLCIARAVLRNSKIILIDEATASIDMETDTLIQRTIREAFQGCTVLVIAHRVTTVLNCDHILVMGNGKVVEFDRPEVLRKKPGSLFAALMATATSSLR

SEQ ID NO: 804486 - protein, 1508 aa, Homo sapiens
MTPRMVLCSDVPFRRRLRTSCRLRAESTLVRMVEPGSRTPSWVSSSGRRLGIWMGLTDDMLAAFRTGGCQKEPDRQLPPACPAVTKPQTRLHASASGYALRSVPGPKSHGFALLSEESLPNWQELKMTRKRTYWVPNSSGGLVNRGIDIGDDMVSGLIYKTYTLQDGPWSQQERNPEAPGRAAVPPWGKYDAALRTMIPFRPKPRFPAPQPLDNAGLFSYLTVSWLTPLMIQSLRSRLDENTIPPLSVHDASDKNVQRLHRLWEEEVSRRGIEKASVLLVMLRFQRTRLIFDALLGICFCIASVLGPILIIPKILEYSEEQLGNVVHGVGLCFALFLSECVKSLSFSSSWIINQRTAIRFRAAVSSFAFEKLIQFKSVIHITSGEAISFFTGDVNYLFEGVCYGPLVLITCASLVICSISSYFIIGYTAFIAILCYLLVFPLAVFMTRMAVKAQHHTSEVSDQRIRVTSEVLTCIKLIKMYTWEKPFAKIIEDLRRKERKLLEKCGLVQSLTSITLFIIPTVATAVWVLIHTSLKLKLTASMAFSMLASLNLLRLSVFFVPIAVKGLTNSKSAVMRFKKFFLQESPVFYVQTLQDPSKALVFEEATLSWQQTCPGIVNGALELERNGHASEGMTRPRDALGPEEEGNSLGPELHKINLVVSKGMMLGVCGNTGSGKSSLLSAILEEMHLLEGSVGVQGSLAYVPQQAWIVSGNIRENILMGGAYDKARYLQVLHCCSLNRDLELLPFGDMTEIGERGLNLSGGQKQRISLARAVYSDRQIYLLDDPLSAVDAHVGKHIFEECIKKTLRGKTVVLVTHQLQYLEFCGQIILLENGKICENGTHSELMQKKGKYAQLIQKMHKEATSDMLQDTAKIAEKPKVESQALATSLEESLNGNAVPEHQLTQEEEMEEGSLSWRVYHHYIQAAGGYMVSCIIFFFVVLIVFLTIFSFWWLSYWLEQGSGTNSSRESNGTMADLGNIADNPQLSFYQLVYGLNALLLICVGVCSSGIFTKVTRKASTALHNKLFNKVFRCPMSFFDTIPIGRLLNCFAGDLEQLDQLLPIFSEQFLVLSLMVIAVLLIVSVLSPYILLMGAIIMVICFIYYMMFKKAIGVFKRLENYSRSPLFSHILNSLQGLSSIHVYGKTEDFISQFKRLTDAQNNYLLLFLSSTRWMALRLEIMTNLVTLAVALFVAFGISSTPYSFKVMAVNIVLQLASSFQATARIGLETEAQFTAVERILQYMKMCVSEAPLHMEGTSCPQGWPQHGEIIFQDYHMKYRDNTPTVLHGINLTIRGHEVVGIVGRTGSGKSSLGMALFRLVEPMAGRILIDGVDICSIGLEDLRSKLSVIPQDPVLLSGTIRFNLDPFDRHTDQQIWDALERTFLTKAISKFPKKLHTDVVENGGNFSVGERQLLCIARAVLRNSKIILIDEATASIDMETDTLIQRTIREAFQGCTVLVIAHRVTTVLNCDHILVMGNGKVVEFDRPEVLRKKPGSLFAALMATATSSLR

SEQ ID NO: 804487 - protein, 363 aa, Homo sapiens
MKRSLNENSARSTAGCLPVPLFNQKKRNRQPLTSNPLKDDSGISTPSDNYDFPPLPTDWAWEAVNPELAPVMKTVDTGQIPHSVSRPLRSQDSVFNSIQSNTGRSQGGWSYRDGNKNTSLKTWNKNDFKPQCKRTNLVANDGKNSCPMSSGAQQQKQLRTPEPPNLSRNKETELLRQTHSSKISGCTMRGLDKNSALQTLKPNFQQNQYKKQMLDDIPEDNTLKETSLYQLQFKEKASSLRIISAVIESMKYWREHAQKTVLLFEVLAVLDSAVTPGPYYSKTFLMRDGKNTLPCVFYEIDRELPRLIRGRVHRCVGNYDQKKNIFQCVSVRPASVSEQKTFQAFVKIADVEMQYYINVMNET

SEQ ID NO: 804488 - protein, 363 aa, Homo sapiens; identical to SEQ ID NO: 804487

SEQ ID NO: 804489 - protein, 184 aa, Homo sapiens
MKIQLEVQQKKRNRQPLTSNPLKDDSDWAWEAVNPELAPVMKTVDTGQIPHSVSRPLRSQDSVFNSIQSNTGRSQGGWSYRDGNKNTSLKTWNKNDFKPQCKRTNLVANDGKNSCPMSSGAQQQKQLRTPEPPNLSRNKETELLRQTHSSKISGCTMRGLDKNSALQTLKPNFQQNQYKKQMLG

SEQ ID NO: 804490 - protein, 363 aa, Homo sapiens; identical to SEQ ID NO: 804487

SEQ ID NO: 804491 - protein, 347 aa, Homo sapiens [sequence omitted]

SEQ ID NO: 804492 - protein, 494 aa, Homo sapiens
MPTESASCSTARQTKQKRKSHSLSIRRTNSSEQERTGLPRDMLEGQDSKLPSSVRSTLLELFGQIEREFENLYIENLELRREIDTLNERLAAEGQAIDGAELSKGQLKTKASHSTSQLSQKLKTTYKASTSKIVSSFKTTTSRAACQLVKEYIGHRDGIWDVSVAKTQPVVLGTASADHTALLWSIETGKCLVKYAGHVGSVNSIKFHPSEQLALTASGDQTAHIWRYAVQLPTPQPVADTSISGEDEVECSDKDEPDLDGDVSSDCPTIRVPLTSLKSHQGVVIASDWLVGGKQAVTASWDRTANLYDVETSELVHSLTGHDQELTHCCTHPTQRLVVTSSRDTTFRLWDFRDPSIHSVNVFQGHTDTVTSAVFTVGDNVVSGSDDRTVKVWDLKNMRSPIATIRTDSAINRINVCVGQKIIALPHDNRQVRLFDMSGVRLARLPRSSRQGHRRMVCCSAWSEDHPVCNLFTCGFDRQAIGWNINIPALLQEK

SEQ ID NO: 804493 - protein, 494 aa, Homo sapiens; identical to SEQ ID NO: 804492

SEQ ID NO: 804494 - protein, 494 aa, Homo sapiens; identical to SEQ ID NO: 804492

SEQ ID NO: 804495 - protein, 313 aa, Homo sapiens
MPTESASCSTARQTKQKRKSHSLSIRRTNSSEQERTGLPRDMLEGQDSKLPSSVRSTLLELFGQIEREFENLYIENLELRREIDTLNERLAAEGQAIDGAELSKGQLKTKASHSTSQLSQKLKTTYKASTSKIVSSFKTTTSRAACQLVKEYIGHRDGIWDVSVAKTQPVVLGTASADHTALLWSIETGKCLVKYAGHVGSGKHCLRSAVARGRCLLQCVFKIVHDKASCYCVGSLTVSVVRGQCGLFRDWDNSVLSLYGLNNREKLNSLNNVHIMLVCILFNIVYNPYVGNFVTEMCALFFTKYISVLEVYF

SEQ ID NO: 804496 - protein, 461 aa, Homo sapiens
MSSDSEWDRSACSDSKLPSSVRSTLLELFGQIEREFENLYIENLELRREIDTLNERLAAEGQAIDGAELSKGQLKTKASHSTSQLSQKLKTTYKASTSKIVSSFKTTTSRAACQLVKEYIGHRDGIWDVSVAKTQPVVLGTASADHTALLWSIETGKCLVKYAGHVGSVNSIKFHPSEQLALTASGDQTAHIWRYAVQLPTPQPVADTSISGEDEVECSDKDEPDLDGDVSSDCPTIRVPLTSLKSHQGVVIASDWLVGGKQAVTASWDRTANLYDVETSELVHSLTGHDQELTHCCTHPTQRLVVTSSRDTTFRLWDFRDPSIHSVNVFQGHTDTVTSAVFTVGDNVVSGSDDRTVKVWDLKNMRSPIATIRTDSAINRINVCVGQKIIALPHDNRQVRLFDMSGVRLARLPRSSRQGHRRMVCCSAWSEDHPVCNLFTCGFDRQAIGWNINIPALLQEK

SEQ ID NO: 804497 - protein, 90 aa, Homo sapiens
PNTDRAVPARLPRGRHRGPERRRPRVSGLRRTAPRARSPPAPAAGLRGRWTRSAPPLIAGVTRTLPPRSNAHRKRKLFDCSPNKTEAQIP

SEQ ID NO: 804498 - protein, 161 aa, Homo sapiens
FVLFFHLKNYKLMIAKFRLLHFHLADHTALLWSIETGKCLVKYAGHVGSGKHCLRSAVARGRCLLQCVFKIVHDKASCYCVGSLTVSVVRGQCGLFRDWDNSVLSLYGLNNREKLNSLNNVHIMLVCILFNIVYNPYVGNFVTEMCALFFTKYISVLEVYF

SEQ ID NO: 804499 - protein, 199 aa, Homo sapiens [sequence omitted]

SEQ ID NO: 804500 - protein, 835 aa, Homo sapiens
MSGGSQVHIFWGAPIAPLKITVSEDTASLMSVADPWKKIQLLYSQHSLYLKDEKQHKNLENYKVPESIGSPDLSGHFLANCMNRHVHVKDDFVRSVSETQNIESQKIHSSRLSDITSSNMQICGFKSTVPHFTEEEKYQKLLSENKIRDEQPKHQPDICGKNFNTNLFQLGHKCAAVLDLVCSTEKINIGPEVVQRECVPTEYHEIQNQCLGLFSSNAVDKSRSEAAVRKVSDLKISTDTEFLSIITSSQVAFLAQKKDKRRSPVNKGNVNMETEPKASYGEIRIPEENSIQLDGFTEAYESGQNQAYSLELFSPVCPKTENSRIHINSDKGLEEHTGSQELFSSEDELPPNEIRIELCSSGILCSQLNTFHKSAIKRSCTSEDKVGQSEALSRVLQVAKKMKLISNGGDSAVEMDRRNVSEFKSIKKTSLIKNCDSKSQKYNCLVMVLSPCHVKEINIKFGPNSGSKVPLATVTVIDQSETKKKVFLWRTAAFWAFTVFLGDIILLTDVVIHEDQWIGETVLQSTFSSQLLNLGSYSSIQPEEYSSVVSEVVLQDLLAYVSSKHSYLRDLPPRQPQRVNSIDFVELEHLQPDVLVHAVLRVVDFTILTEAVYSYRGQKQKKVMLTVEQAQDQHYALVLWGPGAAWYPQLQRKKGVVLIKAQISELAFPITASQKIALNAHSSLKSIFSSLPNIVYTGCAKCGLELETDENRIYKQCFSCLPFTMKKIYYRPALMTAIDGRHDVCIRVESKLIEKILLNISADCLNRVIVPSSEITYGMVVADLFHSLLAVSAEPCVLKIQSLFVLDENSYPLQQDFSLLDFYPDIVKHGANARL

SEQ ID NO: 804501 - protein, 184 aa, Homo sapiens
MPQSKSRKIAILGYRSVGKSSLTIQFVEGQFVDSYDPTIENTFTKLITVNGQEYHLELVDTAGQDEYSIFPQTYSIDINGYILVYSVTSIKSFEVIKVIHGKLLDMVGKVQIPIMLVGNKKDLHMERVISYEEGKALAESWNAAFLESSAKENQTAVDVFRRMILEAEKMDGAASQGKSSCSVM

SEQ ID NO: 804502 - protein, 904 aa, Homo sapiens
MSGGSQVHIFWGAPIAPLKITVSEDTASLMSVADPWKKIQLLYSQHSLYLKDEKQHKNLENYKVPESIGSPDLSGHFLANCMNRHVHVKDDFVRSVSETQNIESQKIHSSRLSDITSSNMQICGFKSTVPHFTEEEKYQKLLSENKIRDEQPKHQPDICGKNFNTNLFQLGHKCAAVLDLVCSTEKINIGPEVVQRECVPTEYHEIQNQCLGLFSSNAVDKSRSEAAVRKVSDLKISTDTEFLSIITSSQVAFLAQKKDKRRSPVNKGNVNMETEPKASYGEIRIPEENSIQLDGFTEAYESGQNQAYSLELFSPVCPKTENSRIHINSDKGLEEHTGSQELFSSEDELPPNEIRIELCSSGILCSQLNTFHKSAIKRSCTSEDKVGQSEALSRVLQVAKKMKLISNGGDSAVEMDRRNVSEFKSIKKTSLIKNCDSKSQKYNCLVMVLSPCHVKEINIKFGPNSGSKVPLATVTVIDQSETKKKVFLWRTAAFWAFTVFLGDIILLTDVVIHEDQWIGETVLQSTFSSQLLNLGSYSSIQPEEYSSVVSEVVLQDLLAYVSSKHSYLRDLPPRQPQRVNSIDFVELEHLQPDVLVHAVLRVVDFTILTEAVYSYRGQKQKKVMLTVEQAQDQHYALVLWGPGAAWYPQLQRKKGYIWEFKYLFVQCNYTLENLELHTTPWSSCECLFDDDIRAITFKAKFQKSAPSFVKISDLATHLEDKCSGVVLIKAQISELAFPITASQKIALNAHSSLKSIFSSLPNIVYTGCAKCGLELETDENRIYKQCFSCLPFTMKKIYYRPALMTAIDGRHDVCIRVESKLIEKILLNISADCLNRVIVPSSEITYGMVVADLFHSLLAVSAEPCVLKIQSLFVLDENSYPLQQDFSLLDFYPDIVKHGANARL

SEQ ID NO: 804503 - protein, 904 aa, Homo sapiens; identical to SEQ ID NO: 804502

SEQ ID NO: 804504 - protein, 886 aa, Homo sapiens
MSGGSQVHIFWGAPIAPLKITVSEDTASLMSVADPWKKIQLLYSQHSLYLKDEKQHKNLEKNCMNRHVHVKDDFVRSVSETQNIESQKIHSSRLSDITSSNMQICGFKSTVPHFTEEEKYQKLLSENKIRDEQPKHQPDICGKNFNTNLFQLGHKCAAVLDLVCSTEKINIGPEVVQRECVPTEYHEIQNQCLGLFSSNAVDKSRSEAAVRKVSDLKISTDTEFLSIITSSQVAFLAQKKDKRRSPVNKGNVNMETEPKASYGEIRIPEENSIQLDGFTEAYESGQNQAYSLELFSPVCPKTENSRIHINSDKGLEEHTGSQELFSSEDELPPNEIRIELCSSGILCSQLNTFHKSAIKRSCTSEDKVGQSEALSRVLQVAKKMKLISNGGDSAVEMDRRNVSEFKSIKKTSLIKNCDSKSQKYNCLVMVLSPCHVKEINIKFGPNSGSKVPLATVTVIDQSETKKKVFLWRTAAFWAFTVFLGDIILLTDVVIHEDQWIGETVLQSTFSSQLLNLGSYSSIQPEEYSSVVSEVVLQDLLAYVSSKHSYLRDLPPRQPQRVNSIDFVELEHLQPDVLVHAVLRVVDFTILTEAVYSYRGQKQKKVMLTVEQAQDQHYALVLWGPGAAWYPQLQRKKGYIWEFKYLFVQCNYTLENLELHTTPWSSCECLFDDDIRAITFKAKFQKSAPSFVKISDLATHLEDKCSGVVLIKAQISELAFPITASQKIALNAHSSLKSIFSSLPNIVYTGCAKCGLELETDENRIYKQCFSCLPFTMKKIYYRPALMTAIDGRHDVCIRVESKLIEKILLNISADCLNRVIVPSSEITYGMVVADLFHSLLAVSAEPCVLKIQSLFVLDENSYPLQQDFSLLDFYPDIVKHGANARL

SEQ ID NO: 804505 - protein, 431 aa, Homo sapiens
MVGKVQIPIMLVGNKKDLHMERVISYEEGKALAESWNAAFLESSAKENQTAVDVFRRMILEAEKMDGAASQDSSVVSEVVLQDLLAYVSSKHSYLRDLPPRQPQRVNSIDFVELEHLQPDVLVHAVLRVVDFTILTEAVYSYRGQKQKKVMLTVEQAQDQHYALVLWGPGAAWYPQLQRKKGYIWEFKYLFVQCNYTLENLELHTTPWSSCECLFDDDIRAITFKAKFQKSAPSFVKISDLATHLEDKCSGVVLIKAQISELAFPITASQKIALNAHSSLKSIFSSLPNIVYTGCAKCGLELETDENRIYKQCFSCLPFTMKKIYYRPALMTAIDGRHDVCIRVESKLIEKILLNISADCLNRVIVPSSEITYGMVVADLFHSLLAVSAEPCVLKIQSLFVLDENSYPLQQDFSLLDFYPDIVKHGANARL

SEQ ID NO: 804506 - protein, 904 aa, Homo sapiens; identical to SEQ ID NO: 804502

SEQ ID NO: 804507 - protein, 886 aa, Homo sapiens
MSGGSQVHIFWGAPIAPLKITVSEDTASLMSVADPWKKIQLLYSQHSLYLKDEKQHKNLENYKVPESIGSPDLSGHFLANCMNRHVHVKDDFVRSVSETQNIESQKIHSSRLSDITSSNMQICGFKSTVPHFTEEEKYQKLLSENKIRDEQPKHQPDICGKNFNTNLFQLGHKCAAVLDLVCSTEKINIGPEVVQRECVPTEYHEIQNQCLGLFSSNAVDKSRSEAAVRKVSDLKISTDTEFLSIITSSQVAFLAQKKDKRRSPVNKGNVNMETEPKASYGEIRIPEENSIQLDGFTEAYESGQNQAYSLELFSPVCPKTENSRIHINSDKGLEEHTGSQELFSSEDELPPNEIRIELCSSGILCSQLNTFHKSAIKRSCTSEDKVGQSEALSRVLQVAKKMKLISNGGDSAVEMDRRNVSEFKSIKKTSLIKNCDSKSQKYNCLVMVLSPCHVKEINIKFGPNSGSKVPLATVTVIDQSETKKKVFLWRTAAFWAFTVFLGDIILLTDVVIHEDQWIGETVLQSTFSSQLLNLGSYSSIQPEEYSSVVSEVVLQDLLAYVSSKHSYLRDLPPRQPQRVNSIDFVELEHLQPDVLVHAVLRVVDFTILTEAVYSYRGQKQKKVMLTVEQAQDQHYALVLWGPGAAWYPQLQRKKGYIWEFKYLFVQCNYTLENLELHTTPWSSCECLFDDDIRAITFKAKFQKSAPSFVKISDLATHLEDKCSGVVLIKAQISELAFPITASQKIALNAHSSLKSIFSSLPNIVYTGCAKCGLELETDENRIYKQCFSCLPFTMKKIYYRPALMTAIDGRHDVCIRVESKLIEKILLNISADCLNRVIVPSSEITYGMVVADLFHSLLAVSAEPCVLKIQSLFVLDVVKHGANARL

SEQ ID NO: 804508 - protein, 904 aa, Homo sapiens; identical to SEQ ID NO: 804502

SEQ ID NO: 804509 - protein, 945 aa, Homo sapiens
MSGGSQVHIFWGAPIAPLKITVSEDTASLMSVADPWKKIQLLYSQHSLYLKDEKQHKNLENYKVPESIGSPDLSGHFLANCMNRHVHVKDDFVRSVSETQNIESQKIHSSRLSDITSSNMQICGFKSTVPHFTEEEKYQKLLSENKIRDEQPKHQPDICGKNFNTNLFQLGHKCAAVLDLVCSTEKINIGPEVVQRECVPTEYHEIQNQCLGLFSSNAVDKSRSEAAVRKVSDLKISTDTEFLSIITSSQVAFLAQKKDKRRSPVNKGNVNMETEPKASYGEIRIPEENSIQLDGFTEAYESGQNQAYSLELFSPVCPKTENSRIHINSDKGLEEHTGSQELFSSEDELPPNEIRIELCSSGILCSQLNTFHKSAIKRSCTSEDKVGQSEALSRVLQVAKKMKLISNGGDSAVEMDRRNVSEFKSIKKTSLIKNCDSKSQKYNCLVMVLSPCHVKEINIKFGPNSGSKVPLATVTVIDQSETKKKVFLWRTAAFWAFTVFLGDIILLTDVVIHEDQWIGETVLQSTFSSQLLNLGSYSSIQPEEYSSVVSEVVLQDLLAYVSSKHSYLRDLPPRQPQRVNSIDFVELEHLQPDVLVHAVLRVVDFTILTEAVYSYRGQKQKKVMLTVEQAQDQHYALVLWGPGAAWYPQLQRKKGYIWEFKYLFVQCNYTLENLELHTTPWSSCECLFDDDIRAITFKAKFQKSAPSFVKISDLATHLEDKCSGVVLIKAQISELAFPITASQKIALNAHSSLKSIFSSLPNIVYTGCAKCGLELETDENRIYKQCFSCLPFTMKKIYYRPALMTAIDGRHDVCIRVESKLIEKILLNISADCLNRVIDGVLLLLPRLECCGAISVHHNLCLLDSSKSPASVSQVAGITVPSSEITYGMVVADLFHSLLAVSAEPCVLKIQSLFVLDENSYPLQQDFSLLDFYPDIVKHGANARL

SEQ ID NO: 804510 - protein, 514 aa, Homo sapiens [sequence omitted]

SEQ ID NO: 804511 - protein, 169 aa, Homo sapiens
MAAESLPFSFGTLSSWELEAWYEDLQEVLSSDENGGTYVSPPGNEEEESKIFTTLDPASLAWLTEEEPEPAEVTSTSQSPHSPDSSQSSLAQEEEEEDQGRTRKRKQSGHSPARAGKQRMKEKEQENERKVAQLAEENERLKQEIERLTREVEATRRALIDRMVNLHQA

SEQ ID NO: 804512 - protein, 169 aa, Homo sapiens; identical to SEQ ID NO: 804511

SEQ ID NO: 804513 - protein, 169 aa, Homo sapiens; identical to SEQ ID NO: 804511

SEQ ID NO: 804514 - protein, 228 aa, Homo sapiens
KARYEALGVIGRGTDERVAATEPKSELEPEERVFKKEVYLHTSPHLKADVLFQTDPTAEMAAESLPFSFGTLSSWELEAWYEDLQEVLSSDENGGTYVSPPGNEEEESKIFTTLDPASLAWLTEEEPEPAEVTSTSQSPHSPDSSQSSLAQEEEEEDQGRTRKRKQSGHSPARAGKQRMKEKEQENERKVAQLAEENERLKQEIERLTREVEATRRALIDRMVNLHQA

SEQ ID NO: 804515 - protein, 177 aa, Homo sapiens
LRLVRGLGCEAESLPFSFGTLSSWELEAWYEDLQEVLSSDENGGTYVSPPGNEEEESKIFTTLDPASLAWLTEEEPEPAEVTSTSQSPHSPDSSQSSLAQEEEEEDQGRTRKRKQSGHSPARAGKQRMKEKEQENERKVAQLAEENERLKQEIERLTREVEATRRALIDRMVNLHQA

SEQ ID NO: 804516 - protein, 192 aa, Homo sapiens
MELVPATPHYPADVLFQTDPTAEMAAESLPFSFGTLSSWELEAWYEDLQEVLSSDENGGTYVSPPGNEEEESKIFTTLDPASLAWLTEEEPEPAEVTSTSQSPHSPDSSQSSLAQEEEEEDQGRTRKRKQSGHSPARAGKQRMKEKEQENERKVAQLAEENERLKQEIERLTREVEATRRALIDRMVNLHQA

SEQ ID NO: 804517 - protein, 283 aa, Homo sapiens
SYPMQPVTAPPSYPPTSYSSTQPTSYDQSSYSQQNTYGQPSSYGQQSSYGQQSSYGQQPPTSYPPQTGSYSQAPSQYSQQSSSYGQQMFKKEVYLHTSPHLKADVLFQTDPTAEMAAESLPFSFGTLSSWELEAWYEDLQEVLSSDENGGTYVSPPGNEEEESKIFTTLDPASLAWLTEEEPEPAEVTSTSQSPHSPDSSQSSLAQEEEEEDQGRTRKRKQSGHSPARAGKQRMKEKEQENERKVAQLAEENERLKQEIERLTREVEATRRALIDRMVNLHQA

SEQ ID NO: 804518 - protein, 192 aa, Homo sapiens; identical to SEQ ID NO: 804516

SEQ ID NO: 804519 - protein, 169 aa, Homo sapiens; identical to SEQ ID NO: 804511

SEQ ID NO: 804520 - protein, 238 aa, Homo sapiens
GDWKCPNPTCENMNFSWRNECNQCKAPKPDGPGGGPGGSHMGVFKKEVYLHTSPHLKADVLFQTDPTAEMAAESLPFSFGTLSSWELEAWYEDLQEVLSSDENGGTYVSPPGNEEEESKIFTTLDPASLAWLTEEEPEPAEVTSTSQSPHSPDSSQSSLAQEEEEEDQGRTRKRKQSGHSPARAGKQRMKEKEQENERKVAQLAEENERLKQEIERLTREVEATRRALIDRMVNLHQA

SEQ ID NO: 804521 - protein, 235 aa, Homo sapiens
YSQQSSQPYGQQSYSGYSQSTDTSGYGQSSYSSYGQSQNMFKKEVYLHTSPHLKADVLFQTDPTAEMAAESLPFSFGTLSSWELEAWYEDLQEVLSSDENGGTYVSPPGNEEEESKIFTTLDPASLAWLTEEEPEPAEVTSTSQSPHSPDSSQSSLAQEEEEEDQGRTRKRKQSGHSPARAGKQRMKEKEQENERKVAQLAEENERLKQEIERLTREVEATRRALIDRMVNLHQA

SEQ ID NO: 804522 - protein, 149 aa, Homo sapiens
MAAESLPFSFGTLSSWELEAWYEDLQEVLSSDENGGTYVSPPGNEEEPEPAEVTSTSQSPHSPDSSQSSLAQEEEEEDQGRTRKRKQSGHSPARAGKQRMKEKEQENERKVAQLAEENERLKQEIERLTREVEATRRALIDRMVNLHQA

SEQ ID NO: 804523 - protein, 551 aa, Homo sapiens
MRDYDEVIAFLGEWGPFQRLIFFLLSASIIPNGFNGMSVVFLAGTPEHRCRVPDAANLSSAWRNNSVPLRLRDGREVPHSCSRYRLATIANFSALGLEPGRDVDLGQLEQESCLDGWEFSQDVYLSTVVTEWNLVCEDNWKVPLTTSLFFVGVLLGSFVSGQLSDRFGRKNVLFATMAVQTGFSFLQIFSISWEMFTVLFVIVGMGQISNYVVAFILGTEILGKSVRIIFSTLGVCTFFAVGYMLLPLFAYFIRDWRMLLLALTVPGVLCVPLWWFIPESPRWLISQRRFREAEDIIQKAAKMNNIAVPAVIFDSVEELNPLKQQKAFILDLFRTRNIAIMTIMSLLLWMLTSVGYFALSLDAPNLHGDAYLNCFLSALIEIPAYITAWLLLRTLPRRYIIAAVLFWGGGVLLFIQLVPVDYYFLSIGLVMLGKFGITSAFSMLYVFTAELYPTLVRNMAVGVTSTASRVGSIIAPYFVYLGAYNRMLPYIVMGSLTVLIGILTLFFPESLGMTLPETLEQMQKVKWFRSGKKTRDSMETEENPKVLITAF

SEQ ID NO: 804524 - protein, 612 aa, Homo sapiens
MRDYDEVIAFLGEWGPFQRLIFFLLSASIIPNGFNGMSVVFLAGTPEHRCRVPDAANLSSAWRNNSVPLRLRDGREVPHSCSRYRLATIANFSALGLEPGRDVDLGQLEQESCLDGWEFSQDVYLSTVVTEWNLVCEDNWKVPLTTSLFFVGVLLGSFVSGQLSDRFGRKNVLFATMAVQTGFSFLQIFSISWEMFTVLFVIVGMGQISNYVVAFILGTEILGKSVRIIFSTLGVCTFFAVGYMLLPLFAYFIRDWRMLLLALTVPGVLCVPLWWSWSMNAPGCGHTVPGTGLAPDRGQPGTSTDKLSAPPEHLPVVLPFSYKRKELSSEHPILGRFIPESPRWLISQRRFREAEDIIQKAAKMNNIAVPAVIFDSVEELNPLKQQKAFILDLFRTRNIAIMTIMSLLLWMLTSVGYFALSLDAPNLHGDAYLNCFLSALIEIPAYITAWLLLRTLPRRYIIAAVLFWGGGVLLFIQLVPVDYYFLSIGLVMLGKFGITSAFSMLYVFTAELYPTLVRNMAVGVTSTASRVGSIIAPYFVYLGAYNRMLPYIVMGSLTVLIGILTLFFPESLGMTLPETLEQMQKVKWFRSGKKTRDSMETEENPKVLITAF

SEQ ID NO: 804525 - protein, 505 aa, Homo sapiens
MRDYDEVIAFLGEWGPFQRLIFFLLSASIIPNGFNGMSVVFLAGTPEHRCRVPDAANLSSAWRNNSVPLRLRDGREVPHSCSRYRLATIANFSALGLEPGRDVDLGQLEQESCLDGWEFSQDVYLSTVVTEWNLVCEDNWKVPLTTSLFFVGVLLGSFVSGQLSDRFGRKNVLFATMAVQTGFSFLQIFSISWEMFTVLFVIVGMGQISNYVVAFILGTEILGKSVRIIFSTLGVCTFFAVGYMLLPLFAYFIRDWRMLLLALTVPGVLCVPLWWSWSMNAPGCGHTVPGTGLAPDRGQPGTSTDKLSAPPEHLPVVLPFSYKRKELSSEHPILGRFIPESPRWLISQRRFREAEDIIQKAAKMNNIAVPAVIFDSVEELNPLKQQKAFILDLFRTRNIAIMTIMSLLLWMLTSVGYFALSLDAPNLHGDAYLNCFLSALIEIPAYITAWLLLRTLPRRYIIAAVLFWGGGVLLFIQLVPVVSGSGPEDSHEVAVKLSVVISTPN

SEQ ID NO: 804526 - protein, 165 aa, Homo sapiens
MEHKDDDDDDVSFAKWMSSFWGHSWREEDQRGLRERHRLQATSHRKTSLPCPLPVLPRIPSSDCHPRRHSHEDQEFRCRSSDRLPRRHSHEDQEFRCRSHVRDYRKYSEDGVIQGGHWESKGRFPFPKLRNFQSPFERQLVLYEPKRFCLFGALKAERREMKENA

SEQ ID NO: 804527 - protein, 96 aa, Homo sapiens
SGLRESVGVSRSLRKPFFFLFAPLLFGRWTSGVPVVAGVVPSTFRKEGQMALLPTEAEEGRVYSGLRALKRSEWKKKQRHSTGMGGSGRRVVKAIG

SEQ ID NO: 804528 - protein, 165 aa, Homo sapiens; identical to SEQ ID NO: 804526

SEQ ID NO: 804529 - protein, 165 aa, Homo sapiens; identical to SEQ ID NO: 804526

SEQ ID NO: 804530 - protein, 403 aa, Homo sapiens
MSTSTSPAAMLLRRLRRLSWGSTAVQLFILTVVTFGLLAPLACHRLLHSYFYLRHWHLNQMSQEFLQQSLKEGEAALHYFEELPSANGSVPIVWQATPRPWLVITIITVDRQPGFHYVLQVVSQFHRLLQQCGPQCEGHQLFLCNVERSVSHFDAKLLSKYVPVANRYEGTEDDYGDDPSTNSFEKEKQDYVYCLESSLQTYNPDYVLMVEDDAVPEEQIFPVLEHLLRARFSEPHLRDALYLKLYHPERLQHYINPEPMRILEWVGVGMLLGPLLTWIYMRFASRPGFSWPVMLFFSLYSMGLVELVGRHYFLELRRLSPSLYSVVPASQCCTPAMLFPAPAARRTLTYLSQVYCHKGFGKDMALYSLLRAKGERAYVVEPNLVKHIGLFSSLRYNFHPSLL

SEQ ID NO: 804531 - protein, 403 aa, Homo sapiens; identical to SEQ ID NO: 804530

SEQ ID NO: 804532 - protein, 403 aa, Homo sapiens; identical to SEQ ID NO: 804530

SEQ ID NO: 804533 - protein, 205 aa, Homo sapiens
SLWLISWESILFLLTSPCHAAPQQGSPGGCHIGWKRRPCILEGSHRLPFRKRPEGHLDEPPPVPEPLNDIAKIQLFSFCFNIFSNGNSLLGCIFASQEKKGLQQPEPLRNAQEAEVSSTCFEDEVGASASPALLAFQQLAVGGDLHVQGQLDVHQLLVLTQEPSHVLLGLLQGLLKVHQLGPCILESQFSPLLCISNGRLQAGTL

SEQ ID NO: 804534 - protein, 394 aa, Homo sapiens
PCRGGLRAWGGRLRTAAAAVAAEPGGEAMAGPAWISKVSRLLGAFHNPKQVTRGFTGGVQTVTLIPGDGIGPEISAAVMKIFDAAKAPIQWEERNVTAIQGPGGKWMIPSEAKESMDKNKMGLKGPLKTPIAAGHPSMNLLLRKTFDLYANVRPCVSIEGYKTPYTDVNIVTIRENTEGEYSGIEHVIVDGVVQSIKLITEGASKRIAEFAFEYARNNHRSNVTAVHKANIMRMSDGLFLQKCREVAESCKDIKFNEMYLDTVCLNMVQDPSQFDVLVMPNLYGDILSDLCAGLIGGLGVTPSGNIGANGVAIFESVHGTAPDIAGKDMANPTALLLSAVMMLRHMGLFDHAARIEAACFATIKDGKSLTKDLGGNAKCSDFTEEICRRVKDLD

SEQ ID NO: 804535 - protein, 348 aa, Homo sapiens
ATERDSISKTKLKKVCSSLQYECQFPLSLSSSLCSVMWHQAPIQWEERNVTAIQGPGGKWMIPSEAKESMDKNKMGLKGPLKTPIAAGHPSMNLLLRKTFDLYANVRPCVSIEGYKTPYTDVNIVTIRENTEGEYSGIEHVIVDGVVQSIKLITEGASKRIAEFAFEYARNNHRSNVTAVHKANIMRMSDGLFLQKCREVAESCKDIKFNEMYLDTVCLNMVQDPSQFDVLVMPNLYGDILSDLCAGLIGGLGVTPSGNIGANGVAIFESVHGTAPDIAGKDMANPTALLLSAVMMLRHMGLFDHAARIEAACFATIKDGKSLTKDLGGNAKCSDFTEEICRRVKDLD

SEQ ID NO: 804536 - protein, 149 aa, Homo sapiens
MKIFDAAKAPIQWEERNVTAIQGPGGKWMIPSEAKESMDKNKMGLKGPLKTPIAAGHPSMNLLLRKTFDLYANVRPCVSIEGYKTPYTDVNIVTIRENTEGEYSGIEHVIVHLTACRVLSSSPEREAKHWEIGFKMAGNPGTAGGKDNM

SEQ ID NO: 804537 - protein, 316 aa, Homo sapiens
MKIFDAAKAPIQWEERNVTAIQGPGGKWMIPSEAKESMDKNKMGLKGPLKTPIAAGHPSMNLLLRKTFDLYANVRPCVSIEGYKTPYTDVNIVTIRENTEGEYSGIEHVIVDGVVQSIKLITEGASKRIAEFAFEYARNNHRSNVTAVHKANIMRMSDGLFLQKCREVAESCKDIKFNEMYLDTVCLNMVQDPSQFDVLVMPNLYGDILSDLCAGLIGGLGVTPSGNIGANGVAIFESVHGTAPDIAGKDMANPTALLLSAVMMLRHMGLFDHAARIEAACFATIKDGKSLTKDLGGNAKCSDFTEEICRRVKDLD

SEQ ID NO: 804538 - protein, 316 aa, Homo sapiens; identical to SEQ ID NO: 804537

SEQ ID NO: 804539 - protein, 344 aa, Homo sapiens
IPQPTAGLVQTVTLIPGDGIGPEISAAVMKIFDAAKAPIQWEERNVTAIQGPGGKWMIPSEAKESMDKNKMGLKGPLKTPIAAGHPSMNLLLRKTFDLYANVRPCVSIEGYKTPYTDVNIVTIRENTEGEYSGIEHVIVDGVVQSIKLITEGASKRIAEFAFEYARNNHRSNVTAVHKANIMRMSDGLFLQKCREVAESCKDIKFNEMYLDTVCLNMVQDPSQFDVLVMPNLYGDILSDLCAGLIGGLGVTPSGNIGANGVAIFESVHGTAPDIAGKDMANPTALLLSAVMMLRHMGLFDHAARIEAACFATIKDGKSLTKDLGGNAKCSDFTEEICRRVKDLD

SEQ ID NO: 804540 - protein, 394 aa, Homo sapiens; identical to SEQ ID NO: 804534

SEQ ID NO: 804541 - protein, 394 aa, Homo sapiens; identical to SEQ ID NO: 804534

SEQ ID NO: 804542 - protein, 394 aa, Homo sapiens; identical to SEQ ID NO: 804534

SEQ ID NO: 804543 - protein, 311 aa, Homo sapiens
PCRGGLRAWGGRLRTAAAAVAAEPGGEAMAGPAWISKVSRLLGAFHNPKQVTRGFTGGVQTVTLIPGDGIGPEISAAVMKIFDAAKAPIQWEERNVTAIQGPGGKWMIPSEAKESMDKNKMGLKGPLKTPIAAGHPSMNLLLRKTFDLYANVRPCVSIEGYKTPYTDVNIVTIRENTEGEYSGIEHVIVDGVVQSIKLITEGASKRIAEFAFEYARNNHRSNVTAVHKANIMRMSDGLFLQKCREVAESCKDIKFNEMYLDTVCLNMVQDPSQFDVLVMPNLYGDILRFMGRLQTLQARTWRIPQPSCSVP

SEQ ID NO: 804544 - protein, 132 aa, Homo sapiens
MKIFDAAKAPIQWEERNVTAIQGPGGKWMIPSEAKESMDKNKMGLKGPLKTPIAAGHPSMNLLLRKTFDLYANVRPCVSIEGYKTPYTDVNIVTIRENTEGEYSGIEHVIVDGVVQSIKLITEGTRLFPLNT

SEQ ID NO: 804545 - protein, 257 aa, Homo sapiens
MNLLLRKTFDLYANVRPCVSIEGYKTPYTDVNIVTIRENTEGEYSGIEHVIVDGVVQSIKLITEGASKRIAEFAFEYARNNHRSNVTAVHKANIMRMSDGLFLQKCREVAESCKDIKFNEMYLDTVCLNMVQDPSQFDVLVMPNLYGDILSDLCAGLIGGLGVTPSGNIGANGVAIFESVHGTAPDIAGKDMANPTALLLSAVMMLRHMGLFDHAARIEAACFATIKDGKSLTKDLGGNAKCSDFTEEICRRVKDLD

SEQ ID NO: 804546 - protein, 394 aa, Homo sapiens; identical to SEQ ID NO: 804534

SEQ ID NO: 804547 - protein, 132 aa, Homo sapiens
TPLDATADDVEDKKVMMVVDDRGNHCCLLFSFIFFFCRWGLTLSPRLECSGVILAHHILHLLGSIEPSRLSLLSGWDHRCMPPHLANFCVFGRDRVSPCCPAWSQTTELNNCPFSYPKAPITALCLSSTSIR

SEQ ID NO: 804548 - protein, 254 aa, Homo sapiens
PCRGGLRAWGGRLRTAAAAVAAEPGGEAMAGPAWISKVSRLLGAFHNPKQVTRGFTGGVQTVTLIPGDGIGPEISAAVMKIFDAAKAPIQWEERNVTAIQGPGGKWMIPSEAKESMDKNKMGLKGPLKTPIAAGHPSMNLLLRKTFDLYANVRPCVSIEGYKTPYTDVNIVTIRENTEGEYSGIEHVIVDGVVQSIKLITEGASKRIAEFAFEYARNNHRSNVTAVHKANIILLITLRRMSDGFSKRMRNVRKL

SEQ ID NO: 804549 - protein, 110 aa, Homo sapiens
GQLRLLQNPTLCSLLFQELDLPGHRQGTDGRAPCQRVMMTQSLVCRCTRTTINYGFAHHGDENNTGHLEAPQGTAPTSPHASPARTQQRLPWDPHPRCDDRNPRWRGPGD

SEQ ID NO: 804550 - protein, 115 aa, Homo sapiens
KPMPPFLTCSVKRRHNLIAMLALSLRPVFAANIPCSLSPSHTGLPADPQTCHRAFTCAVPSAWNVPHLPSCLPSYFPLAHPSALCCVSLLQKSPHSSLQQHSPTPTSTRIRFLLL

SEQ ID NO: 804551 - protein, 270 aa, Homo sapiens
MRGQGRKESLSDSRDLDGSYDQLTGHPPGPTKKALKQRFLKLLPCCGPQALPSVSETLAAPASLRPHRPRLLDPDSVDDEFELSTVCHRPEGLEQLQEQTKFTRKELQVLYRGFKNECPSGIVNEENFKQIYSQFFPQGDSSTYATFLFNAFDTNHDGSVSFEDFVAGLSVILRGTVDDRLNWAFNLYDLNKDGCITKEEMLDIMKSIYDMMGKYTYPALREEAPREHVESFFQKMDRNKDGVVTIEEFIESCQKDENIMRSMQLFDNVI

SEQ ID NO: 804552 - protein, 252 aa, Homo sapiens
MRGQGRKESLSDSRDLDGSYDQLTGHPPGPTKKALKQRFLKLLPCCGPQALPSVSENSVDDEFELSTVCHRPEGLEQLQEQTKFTRKELQVLYRGFKNECPSGIVNEENFKQIYSQFFPQGDSSTYATFLFNAFDTNHDGSVSFEDFVAGLSVILRGTVDDRLNWAFNLYDLNKDGCITKEEMLDIMKSIYDMMGKYTYPALREEAPREHVESFFQKMDRNKDGVVTIEEFIESCQKDENIMRSMQLFDNVI

SEQ ID NO: 804553 - protein, 227 aa, Homo sapiens
MRGQGRKESLSDSRDLDGSYDQLTDSVDDEFELSTVCHRPEGLEQLQEQTKFTRKELQVLYRGFKNPGALSFQECPSGIVNEENFKQIYSQFFPQGDSSTYATFLFNAFDTNHDGSVSFEDFVAGLSVILRGTVDDRLNWAFNLYDLNKDGCITKEEMLDIMKSIYDMMGKYTYPALREEAPREHVESFFQKMDRNKDGVVTIEEFIESCQKDENIMRSMQLFDNVI

SEQ ID NO: 804554 - protein, 220 aa, Homo sapiens
MRGQGRKESLSDSRDLDGSYDQLTDSVDDEFELSTVCHRPEGLEQLQEQTKFTRKELQVLYRGFKNECPSGIVNEENFKQIYSQFFPQGDSSTYATFLFNAFDTNHDGSVSFEDFVAGLSVILRGTVDDRLNWAFNLYDLNKDGCITKEEMLDIMKSIYDMMGKYTYPALREEAPREHVESFFQKMDRNKDGVVTIEEFIESCQKDENIMRSMQLFDNVI

SEQ ID NO: 804555 - protein, 184 aa, Homo sapiens
MRGQGRKESLSDSRDLDGSYDQLTDSVDDEFELSTVCHRPEGLEQLQEQTKFTRKELQVLYRGFKNECPSGIVNEENFKQIYSQFFPQGDSSTYATFLFNAFDTNHDGSVSFEEMLDIMKSIYDMMGKYTYPALREEAPREHVESFFQKMDRNKDGVVTIEEFIESCQKDENIMRSMQLFDNVI

SEQ ID NO: 804556 - protein, 275 aa, Homo sapiens
MRGQGRKESLSDSRDLDGSYDQLTGHPPGPTKKALKQRFLKLLPCCGPQALPSVSETLAAPASLRPHRPRLLDPDSVDDEFELSTVCHRPEGLEQLQEQTKFTRKELQVLYRGFKNECPSGIVNEENFKQIYSQFFPQGDSSTYATFLFNAFDTNHDGSVSFEDFVAGLSVILRGTVDDRLNWAFNLYDLNKDGCITKEEMLDIMKSIYDMMGKYTYPALREEAPREHVESFFQKMDRNKDGVVTIEEFIESCQKVYPHPTPPWGLEGSKSLGIQ

SEQ ID NO: 804557 - protein, 303 aa, Homo sapiens
MRGQGRKESLSDSRDLDGSYDQLTGHPPGPTKKALKQRFLKLLPCCGPQALPSVSENSVDDEFELSTVCHRPEGLEQLQEQTKFTRKELQVLYRGFKNKSSLPSHEPRGESSGGLKIIPLPGSLGPWRVGAVNGRGFCLCPQPGALSFQECPSGIVNEENFKQIYSQFFPQGDSSTYATFLFNAFDTNHDGSVSFEDFVAGLSVILRGTVDDRLNWAFNLYDLNKDGCITKEEMLDIMKSIYDMMGKYTYPALREEAPREHVESFFQKMDRNKDGVVTIEEFIESCQKVQLPALYITLTWTQA

SEQ ID NO: 804558 - protein, 235 aa, Homo sapiens
ELRRRARRQTMNRCPRRCRSPLGQAARSLYQLVTGSLSPDSVDDEFELSTVCHRPEGLEQLQEQTKFTRKELQVLYRGFKNECPSGIVNEENFKQIYSQFFPQGDSSTYATFLFNAFDTNHDGSVSFEDFVAGLSVILRGTVDDRLNWAFNLYDLNKDGCITKEEMLDIMKSIYDMMGKYTYPALREEAPREHVESFFQKMDRNKDGVVTIEEFIESCQKDENIMRSMQLFDNVI

SEQ ID NO: 804559 - protein, 220 aa, Homo sapiens; identical to SEQ ID NO: 804554

SEQ ID NO: 804560 - protein, 220 aa, Homo sapiens; identical to SEQ ID NO: 804554

SEQ ID NO: 804561 - protein, 252 aa, Homo sapiens; identical to SEQ ID NO: 804552

SEQ ID NO: 804562 - protein, 285 aa, Homo sapiens
MRGQGRKESLSDSRDLDGSYDQLTGHPPGPTKKALKQRFLKLLPCCGPQALPSVSEIGRVFRFLGDSSLPSALAAPASLRPHRPRLLDPDSVDDEFELSTVCHRPEGLEQLQEQTKFTRKELQVLYRGFKNECPSGIVNEENFKQIYSQFFPQGDSSTYATFLFNAFDTNHDGSVSFEDFVAGLSVILRGTVDDRLNWAFNLYDLNKDGCITKEEMLDIMKSIYDMMGKYTYPALREEAPREHVESFFQKMDRNKDGVVTIEEFIESCQKDENIMRSMQLFDNVI

SEQ ID NO: 804563 - protein, 154 aa, Homo sapiens
MRGQGRKESLSDSRDLDGSYDQLTGHPPGPTKKALKQRFLKLLPCCGPQALPSVSETLAAPASLRPHRPRLLDPDSVDDEFELSTVCHRPEGLEQLQEQTKFTRKELQVLYRGFKNECPSGIVNEENFKQIYSQFFPQGGLCGWFVRDSSGNCR

SEQ ID NO: 804564 - protein, 262 aa, Homo sapiens
MRGQGRKESLSDSRDLDGSYDQLTGHPPGPTKKALKQRFLKLLPCCGPQALPSVSENSVDDEFELSTVCHRPEGLEQLQEQTKFTRKELQVLYRGFKNKSSLPSMSHVECPSGIVNEENFKQIYSQFFPQGDSSTYATFLFNAFDTNHDGSVSFEDFVAGLSVILRGTVDDRLNWAFNLYDLNKDGCITKEEMLDIMKSIYDMMGKYTYPALREEAPREHVESFFQKMDRNKDGVVTIEEFIESCQKDENIMRSMQLFDNVI

SEQ ID NO: 804565 - protein, 220 aa, Homo sapiens; identical to SEQ ID NO: 804554

SEQ ID NO: 804566 - protein, 271 aa, Homo sapiens
QTTWLPGHPLFPTWGGHPPGPTKKALKQRFLKLLPCCGPQALPSVSETLAAPASLRPHRPRLLDPDSVDDEFELSTVCHRPEGLEQLQEQTKFTRKELQVLYRGFKNKSSLPSMSHVECPSGIVNEENFKQIYSQFFPQGDSSTYATFLFNAFDTNHDGSVSFEDFVAGLSVILRGTVDDRLNWAFNLYDLNKDGCITKEEMLDIMKSIYDMMGKYTYPALREEAPREHVESFFQKMDRNKDGVVTIEEFIESCQKDENIMRSMQLFDNVI

SEQ ID NO: 804567 - protein, 184 aa, Homo sapiens
MRGQGRKESLSDSRDLDGSYDQLTDSVDDEFELSTVCHRPEGLEQLQEQTKFTRKELQVLYRGFKNECPSGIVNEENFKQIYSQFFPQGDSSTYATFLFNAFDTNHDGSVSFEEMLDIMKSIYDMMGKYTYPALREEAPREHVESFFQKMDRNKDGVVTIEEFIESCQKVQLPALYITLTWTQA

SEQ ID NO: 804568 - protein, 201 aa, Homo sapiens
MRGQGRKESLSDSRDLDGSYDQLTGHPPGPTKKALKQRFLKLLPCCGPQALPSVSENSVDDEFELSTVCHRPEGLEQLQEQTKFTRKELQVLYRGFKNKSSLPSHEPRGESSGGLKIIPLPGSLGPWRVGAVNGRGFCLCPQPGALSFQECPSGIVNEENFKQIYSQFFPQGGEGTRPKGKQLSFSRLREGGILEELGMPR

SEQ ID NO: 804569 - protein, 655 aa, Homo sapiens
METYHTCLVGTSCSIPPLFILSVFRYGVRESMQVFLSFLTEAVVSVKKRGEVGGILKNDHSWLAGARARQDFATGSFLVHKTSTSRLALQSWLAPSVHYPPIQCPCLLGLSAKFCLKNVGFFFANFIKAFPFVFSCWWFRVKFSMNKRGKYTTLNLEEKMKVLSRIEAGRSLKSVMDEFGISKSTFYDIKKNKKLILDFVLKQDMPLVGAEKRKRTTGAKYGDVDDAVYMWYQQKRSAGVPVRGVELQAAAERFARCFGRTDFKASTGWLFRFRNRHAIGNRKGCGEQVLSSVSENVEPFRQKLSMIIKEEKLCLAQLYSGDETDLFWKSMPENSQASRKDICLPGKKINKERLSAFLCANADGTHKLKSIIIGKSKLPKSVKEDTSTLPVIYKPSKDVWFTRELFSEWFFQNFVPEVRHFQLNVLRFHDEDVRALLLLDSCPAHPSSESLTSEDGRIKCMFFPHNSSTLIQPMNQGVILSCKRLYRWKQLEESLVIFEESDDEQEKGDKGVSKIKIYNIKSAIFNWAKSWEEVKQITIANAWENLLYKKEPEYDFQGLEHGDYREILEKCGELETKLDDDRVWLNGDEEKGCLLKTKGGITKEVVQKGGEAEKQTAEFKLSAVRESLDYLLDFVDATPEFQRFHFTLCEFSDDS

SEQ ID NO: 804570 - protein, 511 aa, Homo sapiens
MNKRGKYTTLNLEEKMKVLSRIEAGRSLKSVMDEFGISKSTFYDIKKNKKLILDFVLKQDMPLVGAEKRKRTTGAKYGDVDDAVYMWYQQKRSAGVPVRGVELQAAAERFARCFGRTDFKASTGWLFRFRNRHAIGNRKGCGEQVLSSVSENVEPFRQKLSMIIKEEKLCLAQLYSGDETDLFWKSMPENSQASRKDICLPGKKINKERLSAFLCANADGTHKLKSIIIGKSKLPKSVKEDTSTLPVIYKPSKDVWFTRELFSEWFFQNFVPEVRHFQLNVLRFHDEDVRALLLLDSCPAHPSSESLTSEDGRIKCMFFPHNSSTLIQPMNQGVILSCKRLYRWKQLEESLVIFEESDDEQEKGDKGVSKIKIYNIKSAIFNWAKSWEEVKQITIANAWENLLYKKEPEYDFQGLEHGDYREILEKCGELETKLDDDRVWLNGDEEKGCLLKTKGGITKEVVQKGGEAEKQTAEFKLSAVRESLDYLLDFVDATPEFQRFHFTLCEFSDDS

SEQ ID NO: 804571 - protein, 511 aa, Homo sapiens; identical to SEQ ID NO: 804570

SEQ ID NO: 804572 - protein, 439 aa, Homo sapiens
MKETPLSNCERRFLLRAIEEKKRLDGRQTYDYRNIRISFGTDYGCCIVELGKTRVLGQVSCELVSPKLNRATEGILFFNLELSQMAAPAFEPGRQSDLLVKLNRLMERCLRNSKCIDTESLCVVAGEKVWQIRVDLHLLNHDGNIIDAASIAAIVALCHFRRPDVSVQGDEVTLYTPEERDPVPLSIHHMPICVSFAFFQQGTYLLVDPNEREERVMDGLLVIAMNKHREICTIQSSGGIMLLKDQVLRCSKIAGVKVAEITELILKALENDQKVRKEGGKFGFAESIANQRITAFKMEKAPIDTSDVEEKAEEIIAEAEPPSEVVSTPVLWTPGTAQIGEGVENSWGDLEDSEKEDDEGGGDQAIILDGIKMDTGVEVSDIGSQDAPIILSDSEEEEMIILEPDKNPKKIRTQTTSAKQEKAPSKKPVKRRKKKRAAN

SEQ ID NO: 804573 - protein, 439 aa, Homo sapiens; identical to SEQ ID NO: 804572

SEQ ID NO: 804574 - protein, 439 aa, Homo sapiens; identical to SEQ ID NO: 804572

SEQ ID NO: 804575 - protein, 412 aa, Homo sapiens [sequence omitted]

SEQ ID NO: 804576 - protein, 456 aa, Homo sapiens
MKETPLSNCERRFLLRAIEEKKRLDGRQTYDYRNIRISFGTDYGCCIVELGKTRVLGQVSCELVSPKLNRATEGILFFNLELSQMAAPAFEPGRQSDLLVKLNRLMERCLRNSKCIDTESLCVVAGEKVWQIRVDLHLLNHDGNIIDAASIAAIVALCHFRRPDVSVQGDEVTLYTPEERDPVPLSIHHMPICVSFAFFQQGTYLLVDPNEREERVMDGLLVIAMNKHREICTIQSSGGIMLLKDQVLRCSKIAGVKVAEITELILKALENDQKVRKEGGKFGFAESIANQRITAFKMEKAPIDTSDVEEKAEEIIAEAEPPSEVVSTPVLWTPGTAQIGEGVENSWGDLEDSEKEDDEGGGDQAIILDGIKMDTGVEVSDIGSQELGFHHVGQTGLEFLTSDAPIILSDSEEEEMIILEPDKNPKKIRTQTTSAKQEKAPSKKPVKRRKKKRAAN

SEQ ID NO: 804577 - protein, 456 aa, Homo sapiens; identical to SEQ ID NO: 804576

SEQ ID NO: 804578 - protein, 426 aa, Homo sapiens
MKETPLSNCERRFLLRAIEEKKRLDGRQTYDYRNIRISFGTDYGCCIVELGKTRVLGQVSCELVSPKLNRATEGILFFNLELSQMAAPAFEPGRQSDLLVKLNRLMERCLRNSKCIDTESLCVVAGEKVWQIRVDLHLLNHDGNIIDAASIAAIVALCHFRRPDVSVQGDEVTLYTPEERDPVPLSIHHMPICVSFAFFQQGTYLLVDPNEREERVMDGLLVIAMNKHREICTIQSSGGIMLLKDQVLRCSKIAGVKVAEITELILKALENDQKVRKEGGKFGFAESIANQRITAFKMEKAPIDTSDVEEKAEEIIAEAEPPSEVVSTPVLWTPGTAQIGEGVENSWGDLEDSEKEDDEGGGDQAIILDGIKMDTGVEVSDIGSQELGFHHVGQTGLEFLTSGNPPASAYQNVGIKSVSHHAQPQK

SEQ ID NO: 804579 - protein, 387 aa, Homo sapiens [sequence omitted]

SEQ ID NO: 804580 - protein, 293 aa, Homo sapiens
MKETPLSNCERRFLLRAIEEKKRLDGRQTYDYRNIRISFGTDYGCCIVELGKTRVLGQVSCELVSPKLNRATEGILFFNLELSQMAAPAFEPGRQSDLLVKLNRLMERCLRNSKCIDTESLCVVAGEKVWQIRVDLHLLNHDGNIIDAASIAAIVALCHFRRPDVSVQGDEVTLYTPEERDPVPLSIHHMPICVSFAFFQQGTYLLVDPNEREERVMDGLLVIAMNKHREICTIQSSGGIMLLKDQVLRCSKIAGVKVAEITELILKAFTDGERGERKGDERRDECGVWRSRV

SEQ ID NO: 804581 - protein, 367 aa, Homo sapiens
MKETPLSNCERRFLLRAIEEKKRLDGRQTYDYRNIRISFGTDYGCCIVELGKTRVLGQVSCELVSPKLNRATEGILFFNLELSQMAAPAFEPGRQSDLLVKLNRLMERCLRNSKCIDTESLCVVAGEKVWQIRVDLHLLNHDGNIIDAASIAAIVALCHFRRPDVSVQGDEVTLVLRCSKIAGVKVAEITELILKALENDQKVRKEGGKFGFAESIANQRITAFKMEKAPIDTSDVEEKAEEIIAEAEPPSEVVSTPVLWTPGTAQIGEGVENSWGDLEDSEKEDDEGGGDQAIILDGIKMDTGVEVSDIGSQDAPIILSDSEEEEMIILEPDKNPKKIRTQTTSAKQEKAPSKKPVKRRKKKRAAN

SEQ ID NO: 804582 - protein, 412 aa, Homo sapiens [sequence omitted]

SEQ ID NO: 804583 - protein, 402 aa, Homo sapiens
MKETPLSNCERRFLLRAIEEKKRLDGRQTYDYRNIRISFGTDYGCCIVELGKTRVLGQVSCELVSPKLNRATEGILFFNLELSQMAAPAFEPGRQSDLLVKLNRLMERCLRNSKCIDTESLCVVAGEKVWQIRVDLHLLNHDGNIIDAASIAAIVALCHFRRPDVSVQGDEVTLYTPEERDPVPLSIHHMPICVSFAFFQQGTYLLVDPNEREERVMDGLLVIAMNKHREICTIQSSGGIMLLKDQVLRCSKIAGVKVAEITELILKALENDQKVRKEGGKFGFAESIANQRITAFKMEKAPIDTSDVEEKAEEIIAEAEPPSEVVSTPVLWTPGTAQIGEGVENSWGDLEDSEKEDDEGGGDQAIILDGIKMDTGVEVSDIGSQEHRPPVQNKKKHQVKSQ

SEQ ID NO: 804584 - protein, 423 aa, Homo sapiens
MNLCLQRLDGRQTYDYRNIRISFGTDYGCCIVELGKTRVLGQVSCELVSPKLNRATEGILFFNLELSQMAAPAFEPGRQSDLLVKLNRLMERCLRNSKCIDTESLCVVAGEKVWQIRVDLHLLNHDGNIIDAASIAAIVALCHFRRPDVSVQGDEVTLYTPEERDPVPLSIHHMPICVSFAFFQQGTYLLVDPNEREERVMDGLLVIAMNKHREICTIQSSGGIMLLKDQVLRCSKIAGVKVAEITELILKALENDQKVRKEGGKFGFAESIANQRITAFKMEKAPIDTSDVEEKAEEIIAEAEPPSEVVSTPVLWTPGTAQIGEGVENSWGDLEDSEKEDDEGGGDQAIILDGIKMDTGVEVSDIGSQDAPIILSDSEEEEMIILEPDKNPKKIRTQTTSAKQEKAPSKKPVKRRKKKRAAN

SEQ ID NO: 804585 - protein, 393 aa, Homo sapiens
MKETPLSNCERRFLLRAIEEKKRLDGRQTYDYRNIRISFGTDYGCCIVELGKTRVLGQVSCELVSPKLNRATEGILFFNLELSQMAAPAFEPGRQSDLLVKLNRLMERCLRNSKCIDTESLCVVAGEKYTPEERDPVPLSIHHMPICVSFAFFQQGTYLLVDPNEREERVMDGLLVIAMNKHREICTIQSSGGIMLLKDQVLRCSKIAGVKVAEITELILKALENDQKVRKEGGKFGFAESIANQRITAFKMEKAPIDTSDVEEKAEEIIAEAEPPSEVVSTPVLWTPGTAQIGEGVENSWGDLEDSEKEDDEGGGDQAIILDGIKMDTGVEVSDIGSQDAPIILSDSEEEEMIILEPDKNPKKIRTQTTSAKQEKAPSKKPVKRRKKKRAAN

SEQ ID NO: 804586 - protein, 84 aa, Homo sapiens
GAVADTVPFPLARSVLELGSGASLTGLAICKICRPRAYIFSDCHSRVLEQLQGNVLLNGLSLEADITANLDSPRVTMAQRWTGT

SEQ ID NO: 804587 - protein, 647 aa, Homo sapiens
EKWRRSLAVGPSLEKRSGNDCLASSLNLLDAGETQSPAVYFAIPAKEDTEGLAQMFQVFKKFNPAWERVCTILVDPHFLPLPILAMEFPTAEVLLSAFHICKFLQAKFYQLSLERPVERLLLTSLQSTMCSATAGNLRKLYTLLSNCIPPAKLPELHSHWLLNDRIWLAHRWRSRAESSHYFQSLEVTTHILSQFFGTTPSEKQGMASLFRYMQQNSADKANFNQGLCAQNNHAPSDTIPESPKLEQLVESHIQHSLNAICTGPAAQLCLGELAVVQKSTHLIGSGSEKMNIQILEDTHKVQPQPPASCSCYFNQAFHLPCRHILAMLSARRQVLQPDMLPAQWTAGCATSLDSILGSKWSETLDKHLAVTHLTEEVGQLLQHCTKEEFERRYSTLAGTGRQLDWAFMSRSNSDYSRCPEMLMHLCTLTSTHTHTHTHTHTHTHSLTLLYFRGPSFQNKDNKDKVEGSSHLPWPATQHVSSSMRQESAILICLVSLVELRVCHLLLAELEHPCAQVVHQVGGVCVCVMWNMAVNLNRFPCPLLCRQHFYKPMLRRGSSKWMARTGVFLASAFFHEYLVSVPLRMFRLWAFTGMMAQIPLAWFVGRFFQGNYGNAAVWLSLIIGQPIAVLMYVHDYYVLNYEAPAAEA

SEQ ID NO: 804588 - protein, 134 aa, Homo sapiens
MVNLHPPCSASAWEEVGPGFAGSGLQPGWPRDGQSTGPFWCGSGEPRGYGTQWLCPWLFALGQGSVWQPLSFTWNLGSQVGWWLSAALHEVGAPLIPRPALPSALLAPGWAVQTAQPCSLQDTLFPGPAIHQAG

SEQ ID NO: 804589 - protein, 488 aa, Homo sapiens
MGDRGSSRRRRTGSRPSSHGGGGPAAAEEEVRDAAAGPDVGAAGDAPAPAPNKDGDAGVGSGHWELRCHRLQDSLFSSDSGFSNYRGILNWCVVMLILSNARLFLENLIKYGILVDPIQVVSLFLKDPYSWPAPCLVIAANVFAVAAFQVEKRLAVGALTEQAGLLLHVANLATILCFPAAVVLLVESITPVGSLLALMAHTILFLKLFSYRDVNSWCRRARAKAASAGKKASSAAAPHTVSYPDNLTYRDLYYFLFAPTLCYELNFPRSPRIRKRFLLRRILEMLFFTQLQVGLIQQWMVPTIQNSMKPFKDMDYSRIIERLLKLAVPNHLIWLIFFYWLFHSCLNAVAELMQFGDREFYRDWWNSESVTYFWQNWNIPVHKWCIRHFYKPMLRRGSSKWMARTGVFLASAFFHEYLVSVPLRMFRLWAFTGMMAQIPLAWFVGRFFQGNYGNAAVWLSLIIGQPIAVLMYVHDYYVLNYEAPAAEA

SEQ ID NO: 804590 - protein, 515 aa, Homo sapiens
MGDRGSSRRRRTGSRPSSHGGGGPAAAEEEVRDAAAGPDVGAAGDAPAPAPNKDGDAGVGSGHWELRCHRLQDSLFSSDSGFSNYRGILNWCVVMLILSNARLFLENLIKYGILVDPIQVVSLFLKDPYSWPAPCLVIAANVFAVAAFQVEKRLAVGALTEQAGLLLHVANLATILCFPAAVVLLVESITPVGSLLALMAHTILFLKLFSYRDVNSWCRRARAKAASAGKKASSAAAPHTVSYPDNLTYRDLYYFLFAPTLCYELNFPRSPRIRKRFLLRRILEMLFFTQLQVGLIQQWMVPTIQNSMKPFKDMDYSRIIERLLKLAVPNHLIWLIFFYWLFHSCLNAVAELMQFGDREFYRDWWNSESVTYFWQNWNIPVHKWCISVGGVCVCVMWNMAVNLNRFPCPLLCRQHFYKPMLRRGSSKWMARTGVFLASAFFHEYLVSVPLRMFRLWAFTGMMAQIPLAWFVGRFFQGNYGNAAVWLSLIIGQPIAVLMYVHDYYVLNYEAPAAEA

SEQ ID NO: 804591 - protein, 521 aa, Homo sapiens
MGDRGSSRRRRTGSRPSSHGGGGPAAAEEEVRDAAAGPDVGAAGDAPAPAPNKDGDAGVGSGHWELRCHRLQDSLFSSDSGFSNYRGILNWCVVMLILSNARLFLENLIKYGILVDPIQVVSLFLKDPYSWPAPCLVIAANVFAVAAFQVEKRLAVGALTEQAGLLLHVANLATILCFPAAVVLLVESITPVGSLLALMAHTILFLKLFSYRDVNSWCRRARAKAASAGKKASSAAAPHTVSYPDNLTYRDLYYFLFAPTLCYELNFPRSPRIRKRFLLRRILEMLFFTQLQVGLIQQWMVPTIQNSMKPFKDMDYSRIIERLLKLAVSADRWRMHRTGGDSGMWGKVLELGAQPPPPCQVPNHLIWLIFFYWLFHSCLNAVAELMQFGDREFYRDWWNSESVTYFWQNWNIPVHKWCIRHFYKPMLRRGSSKWMARTGVFLASAFFHEYLVSVPLRMFRLWAFTGMMAQIPLAWFVGRFFQGNYGNAAVWLSLIIGQPIAVLMYVHDYYVLNYEAPAAEA

SEQ ID NO: 804592 - protein, 488 aa, Homo sapiens; identical to SEQ ID NO: 804589

SEQ ID NO: 804593 - protein, 257 aa, Homo sapiens
MGDRGSSRRRRTGSRPSSHGGGGPAAAEEEVRDAAAGPDVGAAGDAPAPAPNKDGDAGVGSGHWELRCHRLQDSLFSSDSGFSNYRGILNWCVVMLILSNARLFLENLIKYGILVDPIQVVSLFLKDPYSWPAPCLVIAANVFAVAAFQVEKRLAVGALTEQAGLLLHVANLATILCFPAAVVLLVESITPVGSLLALMAHTILFLKLFSYRDVNSWCRRARAKADTSTSPCFDGAAASGWPGQGCSWPRPSSTSTW

SEQ ID NO: 804594 - protein, 120 aa, Homo sapiens
MWNMAVNLNRFPCPLLCRQHFYKPMLRRGSSKWMARTGVFLASAFFHEYLVSVPLRMFRLWAFTGMMAQIPLAWFVGRFFQGNYGNAAVWLSLIIGQPIAVLMYVHDYYVLNYEAPAAEA

SEQ ID NO: 804595 - protein, 488 aa, Homo sapiens; identical to SEQ ID NO: 804589

SEQ ID NO: 804596 - protein, 195 aa, Homo sapiens
MAGGGRGNRTRRSPRIRKRFLLRRILEMLFFTQLQVGLIQQWMVPTIQNSMKPFKDMDYSRIIERLLKLAVPNHLIWLIFFYWLFHSCLNAVAELMQFGDREFYRDWWNSESVTYFWQNWNIPVHKWCIRHFYKPMLRRSPGTRGPRVAESGSDPAEVILSTAPEPTGAGSWGWGGGLGEGLWQYAGTRLRWLRD

SEQ ID NO: 804597 - protein, 442 aa, Homo sapiens
LPAHLGLGSGCELLSSGPVARCHRLQDSLFSSDSGFSNYRGILNWCVVMLILSNARLFLENLIKYGILVDPIQVVSLFLKDPYSWPAPCLVIAANVFAVAAFQVEKRLAVGALTEQAGLLLHVANLATILCFPAAVVLLVESITPVGSLLALMAHTILFLKLFSYRDVNSWCRRARAKAASAGKKASSAAAPHTVSYPDNLTYRDLYYFLFAPTLCYELNFPRSPRIRKRFLLRRILEMLFFTQLQVGLIQQWMVPTIQNSMKPFKDMDYSRIIERLLKLAVPNHLIWLIFFYWLFHSCLNAVAELMQFGDREFYRDWWNSESVTYFWQNWNIPVHKWCIRHFYKPMLRRGSSKWMARTGVFLASAFFHEYLVSVPLRMFRLWAFTGMMAQIPLAWFVGRFFQGNYGNAAVWLSLIIGQPIAVLMYVHDYYVLNYEAPAAEA

SEQ ID NO: 804598 - protein, 488 aa, Homo sapiens; identical to SEQ ID NO: 804589

SEQ ID NO: 804599 - protein, 394 aa, Homo sapiens
SQGAHYSQGAHYSQGAHYSQGAHYSQESSLLKDPYSWPAPCLVIAANVFAVAAFQVEKRLAVGALTEQAGLLLHVANLATILCFPAAVVLLVESITPVGSLLALMAHTILFLKLFSYRDVNSWCRRARAKAASAGKKASSAAAPHTVSYPDNLTYRDLYYFLFAPTLCYELNFPRSPRIRKRFLLRRILEMLFFTQLQVGLIQQWMVPTIQNSMKPFKDMDYSRIIERLLKLAVPNHLIWLIFFYWLFHSCLNAVAELMQFGDREFYRDWWNSESVTYFWQNWNIPVHKWCIRHFYKPMLRRGSSKWMARTGVFLASAFFHEYLVSVPLRMFRLWAFTGMMAQIPLAWFVGRFFQGNYGNAAVWLSLIIGQPIAVLMYVHDYYVLNYEAPAAEA

SEQ ID NO: 804600 - protein, 345 aa, Homo sapiens
MVRGWVLEKRLAVGALTEQAGLLLHVANLATILCFPAAVVLLVESITPVGSLLALMAHTILFLKLFSYRDVNSWCRRARAKAASAGKKASSAAAPHTVSYPDNLTYRDLYYFLFAPTLCYELNFPRSPRIRKRFLLRRILEMLFFTQLQVGLIQQWMVPTIQNSMKPFKDMDYSRIIERLLKLAVPNHLIWLIFFYWLFHSCLNAVAELMQFGDREFYRDWWNSESVTYFWQNWNIPVHKWCIRHFYKPMLRRGSSKWMARTGVFLASAFFHEYLVSVPLRMFRLWAFTGMMAQIPLAWFVGRFFQGNYGNAAVWLSLIIGQPIAVLMYVHDYYVLNYEAPAAEA

SEQ ID NO: 804601 - protein, 74 aa, Homo sapiens
RCALADEWKRMFRLWAFTGMMAQIPLAWFVGRFFQGNYGNAAVWLSLIIGQPIAVLMYVHDYYVLNYEAPAAEA

SEQ ID NO: 804602 - protein, 538 aa, Homo sapiens
MEGGRRARVVIESKRNFFLGAFPTPFPAEHVELGRLGDSETAMVPGKGGADYILLPFKKMDFSRNLYDIGEQLDSEDLASLKFLSLDYIPQRKQEPIKDALMLFQRLQEKRMLEESNLSFLKELLFRINRLDLLITYLNTRKEEMERELQTPGRAQISAYRVMLYQISEEVSRSELRSFKFLLQEEISKCKLDDDMNLLDIFIEMEKRVILGEGKLDILKRVCAQINKSLLKIINDYEEFSKERSSSLEGSPDEFSNGEELCGVMTISDSPREQDSESQTLDKVYQMKSKPRGYCLIINNHNFAKAREKVPKLHSIRDRNGTHLDAGALTTTFEELHFEIKPHDDCTVEQIYEILKIYQLMDHSNMDCFICCILSHGDKGIIYGTDGQEAPIYELTSQFTGLKCPSLAGKPKVFFIQACQGDNYQKGIPVETDSEEQPYLEMDLSSPQTRYIPDEADFLLGMATVNNCVSYRNPAEGTWYIQSLCQSLRERCPRGDDILTILTEVNYEVSNKDDKKNMGKQMPQPTFTLRKKLVFPSD

SEQ ID NO: 804603 - protein, 464 aa, Homo sapiens
MDFSRNLYDIGEQLDSEDLASLKFLSLDYIPQRKQEPIKDALMLFQRLQEKRMLEESNLSFLKELLFRINRLDLLITYLNTRKEEMERELQTPGRAQISAYRVMLYQISEEVSRSELRSFKFLLQEEISKCKLDDDMNLLDIFIEMEKRVILGEGKLDILKRVCAQINKSLLKIINDYEEFSKGEELCGVMTISDSPREQDSESQTLDKVYQMKSKPRGYCLIINNHNFAKAREKVPKLHSIRDRNGTHLDAGALTTTFEELHFEIKPHDDCTVEQIYEILKIYQLMDHSNMDCFICCILSHGDKGIIYGTDGQEAPIYELTSQFTGLKCPSLAGKPKVFFIQACQGDNYQKGIPVETDSEEQPYLEMDLSSPQTRYIPDEADFLLGMATVNNCVSYRNPAEGTWYIQSLCQSLRERCPRGDDILTILTEVNYEVSNKDDKKNMGKQMPQPTFTLRKKLVFPSD

SEQ ID NO: 804604 - protein, 496 aa, Homo sapiens
MDFSRNLYDIGEQLDSEDLASLKFLSLDYIPQRKQEPIKDALMLFQRLQEKRMLEESNLSFLKELLFRINRLDLLITYLNTRKEEMERELQTPGRAQISAYRFHFCRMSWAEANSQCQTQSVPFWRRVDHLLIRVMLYQISEEVSRSELRSFKFLLQEEISKCKLDDDMNLLDIFIEMEKRVILGEGKLDILKRVCAQINKSLLKIINDYEEFSKGEELCGVMTISDSPREQDSESQTLDKVYQMKSKPRGYCLIINNHNFAKAREKVPKLHSIRDRNGTHLDAGALTTTFEELHFEIKPHDDCTVEQIYEILKIYQLMDHSNMDCFICCILSHGDKGIIYGTDGQEAPIYELTSQFTGLKCPSLAGKPKVFFIQACQGDNYQKGIPVETDSEEQPYLEMDLSSPQTRYIPDEADFLLGMATVNNCVSYRNPAEGTWYIQSLCQSLRERCPRGDDILTILTEVNYEVSNKDDKKNMGKQMPQPTFTLRKKLVFPSD

SEQ ID NO: 804605 - protein, 496 aa, Homo sapiens; identical to SEQ ID NO: 804604

SEQ ID NO: 804606 - protein, 479 aa, Homo sapiens
MDFSRNLYDIGEQLDSEDLASLKFLSLDYIPQRKQEPIKDALMLFQRLQEKRMLEESNLSFLKELLFRINRLDLLITYLNTRKEEMERELQTPGRAQISAYRVMLYQISEEVSRSELRSFKFLLQEEISKCKLDDDMNLLDIFIEMEKRVILGEGKLDILKRVCAQINKSLLKIINDYEEFSKERSSSLEGSPDEFSNGEELCGVMTISDSPREQDSESQTLDKVYQMKSKPRGYCLIINNHNFAKAREKVPKLHSIRDRNGTHLDAGALTTTFEELHFEIKPHDDCTVEQIYEILKIYQLMDHSNMDCFICCILSHGDKGIIYGTDGQEAPIYELTSQFTGLKCPSLAGKPKVFFIQACQGDNYQKGIPVETDSEEQPYLEMDLSSPQTRYIPDEADFLLGMATVNNCVSYRNPAEGTWYIQSLCQSLRERCPRGDDILTILTEVNYEVSNKDDKKNMGKQMPQPTFTLRKKLVFPSD

SEQ ID NO: 804607 - protein, 479 aa, Homo sapiens; identical to SEQ ID NO: 804606

SEQ ID NO: 804608 - protein, 479 aa, Homo sapiens; identical to SEQ ID NO: 804606

SEQ ID NO: 804609 - protein, 335 aa, Homo sapiens
MEGGRRARVVIESKRNFFLGAFPTPFPAEHVELGRLGDSETAMVPGKGGADYILLPFKKMDFSRNLYDIGEQLDSEDLASLKFLSLDYIPQRKQEPIKDALMLFQRLQEKRMLEESNLSFLKELLFRINRLDLLITYLNTRKEEMERELQTPGRAQISAYRVMLYQISEEVSRSELRSFKFLLQEEISKCKLDDDMNLLDIFIEMEKRVILGEGKLDILKRVCAQINKSLLKIINDYEEFSKERSSSLEGSPDEFSNGEELCGVMTISDSPREQDSESQTLDKVYQMKSKPRGYCLIINNHNFAKAREKVPKLHSIRDRNGTHLDAGTVEPKREK

SEQ ID NO: 804610 - protein, 464 aa, Homo sapiens; identical to SEQ ID NO: 804603

SEQ ID NO: 804611 - protein, 395 aa, Homo sapiens
MDFSRNLYDIGEQLDSEDLASLKFLSLDYIPQRKQEPIKDALMLFQRLQEKRMLEESNLSFLKELLFRINRLDLLITYLNTRKEEMERELQTPGRAQISAYRVMLYQISEEVSRSELRSFKFLLQEEISKCKLDDDMNLLDIFIEMEKRVILGEGKLDILKRVCAQINKSLLKIINDYEEFSKGALTTTFEELHFEIKPHDDCTVEQIYEILKIYQLMDHSNMDCFICCILSHGDKGIIYGTDGQEAPIYELTSQFTGLKCPSLAGKPKVFFIQACQGDNYQKGIPVETDSEEQPYLEMDLSSPQTRYIPDEADFLLGMATVNNCVSYRNPAEGTWYIQSLCQSLRERCPRGDDILTILTEVNYEVSNKDDKKNMGKQMPQPTFTLRKKLVFPSD

SEQ ID NO: 804612 - protein, 519 aa, Homo sapiens
MDFSRNLYDIGEQLDSEDLASLKFLSLDYIPQRKQEPIKDALMLFQRLQEKRMLEESNLSFLKELLFRINRLDLLITYLNTRKEEMERELQTPGRAQISAYRVMLYQISEEVSRSELRSFKFLLQEEISKCKLDDDMNLLDIFIEMEKRVILGEGKLDILKRVCAQINKSLLKIINDYEEFSKGRNNLTAGIGKTYSKIETDKSLHITVVSNQILFGVSPFNSERSSSLEGSPDEFSNGEELCGVMTISDSPREQDSESQTLDKVYQMKSKPRGYCLIINNHNFAKAREKVPKLHSIRDRNGTHLDAGALTTTFEELHFEIKPHDDCTVEQIYEILKIYQLMDHSNMDCFICCILSHGDKGIIYGTDGQEAPIYELTSQFTGLKCPSLAGKPKVFFIQACQGDNYQKGIPVETDSEEQPYLEMDLSSPQTRYIPDEADFLLGMATVNNCVSYRNPAEGTWYIQSLCQSLRERCPRGDDILTILTEVNYEVSNKDDKKNMGKQMPQPTFTLRKKLVFPSD

SEQ ID NO: 804613 - protein, 252 aa, Homo sapiens
MKSKPRGYCLIINNHNFAKAREKVPKLHSIRDRNGTHLDAGALTTTFEELHFEIKPHDDCTVEQIYEILKIYQLMDHSNMDCFICCILSHGDKGIIYGTDGQEAPIYELTSQFTGLKCPSLAGKPKVFFIQACQGDNYQKGIPVETDSEEQPYLEMDLSSPQTRYIPDEADFLLGMATVNNCVSYRNPAEGTWYIQSLCQSLRERCPRGDDILTILTEVNYEVSNKDDKKNMGKQMPQPTFTLRKKLVFPSD

SEQ ID NO: 804614 - protein, 479 aa, Homo sapiens; identical to SEQ ID NO: 804606

SEQ ID NO: 804615 - protein, 276 aa, Homo sapiens
MDFSRNLYDIGEQLDSEDLASLKFLSLDYIPQRKQEPIKDALMLFQRLQEKRMLEESNLSFLKELLFRINRLDLLITYLNTRKEEMERELQTPGRAQISAYRVMLYQISEEVSRSELRSFKFLLQEEISKCKLDDDMNLLDIFIEMEKRVILGEGKLDILKRVCAQINKSLLKIINDYEEFSKERSSSLEGSPDEFSNGEELCGVMTISDSPREQDSESQTLDKVYQMKSKPRGYCLIINNHNFAKAREKVPKLHSIRDRNGTHLDAGFENVFSWW

SEQ ID NO: 804616 - protein, 261 aa, Homo sapiens
MDFSRNLYDIGEQLDSEDLASLKFLSLDYIPQRKQEPIKDALMLFQRLQEKRMLEESNLSFLKELLFRINRLDLLITYLNTRKEEMERELQTPGRAQISAYRVMLYQISEEVSRSELRSFKFLLQEEISKCKLDDDMNLLDIFIEMEKRVILGEGKLDILKRVCAQINKSLLKIINDYEEFSKGEELCGVMTISDSPREQDSESQTLDKVYQMKSKPRGYCLIINNHNFAKAREKVPKLHSIRDRNGTHLDAGFENVFSWW

SEQ ID NO: 804617 - protein, 276 aa, Homo sapiens
MDFSRNLYDIGEQLDSEDLASLKFLSLDYIPQRKQEPIKDALMLFQRLQEKRMLEESNLSFLKELLFRINRLDLLITYLNTRKEEMERELQTPGRAQISAYRVMLYQISEEVSRSELRSFKFLLQEEISKCKLDDDMNLLDIFIEMEKRVILGEGKLDILKRVCAQINKSLLKIINDYEEFSKERSSSLEGSPDEFSNGEELCGVMTISDSPREQDSESQTLDKVYQMKSKPRGYCLIINNHNFAKAREKVPKLHSIRDRNGTHLDAGTVEPKREK

SEQ ID NO: 804618 - protein, 220 aa, Homo sapiens
MDFSRNLYDIGEQLDSEDLASLKFLSLDYIPQRKQEPIKDALMLFQRLQEKRMLEESNLSFLKELLFRINRLDLLITYLNTRKEEMERELQTPGRAQISAYRVMLYQISEEVSRSELRSFKFLLQEEISKCKLDDDMNLLDIFIEMEKRVILGEGKLDILKRVCAQINKSLLKIINDYEEFSKDFGQSLPNEKQTSGILSDHQQSQFCKSTGESAQTSQH

SEQ ID NO: 804619 - protein, 213 aa, Homo sapiens
MDFSRNLYDIGEQLDSEDLASLKFLSLDYIPQRKQEPIKDALMLFQRLQEKRMLEESNLSFLKELLFRINRLDLLITYLNTRKEEMERELQTPGRAQISAYRVMLYQISEEVSRSELRSFKFLLQEEISKCKLDDDMNLLDIFIEMEKRVILGEGKLDILKRVCAQINKSLLKIINDYEEFSKGEELCGVMTISDSPREQDSESQEEEEILNI

SEQ ID NO: 804620 - protein, 82 aa, Homo sapiens
ESQRRRSPCQPFIGSGTHEVQLVPGTVHSLKQLKGLSPDTDATLSRMHGPGLTLSMEEVGSARGGRMVARDTESLVLGLWLS

SEQ ID NO: 804621 - protein, 227 aa, Homo sapiens
MASPSRQPPPGGSGLLQGSRARSYGSLVQSACSPVRERRLEHQLEPGDTLAGLALKYGVTMEQIKRANRLYTNDSIFLKKTLYIPILTEPRDLFNGLDSEEEKDGEEKVHPSNSEVWPHSTERKKQETGAGRANGEVLPTPGQETPTPIHDLSASDFLKKLDSQISLSKKAAAQKLKKGENGVPGEDAGLHLSSPWMQQRAVLGPVPLTRTSRTRTLRDQEDEIFKL

SEQ ID NO: 804622 - protein, 98 aa, Homo sapiens
ASCTVAAPKFEEEGAKWWEAAGLPEGEALGTRREHSRTPTFRAGRTPAARPRRAPGPENHREGRDEERRRVASGQGLCDYIGPIQIIQDHLPISRFFT

SEQ ID NO: 804623 - protein, 132 aa, Homo sapiens
APVARWPPPNSRRKVQSGGRLRVSRRVRRWGPGGSTAEPLPFGRGGHQPRALAGRRDRKITAKGGTRKGGGWLQDKDFVITLGPSRSSRIIFPSQDSSLNHICKIPFAVCEISVGEDVMPEDVASTLKQSRT

SEQ ID NO: 804624 - protein, 551 aa, Homo sapiens
MSRQSSITFQSGSRRGFSTTSAITPAAGRSRFSSVSVARSAAGSGGLGRISSAGASFGSRSLYNLGGAKRVSINGCGSSCRSGFGGRASNGFGVNSGFGYGGGVGGGFSGPSFPVCPPGGIQEVTVNQSLLTPLHLQIDPTIQRVRAEEREQIKTLNNKFASFIDKVRFLEQQNKVLETKWALLQEQGSRTVRQNLEPLFDSYTSELRRQLESITTERGRLEAELRNMQDVVEDFKVRYEDEINKRTAAENEFVALKKDVDAAYMNKVELEAKVKSLPEEINFIHSVFDAELSQLQTQVGDTSVVLSMDNNRNLDLDSIIAEVKAQYEDIANRSRAEAESWYQTKYEELQVTAGRHGDDLRNTKQEISEMNRMIQRLRAEIDSVKKQCSSLQTAIADAEQRGELALKDARAKLVDLEEALQKAKQDMARLLREYQELMNIKLALDVEIATYRKLLEGEECRLSGEGVSPVNISVVTSTLSSGYGSGSSIGGGNLGLGGGSGYSFTTSGGHSLGAGLGGSGFSATSNRGLGGSGSSVKFVSTTSSSQKSYTH

SEQ ID NO: 804625 - protein, 103 aa, Homo sapiens
APATFDLHNIISPFQEMTFEQDLKENQMPSPDHCLVIPWHFVHLSISSHLTSPSLLYVLPSEACSWLHQSNVNNKMKNIRMIRDQEYYRCPTLPPGIPKEARF

SEQ ID NO: 804626 - protein, 218 aa, Homo sapiens
MALVPYEETTEFGLQKFHKPLATFSFANHTIQIRQDWRHLGVAAVVWDAAIVLSTYLEMGAVELRGRSAVELGAGTGLVGIVAALLGAHVTITDRKVALEFLKSNVQANLPPHIQTKTVVKELTWGQNLGSFSPGEFDLILGADIIYLEETFTDLLQTLEHLCSNHSVILLACRIRYERDNNFLAMLERQFIVRKVHYDPEKDVHIYEAQKRNQKEDL

SEQ ID NO: 804627 - protein, 218 aa, Homo sapiens; identical to SEQ ID NO: 804626

SEQ ID NO: 804628 - protein, 129 aa, Homo sapiens
MALVPYEETTEFGLQKFHKPLATFSFANHTIQIRQDWRHLGVAAVVWDAAIVLSTYLEMGAVELRGRSAVELGAGTGLVGIVAALLGAHVTITDRKVALEFLKSNVQANLPPHIQTKTVVKELTWGPYI

SEQ ID NO: 804629 - protein, 127 aa, Homo sapiens
MALVPYEETTEFGLQKFHKPLATFSFANHTIQIRQDWRHLGVAAVVWDAAIVLSTYLEMGAVELRGRSAVELGAGTGLVGIVAALLENTGQMQTEGYSKRKQITTLQKLQGHQRQGNKLSQTEGDYN

SEQ ID NO: 804630 - protein, 109 aa, Homo sapiens
MALVPYEETTEFGLQKFHKPLATFSFANHTIQIRQDWRHLGVAAVVWDAAIVLSTYLEMGAVELRGRSAVELGAGTGLVGIVAALLENTGQMQTEGYSKRKQITTLHYN

SEQ ID NO: 804631 - protein, 95 aa, Homo sapiens
LRPAVFAASPGRGKRSARSTRDRLPGRKYRRGGASARPGRALGAPPGSSRRPVWPGDPKRPCDPPRLVSLSPLEGCRSSGAPGQEGRTGRPGRGV

SEQ ID NO: 804632 - protein, 254 aa, Homo sapiens
LRPAVFAASPGRGKRSARSTRDRLPGRLSRGRGAGGMALVPYEETTEFGLQKFHKPLATFSFANHTIQIRQDWRHLGVAAVVWDAAIVLSTYLEMGAVELRGRSAVELGAGTGLVGIVAALLGAHVTITDRKVALEFLKSNVQANLPPHIQTKTVVKELTWGQNLGSFSPGEFDLILGADIIYLEETFTDLLQTLEHLCSNHSVILLACRIRYERDNNFLAMLERQFIVRKVHYDPEKDVHIYEAQKRNQKEDL

SEQ ID NO: 804633 - protein, 218 aa, Homo sapiens; identical to SEQ ID NO: 804626

SEQ ID NO: 804634 - protein, 107 aa, Homo sapiens
MALVPYEETTEFGLQKFHKPLATFSFANHTIQIRQDWRHLGVAAVVWDAAIVLSTYLEMGAVELRGRSAVELGAGTGLVGIVAALLGCGQASPFSTLTGENLNPKLI

SEQ ID NO: 804635 - protein, 345 aa, Homo sapiens [sequence omitted]

SEQ ID NO: 804636 - protein, 345 aa, Homo sapiens [sequence omitted]

SEQ ID NO: 804637 - protein, 345 aa, Homo sapiens [sequence omitted]

SEQ ID NO: 804638 - protein, 304 aa, Homo sapiens
MSVTGGKMAPSLTQEILSHLGLASKTAAWGTLGTLRTFLNFSVDKDAQRLLRAITGQGVDRSAIVDVLTNRSREQRQLISRNFQERTQQDLMKSLQAALSGNLERIVMALLQPTAQFDAQELRTALKASDSAVDVAIEILATRTPPQLQECLAVYKHNFQVEAVDGITSETSGILQDLLLALAKGGRDSYSGIIDYNLAEQDVQALQRAEGPSREETWVPVFTQRNPEHLIRVFDQYQRSTGQELEEAVQNRFHGDAQVALLGLASVIKNTPLYFADKLHQALQDAVKGDCQSALLALCRAEDM

SEQ ID NO: 804639 - protein, 305 aa, Homo sapiens
QLSSSTRLGVIWPPRCAGMAASLWMGDLEPYMDENFISRAFATMGETVMSVKIIRNRLTGIPAGYCFVEFADLATAEKCLHKINGKPLPGATPAKRFKLNYATYGKQPDNSPEYSLFVGDLTPDVDDGMLYEFFVKVYPSCRGGKVVLDQTGVSKGYGFVKFTDELEQKRALTECQGAVGLGSKPVRLSVAIPKASRVKPVEYSQMYSYSYNQYYQQYQNYYAQWGYDQNTGSYSYSYPQYGYTQSTMQTYEEVGDDALEDPMPQLDVTEANKEFMEQSEELYDALMDCHWQPLDTVSSEIPAMM

SEQ ID NO: 804640 - protein, 287 aa, Homo sapiens
MAASLWMGDLEPYMDENFISRAFATMGETVMSVKIIRNRLTGIPAGYCFVEFADLATAEKCLHKINGKPLPGATPAKRFKLNYATYGKQPDNSPEYSLFVGDLTPDVDDGMLYEFFVKVYPSCRGGKVVLDQTGVSKGYGFVKFTDELEQKRALTECQGAVGLGSKPVRLSVAIPKASRVKPVEYSQMYSYSYNQYYQQYQNYYAQWGYDQNTGSYSYSYPQYGYTQSTMQTYEEVGDDALEDPMPQLDVTEANKEFMEQSEELYDALMDCHWQPLDTVSSEIPAMM

SEQ ID NO: 804641 - protein, 177 aa, Homo sapiens
MLYEFFVKVYPSCRGGKVVLDQTGVSKGYGFVKFTDELEQKRALTECQGAVGLGSKPVRLSVAIPKASRVKPVEYSQMYSYSYNQYYQQYQNYYAQWGYDQNTGSYSYSYPQYGYTQSTMQTYEEVGDDALEDPMPQLDVTEANKEFMEQSEELYDALMDCHWQPLDTVSSEIPAMM

SEQ ID NO: 804642 - protein, 177 aa, Homo sapiens; identical to SEQ ID NO: 804641

SEQ ID NO: 804643 - protein, 177 aa, Homo sapiens; identical to SEQ ID NO: 804641

SEQ ID NO: 804644 - protein, 294 aa, Homo sapiens
MAASLWMGDLEPYMDENFISRAFATMGETVMSVKIIRNRLTGIPAGYCFVEFADLATAEKCLHKINGKPLPGATPAKRFKLNYATYGKQPDNSPEYSLFVGDLTPDVDDGMLYEFFVKVYPSCRGGKVVLDQTGVSKGYGFVKFTDELEQKRALTECQGAVGLGSKPVRLSVAIPKASRVKPVEYSQMYSYSYNQYYQQYQNYYAQWGYDQNTGSYSYSYPQYGYTQSTMQTYEEVGDDALEEAGFHHVAQAGLELLGSSDLPISAFQSAGIIGMSHCSWPKLFLRPHATAGCD

SEQ ID NO: 804645 - protein, 135 aa, Homo sapiens
EREREREREREREREREASRVKPVEYSQMYSYSYNQYYQQYQNYYAQWGYDQNTGSYSYSYPQYGYTQSTMQTYEEVGDDALEEAGFHHVAQAGLELLGSSDLPISAFQSAGIIGMSHCSWPKLFLRPHATAGCD

SEQ ID NO: 804646 - protein, 305 aa, Homo sapiens; identical to SEQ ID NO: 804639

SEQ ID NO: 804647 - protein, 177 aa, Homo sapiens; identical to SEQ ID NO: 804641

SEQ ID NO: 804648 - protein, 177 aa, Homo sapiens; identical to SEQ ID NO: 804641

SEQ ID NO: 804649 - protein, 171 aa, Homo sapiens [sequence omitted]

SEQ ID NO: 804650 - protein, 311 aa, Homo sapiens
MAASLWMGDLEPYMDENFISRAFATMGETVMSVKIIRNRLTGIPAGYCFVEFADLATAEKCLHKINGKPLPGATPAKRFKLNYATYGKQPDNSPEYSLFVGDLTPDVDDGMLYEFFVKVYPSCRGGKVVLDQTGVSKGYGFVKFTDELEQKRALTECQGAVGLGSKPVRLSVAIPKASRVKPVEYSQMYSYSYNQYYQQYQNYYAQWGYDQNTGSYSYSYPQYGYTQSTMQTYEEVGDDALEEAGFHHVAQAGLELLGSSDLPISAFQSAGIIGMSHCSWPKLFLRPHDTAGPDSGLQVDMFHSVKLRPAK

SEQ ID NO: 804651 - protein, 164 aa, Homo sapiens
VCPWIRPRQGGAADAGRDRAEATVLPSPPGPTQPRPVGSCPQLLNFLSCLRLLERMAANSWSREFFSWAGRTLSPIFLWVADVSLVVEAELGQRVVLEEGPEDGQDAFACDVVGVQVEAGDGLVGLEHDGNGKGHVVIGSRVGQGEQLNHSVELQSLSKPDQDL

SEQ ID NO: 804652 - protein, 88 aa, Homo sapiens
AGCSWLLGHGTVSFPSIDNCEKKAIRTHSGVAGLFTVKSSAMSLSLRTAATASAMAKNTDDPRNIPDSPRPCKKAHWCKKLPYYTTSF

SEQ ID NO: 804653 - protein, 123 aa, Homo sapiens
MKRDARKKREARKQANRTIPTSEQEKMGACWQSWGLAVVTLNLLFGVFMSGGKNRDHMEPTQEALAVHSKQEDNSKEAAHSLLSFPVHLPLSVRLLIYGEPNCVYLPSSHPQINVFRKIGHQQ

SEQ ID NO: 804654 - protein, 175 aa, Homo sapiens
RRRRCRRCSPGPSSWPPPPPGRAVTRRGGASPSPRAAAAAAAAAAAGAVGLSPPPAPLTRGSRPPISASLPAQDETSVSSEDFDMSDSTWMSADPHLASSLSPSQDERMRSPQNLHSQEDGPHRLSHLSQGLNIICSLDTSLRARNPRVSAERNDFSFRGRSRCVTSNSLAKDGY

SEQ ID NO: 804655 - protein, 347 aa, Homo sapiens
RRRRCRRCSPGPSSWPPPPPGRAVTRRGGASPSPRAAAAAAAAAAAGAVGLSPPPAPLTRGSRPPISASLPAQDETSVSSEDFDMSDSTWMSADPHLASSLSPSQDERMRSPQNLHSQEDDDSSSESGSGNGSSTLNPSTSSSTQGDPAFPEMNGNGAVAPMDFTTAAEDQPINLCDKLPPATALGTASYPSDGCGADGLRSRVKYGVKTTPEVLVLASAEETADTLLSAQQPREPVPPLQLWELDSIKTEVSGCPEDLTVGRAPTADDDDDDHDDHEDNDKMNDSEGMDPERLKAFNMFVRLFVDENLDRMVPISKQPKEKIQAIIESCSRQFPEFQERARKRIRT

SEQ ID NO: 804656 - protein, 175 aa, Homo sapiens; identical to SEQ ID NO: 804654

SEQ ID NO: 804657 - protein, 660 aa, Homo sapiens
MNPDLRRERDSASFNPELLTHILDGSPEKTRRRREIENMILNDPDFQHEDLNFLTRSQRYEVAVRKSAIMVKKMREFGIADPDEIMWFKNFVHRGRPEPLDLHLGMFLPTLLHQATAEQQERFFMPAWNLEIIGTYAQTEMGHGTHLRGLETTATYDPETQEFILNSPTVTSIKWWPGGLGKTSNHAIVLAQLITKGKCYGLHAFIVPIREIGTHKPLPGITVGDIGPKFGYDEIDNGYLKMDNHRIPRENMLMKYAQVKPDGTYVKPLSNKLTYGTMVFVRSFLVGEAARALSKACTIAIRYSAVRHQSEIKPGEPEPQILDFQTQQYKLFPLLATAYAFQFVGAYMKETYHRINEGIGQGDLSELPELHALTAGLKAFTSWTANTGIEACRMACGGHGYSHCSGLPNIYVNFTPSCTFEGENTVMMLQTARFLMKSYDQVHSGKLVCGMVSYLNDLPSQRIQPQQVAVWPTMVDINSPESLTEAYKLRAARLVEIAAKNLQKEVIHRKSKEVAWNLTSVDLVRASEAHCHYVVVKLFSEKLLKIQDKAIQAVLRSLCLLYSLYGISQNAGDFLQGSIMTEPQITQVNQRVKELLTLIRSDAVALVDAFDFQDVTLGSVLGRYDGNVYENLFEWAKNSPLNKAEVHESYKHLKSLQSKL

SEQ ID NO: 804658 - protein, 660 aa, Homo sapiens
MNPDLRRERDSASFNPELLTHILDGSPEKTRRRREIENMILNDPDFQHEDLNFLTRSQRYEVAVRKSAIMVKKMREFGIADPDEIMWFKKLHLVNFVEPVGLNYSMFIPTLLNQGTTAQKEKWLLSSKGLQIIGTYAQTEMGHGTHLRGLETTATYDPETQEFILNSPTVTSIKWWPGGLGKTSNHAIVLAQLITKGKCYGLHAFIVPIREIGTHKPLPGITVGDIGPKFGYDEIDNGYLKMDNHRIPRENMLMKYAQVKPDGTYVKPLSNKLTYGTMVFVRSFLVGEAARALSKACTIAIRYSAVRHQSEIKPGEPEPQILDFQTQQYKLFPLLATAYAFQFVGAYMKETYHRINEGIGQGDLSELPELHALTAGLKAFTSWTANTGIEACRMACGGHGYSHCSGLPNIYVNFTPSCTFEGENTVMMLQTARFLMKSYDQVHSGKLVCGMVSYLNDLPSQRIQPQQVAVWPTMVDINSPESLTEAYKLRAARLVEIAAKNLQKEVIHRKSKEVAWNLTSVDLVRASEAHCHYVVVKLFSEKLLKIQDKAIQAVLRSLCLLYSLYGISQNAGDFLQGSIMTEPQITQVNQRVKELLTLIRSDAVALVDAFDFQDVTLGSVLGRYDGNVYENLFEWAKNSPLNKAEVHESYKHLKSLQSKL

SEQ ID NO: 804659 - protein, 110 aa, Homo sapiens
DLDCHCHLGRCLLRCQLVVAMNPDLRRERDSASFNPELLTHILDGSPEKTRRRREIENMILNDPDFQHEDLNFLTRSQRYEVAVRKSAIMVKKMREFGIADPDEIMWFKK

SEQ ID NO: 804660 - protein, 660 aa, Homo sapiens; identical to SEQ ID NO: 804657

SEQ ID NO: 804661 - protein, 660 aa, Homo sapiens; identical to SEQ ID NO: 804658

SEQ ID NO: 804662 - protein, 660 aa, Homo sapiens; identical to SEQ ID NO: 804657

SEQ ID NO: 804663 - protein, 660 aa, Homo sapiens; identical to SEQ ID NO: 804658

SEQ ID NO: 804664 - protein, 555 aa, Homo sapiens
MFIPTLLNQGTTAQKEKWLLSSKGLQIIGTYAQTEMGHGTHLRGLETTATYDPETQEFILNSPTVTSIKWWPGGLGKTSNHAIVLAQLITKGKCYGLHAFIVPIREIGTHKPLPGITVGDIGPKFGYDEIDNGYLKMDNHRIPRENMLMKYAQVKPDGTYVKPLSNKLTYGTMVFVRSFLVGEAARALSKACTIAIRYSAVRHQSEIKPGEPEPQILDFQTQQYKLFPLLATAYAFQFVGAYMKETYHRINEGIGQGDLSELPELHALTAGLKAFTSWTANTGIEACRMACGGHGYSHCSGLPNIYVNFTPSCTFEGENTVMMLQTARFLMKSYDQVHSGKLVCGMVSYLNDLPSQRIQPQQVAVWPTMVDINSPESLTEAYKLRAARLVEIAAKNLQKEVIHRKSKEVAWNLTSVDLVRASEAHCHYVVVKLFSEKLLKIQDKAIQAVLRSLCLLYSLYGISQNAGDFLQGSIMTEPQITQVNQRVKELLTLIRSDAVALVDAFDFQDVTLGSVLGRYDGNVYENLFEWAKNSPLNKAEVHESYKHLKSLQSKL

SEQ ID NO: 804665 - protein, 673 aa, Homo sapiens
MNPDLRRERDSASFNPELLTHILDGSPEKTRRRREIENMILNDPDFQHEDLNFLTRSQRYEVAVRKSAIMVKKMREFGIADPDEIMWFKNFVHRGRPEPLDLHLGMFLPTLLHQATAEQQERFFMPAWNLEIIGTYAQTEMGHGTHLRGLETTATYDPETQEFILNSPTVTSIKWWPGGREVNFSAFIGCFEVGKTSNHAIVLAQLITKGKCYGLHAFIVPIREIGTHKPLPGITVGDIGPKFGYDEIDNGYLKMDNHRIPRENMLMKYAQVKPDGTYVKPLSNKLTYGTMVFVRSFLVGEAARALSKACTIAIRYSAVRHQSEIKPGEPEPQILDFQTQQYKLFPLLATAYAFQFVGAYMKETYHRINEGIGQGDLSELPELHALTAGLKAFTSWTANTGIEACRMACGGHGYSHCSGLPNIYVNFTPSCTFEGENTVMMLQTARFLMKSYDQVHSGKLVCGMVSYLNDLPSQRIQPQQVAVWPTMVDINSPESLTEAYKLRAARLVEIAAKNLQKEVIHRKSKEVAWNLTSVDLVRASEAHCHYVVVKLFSEKLLKIQDKAIQAVLRSLCLLYSLYGISQNAGDFLQGSIMTEPQITQVNQRVKELLTLIRSDAVALVDAFDFQDVTLGSVLGRYDGNVYENLFEWAKNSPLNKAEVHESYKHLKSLQSKL

SEQ ID NO: 804666 - protein, 551 aa, Homo sapiens
AKEETGIGEAQQKWLLSSKGLQIIGTYAQTEMGHGTHLRGLETTATYDPETQEFILNSPTVTSIKWWPGGLGKTSNHAIVLAQLITKGKCYGLHAFIVPIREIGTHKPLPGITVGDIGPKFGYDEIDNGYLKMDNHRIPRENMLMKYAQVKPDGTYVKPLSNKLTYGTMVFVRSFLVGEAARALSKACTIAIRYSAVRHQSEIKPGEPEPQILDFQTQQYKLFPLLATAYAFQFVGAYMKETYHRINEGIGQGDLSELPELHALTAGLKAFTSWTANTGIEACRMACGGHGYSHCSGLPNIYVNFTPSCTFEGENTVMMLQTARFLMKSYDQVHSGKLVCGMVSYLNDLPSQRIQPQQVAVWPTMVDINSPESLTEAYKLRAARLVEIAAKNLQKEVIHRKSKEVAWNLTSVDLVRASEAHCHYVVVKLFSEKLLKIQDKAIQAVLRSLCLLYSLYGISQNAGDFLQGSIMTEPQITQVNQRVKELLTLIRSDAVALVDAFDFQDVTLGSVLGRYDGNVYENLFEWAKNSPLNKAEVHESYKHLKSLQSKL

SEQ ID NO: 804667 - protein, 338 aa, Homo sapiens
MLGTPETAADALLATAYAFQFVGAYMKETYHRINEGIGQGDLSELPELHALTAGLKAFTSWTANTGIEACRMACGGHGYSHCSGLPNIYVNFTPSCTFEGENTVMMLQTARFLMKSYDQVHSGKLVCGMVSYLNDLPSQRIQPQQVAVWPTMVDINSPESLTEAYKLRAARLVEIAAKNLQKEVIHRKSKEVAWNLTSVDLVRASEAHCHYVVVKLFSEKLLKIQDKAIQAVLRSLCLLYSLYGISQNAGDFLQGSIMTEPQITQVNQRVKELLTLIRSDAVALVDAFDFQDVTLGSVLGRYDGNVYENLFEWAKNSPLNKAEVHESYKHLKSLQSKL

SEQ ID NO: 804668 - protein, 660 aa, Homo sapiens; identical to SEQ ID NO: 804657

SEQ ID NO: 804669 - protein, 660 aa, Homo sapiens; identical to SEQ ID NO: 804657

SEQ ID NO: 804670 - protein, 210 aa, Homo sapiens
MFIPTLLNQGTTAQKEKWLLSSKGLQIIGTYAQTEMGHGTHLRGLETTATYDPETQEFILNSPTVTSIKWWPGGLGKTSNHAIVLAQLITKGKCYGLHAFIVPIREIGTHKPLPGITVGDIGPKFGYDEIDNGYLKMDNHRIPRENMLMKYAQVKPDGTYVKPLSNKLTYGTMVFVRSFLVGEAARALSKACTIAIRYSAVRHQSEIKPG

SEQ ID NO: 804671 - protein, 66 aa, Homo sapiens
SGHCTPSSLGNKNETPSQKKQKKVELLKACLLVTFRFLMKSYDQVHSGKLVCGMVSYLNDLPSQRI

SEQ ID NO: 804672 - protein, 502 aa, Homo sapiens
RSHSRRCRRSGVAPPSPALLPGISPEPAPREKEPGSIRPHCPDSRLDSVLSAPAGLRSSGARGAVVAAAPGMFHSPRRLCSALLQRDAPGLRRLPAPGLRRPLSPPAAVPRPASPRLLAAASAASGAARSCSRTVCSMGTGTSRLYSALAKTLNSSAASQHPEYLVSPDPEHLEPIDPKELLEECRAVLHTRPPRFQRDFVDLRTDCPSTHPPIRVMQWNILAQALGEGKDNFVQCPVEALKWEERKCLILEEILAYQPDILCLQEVDHYFDTFQPLLSRLGYQGTFFPKPWSPCLDVEHNNGPDGCALFFLQNRFKLVNSANIRLTAMTLKTNQVAIAQTLECKESGRQFCIAVTHLKARTGWERFRSAQGCDLLQNLQNITQGAKIPLIVCGDFNAEPTEEVYKHFASSSLNLNSAYKLLSADGQSEPPYTTWKIRTSGECRHTLDYIWYSKHALNVRSALDLLTEEQIGPNRLPSFNYPSDHLSLVCDFSFTEESDGLS

SEQ ID NO: 804673 - protein, 174 aa, Homo sapiens [sequence omitted]

SEQ ID NO: 804674 - protein, 241 aa, Homo sapiens
PSSRGLGLNRPRSGVAPPSPALLPGISPEPAPREKEPGSIRPHCPDSRLDSVLSAPAGLRSSGARGAVVAAAPGMFHSPRRLCSALLQRDAPGLRRLPAPGLRRPLSPPAAVPRPASPRLLAAASAASGAARSCSRTVCSMGTGTSRLYSALAKTLNSSAASQHPEYLVSPDPEHLEPIDPKELLEECRAVLHTRPPRFQRDFVDLRTDCPSTHPPIRVMQWNILAQGMLDAFVPLQSSLL

SEQ ID NO: 804675 - protein, 74 aa, Homo sapiens
GIRIPVVIIFAMIFSMILSCAIPRNPEMVYKSLYIPEQESLPMKIGRNFFFIFRFCFFTFLFQRIVLEKPSLWK

SEQ ID NO: 804676 - protein, 74 aa, Homo sapiens; identical to SEQ ID NO: 804675

SEQ ID NO: 804677 - protein, 313 aa, Homo sapiens
MTSCHIAEEHIQKVAIFGGTHGNELTGVFLVKHWLENGAEIQRTGLEVKPFITNPRAVKKCTRYIDCDLNRIFDLENLGKKMSEDLPYEVRRAQEINHLFGPKDSEDSYDIIFDLHNTTSNMGCTLILEDSRNNFLIQMFHYIKTSLAPLPCYVYLIEHPSLKYATTRSIAKYPVGIEVGPQPQGVLRADILDQMRKMIKHALDFIHHFNEGKEFPPCAIEVYKIIEKVDYPRDENGEIAAIIHPNLQDQDWKPLHPGDPMFLTLDGKTIPLGGDCTVYPVFVNEAAYYEKKEAFAKTTKLTLNAKSIRCCLH

SEQ ID NO: 804678 - protein, 313 aa, Homo sapiens; identical to SEQ ID NO: 804677

SEQ ID NO: 804679 - protein, 69 aa, Homo sapiens
LGTELKPRFRWRPWKAESRQRGSAGAAGACGREAPVSRRDALQGKPRGVRPWALSSRLPGKEDCGFLAL

SEQ ID NO: 804680 - protein, 313 aa, Homo sapiens; identical to SEQ ID NO: 804677

SEQ ID NO: 804681 - protein, 313 aa, Homo sapiens; identical to SEQ ID NO: 804677

SEQ ID NO: 804682 - protein, 69 aa, Homo sapiens
TQRGCWAPRLSPDRSNISRYARCDQCCIQEMREDGQTPGSRKMVKGRIGNPTDRSSSQENPTHESGSSP

SEQ ID NO: 804683 - protein, 76 aa, Homo sapiens
TQRGCWAPRLSPDRSNISRYARCDQCCIQEMREDGQTPGSRKMILHGKIQQSLLLLDEVQSHIFKDHQAVTYPRYV

SEQ ID NO: 804684 - protein, 185 aa, Homo sapiens
MTTPNKTPPGADPKQLERTGTVREIGSQAVWSLSSCKPGFGVDQLRDDNLETYWQSDGSQPHLVNIQFRRKTTVKTLCIYADYKSDESYTPSKISVRVGNNFHNLQEIRQLELVEPSGWIHVPLTDNHKKPTRTFMIQIAVLANHQNGRDTHMRQIKIYTPVEESSIGKFPRCTTIDFMMYRSIR

SEQ ID NO: 804685 - protein, 93 aa, Homo sapiens
  misc_feature (12)..(14): Xaa can be any naturally occurring amino acid
GAPALPARLRFXXXFRDQLELVEPSGWIHVPLTDNHKKPTRTFMIQIAVLANHQNGRDTHMRQIKIYTPVEESSIGKFPRCTTIDFMMYRSIR

SEQ ID NO: 804686 - protein, 100 aa, Homo sapiens
  misc_feature (17)..(17): Xaa can be any naturally occurring amino acid
  misc_feature (29)..(31): Xaa can be any naturally occurring amino acid
REGQFLDRRPFGPFPQXDFCFYESARRGXXXENRIHVPLTDNHKKPTRTFMIQIAVLANHQNGRDTHMRQIKIYTPVEESSIGKFPRCTTIDFMMYRSIR

SEQ ID NO: 804687 - protein, 222 aa, Homo sapiens
TSLSCDPCSTPLAKPAAGGAENLSFGKQPGLETNILKMTTPNKTPPGADPKQLERTGTVREIGSQAVWSLSSCKPGFGVDQLRDDNLETYWQSDGSQPHLVNIQFRRKTTVKTLCIYADYKSDESYTPSKISVRVGNNFHNLQEIRQLELVEPSGWIHVPLTDNHKKPTRTFMIQIAVLANHQNGRDTHMRQIKIYTPVEESSIGKFPRCTTIDFMMYRSIR

SEQ ID NO: 804688 - protein, 196 aa, Homo sapiens
MGGVKETNILKMTTPNKTPPGADPKQLERTGTVREIGSQAVWSLSSCKPGFGVDQLRDDNLETYWQSDGSQPHLVNIQFRRKTTVKTLCIYADYKSDESYTPSKISVRVGNNFHNLQEIRQLELVEPSGWIHVPLTDNHKKPTRTFMIQIAVLANHQNGRDTHMRQIKIYTPVEESSIGKFPRCTTIDFMMYRSIR

SEQ ID NO: 804689 - protein, 219 aa, Homo sapiens
MRSTFLEWASYSLQNLEAIFLTLSSMVRAYNILKMTTPNKTPPGADPKQLERTGTVREIGSQAVWSLSSCKPGFGVDQLRDDNLETYWQSDGSQPHLVNIQFRRKTTVKTLCIYADYKSDESYTPSKISVRVGNNFHNLQEIRQLELVEPSGWIHVPLTDNHKKPTRTFMIQIAVLANHQNGRDTHMRQIKIYTPVEESSIGKFPRCTTIDFMMYRSIR

SEQ ID NO: 804690 - protein, 206 aa, Homo sapiens
QECRHEAEFCNQPGLETNILKMTTPNKTPPGADPKQLERTGTVREIGSQAVWSLSSCKPGFGVDQLRDDNLETYWQSDGSQPHLVNIQFRRKTTVKTLCIYADYKSDESYTPSKISVRVGNNFHNLQEIRQLELVEPSGWIHVPLTDNHKKPTRTFMIQIAVLANHQNGRDTHMRQIKIYTPVEESSIGKFPRCTTIDFMMYRSIR

SEQ ID NO: 804691 - protein, 185 aa, Homo sapiens; identical to SEQ ID NO: 804684

SEQ ID NO: 804692 - protein, 179 aa, Homo sapiens
TSLSCDPCSTPLAKPAAGGAENLSFGKQPGLETNILKMTTPNKTPPGADPKQLERTGTVREIGSQAVWSLSSCKPGFGVDQLRDDNLETYWQSDGSQPHLVNIQFRRKTTVKTLCIYADYKSDESYTPSKISVRVGNNFHNLQEIRVAAFLPLKLRRLGQQNVMSWEQEAKMLPVDHQG

SEQ ID NO: 804693 - protein, 204 aa, Homo sapiens
TSLSCDPCSTPLAKPAAGGAENLSFGKQPGLETNILKMTTPNKTPPGADPKQLERTGTVREIGSQAVWSLSSCKPGFGVDQLRDDNLETYWQSDGSQPHLVNIQFRRKTTVKTLCIYADYKSDESYTPSKISVRVGNNFHNLQEIRQLELVEPSGWIHVPLTDNHKKPTRTFMIQIAVLANHQNGRDTHMRQITIDFMMYRSIR

SEQ ID NO: 804694 - protein, 126 aa, Homo sapiens
MTTPNKTPPGADPKQLERTGTVREIGSQAVWSLSSCKPGFGVDQLRDDNLETYWQSDGSQPHLVNIQFRRKTTVKTLCIYADYKSDESYTPSKISVRVGNNFHNLQEIRPHVLHVNEESMNLQVSG

SEQ ID NO: 804695 - protein, 222 aa, Homo sapiens; identical to SEQ ID NO: 804687

SEQ ID NO: 804696 - protein, 222 aa, Homo sapiens; identical to SEQ ID NO: 804687

SEQ ID NO: 804697 - protein, 120 aa, Homo sapiens
TSLSCDPCSTPLAKPAAGGAENLSFGKQPGLETNILKMTTPNKTPPGADPKQLERTGTVREIGSQAVWSLSSCKPGFGVDQLRDDNLETYWQSDGSQPHLVNIQFSNLSWWNQVAGFMFP

SEQ ID NO: 804698 - protein, 151 aa, Homo sapiens
TSLSCDPCSTPLAKPAAGGAENLSFGKQPGLETNILKMTTPNKTPPGADPKQLERTGTVREIGSQAVWSLSSCKPGFGVDQLRDDNLETYWQSDGSQPHLVNIQFRRKTTVKTLCIYADYKSDESYTPSKISVRVGNNFHNLQEIRALVSG

SEQ ID NO: 804699 - protein, 196 aa, Homo sapiens; identical to SEQ ID NO: 804688

SEQ ID NO: 804700 - protein, 196 aa, Homo sapiens; identical to SEQ ID NO: 804688

SEQ ID NO: 804701 - protein, 114 aa, Homo sapiens
MTTPNKTPPGADPKQLERTGTVREIGSQAVWSLSSCKPGFGVDQLRDDNLETYWQSDGSQPHLVNIQFRRKTTVKTLCIYADYKSDESYTPSKISVRVGNNFHNLQEIRALVSG

SEQ ID NO: 804702 - protein, 120 aa, Homo sapiens; identical to SEQ ID NO: 804697

SEQ ID NO: 804703 - protein, 126 aa, Homo sapiens; identical to SEQ ID NO: 804694

SEQ ID NO: 804704 - protein, 821 aa, Homo sapiens
MRRGSSDSCASGSQVAGTTVAGPAHPESLTLCSGEAERRGKEEWPDSHHYPGPTPAPESSDGPHKVTVLATMLSSRWWPSSWGILGLGPRSPPRGSQLCALYAFTYTGADGQQVSLAEGDRFLLLRKTNSDWWLARRLEAPSTSRPIFVPAAYMIEESIPSQSPTTVIPGQLLWTPGPKLFHGSLEELSQALPSRAQASSEQPPPLPRKMCRSVSTDNLSPSLLKPFQEGPSGRSLSQEDLPSEASASTAGPQPLMSEPPVYCNLVDLRRCPRSPPPGPACPLLQRLDAWEQHLDPNSGRCFYINSLTGCKSWKPPRRSRSETNPGSMEGTQTLKRNNDVLQPQAKGFRSDTGTPEPLDPQGSLSLSQRTSQLDPPALQAPRPLPQLLDDPHEVEKSGLLNMTKIAQGGRKLRKNWGPSWVVLTGNSLVFYREPPPTAPSSGWGPAGSRPESSVDLRGAALAHGRHLSSRRNVLHIRTIPGHEFLLQSDHETELRAWHRALRTVIERLVRWVEARREAPTGRDQGSGDRENPLELRLSGSGPAELSAGEDEEEESELVSKPLLRLSSRRSSIRGPEGTEQNRVRNKLKRLIAKRPPLQSLQERGLLRDQVFGCQLESLCQREGDTVPSFLRLCIAAVDKRGLDVDGIYRVSGNLAVVQKLRFLVDRERAVTSDGRYVFPEQPGQEGRLDLDSTEWDDIHVVTGALKLFLRELPQPLVPPLLLPHFRAALALSESEQCLSQIQELIGSMPKPNHDTLRYLLEHLCRVIAHSDKNRMTPHNLGIVFGPTLFRPEQETSDPAAHALYPGQLVQLMLTNFTSLFP

SEQ ID NO: 804705 - protein, 731 aa, Homo sapiens
MLSSRWWPSSWGILGLGPRSPPRGSQLCALYAFTYTGADGQQVSLAEGDRFLLLRKTNSDWWLARRLEAPSTSRPIFVPAAYMIEESIPSQSPTTVIPGQLLWTPGPKLFHGSLEELSQALPSRAQASSEQPPPLPRKMCRSVSTDNLSPSLLKPFQEGPSGRSLSQEDLPSEASASTAGPQPLMSEPPVYCNLVDLRRCPRSPPPGPACPLLQRLDAWEQHLDPNSGRCFYINSLTGCKSWKPPRRSRSETNPGSMEGTQTLKRNNDVLQPQAKGFRSDTGTPEPLDPQGSLSLSQRTSQLDPPALQAPRPLPQLLDDPHEVEKSGLLNMTKIAQGGRKLRKNWGPSWVVLTGNSLVFYREPPPTAPSSGWGPAGSRPESSVDLRGAALAHGRHLSSRRNVLHIRTIPGHEFLLQSDHETELRAWHRALRTVIERLDRENPLELRLSGSGPAELSAGEDEEEESELVSKPLLRLSSRRSSIRGPEGTEQNRVRNKLKRLIAKRPPLQSLQERGLLRDQVFGCQLESLCQREGDTVPSFLRLCIAAVDKRGLDVDGIYRVSGNLAVVQKLRFLVDRERAVTSDGRYVFPEQPGQEGRLDLDSTEWDDIHVVTGALKLFLRELPQPLVPPLLLPHFRAALALSESEQCLSQIQELIGSMPKPNHDTLRYLLEHLCRVIAHSDKNRMTPHNLGIVFGPTLFRPEQETSDPAAHALYPGQLVQLMLTNFTSLFP

SEQ ID NO: 804706 - protein, 182 aa, Homo sapiens
MSEPPVYCNLVDLRRCPRSPPPGPACPLLQRLDAWEQHLDPNSGRCFYINSLTGCKSWKPPRRSRSETNPGSMEGTQTLKRNNDVLQPQAKGFRSDTGTPEPLDPQGSLSLSQRTSQLDPPALQAPRPLPQLLDDPHVNLPFLCEGQDPPCPPSPLFLLHINIFLFLNILLPSPPPATLRDF

SEQ ID NO: 804707 - protein, 502 aa, Homo sapiens
MSEPPVYCNLVDLRRCPRSPPPGPACPLLQRLDAWEQHLDPNSGRCFYINSLTGCKSWKPPRRSRSETNPGSMEGTQTLKRNNDVLQPQAKGFRSDTGTPEPLDPQGSLSLSQRTSQLDPPALQAPRPLPQLLDDPHEVEKSGLLNMTKIAQGGRKLRKNWGPSWVVLTGNSLVFYREPPPTAPSSGWGPAGSRPESSVDLRGAALAHGRHLSSRRNVLHIRTIPGHEFLLQSDHETELRAWHRALRTVIERLDRENPLELRLSGSGPAELSAGEDEEEESELVSKPLLRLSSRRSSIRGPEGTEQNRVRNKLKRLIAKRPPLQSLQERGLLRDQVFGCQLESLCQREGDTVPSFLRLCIAAVDKRGLDVDGIYRVSGNLAVVQKLRFLVDRERAVTSDGRYVFPEQPGQALSESEQCLSQIQELIGSMPKPNHDTLRYLLEHLCRVIAHSDKNRMTPHNLGIVFGPTLFRPEQETSDPAAHALYPGQLVQLMLTNFTSLFP

SEQ ID NO: 804708 - protein, 547 aa, Homo sapiens
MSEPPVYCNLVDLRRCPRSPPPGPACPLLQRLDAWEQHLDPNSGRCFYINSLTGCKSWKPPRRSRSETNPGSMEGTQTLKRNNDVLQPQAKGFRSDTGTPEPLDPQGSLSLSQRTSQLDPPALQAPRPLPQLLDDPHEVEKSGLLNMTKIAQGGRKLRKNWGPSWVVLTGNSLVFYREPPPTAPSSGWGPAGSRPESSVDLRGAALAHGRHLSSRRNVLHIRTIPGHEFLLQSDHETELRAWHRALRTVIERLDRENPLELRLSGSGPAELSAGEDEEEESELVSKPLLRLSSRRSSIRGPEGTEQNRVRNKLKRLIAKRPPLQSLQERGLLRDQVFGCQLESLCQREGDTVPSFLRLCIAAVDKRGLDVDGIYRVSGNLAVVQKLRFLVDRERAVTSDGRYVFPEQPGQEGRLDLDSTEWDDIHVVTGALKLFLRELPQPLVPPLLLPHFRAALALSESEQCLSQIQELIGSMPKPNHDTLRYLLEHLCRVIAHSDKNRMTPHNLGIVFGPTLFRPEQETSDPAAHALYPGQLVQLMLTNFTSLFP

SEQ ID NO: 804709 - protein, 456 aa, Homo sapiens
MSEPPVYCNLVDLRRCPRSPPPGPACPLLQRLDAWEQHLDPNSGRCFYINSLTGCKSWKPPRRSRSETNPGSMEGTQTLKRNNDVLQPQAKGFRSDTGTPEPLDPQGSLSLSQRTSQLDPPALQAPRPLPQLLDDPHEVEKSGLLNMTKIAQGGRKLRKNWGPSWVVLTGNSLVFYREPPPTAPSSGWGPAGSRPESSVDLRGAALAHGRHLSSRRNVLHIRTIPGHEFLLQSDHETELRAWHRALRTVIERLDRENPLELRLSGSGPAELSAGEDEEEESELVSKPLLRLSSRRSSIRGPEGTEQNRVRNKLKRLIAKRPPLQSLQERGLLRDQVFGCQLESLCQREGDTVPSFLRLCIAAVDKRGLDVDGIYRVSGNLAVVQKLRFLVDRERAVTSDGRYVFPEQPGQEGRLDLDSTEWDDIHVVTGALKLFLRELPQPLVPPLLLPHFRAALG

SEQ ID NO: 804710 - protein, 456 aa, Homo sapiens; identical to SEQ ID NO: 804709

SEQ ID NO: 804711 - protein, 430 aa, Homo sapiens
MEGTQTLKRNNDVLQPQAKGFRSDTGTPEPLDPQGSLSLSQRTSQLDPPALQAPRPLPQLLDDPHEVEKSGLLNMTKIAQGGRKLRKNWGPSWVVLTGNSLVFYREPPPTAPSSGWGPAGSRPESSVDLRGAALAHGRHLSSRRNVLHIRTIPGHEFLLQSDHETELRAWHRALRTVIERLDRENPLELRLSGSGPAELSAGEDEEEESELVSKPLLRLSSRRSSIRGPEGTEQNRVRNKLKRLIAKRPPLQSLQERGLLRDQVFGCQLESLCQREGDTVPSFLRLCIAAVDKRGLDVDGIYRVSGNLAVVQKLRFLVDRERAVTSDGRYVFPEQPGQALSESEQCLSQIQELIGSMPKPNHDTLRYLLEHLCRVIAHSDKNRMTPHNLGIVFGPTLFRPEQETSDPAAHALYPGQLVQLMLTNFTSLFP

SEQ ID NO: 804712 - protein, 322 aa, Homo sapiens
MSEPPVYCNLVDLRRCPRSPPPGPACPLLQRLDAWEQHLDPNSGRCFYINSLTGCKSWKPPRRSRSETNPGSMEGTQTLKRNNDVLQPQAKGFRSDTGTPEPLDPQPLLRLSSRRSSIRGPEGTEQNRVRNKLKRLIAKRPPLQSLQERGLLRDQVFGCQLESLCQREGDTVPSFLRLCIAAVDKRGLDVDGIYRVSGNLAVVQKLRFLVDRERAVTSDGRYVFPEQPGQALSESEQCLSQIQELIGSMPKPNHDTLRYLLEHLCRVIAHSDKNRMTPHNLGIVFGPTLFRPEQETSDPAAHALYPGQLVQLMLTNFTSLFP

SEQ ID NO: 804713 - protein, 437 aa, Homo sapiens
MRRGSSDSCASGSQVAGTTVAGPAHPESLTLCSGEAERRGKEEWPDSHHYPGPTPAPESSDGPHKVTVLATMLSSRWWPSSWGILGLGPRSPPRGSQLCALYAFTYTGADGQQVSLAEGDRFLLLRKTNSDWWLARRLEAPSTSRPIFVPAAYMIEESIPSQSPTTVIPGQLLWTPGPKLFHGSLEELSQALPSRAQASSEQPPPLPRKMCRSVSTDNLSPSLLKPFQEGPSGRSLSQEDLPSEASASTAGPQPLMSEPPVYCNLVDLRRCPRSPPPGPACPLLQRLDAWEQHLDPNSGRCFYINSLTGCKSWKPPRRSRSETNPGSMEGTQTLKRNNDVLQPQAKGFRSDTGTPEPLDPQGSLSLSQRTSQLDPPALQAPRPLPQLLDDPHVNLPFLCEGQDPPCPPSPLFLLHINIFLFLNILLPSPPPATLRDF

SEQ ID NO: 804714 - protein, 92 aa, Homo sapiens
GDSEDPRLYHQIQELIGSMPKPNHDTLRYLLEHLCRVIAHSDKNRMTPHNLGIVFGPTLFRPEQETSDPAAHALYPGQLVQLMLTNFTSLFP

SEQ ID NO: 804715 - protein, 129 aa, Homo sapiens
MRDPVTTTPLITCHPPSPFLFPGPKLFHGSLEELSQALPSRAQASSEQPPPLPRKMCRSVSTDNLSPSLLKPFQEGPSGRSLSQEDLPSEASASTVSHSSSELGPVLGTGQTAPLSSGDSPGDDKHKNK

SEQ ID NO: 804716 - protein, 69 aa, Homo sapiens
LRRAPVSDAGTGFPPHSTSPDQVFGCQLESLCQREGDTVPSFLRLCIAAVDKRGHFLRDPRILFQQAKA

SEQ ID NO: 804717 - protein, 107 aa, Homo sapiens
VEARREAPTGRDQGSGVGTIGVRSSWGQGGLSGEPLPGPGCGTPAVGQSPARDTDFSPLSPSTRPAPGLGSGEPPGAASVGLWTRGAERRGGRRRGVGAGVQAAAAP

SEQ ID NO: 804718 - protein, 41 aa, Homo sapiens
VVPAPHCPLRTQIPCPPGQGCGRGLGSGQSRNERAFFFHSW

SEQ ID NO: 804719 - protein, 192 aa, Homo sapiens
IGGLCLPLNSRKPPALGGRQQVRLGEGLAGRPGWSLSLVGTQFLRRENGEGEWTAPVGSVPLGRRCFRSFPRGNPTRTGKETHHRSGNGREPWTGGMGPSPNRAGRGVPQSPPSGLSLHLCTMGALAFSLSSWGWWQGGEGSRGSSGVGLGGASGCVWAGGVARVAVVTGEVRLSVWDLCEIRSPSNNPRSL

SEQ ID NO: 804720 - protein, 152 aa, Homo sapiens
LVSVPRAQAVWLGRLDPEQLLGPWYVLAVASREKGFAMEKDMKNVVGVVVTLTPENNLRTLSSQHGLGGCDQSVMDLIKRNSGWVFENPSIGVLELWVLATNFRDYAIIFTQLEFGDEPFNTVELYSLTETASQEAMGLFTKWSRSLGFLSQ

SEQ ID NO: 804721 - protein, 70 aa, Homo sapiens
GGGFCFLAIGVLELWVLATNFRDYAIIFTQLEFGDEPFNTVELYSLTETASQEAMGLFTKWSRSLGFLSQ

SEQ ID NO: 804722 - protein, 122 aa, Homo sapiens
LASLLAGLAWTPELQSPLTGPRGLDPEWVTGPFFSRLGGCDQSVMDLIKRNSGWVFENPSIGVLELWVLATNFRDYAIIFTQLEFGDEPFNTVELYSLTETASQEAMGLFTKWSRSLGFLSQ

SEQ ID NO: 804723 - protein, 66 aa, Homo sapiens
LVSVPRAQAVWLGRLDPEQLLGPWYVLAVASREKGFAMEKDMKNVVGVVVTLTPENNLRTLSSQHG

SEQ ID NO: 804724 - protein, 112 aa, Homo sapiens
MASGGWEAPPGNNPVPPQLEQEVERRQRLGQESAARKALIASSYHPARPEVYDSLQDAALAPEFLAVTEYSVSPDADLKGLLQRLETVSGPSKKEQPLLAFLLGDRGSQSHF

SEQ ID NO: 804725 - protein, 373 aa, Homo sapiens
MASTDLGNIGFYGKLRSGCGCFTMATVGAPRHFCRCACFCTDNLYVARYGLHVRFRGEQQLRRDYGPILRSRGCVSAKDFQQLLAELEQEVERRQRLGQESAARKALIASSYHPARPEVYDSLQDAALAPEFLAVTEYSVSPDADLKGLLQRLETVSEEKRIYRVPVFTAPFCQALLEELEHFEQSDMPKGRPNTMNNYGVLLHELGLDEPLMTPLRERFLQPLMALLYPDCGGGRLDSHRAFVVKYAPGQDLELGCHYDNAELTLNVALGKVFTGGALYFGGLFQAPTALTEPLEVEHVVGQGVLHRGGQLHGARPLGTGERWNLVVWLRASAVRNSLCPMCCREPDLVDDEGFGDGFTREEPATVDVCALT

SEQ ID NO: 804726 - protein, 186 aa, Homo sapiens
MPKGRPNTMNNYGVLLHELGLDEPLMTPLRERFLQPLMALLYPDCGGGRLDSHRAFVVKYAPGQDLELGCHYDNAELTLNVALGKVFTGGALYFGGLFQAPTALTEPLEVEHVVGQGVLHRGGQLHGARPLGTGERWNLVVWLRASAVRNSLCPMCCREPDLVDDEGFGDGFTREEPATVDVCALT

SEQ ID NO: 804727 - protein, 186 aa, Homo sapiens; identical to SEQ ID NO: 804726

SEQ ID NO: 804728 - protein, 186 aa, Homo sapiens; identical to SEQ ID NO: 804726

SEQ ID NO: 804729 - protein, 186 aa, Homo sapiens; identical to SEQ ID NO: 804726

SEQ ID NO: 804730 - protein, 186 aa, Homo sapiens; identical to SEQ ID NO: 804726

SEQ ID NO: 804731 - protein, 186 aa, Homo sapiens; identical to SEQ ID NO: 804726

SEQ ID NO: 804732 - protein, 186 aa, Homo sapiens; identical to SEQ ID NO: 804726

SEQ ID NO: 804733 - protein, 163 aa, Homo sapiens
MASTDLGNIGFYGKLRSGCGCFTMATVGAPRHFCRCACFCTDNLYVARYGLHVRFRGEQQLRRDYGPILRSRGCVSAKDFQQLLAELEQEVERRQRLGQESAARKALIASSYHPARPEVYDSLQDAALAPEFLAVTEYSVSPDADLKGLLQRLETVSGVRSWP

SEQ ID NO: 804734 - protein, 290 aa, Homo sapiens
MVELEQEVERRQRLGQESAARKALIASSYHPARPEVYDSLQDAALAPEFLAVTEYSVSPDADLKGLLQRLETVSEEKRIYRVPVFTAPFCQALLEELEHFEQSDMPKGRPNTMNNYGVLLHELGLDEPLMTPLRERFLQPLMALLYPDCGGGRLDSHRAFVVKYAPGQDLELGCHYDNAELTLNVALGKVFTGGALYFGGLFQAPTALTEPLEVEHVVGQGVLHRGGQLHGARPLGTGERWNLVVWLRASAVRNSLCPMCCREPDLVDDEGFGDGFTREEPATVDVCALT

SEQ ID NO: 804735 - protein, 373 aa, Homo sapiens; identical to SEQ ID NO: 804725

SEQ ID NO: 804736 - protein, 186 aa, Homo sapiens; identical to SEQ ID NO: 804726

SEQ ID NO: 804737 - protein, 373 aa, Homo sapiens; identical to SEQ ID NO: 804725

SEQ ID NO: 804738 - protein, 186 aa, Homo sapiens; identical to SEQ ID NO: 804726

SEQ ID NO: 804739 - protein, 397 aa, Homo sapiens
MASTDLGNIGFYGKLRSGCGCFTMATVGAPRHFCRCACFCTDNLYVARYGLHVRFRGEQQLRRDYGPILRSRGCVSAKDFQQLLAELEQEVERRQRLGQESAARKALIASSYHPARPEVYDSLQDAALAPEFLAVTEYSVSPDADLKGLLQRLETVSEEKRIYRVPVFTAPFCQALLEELEHFEQSDMPKGRPNTMNNYGVLLHELGLDEPLMTPLRERFLQPLMALLYPDCGGGRLDSHRAFVVKYAPGQDLELGCHYDNAELTLNVALGKVFTGGALYFGGLFQVSCDPCGRAWGSCECPGLSRAILQAPTALTEPLEVEHVVGQGVLHRGGQLHGARPLGTGERWNLVVWLRASAVRNSLCPMCCREPDLVDDEGFGDGFTREEPATVDVCALT

SEQ ID NO: 804740 - protein, 381 aa, Homo sapiens
MASTDLGNIGFYGKLRSGCGCFTMATVGAPRHFCRCACFCTDNLYVARYGLHVRFRGEQQLRRDYGPLEQEVERRQRLGQESAARKALIASSYHPARPEVYDSLQDAALAPEFLAVTEYSVSPDADLKGLLQRLETVSGDETGRLKPRPGRPTAHSGQQTIPPSTEEKRIYRVPVFTAPFCQALLEELEHFEQSDMPKGRPNTMNNYGVLLHELGLDEPLMTPLRERFLQPLMALLYPDCGGGRLDSHRAFVVKYAPGQDLELGCHYDNAELTLNVALGKVFTGGALYFGGLFQAPTALTEPLEVEHVVGQGVLHRGGQLHGARPLGTGERWNLVVWLRASAVRNSLCPMCCREPDLVDDEGFGDGFTREEPATVDVCALT

SEQ ID NO: 804741 - protein, 186 aa, Homo sapiens; identical to SEQ ID NO: 804726

SEQ ID NO: 804742 - protein, 83 aa, Homo sapiens
QAEYRSREYRILRKLVAAVGASLWRRWGLRGTSAAAPASAPITCTWRAMGCTCASEASSSCAGTTARSCAAEAVLAPRTSSSC

SEQ ID NO: 804743 - protein, 283 aa, Homo sapiens
PSSRSPQGWSLSEEPASSPLSSVSADDEWLDNMESGKMAPPKNAPRDALVMAQILKDMGITEYEPRVINQMLEFAFRYVTTILDDAKIYSSHAKKPNVDADDVRLAIQCRADQSFTSPPPRDFLLDIARQKNQTPLPLIKPYAGPRLPPDRYCLTAPNYRLKSLIKKGPNQGRLVPRLSVGAVSSKPTTPTIATPQTVSVPNKVATPMSVTSQRFTVQIPPSQSTPVKPVPATTAVQNVLINPSMIGPKNILITTNMVSSQNTANEANPLKRKHEDDDDNDIM

SEQ ID NO: 804744 - protein, 251 aa, Homo sapiens
MESGKMAPPKNAPRDALVMAQILKDMGITEYEPRVINQMLEFAFRYVTTILDDAKIYSSHAKKPNVDADDVRLAIQCRADQSFTSPPPRDFLLDIARQKNQTPLPLIKPYAGPRLPPDRYCLTAPNYRLKSLIKKGPNQGRLVPRLSVGAVSSKPTTPTIATPQTVSVPNKVATPMSVTSQRFTVQIPPSQSTPVKPVPATTAVQNVLINPSMIGPKNILITTNMVSSQNTANEANPLKRKHEDDDDNDIM

SEQ ID NO: 804745 - protein, 857 aa, Homo sapiens
MRSFAWGSSGDHVGDKSEEAPGAWDEVSAVGALLQRPPHPGAGRRAWALVGAPASGQGLAGSATNSRVVSRESKLKNMATSNLLKNKGSLQFEDKWDFMRPIVLKLLRQESVTKQQWFDLFSDVHAVCLWDDKGPAKIHQALKEDILEFIKQAQARVLSHQDDTALLKAYIVEWRKFFTQCDILPKPFCQLEITLMGKQGSNKKSNVEDSIVRKLMLDTWNESIFSNIKNRLQDSAMKLVHAERLGEAFDSQLVIGVRESYVNLCSNPEDKLQIYRDNFEKAYLDSTERFYRTQAPSYLQQNGVQNYMKYADAKLKEEEKRALRYLETRRECNSVEALMECCVNALVTSFKETILAECQGMIKRNETEKLHLMFSLMDKVPNGIEPMLKDLEEHIISAGLADMVAAAETITTDSEKYVEQLLTLFNRFSKLVKEAFQDDPRFLTARDKAYKAVVNDATIFKLELPLKQKGVGLKTQPESKCPELLANYCDMLLRKTPLSKKLTSEEIEAKLKEVLLVLKYVQNKDVFMRYHKAHLTRRLILDISADSEIEENMVEWLREVGMPADYVNKLARMFQDIKVSEDLNQAFKEMHKNNKLALPADSVNIKILNAGAWSRSSEKVFVSLPTELEDLIPEVEEFYKKNHSGRKLHWHHLMSNGIITFKNEVGQYDLEVTTFQLAVLFAWNQRPREKISFENLKLATELPDAELRRTLWSLVAFPKLKRQVLLYEPQVNSPKDFTEGTLFSVNQEFSLIKNAKVQKRGKINLIGRLQLTTERMREEENEGIVQLRILRTQEAIIQIMKMRKKISNAQLQTELVEILKNMFLPQKKMIKEQIEWLIEHKYIRRDESDINTFIYMA

SEQ ID NO: 804746 - protein, 857 aa, Homo sapiens; identical to SEQ ID NO: 804745

SEQ ID NO: 804747 - protein, 857 aa, Homo sapiens; identical to SEQ ID NO: 804745

SEQ ID NO: 804748 - protein, 857 aa, Homo sapiens; identical to SEQ ID NO: 804745

SEQ ID NO: 804749 - protein, 798 aa, Homo sapiens
MRSFAWGSSGDHVGDKSEEAPGAWDEVSAVGALLQRPPHPGAGRRAWALVGAPASGQGLAGSATNSRVVSRESKLKNMATSNLLKNKGSLQFEDKWDFMRPIVLKLLRQESVTKQQWFDLFSDVHAVCLWDDKGPAKIHQALKEDILEFIKQAQALMLDTWNESIFSNIKNRLQDSAMKLVHAERLGEAFDSQLVIGVRESYVNLCSNPEDKLQIYRDNFEKAYLDSTERFYRTQAPSYLQQNGVQNYMKYADAKLKEEEKRALRYLETRRECNSVEALMECCVNALVTSFKETILAECQGMIKRNETEKLHLMFSLMDKVPNGIEPMLKDLEEHIISAGLADMVAAAETITTDSEKYVEQLLTLFNRFSKLVKEAFQDDPRFLTARDKAYKAVVNDATIFKLELPLKQKGVGLKTQPESKCPELLANYCDMLLRKTPLSKKLTSEEIEAKLKEVLLVLKYVQNKDVFMRYHKAHLTRRLILDISADSEIEENMVEWLREVGMPADYVNKLARMFQDIKVSEDLNQAFKEMHKNNKLALPADSVNIKILNAGAWSRSSEKVFVSLPTELEDLIPEVEEFYKKNHSGRKLHWHHLMSNGIITFKNEVGQYDLEVTTFQLAVLFAWNQRPREKISFENLKLATELPDAELRRTLWSLVAFPKLKRQVLLYEPQVNSPKDFTEGTLFSVNQEFSLIKNAKVQKRGKINLIGRLQLTTERMREEENEGIVQLRILRTQEAIIQIMKMRKKISNAQLQTELVEILKNMFLPQKKMIKEQIEWLIEHKYIRRDESDINTFIYMA

SEQ ID NO: 804750 - protein, 857 aa, Homo sapiens; identical to SEQ ID NO: 804745

SEQ ID NO: 804751 - protein, 473 aa, Homo sapiens
MRSFAWGSSGDHVGDKSEEAPGAWDEVSAVGALLQRPPHPGAGRRAWALVGAPASGQGLAGSATNSRVVSRESKLKNMATSNLLKNKGSLQFEDKWDFMRPIVLKLLRQESVTKQQWFDLFSDVHAVCLWDDKGPAKIHQALKEDILEFIKQAQARVLSHQDDTALLKAYIVEWRKFFTQCDILPKPFCQLEITLMGKQGSNKKSNVEDSIVRKLMLDTWNESIFSNIKNRLQDSAMKLVHAERLGEAFDSQLVIGVRESYVNLCSNPEDKLQIYRDNFEKAYLDSTERFYRTQAPSYLQQNGVQNYMKYADAKLKEEEKRALRYLETRRECNSVEALMECCVNALVTSFKETILAECQGMIKRNETEKLHLMFSLMDKVPNGIEPMLKDLEEHIISAGLADMVAAAETITTDSEKYVEQLLTLFNRFSKLVKEAFQDDPRFLTARDKTQLKEYFPWSFLDVLPPSTAHHQQS

SEQ ID NO: 804752 - protein, 69 aa, Homo sapiens
QGGWPAGQWRPTPLPAALRASLFGNPKPQDGGGGSQQRSQFLTCSIVPLSEELPVIFFARKSLKFEIPE

SEQ ID NO: 804753 - protein, 69 aa, Homo sapiens; identical to SEQ ID NO: 804752

SEQ ID NO: 804754 - protein, 60 aa, Homo sapiens
METEVGRWKRTQSQGMQMESCSAAQAGVQWTDLGSLQRPSSGFKRFSCFSLSSSWDYRRP

SEQ ID NO: 804755 - protein, 131 aa, Homo sapiens
MEHSPASTLISGLLTPRISPGRNHLSSCLEGSFCWIWSDLCMMDFGNPVEGCSLIAPICHYRTMRLPFIYSICFYPDLLCCCRPSSSCYNTGLSVLRPWARVVWNRSHITAHVESSKPKLGGTPGTRLLGS

SEQ ID NO: 804756 - protein, 323 aa, Homo sapiens
MDSKYQCVKLNDGHFMPVLGFGTYAPAEVPKSKALEAVKLAIEAGFHHIDSAHVYNNEEQVGLAIRSKIADGSVKREDIFYTSKLWSNSHRPELVRPALERSLKNLQLDYVDLYLIHFPVSVKPGEEVIPKDENGKILFDTVDLCATWEAMEKCKDAGLAKSIGVSNFNHRLLEMILNKPGLKYKPVCNQVECHPYFNQRKLLDFCKSKDIVLVAYSALGSHREEPWVDPNSPVLLEDPVLCALAKKHKRTPALIALRYQLQRGVVVLAKSYNEQRIRQNVQVFEFQLTSEEMKAIDGLNRNVRYLTLDIFAGPPNYPFSDEY

SEQ ID NO: 804757 - protein, 323 aa, Homo sapiens; identical to SEQ ID NO: 804756

SEQ ID NO: 804758 - protein, 323 aa, Homo sapiens; identical to SEQ ID NO: 804756

SEQ ID NO: 804759 - protein, 323 aa, Homo sapiens; identical to SEQ ID NO: 804756

SEQ ID NO: 804760 - protein, 323 aa, Homo sapiens; identical to SEQ ID NO: 804756

SEQ ID NO: 804761 - protein, 323 aa, Homo sapiens; identical to SEQ ID NO: 804756

SEQ ID NO: 804762 - protein, 322 aa, Homo sapiens
PSLSLSLSLSCQPSEDMLTSPSPSFMMVPKSKALEAVKLAIEAGFHHIDSAHVYNNEEQVGLAIRSKIADGSVKREDIFYTSKLWSNSHRPELVRPALERSLKNLQLDYVDLYLIHFPVSVKPGEEVIPKDENGKILFDTVDLCATWEAMEKCKDAGLAKSIGVSNFNHRLLEMILNKPGLKYKPVCNQVECHPYFNQRKLLDFCKSKDIVLVAYSALGSHREEPWVDPNSPVLLEDPVLCALAKKHKRTPALIALRYQLQRGVVVLAKSYNEQRIRQNVQVFEFQLTSEEMKAIDGLNRNVRYLTLDIFAGPPNYPFSDEY

SEQ ID NO: 804763 - protein, 364 aa, Homo sapiens
MWQPLFFKWLLSCCPGSSQIAAAASTQPEDDINTQRKKSQEKMREVTDSPGRPRELTIPQTSSHGANRFVPKSKALEAVKLAIEAGFHHIDSAHVYNNEEQVGLAIRSKIADGSVKREDIFYTSKLWSNSHRPELVRPALERSLKNLQLDYVDLYLIHFPVSVKPGEEVIPKDENGKILFDTVDLCATWEAMEKCKDAGLAKSIGVSNFNHRLLEMILNKPGLKYKPVCNQVECHPYFNQRKLLDFCKSKDIVLVAYSALGSHREEPWVDPNSPVLLEDPVLCALAKKHKRTPALIALRYQLQRGVVVLAKSYNEQRIRQNVQVFEFQLTSEEMKAIDGLNRNVRYLTLDIFAGPPNYPFSDEY

SEQ ID NO: 804764 - protein, 332 aa, Homo sapiens
FAFHSNENIGINFLWSDSKWETTHARQQMNGTMPHPYKILLLIYMPECTDFCPNINTSTNNIAALKKNEKDISYDSIYVKALKNNEQIYGDQSLAGVGVVAELVRPALERSLKNLQLDYVDLYLIHFPVSVKPGEEVIPKDENGKILFDTVDLCATWEAMEKCKDAGLAKSIGVSNFNHRLLEMILNKPGLKYKPVCNQVECHPYFNQRKLLDFCKSKDIVLVAYSALGSHREEPWVDPNSPVLLEDPVLCALAKKHKRTPALIALRYQLQRGVVVLAKSYNEQRIRQNVQVFEFQLTSEEMKAIDGLNRNVRYLTLDIFAGPPNYPFSDEY

SEQ ID NO: 804765 - protein, 360 aa, Homo sapiens
RYTANGYSQLSSMVVNHDVNGHCCLLLLIRATNSPCSRDSVNSYRSYVRESAKIEAGINARCSPILSAEDQMVERIICESLRVESRTHLHEHKNCMNGTMSSEIRRSYIISVYRCWLDADIPDSYQTYLSPGGITLERSLKNLQLDYVDLYLIHFPVSVKPGEEVIPKDENGKILFDTVDLCATWEAMEKCKDAGLAKSIGVSNFNHRLLEMILNKPGLKYKPVCNQVECHPYFNQRKLLDFCKSKDIVLVAYSALGSHREEPWVDPNSPVLLEDPVLCALAKKHKRTPALIALRYQLQRGVVVLAKSYNEQRIRQNVQVFEFQLTSEEMKAIDGLNRNVRYLTLDIFAGPPNYPFSDEY

SEQ ID NO: 804766 - protein, 297 aa, Homo sapiens
MDSKYQCVKLNDGHFMPVLGFGTYAPAEVPKSKALEAVKLAIEAGFHHIDSAHVYNNEEQVGLAIRSKIADGSVKREDIFYTSKLWSNSHRPELVRPALERSLKNLQLDYVDLYLIHFPVSVKAMEKCKDAGLAKSIGVSNFNHRLLEMILNKPGLKYKPVCNQVECHPYFNQRKLLDFCKSKDIVLVAYSALGSHREEPWVDPNSPVLLEDPVLCALAKKHKRTPALIALRYQLQRGVVVLAKSYNEQRIRQNVQVFEFQLTSEEMKAIDGLNRNVRYLTLDIFAGPPNYPFSDEY

SEQ ID NO: 804767 - protein, 202 aa, Homo sapiens
MDSKYQCVKLNDGHFMPVLGFGTYAPAEAMEKCKDAGLAKSIGVSNFNHRLLEMILNKPGLKYKPVCNQVECHPYFNQRKLLDFCKSKDIVLVAYSALGSHREEPWVDPNSPVLLEDPVLCALAKKHKRTPALIALRYQLQRGVVVLAKSYNEQRIRQNVQVFEFQLTSEEMKAIDGLNRNVRYLTLDIFAGPPNYPFSDEY

SEQ ID NO: 804768 - protein, 305 aa, Homo sapiens
MDSKYQCVKLNDGHFMPVLGFGTYAPAEVPKSKALEAVKLAIEAGFHHIDSAHVYNNEEQVGLAIRSKIADGSVKREDIFYTSKLWSNSHRPELVRPALERSLKNLQLDYVDLYLIHFPVSVKPGEEVIPKDENGKILFDTVDLCATWEAMEKCKDAGLAKSIGVSNFNHRLLEMILNKPGLKYKPVCNQVECHPYFNQRKLLDFCKSKDIVLVAYSALGSHREEPWVDPNSPVLLEDPVLCALARVVVLAKSYNEQRIRQNVQVFEFQLTSEEMKAIDGLNRNVRYLTLDIFAGPPNYPFSDEY

SEQ ID NO: 804769 - protein, 148 aa, Homo sapiens
DHLQLPAVEVGHPDGVECHPYFNQRKLLDFCKSKDIVLVAYSALGSHREEPWVDPNSPVLLEDPVLCALAKKHKRTPALIALRYQLQRGVVVLAKSYNEQRIRQNVQVFEFQLTSEEMKAIDGLNRNVRYLTLDIFAGPPNYPFSDEY

SEQ ID NO: 804770 - protein, 146 aa, Homo sapiens
MDSKYQCVKLNDGHFMPVLGFGTYAPAEVPKSKALEAVKLAIEAGFHHIDSAHVYNNEEQVGLAIRSKIADGSVKREDIFYTSKLWSNSHRPELVRPALERSLKNLQLDYVDLYLIHFPVSVKVGSLCDQINFTFVLSINIVFMEI

SEQ ID NO: 804771 - protein, 34 aa, Homo sapiens
MEKCKDAGLAKSIGVSNFNHRLLEMILNKPGLKY

SEQ ID NO: 804772 - protein, 3018 aa, Homo sapiens
REYKKAYEKSKGIHNTPLDMMSIVQAKKCQVLVSDIDYRNYLHQWTCLPDQNDVIQAKKAYDLQSDNLYKSDLEWLKGIGWLPEGSVEVMRVKNAQNLLNERLYRIKPEALKFTSIVDTPEVIQAKINAVQISEPLYRDAWEKEKANVNVPADTPLMLQSKINALQISNKRYQQAWEDVKMTGYDLRADAIGIQHAKASRDIASDYLYKTAYEKQKGHYIGCRSAKEDPKLVWAANVLKMQNDRLYKKAYNDHKAKISIPVDMVSISAAKEGQALASDVDYRHYLHRWSCFPDQNDVIQARKAYDLQSDALYKADLEWLRGIGWMPQGSPEVLRVKNAQNIFCDSVYRTPVVNLKYTSIVDTPEVVLAKSNAENISIPKYREVWDKDKTSIHIMPDTPEINLARANALNVSNKLYREGWDEMKAGCDVRLDAIPIQAAKASREIASDYKYKLDHEKQKGHYVGTLTARDDNKIRWALIADKLQNEREYRLDWAKWKAKIQSPVDMLSILHSKNSQALVSDMDYRNYLHQWTCMPDQNDVIQAKKAYELQSDNVYKADLEWLRGIGWMPNDSVSVNHAKHAADIFSEKKYRTKIETLNFTPVDDRVDYVTAKQSGEILDDIKYRKDWNATKSKYTLTETPLLHTAQEAARILDQYLYKEGWERQKATGYILPPDAVPFVHAHHCNDVQSELKYKAEHVKQKGHYVGVPTMRDDPKLVWFEHAGQIQNERLYKEDYHKTKAKINIPADMVSVLAAKQGQTLVSDIDYRNYLHQWMCHPDQNDVIQARKAYDLQSDNVYRADLEWLRGIGWIPLDSVDHVRVTKNQEMMSQIKYKKNALENYPNFTSVVDPPEIVLAKINSVNQSDVKYKETFNKAKGKYTFSPDTPHISHSKDMGKLYSTILYKGAWEGTKAYGYTLDERYIPIVGAKHADLVNSELKYKETYEKQKGHYLAGKVIGEFPGVVHCLDFQKMRSALNYRKHYEDTKANVHIPNDMMNHVLAKRCQYILSDLEYRHYFHQWTSLLEEPNVIRVRNAQEILSDNVYKDDLNWLKGIGCYVWDTPQILHAKKSYDLQSQLQYTAAGKENLQNYNLVTDTPLYVTAVQSGINASEVKYKENYHQIKDKYTTVLETVDYDRTRNLKNLYSSNLYKEAWDRVKATSYILPSSTLSLTHAKNQKHLASHIKYREEYEKFKALYTLPRSVDDDPNTARCLRVGKLNIDRLYRSVYEKNKMKIHIVPDMVEMVTAKDSQKKVSEIDYRLRLHEWICHPDLQVNDHVRKVTDQISDIVYKDDLNWLKGIGCYVWDTPEILHAKHAYDLRDDIKYKAHMLKTRNDYKLVTDTPVYVQAVKSGKQLSDAVYHYDYVHSVRGKVAPTTKTVDLDRALHAYKLQSSNLYKTSLRTLPTGYRLPGDTPHFKHIKDTRYMSSYFKYKEAYEHTKAYGYTLGPKDVPFVHVRRVNNVTSERLYRELYHKLKDKIHTTPDTPEIRQVKKTQEAVSELIYKSDFFKMQGHMISLPYTPQVIHCRYVGDITSDIKYKEDLQVLKGFGCFLYDTPDMVRSRHLRKLWSNYLYTDKARKMRDKYKVVLDTPEYRKVQELKTHLSELVYRAAGKKQKSIFTSVPDTPDLLRAKRGQKLQSQYLYVELATKERPHHHAGNQTTALKHAKDVKDMVSEKKYKIQYEKMKDKYTPVPDTPILIRAKRAYWNASDLRYKETFQKTKGKYHTVKDALDIVYHRKVTDDISKIKYKENYMSQLGIWRSIPDRPEHFHHRAVTDTVSDVKYKEDLTWLKGIGCYAYDTPDFTLAEKNKTLYSKYKYKEVFERTKSDFKYVADSPINRHFKYATQLMNEKKYRADYEQRKDKYHLVVDEPRHLLAKTRSDQISQIKYRKNYEKSKDKFTSIVDTPEHLRTTKVNKQISDILYKLEYNKAKPRGYTTIHDTPMLLHVRKVKDEVSDLKYKEVYQRNKSNCTIEPDAVHIKAAKDAYKVNTNLDYKKQYEANKAHWKWTPDRPDFLQAAKSSLQQSDFEYKLDREFLKGCKLSVTDDKNTVLALRNTLIESDLKYKEKHVKERGTCHAVPDTPQILLAKTVSNLVSENKYKDHVKKHLAQGSYTTLPETRDTVHVKEVTKHVSDTNYKKKFVKEKGKSNYSIMLEPPEVKHAMEVAKKQSDVAYRKDAKENLHYTTVADRPDIKKATQAAKQASEVEYRAKHRKEGSHGLSMLGRPDIEMAKKAAKLSSQVKYRENFDKEKGKTPKYNPKDSQLYKVMKDANNLASEVKYKADLKKLHKPVTDMKESLIMNHVLNTSQLASSYQYKKKYEKSKGHYHTIPDNLEQLHLKEATELQSIVKYKEKYEKERGKPMLDFETPTYITAKESQQMQSGKEYRKDYEESIKGRNLTGLEVTPALLHVKYATKIASEKEYRKDLEESIRGKGLTEMEDTPDMLRAKNATQILNEKEYKRDLELEVKGRGLNAMANETPDFMRARNATDIASQIKYKQSAEMEKANFTSVVDTPEIIHAQQVKNLSSQKKYKEDAEKSMSYYETVLDTPEIQRVRENQKNFSLLQYQCDLKNSKGKITVVQDTPEILRVKENQKNFSSVLYKEDVSPGTAIGKTPEMMRVKQTQDHISSVKYKEAIGQGTPIPDLPEVKRVKETQKHISSVMYKENLGTGIPTTVTPEIERVKRNQENFSSVLYKENMGKGTPLPVTPEMERVKHNQENISSVLYKENVGKATATPVTPEMQRVKRNQENISSVLYSDSFRKQIQGKAAYVLDTPEMRRVRETQRHISTVKYHEDFEKHKGCFTPVVTDPITERVKKNMQDFSDINYRGIQRKVVEMEQKRNDQDQETITGLRVWRTNPGSVFDYDPAEDNIQSRSLHMINVQAQRRSREQSRSASALSISGGEEKSEHSEAPDHHLSTYSDGGVFAVSTAYKHAKTTELPQQRSSSVATQQTTVSSIPSHPSTAGKIFRAMYDYMAADADEVSFKDGDAIINVQAIDEGWMYGTVQRTGRTGMLPANYVEAI

SEQ ID NO: 804773 - protein, 3049 aa, Homo sapiens
REYKKAYEKSKGIHNTPLDMMSIVQAKKCQVLVSDIDYRNYLHQWTCLPDQNDVIQAKKAYDLQSDNLYKSDLEWLKGIGWLPEGSVEVMRVKNAQNLLNERLYRIKPEALKFTSIVDTPEVIQAKINAVQISEPLYRDAWEKEKANVNVPADTPLMLQSKINALQISNKRYQQAWEDVKMTGYDLRADAIGIQHAKASRDIASDYLYKTAYEKQKGHYIGCRSAKEDPKLVWAANVLKMQNDRLYKKAYNDHKAKISIPVDMVSISAAKEGQALASDVDYRHYLHRWSCFPDQNDVIQARKAYDLQSDALYKADLEWLRGIGWMPQGSPEVLRVKNAQNIFCDSVYRTPVVNLKYTSIVDTPEVVLAKSNAENISIPKYREVWDKDKTSIHIMPDTPEINLARANALNVSNKLYREGWDEMKAGCDVRLDAIPIQAAKASREIASDYKYKLDHEKQKGHYVGTLTARDDNKIRWALIADKLQNEREYRLDWAKWKAKIQSPVDMLSILHSKNSQALVSDMDYRNYLHQWTCMPDQNDVIQAKKAYELQSDNVYKADLEWLRGIGWMPNDSVSVNHAKHAADIFSEKKYRTKIETLNFTPVDDRVDYVTAKQSGEILDDIKYRKDWNATKSKYTLTETPLLHTAQEAARILDQYLYKEGWERQKATGYILPPDAVPFVHAHHCNDVQSELKYKAEHVKQKGHYVGVPTMRDDPKLVWFEHAGQIQNERLYKEDYHKTKAKINIPADMVSVLAAKQGQTLVSDIDYRNYLHQWMCHPDQNDVIQARKAYDLQSDNVYRADLEWLRGIGWIPLDSVDHVRVTKNQEMMSQIKYKKNALENYPNFTSVVDPPEIVLAKINSVNQSDVKYKETFNKAKGKYTFSPDTPHISHSKDMGKLYSTILYKGAWEGTKAYGYTLDERYIPIVGAKHADLVNSELKYKETYEKQKGHYLAGKVIGEFPGVVHCLDFQKMRSALNYRKHYEDTKANVHIPNDMMNHVLAKRCQYILSDLEYRHYFHQWTSLLEEPNVIRVRNAQEILSDNVYKDDLNWLKGIGCYVWDTPQILHAKKSYDLQSQLQYTAAGKENLQNYNLVTDTPLYVTAVQSGINASEVKYKENYHQIKDKYTTVLETVDYDRTRNLKNLYSSNLYKEAWDRVKATSYILPSSTLSLTHAKNQKHLASHIKYREEYEKFKALYTLPRSVDDDPNTARCLRVGKLNIDRLYRSVYEKNKMKIHIVPDMVEMVTAKDSQKKVSEIDYRLRLHEWICHPDLQVNDHVRKVTDQISDIVYKDDLNWLKGIGCYVWDTPEILHAKHAYDLRDDIKYKAHMLKTRNDYKLVTDTPVYVQAVKSGKQLSDAVYHYDYVHSVRGKVAPTTKTVDLDRALHAYKLQSSNLYKTSLRTLPTGYRLPGDTPHFKHIKDTRYMSSYFKYKEAYEHTKAYGYTLGPKDVPFVHVRRVNNVTSERLYRELYHKLKDKIHTTPDTPEIRQVKKTQEAVSELIYKSDFFKMQGHMISLPYTPQVIHCRYVGDITSDIKYKEDLQVLKGFGCFLYDTPDMVRSRHLRKLWSNYLYTDKARKMRDKYKVVLDTPEYRKVQELKTHLSELVYRAAGKKQKSIFTSVPDTPDLLRAKRGQKLQSQYLYVELATKERPHHHAGNQTTALKHAKDVKDMVSEKKYKIQYEKMKDKYTPVPDTPILIRAKRAYWNASDLRYKETFQKTKGKYHTVKDALDIVYHRKVTDDISKIKYKENYMSQLGIWRSIPDRPEHFHHRAVTDTVSDVKYKEDLTWLKGIGCYAYDTPDFTLAEKNKTLYSKYKYKEVFERTKSDFKYVADSPINRHFKYATQLMNERKYKSSAKMFLQHGCNEILRPDMLTALYNSHMWSQIKYRKNYEKSKDKFTSIVDTPEHLRTTKVNKQISDILYKLEYNKAKPRGYTTIHDTPMLLHVRKVKDEVSDLKYKEVYQRNKSNCTIEPDAVHIKAAKDAYKVNTNLDYKKQYEANKAHWKWTPDRPDFLQAAKSSLQQSDFEYKLDREFLKGCKLSVTDDKNTVLALRNTLIESDLKYKEKHVKERGTCHAVPDTPQILLAKTVSNLVSENKYKDHVKKHLAQGSYTTLPETRDTVHVKEVTKHVSDTNYKKKFVKEKGKSNYSIMLEPPEVKHAMEVAKKQSDVAYRKDAKENLHYTTVADRPDIKKATQAAKQASEVEYRAKHRKEGSHGLSMLGRPDIEMAKKAAKLSSQVKYRENFDKEKGKTPKYNPKDSQLYKVMKDANNLASEVKYKADLKKLHKPVTDMKESLIMNHVLNTSQLASSYQYKKKYEKSKGHYHTIPDNLEQLHLKEATELQSIVKYKEKYEKERGKPMLDFETPTYITAKESQQMQSGKEYRKDYEESIKGRNLTGLEVTPALLHVKYATKIASEKEYRKDLEESIRGKGLTEMEDTPDMLRAKNATQILNEKEYKRDLELEVKGRGLNAMANETPDFMRARNATDIASQIKYKQSAEMEKANFTSVVDTPEIIHAQQVKNLSSQKKYKEDAEKSMSYYETVLDTPEIQRVRENQKNFSLLQYQCDLKNSKGKITVVQDTPEILRVKENQKNFSSVLYKEDVSPGTAIGKTPEMMRVKQTQDHISSVKYKEAIGQGTPIPDLPEVKRVKETQKHISSVMYKENLGTGIPTTVTPEIERVKRNQENFSSVLYKENLGKGIPTPITPEMERVKRNQENFSSVLYKENVGKATATPVTPEMQRVKRNQENISSVLYKENMRKATPTPVTPEMERAKRNQENISSVLYSDSFRKQIQGKAAYVLDTPEMRRVRETQRHISTVKYHEDFEKHKGCFTPVVTDPITERVKKNMQDFSDINYRGIQRKVVEMEQKRNDQDQETITGLRVWRTNPGSVFDYDPAEDNIQSRSLHMINVQAQRRSREQSRSASALSISGGEEKSEHSEAPDHHLSTYSDGGVFAVSTAYKHAKTTELPQQRSSSVATQQTTVSSIPSHPSTAGKIFRAMYDYMAADADEVSFKDGDAIINVQAIDEGWMYGTVQRTGRTGMLPANYVEAI

SEQ ID NO: 804774 - protein, 2142 aa, Homo sapiens
VNAVNRIMSELFHDVKPGTLPVVNWKTLKYKETYEKQKGHYLAGKVIGEFPGVVHCLDFQKMRSALNYRKHYEDTKANVHIPNDMMNHVLAKRCQYILSDLEYRHYFHQWTSLLEEPNVIRVRNAQEILSDNVYKDDLNWLKGIGCYVWDTPQILHAKKSYDLQSQLQYTAAGKENLQNYNLVTDTPLYVTAVQSGINASEVKYKENYHQIKDKYTTVLETVDYDRTRNLKNLYSSNLYKEAWDRVKATSYILPSSTLSLTHAKNQKHLASHIKYREEYEKFKALYTLPRSVDDDPNTARCLRVGKLNIDRLYRSVYEKNKMKIHIVPDMVEMVTAKDSQKKVSEIDYRLRLHEWICHPDLQVNDHVRKVTDQISDIVYKDDLNWLKGIGCYVWDTPEILHAKHAYDLRDDIKYKAHMLKTRNDYKLVTDTPVYVQAVKSGKQLSDAVYHYDYVHSVRGKVAPTTKTVDLDRALHAYKLQSSNLYKTSLRTLPTGYRLPGDTPHFKHIKDTRYMSSYFKYKEAYEHTKAYGYTLGPKDVPFVHVRRVNNVTSERLYRELYHKLKDKIHTTPDTPEIRQVKKTQEAVSELIYKSDFFKMQGHMISLPYTPQVIHCRYVGDITSDIKYKEDLQVLKGFGCFLYDTPDMVRSRHLRKLWSNYLYTDKARKMRDKYKVVLDTPEYRKVQELKTHLSELVYRAAGKKQKSIFTSVPDTPDLLRAKRGQKLQSQYLYVELATKERPHHHAGNQTTALKHAKDVKDMVSEKKYKIQYEKMKDKYTPVPDTPILIRAKRAYWNASDLRYKETFQKTKGKYHTVKDALDIVYHRKVTDDISKIKYKENYMSQLGIWRSIPDRPEHFHHRAVTDTVSDVKYKEDLTWLKGIGCYAYDTPDFTLAEKNKTLYSKYKYKEVFERTKSDFKYVADSPINRHFKYATQLMNERKYKSSAKMFLQHGCNEILRPDMLTALYNSHMWSQIKYRKNYEKSKDKFTSIVDTPEHLRTTKVNKQISDILYKLEYNKAKPRGYTTIHDTPMLLHVRKVKDEVSDLKYKEVYQRNKSNCTIEPDAVHIKAAKDAYKVNTNLDYKKQYEANKAHWKWTPDRPDFLQAAKSSLQQSDFEYKLDREFLKGCKLSVTDDKNTVLALRNTLIESDLKYKEKHVKERGTCHAVPDTPQILLAKTVSNLVSENKYKDHVKKHLAQGSYTTLPETRDTVHVKEVTKHVSDTNYKKKFVKEKGKSNYSIMLEPPEVKHAMEVAKKQSDVAYRKDAKENLHYTTVADRPDIKKATQAAKQASEVEYRAKHRKEGSHGLSMLGRPDIEMAKKAAKLSSQVKYRENFDKEKGKTPKYNPKDSQLYKVMKDANNLASEVKYKADLKKLHKPVTDMKESLIMNHVLNTSQLASSYQYKKKYEKSKGHYHTIPDNLEQLHLKEATELQSIVKYKEKYEKERGKPMLDFETPTYITAKESQQMQSGKEYRKDYEESIKGRNLTGLEVTPALLHVKYATKIASEKEYRKDLEESIRGKGLTEMEDTPDMLRAKNATQILNEKEYKRDLELEVKGRGLNAMANETPDFMRARNATDIASQIKYKQSAEMEKANFTSVVDTPEIIHAQQVKNLSSQKKYKEDAEKSMSYYETVLDTPEIQRVRENQKNFSLLQYQCDLKNSKGKITVVQDTPEILRVKENQKNFSSVLYKEDVSPGTAIGKTPEMMRVKQTQDHISSVKYKEAIGQGTPIPDLPEVKRVKETQKHISSVMYKENLGTGIPTTVTPEIERVKRNQENFSSVLYKENLGKGIPTPITPEMERVKRNQENFSSVLYKENVGKATATPVTPEMQRVKRNQENISSVLYKENMRKATPTPVTPEMERAKRNQENISSVLYSDSFRKQIQGKAAYVLDTPEMRRVRETQRHISTVKYHEDFEKHKGCFTPVVTDPITERVKKNMQDFSDINYRGIQRKVVEMEQKRNDQDQETITGLRVWRTNPGSVFDYDPAEDNIQSRSLHMINVQAQRRSREQSRSASALSISGGEEKSEHSEAPDHHLSTYSDGGVFAVSTAYKHAKTTELPQQRSSSVATQQTTVSSIPSHPSTAGKIFRAMYDYMAADADEVSFKDGDAIINVQAIDEGWMYGTVQRTGRTGMLPANYVEAI

SEQ ID NO: 804775 - protein, 3018 aa, Homo sapiens
REYKKAYEKSKGIHNTPLDMMSIVQAKKCQVLVSDIDYRNYLHQWTCLPDQNDVIQAKKAYDLQSDNLYKSDLEWLKGIGWLPEGSVEVMRVKNAQNLLNERLYRIKPEALKFTSIVDTPEVIQAKINAVQISEPLYRDAWEKEKANVNVPADTPLMLQSKINALQISNKRYQQAWEDVKMTGYDLRADAIGIQHAKASRDIASDYLYKTAYEKQKGHYIGCRSAKEDPKLVWAANVLKMQNDRLYKKAYNDHKAKISIPVDMVSISAAKEGQALASDVDYRHYLHRWSCFPDQNDVIQARKAYDLQSDALYKADLEWLRGIGWMPQGSPEVLRVKNAQNIFCDSVYRTPVVNLKYTSIVDTPEVVLAKSNAENISIPKYREVWDKDKTSIHIMPDTPEINLARANALNVSNKLYREGWDEMKAGCDVRLDAIPIQAAKASREIASDYKYKLDHEKQKGHYVGTLTARDDNKIRWALIADKLQNEREYRLDWAKWKAKIQSPVDMLSILHSKNSQALVSDMDYRNYLHQWTCMPDQNDVIQAKKAYELQSDNVYKADLEWLRGIGWMPNDSVSVNHAKHAADIFSEKKYRTKIETLNFTPVDDRVDYVTAKQSGEILDDIKYRKDWNATKSKYTLTETPLLHTAQEAARILDQYLYKEGWERQKATGYILPPDAVPFVHAHHCNDVQSELKYKAEHVKQKGHYVGVPTMRDDPKLVWFEHAGQIQNERLYKEDYHKTKAKINIPADMVSVLAAKQGQTLVSDIDYRNYLHQWMCHPDQNDVIQARKAYDLQSDNVYRADLEWLRGIGWIPLDSVDHVRVTKNQEMMSQIKYKKNALENYPNFTSVVDPPEIVLAKINSVNQSDVKYKETFNKAKGKYTFSPDTPHISHSKDMGKLYSTILYKGAWEGTKAYGYTLDERYIPIVGAKHADLVNSELKYKETYEKQKGHYLAGKVIGEFPGVVHCLDFQKMRSALNYRKHYEDTKANVHIPNDMMNHVLAKRCQYILSDLEYRHYFHQWTSLLEEPNVIRVRNAQEILSDNVYKDDLNWLKGIGCYVWDTPQILHAKKSYDLQSQLQYTAAGKENLQNYNLVTDTPLYVTAVQSGINASEVKYKENYHQIKDKYTTVLETVDYDRTRNLKNLYSSNLYKEAWDRVKATSYILPSSTLSLTHAKNQKHLASHIKYREEYEKFKALYTLPRSVDDDPNTARCLRVGKLNIDRLYRSVYEKNKMKIHIVPDMVEMVTAKDSQKKVSEIDYRLRLHEWICHPDLQVNDHVRKVTDQISDIVYKDDLNWLKGIGCYVWDTPEILHAKHAYDLRDDIKYKAHMLKTRNDYKLVTDTPVYVQAVKSGKQLSDAVYHYDYVHSVRGKVAPTTKTVDLDRALHAYKLQSSNLYKTSLRTLPTGYRLPGDTPHFKHIKDTRYMSSYFKYKEAYEHTKAYGYTLGPKDVPFVHVRRVNNVTSERLYRELYHKLKDKIHTTPDTPEIRQVKKTQEAVSELIYKSDFFKMQGHMISLPYTPQVIHCRYVGDITSDIKYKEDLQVLKGFGCFLYDTPDMVRSRHLRKLWSNYLYTDKARKMRDKYKVVLDTPEYRKVQELKTHLSELVYRAAGKKQKSIFTSVPDTPDLLRAKRGQKLQSQYLYVELATKERPHHHAGNQTTALKHAKDVKDMVSEKKYKIQYEKMKDKYTPVPDTPILIRAKRAYWNASDLRYKETFQKTKGKYHTVKDALDIVYHRKVTDDISKIKYKENYMSQLGIWRSIPDRPEHFHHRAVTDTVSDVKYKEDLTWLKGIGCYAYDTPDFTLAEKNKTLYSKYKYKEVFERTKSDFKYVADSPINRHFKYATQLMNERKYKSSAKMFLQHGCNEILRPDMLTALYNSHMWSQIKYRKNYEKSKDKFTSIVDTPEHLRTTKVNKQISDILYKLEYNKAKPRGYTTIHDTPMLLHVRKVKDEVSDLKYKEVYQRNKSNCTIEPDAVHIKAAKDAYKVNTNLDYKKQYEANKAHWKWTPDRPDFLQAAKSSLQQSDFEYKLDREFLKGCKLSVTDDKNTVLALRNTLIESDLKYKEKHVKERGTCHAVPDTPQILLAKTVSNLVSENKYKDHVKKHLAQGSYTTLPETRDTVHVKEVTKHVSDTNYKKKFVKEKGKSNYSIMLEPPEVKHAMEVAKKQSDVAYRKDAKENLHYTTVADRPDIKKATQAAKQASEVEYRAKHRKEGSHGLSMLGRPDIEMAKKAAKLSSQVKYRENFDKEKGKTPKYNPKDSQLYKVMKDANNLASEVKYKADLKKLHKPVTDMKESLIMNHVLNTSQLASSYQYKKKYEKSKGHYHTIPDNLEQLHLKEATELQSIVKYKEKYEKERGKPMLDFETPTYITAKESQQMQSGKEYRKDYEESIKGRNLTGLEVTPALLHVKYATKIASEKEYRKDLEESIRGKGLTEMEDTPDMLRAKNATQILNEKEYKRDLELEVKGRGLNAMANETPDFMRARNATDIASQIKYKQSAEMEKANFTSVVDTPEIIHAQQVKNLSSQKKYKEDAEKSMSYYETVLDTPEIQRVRENQKNFSLLQYQCDLKNSKGKITVVQDTPEILRVKENQKNFSSVLYKEDVSPGTAIGKTPEMMRVKQTQDHISSVKYKEAIGQGTPIPDLPEVKRVKETQKHISSVMYKENLGTGIPTTVTPEIERVKRNQENFSSVLYKENLGKATPTPFTPEMERVKRNQENFSSVLYKENMRKATPTPVTPEMERAKRNQENISSVLYSDSFRKQIQGKAAYVLDTPEMRRVRETQRHISTVKYHEDFEKHKGCFTPVVTDPITERVKKNMQDFSDINYRGIQRKVVEMEQKRNDQDQETITGLRVWRTNPGSVFDYDPAEDNIQSRSLHMINVQAQRRSREQSRSASALSISGGEEKSEHSEAPDHHLSTYSDGGVFAVSTAYKHAKTTELPQQRSSSVATQQTTVSSIPSHPSTAGKIFRAMYDYMAADADEVSFKDGDAIINVQAIDEGWMYGTVQRTGRTGMLPANYVEAI

SEQ ID NO: 804776 - protein, 788 aa, Homo sapiens
MKDANNLASEVKYKADLKKLHKPVTDMKESLIMNHVLNTSQLASSYQYKKKYEKSKGHYHTIPDNLEQLHLKEATELQSIVKYKEKYEKERGKPMLDFETPTYITAKESQQMQSGKEYRKDYEESIKGRNLTGLEVTPALLHVKYATKIASEKEYRKDLEESIRGKGLTEMEDTPDMLRAKNATQILNEKEYKRDLELEVKGRGLNAMANETPDFMRARNATDIASQIKYKQSAEMEKANFTSVVDTPEIIHAQQVKNLSSQKKYKEDAEKSMSYYETVLDTPEIQRVRENQKNFSLLQYQCDLKNSKGKITVVQDTPEILRVKENQKNFSSVLYKEDVSPGTAIGKTPEMMRVKQTQDHISSVKYKEAIGQGTPIPDLPEVKRVKETQKHISSVMYKENLGTGIPTTVTPEIERVKRNQENFSSVLYKENLGKGIPTPITPEMERVKRNQENFSSVLYKENVGKATATPVTPEMQRVKRNQENISSVLYKENMRKATPTPVTPEMERAKRNQENISSVLYSDSFRKQIQGKAAYVLDTPEMRRVRETQRHISTVKYHEDFEKHKGCFTPVVTDPITERVKKNMQDFSDINYRGIQRKVVEMEQKRNDQDQETITGLRVWRTNPGSVFDYDPAEDNIQSRSLHMINVQAQRRSREQSRSASALSISGGEEKSEHSEAPDHHLSTYSDGGVFAVSTAYKHAKTTELPQQRSSSVATQQTTVSSIPSHPSTAGKIFRAMYDYMAADADEVSFKDGDAIINVQAIDEGWMYGTVQRTGRTGMLPANYVEAI

SEQ ID NO: 804777 - protein, 437 aa, Homo sapiens
MRVKQTQDHISSVKYKEAIGQGTPIPDLPEVKRVKETQKHISSVMYKENLGTGIPTTVTPEIERVKRNQENFSSVLYKENLGKGIPTPITPEMERVKRNQENFSSVLYKENVGKATATPVTPEMQRVKRNQENISSVLYKENMRKATPTPVTPEMERAKRNQENISSVLYSDSFRKQIQGKAAYVLDTPEMRRVRETQRHISTVKYHEDFEKHKGCFTPVVTDPITERVKKNMQDFSDINYRGIQRKVVEMEQKRNDQDQETITGLRVWRTNPGSVFDYDPAEDNIQSRSLHMINVQAQRRSREQSRSASALSISGGEEKSEHSEAPDHHLSTYSDGGVFAVSTAYKHAKTTELPQQRSSSVATQQTTVSSIPSHPSTAGKIFRAMYDYMAADADEVSFKDGDAIINVQAIDEGWMYGTVQRTGRTGMLPANYVEAI

SEQ ID NO: 804778 - protein, 388 aa, Homo sapiens
MGKGTPLPVTPEMERVKHNQENISSVLYKENMGKGTPLPVTPEMERVKHNQENISSVLYKENVGKATATPVTPEMQRVKRNQENISSVLYKENMRKATPTPVTPEMERAKRNQENISSVLYSDSFRKQIQGKAAYVLDTPEMRRVRETQRHISTVKYHEDFEKHKGCFTPVVTDPITERVKKNMQDFSDINYRGIQRKVVEMEQKRNDQDQETITGLRVWRTNPGSVFDYDPAEDNIQSRSLHMINVQAQRRSREQSRSASALSISGGEEKSEHSEAPDHHLSTYSDGGVFAVSTAYKHAKTTELPQQRSSSVATQQTTVSSIPSHPSTAGKIFRAMYDYMAADADEVSFKDGDAIINVQAIDEGWMYGTVQRTGRTGMLPANYVEAI

SEQ ID NO: 804779 - protein, 462 aa, Homo sapiens
MVYMRITLVDSVIFQGAPSTSCRCQSRSHRHEKTFSSVLYKENMGKGTPLPVTPEMERVKHNQENISSVLYKENMGKGTPLPVTPEMERVKHNQENISSVLYKENMGKGTPLPVTPEMERVKHNQENISSVLYKENVGKATATPVTPEMQRVKRNQENISSVLYKENMRKATPTPVTPEMERAKRNQENISSVLYSDSFRKQIQGKAAYVLDTPEMRRVRETQRHISTVKYHEDFEKHKGCFTPVVTDPITERVKKNMQDFSDINYRGIQRKVVEMEQKRNDQDQETITGLRVWRTNPGSVFDYDPAEDNIQSRSLHMINVQAQRRSREQSRSASALSISGGEEKSEHSEAPDHHLSTYSDGGVFAVSTAYKHAKTTELPQQRSSSVATQQTTVSSIPSHPSTAGKIFRAMYDYMAADADEVSFKDGDAIINVQAIDEGWMYGTVQRTGRTGMLPANYVEAI

SEQ ID NO: 804780 - protein, 419 aa, Homo sapiens
MGKGTPLPVTPEMERVKHNQENISSVLYKENMGKGTPLPVTPEMERVKHNQENISSVLYKENVGKATATPVTPEMQRVKRNQENISSVLYKENLGKATPTPFTPEMERVKRNQENFSSVLYKENMRKATPTPVTPEMERAKRNQENISSVLYSDSFRKQIQGKAAYVLDTPEMRRVRETQRHISTVKYHEDFEKHKGCFTPVVTDPITERVKKNMQDFSDINYRGIQRKVVEMEQKRNDQDQETITGLRVWRTNPGSVFDYDPAEDNIQSRSLHMINVQAQRRSREQSRSASALSISGGEEKSEHSEAPDHHLSTYSDGGVFAVSTAYKHAKTTELPQQRSSSVATQQTTVSSIPSHPSTAGKIFRAMYDYMAADADEVSFKDGDAIINVQAIDEGWMYGTVQRTGRTGMLPANYVEAI

SEQ ID NO: 804781 - protein, 247 aa, Homo sapiens [sequence omitted]

SEQ ID NO: 804782 - protein, 2878 aa, Homo sapiens
REYKKAYEKSKGIHNTPLDMMSIVQAKKCQVLVSDIDYRNYLHQWTCLPDQNDVIQAKKAYDLQSDNLYKSDLEWLKGIGWLPEGSVEVMRVKNAQNLLNERLYRIKPEALKFTSIVDTPEVIQAKINAVQISEPLYRDAWEKEKANVNVPADTPLMLQSKINALQISNKRYQQAWEDVKMTGYDLRADAIGIQHAKASRDIASDYLYKTAYEKQKGHYIGCRSAKEDPKLVWAANVLKMQNDRLYKKAYNDHKAKISIPVDMVSISAAKEGQALASDVDYRHYLHRWSCFPDQNDVIQARKAYDLQSDALYKADLEWLRGIGWMPQGSPEVLRVKNAQNIFCDSVYRTPVVNLKYTSIVDTPEVVLAKSNAENISIPKYREVWDKDKTSIHIMPDTPEINLARANALNVSNKLYREGWDEMKAGCDVRLDAIPIQAAKASREIASDYKYKLDHEKQKGHYVGTLTARDDNKIRWALIADKLQNEREYRLDWAKWKAKIQSPVDMLSILHSKNSQALVSDMDYRNYLHQWTCMPDQNDVIQAKKAYELQSDNVYKADLEWLRGIGWMPNDSVSVNHAKHAADIFSEKKYRTKIETLNFTPVDDRVDYVTAKQSGEILDDIKYRKDWNATKSKYTLTETPLLHTAQEAARILDQYLYKEGWERQKATGYILPPDAVPFVHAHHCNDVQSELKYKAEHVKQKGHYVGVPTMRDDPKLVWFEHAGQIQNERLYKEDYHKTKAKINIPADMVSVLAAKQGQTLVSDIDYRNYLHQWMCHPDQNDVIQARKAYDLQSDNVYRADLEWLRGIGWIPLDSVDHVRVTKNQEMMSQIKYKKNALENYPNFTSVVDPPEIVLAKINSVNQSDVKYKETFNKAKGKYTFSPDTPHISHSKDMGKLYSTILYKGAWEGTKAYGYTLDERYIPIVGAKHADLVNSELKYKETYEKQKGHYLAGKVIGEFPGVVHCLDFQKMRSALNYRKHYEDTKANVHIPNDMMNHVLAKRCQYILSDLEYRHYFHQWTSLLEEPNVIRVRNAQEILSDNVYKDDLNWLKGIGCYVWDTPQILHAKKSYDLQSQLQYTAAGKENLQNYNLVTDTPLYVTAVQSGINASEVKYKENYHQIKDKYTTVLETVDYDRTRNLKNLYSSNLYKEAWDRVKATSYILPSSTLSLTHAKNQKHLASHIKYREEYEKFKALYTLPRSVDDDPNTARCLRVGKLNIDRLYRSVYEKNKMKIHIVPDMVEMVTAKDSQKKVSEIDYRLRLHEWICHPDLQVNDHVRKVTDQISDIVYKDDLNWLKGIGCYVWDTPEILHAKHAYDLRDDIKYKAHMLKTRNDYKLVTDTPVYVQAVKSGKQLSDAVYHYDYVHSVRGKVAPTTKTVDLDRALHAYKLQSSNLYKTSLRTLPTGYRLPGDTPHFKHIKDTRYMSSYFKYKEAYEHTKAYGYTLGPKDVPFVHVRRVNNVTSERLYRELYHKLKDKIHTTPDTPEIRQVKKTQEAVSELIYKSDFFKMQGHMISLPYTPQVIHCRYVGDITSDIKYKEDLQVLKGFGCFLYDTPDMVRSRHLRKLWSNYLYTDKARKMRDKYKVVLDTPEYRKVQELKTHLSELVYRAAGKKQKSIFTSVPDTPDLLRAKRGQKLQSQYLYVELATKERPHHHAGNQTTALKHAKDVKDMVSEKKYKIQYEKMKDKYTPVPDTPILIRAKRAYWNASDLRYKETFQKTKGKYHTVKDALDIVYHRKVTDDISKIKYKENYMSQLGIWRSIPDRPEHFHHRAVTDTVSDVKYKEDLTWLKGIGCYAYDTPDFTLAEKNKTLYSKYKYKEVFERTKSDFKYVADSPINRHFKYATQLMNERKYKSSAKMFLQHGCNEILRPDMLTALYNSHMWSQIKYRKNYEKSKDKFTSIVDTPEHLRTTKVNKQISDILYKLEYNKAKPRGYTTIHDTPMLLHVRKVKDEVSDLKYKEVYQRNKSNCTIEPDAVHIKAAKDAYKVNTNLDYKKQYEANKAHWKWTPDRPDFLQAAKSSLQQSDFEYKLDREFLKGCKLSVTDDKNTVLALRNTLIESDLKYKEKHVKERGTCHAVPDTPQILLAKTVSNLVSENKYKDHVKKHLAQGSYTTLPETRDTVHVKEVTKHVSDTNYKKKFVKEKGKSNYSIMLEPPEVKHAMEVAKKQSDVAYRKDAKENLHYTTVADRPDIKKATQAAKQASEVEYRAKHRKEGSHGLSMLGRPDIEMAKKAAKLSSQVKYRENFDKEKGKTPKYNPKDSQLYKVMKDANNLASEVKYKADLKKLHKPVTDMKESLIMNHVLNTSQLASSYQYKKKYEKSKGHYHTIPDNLEQLHLKEATELQSIVKYKEKYEKERGKPMLDFETPTYITAKESQQMQSGKEYRKDYEESIKGRNLTGLEVTPALLHVKYATKIASEKEYRKDLEESIRGKGLTEMEDTPDMLRAKNATQILNEKEYKRDLELEVKGRGLNAMANETPDFMRARNATDIASQIKYKQSAEMEKANFTSVVDTPEIIHAQQVKNLSSQKKYKEDAEKSMSYYETVLDTPEIQRVRENQKNFSLLQYQCDLKNSKGKITVVQDTPEILRVKENQKNFSSVLYKEDVSPGTAIGKTPEMMRVKQTQDHISSVKYKEAIGQGTPIPDLPEVKRVKETQKHISSVMYKENLGTGIPTTVTPEIERVKRNQENFSSVLYKENLGKGIPTPITPEMERVKRNQENFSSVLYKENVGKATATPVTPEMQRVKRNQENISSVLYKENMRKATPTPVTPEMERAKRNQENISSVLYSDSFRKQIQGKAAYVLDTPEMRRVRETQRHISTVKYHEDFEKHKGCFTPVVTDPITERVKKNMQDFSDINYRGIQRKVVEMEQKRNDQDQETITGN

SEQ ID NO: 804783 - protein, 2732 aa, Homo sapiens
REYKKAYEKSKGIHNTPLDMMSIVQAKKCQVLVSDIDYRNYLHQWTCLPDQNDVIQAKKAYDLQSDNLYKSDLEWLKGIGWLPEGSVEVMRVKNAQNLLNERLYRIKPEALKFTSIVDTPEVIQAKINAVQISEPLYRDAWEKEKANVNVPADTPLMLQSKINALQISNKRYQQAWEDVKMTGYDLRADAIGIQHAKASRDIASDYLYKTAYEKQKGHYIGCRSAKEDPKLVWAANVLKMQNDRLYKKAYNDHKAKISIPVDMVSISAAKEGQALASDVDYRHYLHRWSCFPDQNDVIQARKAYDLQSDALYKADLEWLRGIGWMPQGSPEVLRVKNAQNIFCDSVYRTPVVNLKYTSIVDTPEVVLAKSNAENISIPKYREVWDKDKTSIHIMPDTPEINLARANALNVSNKLYREGWDEMKAGCDVRLDAIPIQAAKASREIASDYKYKLDHEKQKGHYVGTLTARDDNKIRWALIADKLQNEREYRLDWAKWKAKIQSPVDMLSILHSKNSQALVSDMDYRNYLHQWTCMPDQNDVIQAKKAYELQSDNVYKADLEWLRGIGWMPNDSVSVNHAKHAADIFSEKKYRTKIETLNFTPVDDRVDYVTAKQSGEILDDIKYRKDWNATKSKYTLTETPLLHTAQEAARILDQYLYKEGWERQKATGYILPPDAVPFVHAHHCNDVQSELKYKAEHVKQKGHYVGVPTMRDDPKLVWFEHAGQIQNERLYKEDYHKTKAKINIPADMVSVLAAKQGQTLVSDIDYRNYLHQWMCHPDQNDVIQARKAYDLQSDNVYRADLEWLRGIGWIPLDSVDHVRVTKNQEMMSQIKYKKNALENYPNFTSVVDPPEIVLAKINSVNQSDVKYKETFNKAKGKYTFSPDTPHISHSKDMGKLYSTILYKGAWEGTKAYGYTLDERYIPIVGAKHADLVNSELKYKETYEKQKGHYLAGKVIGEFPGVVHCLDFQKMRSALNYRKHYEDTKANVHIPNDMMNHVLAKRCQYILSDLEYRHYFHQWTSLLEEPNVIRVRNAQEILSDNVYKDDLNWLKGIGCYVWDTPQILHAKKSYDLQSQLQYTAAGKENLQNYNLVTDTPLYVTAVQSGINASEVKYKENYHQIKDKYTTVLETVDYDRTRNLKNLYSSNLYKEAWDRVKATSYILPSSTLSLTHAKNQKHLASHIKYREEYEKFKALYTLPRSVDDDPNTARCLRVGKLNIDRLYRSVYEKNKMKIHIVPDMVEMVTAKDSQKKVSEIDYRLRLHEWICHPDLQVNDHVRKVTDQISDIVYKDDLNWLKGIGCYVWDTPEILHAKHAYDLRDDIKYKAHMLKTRNDYKLVTDTPVYVQAVKSGKQLSDAVYHYDYVHSVRGKVAPTTKTVDLDRALHAYKLQSSNLYKTSLRTLPTGYRLPGDTPHFKHIKDTRYMSSYFKYKEAYEHTKAYGYTLGPKDVPFVHVRRVNNVTSERLYRELYHKLKDKIHTTPDTPEIRQVKKTQEAVSELIYKSDFFKMQGHMISLPYTPQVIHCRYVGDITSDIKYKEDLQVLKGFGCFLYDTPDMVRSRHLRKLWSNYLYTDKARKMRDKYKVVLDTPEYRKVQELKTHLSELVYRAAGKKQKSIFTSVPDTPDLLRAKRGQKLQSQYLYVELATKERPHHHAGNQTTALKHAKDVKDMVSEKKYKIQYEKMKDKYTPVPDTPILIRAKRAYWNASDLRYKETFQKTKGKYHTVKDALDIVYHRKVTDDISKIKYKENYMSQLGIWRSIPDRPEHFHHRAVTDTVSDVKYKEDLTWLKGIGCYAYDTPDFTLAEKNKTLYSKYKYKEVFERTKSDFKYVADSPINRHFKYATQLMNERKYKSSAKMFLQHGCNEILRPDMLTALYNSHMWSQIKYRKNYEKSKDKFTSIVDTPEHLRTTKVNKQISDILYKLEYNKAKPRGYTTIHDTPMLLHVRKVKDEVSDLKYKEVYQRNKSNCTIEPDAVHIKAAKDAYKVNTNLDYKKQYEANKAHWKWTPDRPDFLQAAKSSLQQSDFEYKLDREFLKGCKLSVTDDKNTVLALRNTLIESDLKYKEKHVKERGTCHAVPDTPQILLAKTVSNLVSENKYKDHVKKHLAQGSYTTLPETRDTVHVKEVTKHVSDTNYKKKFVKEKGKSNYSIMLEPPEVKHAMEVAKKQSDVAYRKDAKENLHYTTVADRPDIKKATQAAKQASEVEYRAKHRKEGSHGLSMLGRPDIEMAKKAAKLSSQVKYRENFDKEKGKTPKYNPKDSQLYKVMKDANNLASEVKYKADLKKLHKPVTDMKESLIMNHVLNTSQLASSYQYKKKYEKSKGHYHTIPDNLEQLHLKEATELQSIVKYKEKYEKERGKPMLDFETPTYITAKESQQMQSGKEYRKDYEESIKGRNLTGLEVTPALLHVKYATKIASEKEYRKDLEESIRGKGLTEMEDTPDMLRAKNATQILNEKEYKRDLELEVKGRGLNAMANETPDFMRARNATDIASQIKYKQSAEMEKANFTSVVDTPEIIHAQQVKNLSSQKKYKEDAEKSMSYYETVLDTPEIQRVRENQKNFSLLQYQCDLKNSKGKITVVQDTPEILRVKENQKNFSSVLYKEDVSPGTAIGKTPEMMRVKQTQDHISSVKYKEAIGQGTPIPDLPEVKRVKETQKHISSVMYKENLGTGIPTTVTPEIERVKRNQENFSSVLYKENLGKGIPTPITPEMERVKRNQENFSSVFLRGPKKKKSLNFI

SEQ ID NO: 804784 - protein, 2605 aa, Homo sapiens
REYKKAYEKSKGIHNTPLDMMSIVQAKKCQVLVSDIDYRNYLHQWTCLPDQNDVIQAKKAYDLQSDNLYKSDLEWLKGIGWLPEGSVEVMRVKNAQNLLNERLYRIKPEALKFTSIVDTPEVIQAKINAVQISEPLYRDAWEKEKANVNVPADTPLMLQSKINALQISNKRYQQAWEDVKMTGYDLRADAIGIQHAKASRDIASDYLYKTAYEKQKGHYIGCRSAKEDPKLVWAANVLKMQNDRLYKKAYNDHKAKISIPVDMVSISAAKEGQALASDVDYRHYLHRWSCFPDQNDVIQARKAYDLQSDALYKADLEWLRGIGWMPQGSPEVLRVKNAQNIFCDSVYRTPVVNLKYTSIVDTPEVVLAKSNAENISIPKYREVWDKDKTSIHIMPDTPEINLARANALNVSNKLYREGWDEMKAGCDVRLDAIPIQAAKASREIASDYKYKLDHEKQKGHYVGTLTARDDNKIRWALIADKLQNEREYRLDWAKWKAKIQSPVDMLSILHSKNSQALVSDMDYRNYLHQWTCMPDQNDVIQAKKAYELQSDNVYKADLEWLRGIGWMPNDSVSVNHAKHAADIFSEKKYRTKIETLNFTPVDDRVDYVTAKQSGEILDDIKYRKDWNATKSKYTLTETPLLHTAQEAARILDQYLYKEGWERQKATGYILPPDAVPFVHAHHCNDVQSELKYKAEHVKQKGHYVGVPTMRDDPKLVWFEHAGQIQNERLYKEDYHKTKAKINIPADMVSVLAAKQGQTLVSDIDYRNYLHQWMCHPDQNDVIQARKAYDLQSDNVYRADLEWLRGIGWIPLDSVDHVRVTKNQEMMSQIKYKKNALENYPNFTSVVDPPEIVLAKINSVNQSDVKYKETFNKAKGKYTFSPDTPHISHSKDMGKLYSTILYKGAWEGTKAYGYTLDERYIPIVGAKHADLVNSELKYKETYEKQKGHYLAGKVIGEFPGVVHCLDFQKMRSALNYRKHYEDTKANVHIPNDMMNHVLAKRCQYILSDLEYRHYFHQWTSLLEEPNVIRVRNAQEILSDNVYKDDLNWLKGIGCYVWDTPQILHAKKSYDLQSQLQYTAAGKENLQNYNLVTDTPLYVTAVQSGINASEVKYKENYHQIKDKYTTVLETVDYDRTRNLKNLYSSNLYKEAWDRVKATSYILPSSTLSLTHAKNQKHLASHIKYREEYEKFKALYTLPRSVDDDPNTARCLRVGKLNIDRLYRSVYEKNKMKIHIVPDMVEMVTAKDSQKKVSEIDYRLRLHEWICHPDLQVNDHVRKVTDQISDIVYKDDLNWLKGIGCYVWDTPEILHAKHAYDLRDDIKYKAHMLKTRNDYKLVTDTPVYVQAVKSGKQLSDAVYHYDYVHSVRGKVAPTTKTVDLDRALHAYKLQSSNLYKTSLRTLPTGYRLPGDTPHFKHIKDTRYMSSYFKYKEAYEHTKAYGYTLGPKDVPFVHVRRVNNVTSERLYRELYHKLKDKIHTTPDTPEIRQVKKTQEAVSELIYKSDFFKMQGHMISLPYTPQVIHCRYVGDITSDIKYKEDLQVLKGFGCFLYDTPDMVRSRHLRKLWSNYLYTDKARKMRDKYKVVLDTPEYRKVQELKTHLSELVYRAAGKKQKSIFTSVPDTPDLLRAKRGQKLQSQYLYVELATKERPHHHAGNQTTALKHAKDVKDMVSEKKYKIQYEKMKDKYTPVPDTPILIRAKRAYWNASDLRYKETFQKTKGKYHTVKDALDIVYHRKVTDDISKIKYKENYMSQLGIWRSIPDRPEHFHHRAVTDTVSDVKYKEDLTWLKGIGCYAYDTPDFTLAEKNKTLYSKYKYKEVFERTKSDFKYVADSPINRHFKYATQLMNERKYKSSAKMFLQHGCNEILRPDMLTALYNSHMWSQIKYRKNYEKSKDKFTSIVDTPEHLRTTKVNKQISDILYKLEYNKAKPRGYTTIHDTPMLLHVRKVKDEVSDLKYKEVYQRNKSNCTIEPDAVHIKAAKDAYKVNTNLDYKKQYEANKAHWKWTPDRPDFLQAAKSSLQQSDFEYKLDREFLKGCKLSVTDDKNTVLALRNTLIESDLKYKEKHVKERGTCHAVPDTPQILLAKTVSNLVSENKYKDHVKKHLAQGSYTTLPETRDTVHVKEVTKHVSDTNYKKKFVKEKGKSNYSIMLEPPEVKHAMEVAKKQSDVAYRKDAKENLHYTTVADRPDIKKATQAAKQASEVEYRAKHRKEGSHGLSMLGRPDIEMAKKAAKLSSQVKYRENFDKEKGKTPKYNPKDSQLYKVMKDANNLASEVKYKADLKKLHKPVTDMKESLIMNHVLNTSQLASSYQYKKKYEKSKGHYHTIPDNLEQLHLKEATELQSIVKYKEKYEKERGKPMLDFETPTYITAKESQQMQSGKEYRKDYEESIKGRNLTGLEVTPALLHVKYATKIASEKEYRKDLEESIRGKGLTEMEDTPDMLRAKNATQILNEKEYKRDLELEVKGRGLNAMANETPDFMRARNATDIASQIKYKQSAEMEKANFTSVVDTPEIIHAQQVKNLSSQKKYKEDAEKSMSYYETVLDTPEIQRVRENQKNFSLLQYQCDLKNSKGKITVVQDTPEILRVKENQKNFSSVYLLFILHLMLT

SEQ ID NO: 804785 - protein, 2580 aa, Homo sapiens
REYKKAYEKSKGIHNTPLDMMSIVQAKKCQVLVSDIDYRNYLHQWTCLPDQNDVIQAKKAYDLQSDNLYKSDLEWLKGIGWLPEGSVEVMRVKNAQNLLNERLYRIKPEALKFTSIVDTPEVIQAKINAVQISEPLYRDAWEKEKANVNVPADTPLMLQSKINALQISNKRYQQAWEDVKMTGYDLRADAIGIQHAKASRDIASDYLYKTAYEKQKGHYIGCRSAKEDPKLVWAANVLKMQNDRLYKKAYNDHKAKISIPVDMVSISAAKEGQALASDVDYRHYLHRWSCFPDQNDVIQARKAYDLQSDALYKADLEWLRGIGWMPQGSPEVLRVKNAQNIFCDSVYRTPVVNLKYTSIVDTPEVVLAKSNAENISIPKYREVWDKDKTSIHIMPDTPEINLARANALNVSNKLYREGWDEMKAGCDVRLDAIPIQAAKASREIASDYKYKLDHEKQKGHYVGTLTARDDNKIRWALIADKLQNEREYRLDWAKWKAKIQSPVDMLSILHSKNSQALVSDMDYRNYLHQWTCMPDQNDVIQAKKAYELQSDNVYKADLEWLRGIGWMPNDSVSVNHAKHAADIFSEKKYRTKIETLNFTPVDDRVDYVTAKQSGEILDDIKYRKDWNATKSKYTLTETPLLHTAQEAARILDQYLYKEGWERQKATGYILPPDAVPFVHAHHCNDVQSELKYKAEHVKQKGHYVGVPTMRDDPKLVWFEHAGQIQNERLYKEDYHKTKAKINIPADMVSVLAAKQGQTLVSDIDYRNYLHQWMCHPDQNDVIQARKAYDLQSDNVYRADLEWLRGIGWIPLDSVDHVRVTKNQEMMSQIKYKKNALENYPNFTSVVDPPEIVLAKINSVNQSDVKYKETFNKAKGKYTFSPDTPHISHSKDMGKLYSTILYKGAWEGTKAYGYTLDERYIPIVGAKHADLVNSELKYKETYEKQKGHYLAGKVIGEFPGVVHCLDFQKMRSALNYRKHYEDTKANVHIPNDMMNHVLAKRCQYILSDLEYRHYFHQWTSLLEEPNVIRVRNAQEILSDNVYKDDLNWLKGIGCYVWDTPQILHAKKSYDLQSQLQYTAAGKENLQNYNLVTDTPLYVTAVQSGINASEVKYKENYHQIKDKYTTVLETVDYDRTRNLKNLYSSNLYKEAWDRVKATSYILPSSTLSLTHAKNQKHLASHIKYREEYEKFKALYTLPRSVDDDPNTARCLRVGKLNIDRLYRSVYEKNKMKIHIVPDMVEMVTAKDSQKKVSEIDYRLRLHEWICHPDLQVNDHVRKVTDQISDIVYKDDLNWLKGIGCYVWDTPEILHAKHAYDLRDDIKYKAHMLKTRNDYKLVTDTPVYVQAVKSGKQLSDAVYHYDYVHSVRGKVAPTTKTVDLDRALHAYKLQSSNLYKTSLRTLPTGYRLPGDTPHFKHIKDTRYMSSYFKYKEAYEHTKAYGYTLGPKDVPFVHVRRVNNVTSERLYRELYHKLKDKIHTTPDTPEIRQVKKTQEAVSELIYKSDFFKMQGHMISLPYTPQVIHCRYVGDITSDIKYKEDLQVLKGFGCFLYDTPDMVRSRHLRKLWSNYLYTDKARKMRDKYKVVLDTPEYRKVQELKTHLSELVYRAAGKKQKSIFTSVPDTPDLLRAKRGQKLQSQYLYVELATKERPHHHAGNQTTALKHAKDVKDMVSEKKYKIQYEKMKDKYTPVPDTPILIRAKRAYWNASDLRYKETFQKTKGKYHTVKDALDIVYHRKVTDDISKIKYKENYMSQLGIWRSIPDRPEHFHHRAVTDTVSDVKYKEDLTWLKGIGCYAYDTPDFTLAEKNKTLYSKYKYKEVFERTKSDFKYVADSPINRHFKYATQLMNERKYKSSAKMFLQHGCNEILRPDMLTALYNSHMWSQIKYRKNYEKSKDKFTSIVDTPEHLRTTKVNKQISDILYKLEYNKAKPRGYTTIHDTPMLLHVRKVKDEVSDLKYKEVYQRNKSNCTIEPDAVHIKAAKDAYKVNTNLDYKKQYEANKAHWKWTPDRPDFLQAAKSSLQQSDFEYKLDREFLKGCKLSVTDDKNTVLALRNTLIESDLKYKEKHVKERGTCHAVPDTPQILLAKTVSNLVSENKYKDHVKKHLAQGSYTTLPETRDTVHVKEVTKHVSDTNYKKKFVKEKGKSNYSIMLEPPEVKHAMEVAKKQSDVAYRKDAKENLHYTTVADRPDIKKATQAAKQASEVEYRAKHRKEGSHGLSMLGRPDIEMAKKAAKLSSQVKYRENFDKEKGKTPKYNPKDSQLYKVMKDANNLASEVKYKADLKKLHKPVTDMKESLIMNHVLNTSQLASSYQYKKKYEKSKGHYHTIPDNLEQLHLKEATELQSIVKYKEKYEKERGKPMLDFETPTYITAKESQQMQSGKEYRKDYEESIKGRNLTGLEVTPALLHVKYATKIASEKEYRKDLEESIRGKGLTEMEDTPDMLRAKNATQILNEKEYKRDLELEVKGRGLNAMANETPDFMRARNATDIASQIKYKQSAEMEKANFTSVVDTPEIIHAQQVKNLSSQKKYKEDAEKSMSYYETVLDTPEIQRVRENQKNFSLLQYQCDLKKKNSRDVHLFLADC

SEQ ID NO: 804786 - protein, 299 aa, Homo sapiens
  misc_feature (279)..(279): Xaa can be any naturally occurring amino acid
  misc_feature (287)..(287): Xaa can be any naturally occurring amino acid
  misc_feature (296)..(296): Xaa can be any naturally occurring amino acid
MGKGTPLPVTPEMERVKHNQENISSVLYKENMGKGTPLPVTPEMERVKHNQENISSVLYKENVGKATATPVTPEMQRVKRNQENISSVLYKENLGKATPTPFTPEMERVKRNQENFSSVLYKENMRKATPTPVTPEMERAKRNQENISSVLYSDSFRKQIQGKAAYVLDTPEMRRVRETQRHISTVKYHEDFEKHKGCFTPVVTDPITERVKKNMQDFSDINYRGIQRKVVEMEQKRNDQDQETITGLRVWRTNPGSVFDYDPAEDNIQSRSLHMINGXKASRGPGXPGSKSPNLXQWH

SEQ ID NO: 804787 - protein, 127 aa, Homo sapiens
MRSRSKSPRRPSPTARGANCDVELLKTTTRDREELKCMLEKYERHLAEIQGNVKVLKSERDKIFLLYEQAGEIPIRRECESVEASSHGIASREGEKNVYDRDADGLRRNGKGEEARKGGSLKKLERL

SEQ ID NO: 804788 - protein, 84 aa, Homo sapiens
ARDAAPPPEGRPPEAQEKEGRAGIAPSLSACGAVGSRQPAGVLSKGPSGREPGSRQGRRLRSNKSTEGHKAPVQMGLPRVTAQR

SEQ ID NO: 804789 - protein, 84 aa, Homo sapiens; identical to SEQ ID NO: 804788

SEQ ID NO: 804790 - protein, 84 aa, Homo sapiens; identical to SEQ ID NO: 804788

SEQ ID NO: 804791 - protein, 74 aa, Homo sapiens
ARDAAPPPEGRPPEAQEKEGRAGIAPSLSACGAVGSRQPAGVLNDNTGWSGSENTLRLLIIPICQLTAVGKKTL

SEQ ID NO: 804792 - protein, 697 aa, Homo sapiens [sequence omitted]

SEQ ID NO: 804793 - protein, 697 aa, Homo sapiens [sequence omitted]

SEQ ID NO: 804794 - protein, 697 aa, Homo sapiens [sequence omitted]

SEQ ID NO: 804795 - protein, 697 aa, Homo sapiens [sequence omitted]

SEQ ID NO: 804796 - protein, 697 aa, Homo sapiens [sequence omitted]

SEQ ID NO: 804797 - protein, 875 aa, Homo sapiens
MVTTKEYDFGLGAPVSEAENYQNTLQLEQEVRNQDRFISTLKLQIEDLKQTNHGLEEYVRKLLDSKEVVSSQVDDLTSHNEHLCKELIKIDQLAEQLEKEKNFVVDSANKELEEAKIDLICQQNNIIVLEDTIKRLKSIILDTEKAQNKSPSRLDSFVKTLEADKDHYKSEAQHLRKMMRSRSKSPRRPSPTARGANCDVELLKTTTRDREELKCMLEKYERHLAEIQGNVKVLKSERDKIFLLYEQAQEEITRLRREMMKSCKSPKSTTAHAILRRVETERDVAFTDLRRMTTERDSLRERLKIAQETAFNEKAHLEQRIEELECTVHNLDDERMEQMSNMTLMKETISTVEKEMKSLARKAMDTESELGRQKAENNSLRLLYENTEKDLSDTQRHLAKKKYELQLTQEKIMCLDEKIDNFTRQNIAQREEISILGGTLNDLAKEKECLQACLDKKSENIASLGESLAMKEKTISGMKNIIAEMEQASRQCTEALIVCEQDVSRMRRQLDETNDELAQIARERDILAHDNDNLQEQFAKAKQENQALSKKLNDTHNELNDIKQKVQDTNLEVNKLKNILKSEESENRQMMEQLRKANEDAENWENKARQSEADNNTLKLELITAEAEGNRLKEKVDSLNREVEQHLNAERSYKSQISTLHKSVVKMEEELQKVQFEKVSALADLSSTRELCIKLDSSKELLNRQLVAKDQEIEMRENELDSAHSEIELLRSQMANERISMQNLEALLVANRDKEYQSQIALQEKESEIQLLKEHLCLAENKMAIQSRDVAQFRNVVTQLEADLDITKRQLGTERFERERAVQELRRQNYSSNAYHMSSTMKPNTKCHSPERAHHRSPDRGLDRSLEENLCYRDF

SEQ ID NO: 804798 - protein, 697 aa, Homo sapiens [sequence omitted]

SEQ ID NO: 804799 - protein, 697 aa, Homo sapiens [sequence omitted]

SEQ ID NO: 804800 - protein, 719 aa, Homo sapiens
  misc_feature (695)..(696): Xaa can be any naturally occurring amino acid
  misc_feature (701)..(701): Xaa can be any naturally occurring amino acid
  misc_feature (712)..(712): Xaa can be any naturally occurring amino acid
MRSRSKSPRRPSPTARGANCDVELLKTTTRDREELKCMLEKYERHLAEIQGNVKVLKSERDKIFLLYEQAQEEITRLRREMMKSCKSPKSTTAHAILRRVETERDVAFTDLRRMTTERDSLRERLKIAQETAFNEKAHLEQRIEELECTVHNLDDERMEQMSNMTLMKETISTVEKEMKSLARKAMDTESELGRQKAENNSLRLLYENTEKDLSDTQRHLAKKKYELQLTQEKIMCLDEKIDNFTRQNIAQREEISILGGTLNDLAKEKECLQACLDKKSENIASLGESLAMKEKTISGMKNIIAEMEQASRQCTEALIVCEQDVSRMRRQLDETNDELAQIARERDILAHDNDNLQEQFAKAKQENQALSKKLNDTHNELNDIKQKVQDTNLEVNKLKNILKSEESENRQMMEQLRKANEDAENWENKARQSEADNNTLKLELITAEAEGNRLKEKVDSLNREVEQHLNAERSYKSQISTLHKSVVKMEEELQKVQFEKVSALADLSSTRELCIKLDSSKELLNRQLVAKDQEIEMRENELDSAHSEIELLRSQMANERISMQNLEALLVANRDKEYQSQIALQEKESEIQLLKEHLCLAENKMAIQSRDVAQFRNVVTQLEADLDITKRQLGTERFERERAVQELRRQNYSSNAYHMSSTMKPNTKCHSPERAHHRSPDRGLDRSLEEGRKGXXNLLLXGSTNRKRENFXNLCYRDF

SEQ ID NO: 804801 - protein, 540 aa, Homo sapiens
MEQMSNMTLMKETISTVEKEMKSLARKAMDTESELGRQKAENNSLRLLYENTEKDLSDTQRHLAKKKYELQLTQEKIMCLDEKIDNFTRQNIAQREEISILGGTLNDLAKEKECLQACLDKKSENIASLGESLAMKEKTISGMKNIIAEMEQASRQCTEALIVCEQDVSRMRRQLDETNDELAQIARERDILAHDNDNLQEQFAKAKQENQALSKKLNDTHNELNDIKQKVQDTNLEVNKLKNILKSEESENRQMMEQLRKANEDAENWENKARQSEADNNTLKLELITAEAEGNRLKEKVDSLNREVEQHLNAERSYKSQISTLHKSVVKMEEELQKVQFEKVSALADLSSTRELCIKLDSSKELLNRQLVAKDQEIEMRENELDSAHSEIELLRSQMANERISMQNLEALLVANRDKEYQSQIALQEKESEIQLLKEHLCLAENKMAIQSRDVAQFRNVVTQLEADLDITKRQLGTERFERERAVQELRRQNYSSNAYHMSSTMKPNTKCHSPERAHHRSPDRGLDRSLEENLCYRDF

SEQ ID NO: 804802 - protein, 406 aa, Homo sapiens
MKEKTISGMKNIIAEMEQASRQCTEALIVCEQDVSRMRRQLDETNDELAQIARERDILAHDNDNLQEQFAKAKQENQALSKKLNDTHNELNDIKQKVQDTNLEVNKLKNILKSEESENRQMMEQLRKANEDAENWENKARQSEADNNTLKLELITAEAEGNRLKEKVDSLNREVEQHLNAERSYKSQISTLHKSVVKMEEELQKVQFEKVSALADLSSTRELCIKLDSSKELLNRQLVAKDQEIEMRENELDSAHSEIELLRSQMANERISMQNLEALLVANRDKEYQSQIALQEKESEIQLLKEHLCLAENKMAIQSRDVAQFRNVVTQLEADLDITKRQLGTERFERERAVQELRRQNYSSNAYHMSSTMKPNTKCHSPERAHHRSPDRGLDRSLEENLCYRDF

SEQ ID NO: 804803 - protein, 104 aa, Homo sapiens
MDNLSSEEIQQRAHQITDESLESTRRILGLAIESQDAGIKTITMLDEQKEQLNRIEEGLDQINKDMRETEKTLTELNKCCGLCVCPCNRRRILRRGQQDIFTEI

SEQ ID NO: 804804 - protein, 211 aa, Homo sapiens
MDNLSSEEIQQRAHQITDESLESTRRILGLAIESQDAGIKTITMLDEQKEQLNRIEEGLDQINKDMRETEKTLTELNKCCGLCVCPCNRTKNFESGKAYKTTWGDGGENSPCNVVSKQPGPVTNGQLQQPTTGAASGGYIKRITNDAREDEMEENLTQVGSILGNLKDMALNIGNEIDAQNPQIKRITDKADTNRDRIDIANARAKKLIDS

SEQ ID NO: 804805 - protein, 211 aa, Homo sapiens; identical to SEQ ID NO: 804804

SEQ ID NO: 804806 - protein, 168 aa, Homo sapiens [sequence omitted]

SEQ ID NO: 804807 - protein, 158 aa, Homo sapiens
MDNLSSEEIQQRAHQITDESLESTRRILGLAIESQDAGIKTITMLDEQKEQLNRIEEGLDQINKDMRETEKTLTELNKCCGLCVCPCNSITNDAREDEMEENLTQVGSILGNLKDMALNIGNEIDAQNPQIKRITDKADTNRDRIDIANARAKKLIDS

SEQ ID NO: 804808 - protein, 179 aa, Homo sapiens
MLDEQKEQLNRIEEGLDQINKDMRETEKTLTELNKCCGLCVCPCNRFSDVGCFYETRTKNFESGKAYKTTWGDGGENSPCNVVSKQPGPVTNGQLQQPTTGAASGGYIKRITNDAREDEMEENLTQVGSILGNLKDMALNIGNEIDAQNPQIKRITDKADTNRDRIDIANARAKKLIDS

SEQ ID NO: 804809 - protein, 222 aa, Homo sapiens
MDNLSSEEIQQRAHQITDESLESTRRILGLAIESQDAGIKTITMLDEQKEQLNRIEEGLDQINKDMRETEKTLTELNKCCGLCVCPCNRFSDVGCFYETRTKNFESGKAYKTTWGDGGENSPCNVVSKQPGPVTNGQLQQPTTGAASGGYIKRITNDAREDEMEENLTQVGSILGNLKDMALNIGNEIDAQNPQIKRITDKADTNRDRIDIANARAKKLIDS

SEQ ID NO: 804810 - protein, 189 aa, Homo sapiens
MDNLSSEEIQQRAHQITDESLESTRRILGLAIESQDAGIKTITMLDEQKEQLNRIEEGLDQINKDMRETEKTLTELNKCCGLCVCPCNRTKNFESGKAYKTTWGDGGENSPCNVVSKQPGPVTNGQLQQPTTGAASGGYIKRITNDAREDEMEENLTQVGSILGNLKDMALNIGNEIDAQNQCQSKETH

SEQ ID NO: 804811 - protein, 189 aa, Homo sapiens; identical to SEQ ID NO: 804810

SEQ ID NO: 804812 - protein, 127 aa, Homo sapiens
MDNLSSEEIQQRAHQITDESLESTRRILGLAIESQDAGIKTITMLDEQKEQLNRIEEGLDQINKDMRETEKTLTELNKCCGLCVCPCNRLTPTEIVLILPMPEQRNSLTAKATAVLLYHLFTSVAPP

SEQ ID NO: 804813 - protein, 211 aa, Homo sapiens; identical to SEQ ID NO: 804804

SEQ ID NO: 804814 - protein, 113 aa, Homo sapiens
MDNLSSEEIQQRAHQITDESLESTRRILGLAIESQDAGIKTITMLDEQKEQLNRIEEGLDQINKDMRETEKTLTELNKCCGLCVCPCNRTKNFESGKAYKTTWGDGGENSPLQ

SEQ ID NO: 804815 - protein, 198 aa, Homo sapiens [sequence omitted]

SEQ ID NO: 804816 - protein, 198 aa, Homo sapiens
MDNLSSEEIQQRAHQITDESLESTRRILGLAIESQDAGIKTITMLDEQKEQLNRIEEGLDQINKDMRETEKTLTELNKCCGLCVCPCNRTKNFESGKAYKTTWGDGGENSPCNVVSKQPGPVTNGQLQQPTTGAASGGYIKRITNDAREDEMEENLTQVGSILGNLKDMALNIGNEIDAQNRLYCPCRAKKLMAGKGS

SEQ ID NO: 804817 - protein, 126 aa, Homo sapiens
MDNLSSEEIQQRAHQITDESLESTRRILGLAIESQDAGIKTITMLDEQKEQLNRIEEGLDQINKDMRETEKTLTELNKCCGLCVCPCNSKQTDLGITEDALGKHAELKTILFQAKNFKAWTARYLH

SEQ ID NO: 804818 - protein, 248 aa, Homo sapiens
VPHLIPRSLQLPREVGSQPAAMSDINLDWVDRRQLQRLEEMLIVVDENDKVIGADTKRNCHLNENIEKGLLHRAFSVVLFNTKNRILIQQRSDTKVTFPGYFTDSCSSHPLYNPAELEEKDAIGVRRAAQRRLQAELGIPGEQISPEDIVFMTIYHHKAKSDRIWGEHEICYLLLVRKNVTLNPDPSETKSILYLSQEELWELLEREARGEVKVTPWLRTIAERFLYRWWPHLDDVTPFVELHKIHRV

SEQ ID NO: 804819 - protein, 248 aa, Homo sapiens; identical to SEQ ID NO: 804818

SEQ ID NO: 804820 - protein, 227 aa, Homo sapiens
MSDINLDWVDRRQLQRLEEMLIVVDENDKVIGADTKRNCHLNENIEKGLLHRAFSVVLFNTKNRILIQQRSDTKVTFPGYFTDSCSSHPLYNPAELEEKDAIGVRRAAQRRLQAELGIPGEQISPEDIVFMTIYHHKAKSDRIWGEHEICYLLLVRKNVTLNPDPSETKSILYLSQEELWELLEREARGEVKVTPWLRTIAERFLYRWWPHLDDVTPFVELHKIHRV

SEQ ID NO: 804821 - protein, 46 aa, Homo sapiens
LEEMLIVVDENDKVIGADTKRNCHLNENIEKGSPRPFSLSSSQGFP

SEQ ID NO: 804822 - protein, 387 aa, Homo sapiens
MKALILVGGYGTRLRPLTLSTPKPLVDFCNKPILLHQVEALAAAGVDHVILAVSYMSQVLEKEMKAQEQRLGIRISMSHEEEPLGTAGPLALARDLLSETADPFFVLNSDVICDFPFQAMVQFHRHHGQEGSILVTKVEEPSKYGVVVCEADTGRIHRFVEKPQVFVSNKINAGMYILSPAVLRRIQLQPTSIEKEVFPIMAKEGQLYAMELQGFWMDIGQPKDFLTGMCLFLQSLRQKQPERLCSGPGIVGNVLVDPSARIGQNCSIGPNVSLGPGVVVEDGVCIRRCTVLRDARIRSHSWLESCIVGWRCRVGQWVSLWAGLGGERGGECACLPDKAYPLLEVRMENVTVLGEDVIVNDELYLNGASVLPHKSIGESVPEPRIIM

SEQ ID NO: 804823 - protein, 400 aa, Homo sapiens
PEFGASSRLPGVAFCVVAALDPASGRPGGRGGARVCQAGAMKALILVGGYGTRLRPLTLSTPKPLVDFCNKPILLHQVEALAAAGVDHVILAVSYMSQVLEKEMKAQEQRLGIRISMSHEEEPLGTAGPLALARDLLSETADPFFVLNSDVICDFPFQAMVQFHRHHGQEGSILVTKVEEPSKYGVVVCEADTGRIHRFVEKPQVFVSNKINAGMYILSPAVLRRIQLQPTSIEKEVFPIMAKEGQLYAMELQGFWMDIGQPKDFLTGMCLFLQSLRQKQPERLCSGPGIVGNVLVDPSARIGQNCSIGPNVSLGPGVVVEDGVCIRRCTVLRDARIRSHSWLESCIVGWRCRVGQWVRMENVTVLGEDVIVNDELYLNGASVLPHKSIGESVPEPRIIM

SEQ ID NO: 804824 - protein, 360 aa, Homo sapiens
MKALILVGGYGTRLRPLTLSTPKPLVDFCNKPILLHQVEALAAAGVDHVILAVSYMSQVLEKEMKAQEQRLGIRISMSHEEEPLGTAGPLALARDLLSETADPFFVLNSDVICDFPFQAMVQFHRHHGQEGSILVTKVEEPSKYGVVVCEADTGRIHRFVEKPQVFVSNKINAGMYILSPAVLRRIQLQPTSIEKEVFPIMAKEGQLYAMELQGFWMDIGQPKDFLTGMCLFLQSLRQKQPERLCSGPGIVGNVLVDPSARIGQNCSIGPNVSLGPGVVVEDGVCIRRCTVLRDARIRSHSWLESCIVGWRCRVGQWVRMENVTVLGEDVIVNDELYLNGASVLPHKSIGESVPEPRIIM

SEQ ID NO: 804825 - protein, 360 aa, Homo sapiens; identical to SEQ ID NO: 804824

SEQ ID NO: 804826 - protein, 360 aa, Homo sapiens; identical to SEQ ID NO: 804824

SEQ ID NO: 804827 - protein, 360 aa, Homo sapiens; identical to SEQ ID NO: 804824

SEQ ID NO: 804828 - protein, 394 aa, Homo sapiens
GLSSGPAAVYPVSRSVLWRPWIRRQDTPSTSAGAMKALILVGGYGTRLRPLTLSTPKPLVDFCNKPILLHQVEALAAAGVDHVILAVSYMSQVLEKEMKAQEQRLGIRISMSHEEEPLGTAGPLALARDLLSETADPFFVLNSDVICDFPFQAMVQFHRHHGQEGSILVTKVEEPSKYGVVVCEADTGRIHRFVEKPQVFVSNKINAGMYILSPAVLRRIQLQPTSIEKEVFPIMAKEGQLYAMELQGFWMDIGQPKDFLTGMCLFLQSLRQKQPERLCSGPGIVGNVLVDPSARIGQNCSIGPNVSLGPGVVVEDGVCIRRCTVLRDARIRSHSWLESCIVGWRCRVGQWVRMENVTVLGEDVIVNDELYLNGASVLPHKSIGESVPEPRIIM

SEQ ID NO: 804829 - protein, 462 aa, Homo sapiens
MKALILVGGYGTRLRPLTLSTPKPLVDFCNKPILLHQVEALAAAGVDHVILAVSYMSQVLEKEMKAQEQRVRHRLLALILGPRPTSHPGENLTGGASSFQLGIRISMSHEEEPLGTAGPLALARDLLSETADPFFVLNSDVICDFPFQAMVQFHRHHGQEGSILVRRQVFSLLTLSPSMPSLPCPLAFICLRMLWIQSCAVCIFKHLGQSLLRSGTACVSRLRNTGLGPRSPSLLQVTKVEEPSKYGVVVCEADTGRIHRFVEKPQVFVSNKINAGMYILSPAVLRRIQLQPTSIEKEVFPIMAKEGQLYAMELQGFWMDIGQPKDFLTGMCLFLQSLRQKQPERLCSGPGIVGNVLVDPSARIGQNCSIGPNVSLGPGVVVEDGVCIRRCTVLRDARIRSHSWLESCIVGWRCRVGQWVRMENVTVLGEDVIVNDELYLNGASVLPHKSIGESVPEPRIIM

SEQ ID NO: 804830 - protein, 218 aa, Homo sapiens
MKRSLWGQLGPWRWPVTYSLRLQTLSSSSTAGMYILSPAVLRRIQLQPTSIEKEVFPIMAKEGQLYAMELQGFWMDIGQPKDFLTGMCLFLQSLRQKQPERLCSGPGIVGNVLVDPSARIGQNCSIGPNVSLGPGVVVEDGVCIRRCTVLRDARIRSHSWLESCIVGWRCRVGQWVRMENVTVLGEDVIVNDELYLNGASVLPHKSIGESVPEPRIIM

SEQ ID NO: 804831 - protein, 198 aa, Homo sapiens
TPRGFPGKAPTTQALPSEPCSAAAHLQPTSIEKEVFPIMAKEGQLYAMELQGFWMDIGQPKDFLTGMCLFLQSLRQKQPERLCSGPGIVGNVLVDPSARIGQNCSIGPNVSLGPGVVVEDGVCIRRCTVLRDARIRSHSWLESCIVGWRCRVGQWVRMENVTVLGEDVIVNDELYLNGASVLPHKSIGESVPEPRIIM

SEQ ID NO: 804832 - protein, 132 aa, Homo sapiens
MMSSTSTEPACCPTSLLASQCQSLVSSCEGMQWGWPSPGFPISKGSAGLTHQKTLDLSLFVWGALGEAEAVGHLPSHVDIIWQDPCWAHPTNPTPSRRARARAVWNNNLMLTVALTESQAQAQLGPWLGSHQ

SEQ ID NO: 804833 - protein, 295 aa, Homo sapiens
MKALILVGGYGTRLRPLTLSTPKPLVDFCNKPILLHQVEALAAAGVDHVILAVSYMSQVLEKEMKAQEQRLGIRISMSHEEEPLGTAGPLALARDLLSETADPFFVLNSDVICDFPFQAMVQFHRHHGQEGSILVTKVEEPSKYGVVVCEADTGRIHRFVEKPQVFVSNKINAGMYILSPAVLRRIQLQPTSIEKEVFPIMAKEGQLYAMELQGFWMDIGQPKDFLTGMCLFLQSLRQKQPERLCSGPGIVGNVLVDPSARIGQNCSIGPNVSRNGNGSGHPAAPCTAGYTHHLR

SEQ ID NO: 804834 - protein, 132 aa, Homo sapiens; identical to SEQ ID NO: 804832

SEQ ID NO: 804835 - protein, 61 aa, Homo sapiens
LVDSRGSLGNTQRKLGEQSIPGGDREGRWSSRGTDRGENWCNTASQGWGDQSFTTEKTVKK

SEQ ID NO: 804836 - protein, 177 aa, Homo sapiens
LDRMVPISKQPKEKIQAIIESCSRQFPEFQERARKRIRTYLKSCRRMKKNGMEMTRPTPPHLTSAMAENILAAACESETRKAAKRMRLEIYQSSQDEPIALDKQHSRDSAAITHSTYSLPASSYSQDPVYANGGLNYSYRGYGALSSNLQPPASLQTGNHSNGPTDLSMKGGASTTS

SEQ ID NO: 804837 - protein, 100 aa, Homo sapiens
RTSAPKARSRAVSSGVRPPRSPAVYTGPAGSQSRSAPASVPDGASMPGSACSRRSQRSCSPSSSAYGTRPRRTSRTAGCRIVPTVASAGPRPLRGPGGVA

SEQ ID NO: 804838 - protein, 1432 aa, Homo sapiens
MSEKKLETTAQQRKCPEWMNVQNKRCAVEERKACVRKSVFEDDLPFLEFTGSIVYSYDASDCSFLSEDISMSLSDGDVVGFDMEWPPLYNRGKLGKVALIQLCVSESKCYLFHVSSMSVFPQGLKMLLENKAVKKAGVGIEGDQWKLLRDFDIKLKNFVELTDVANKKLKCTETWSLNSLVKHLLGKQLLKDKSIRCSNWSKFPLTEDQKLYAATDAYAGFIIYRNLEILDDTVQRFAINKEEEILLSDMNKQLTSISEEVMDLAKHLPHAFSKLENPRRVSILLKDISENLYSLRRMIIGSTNIETELRPSNNLNLLSFEDSTTGGVQQKQIREHEVLIHVEDETWDPTLDHLAKHDGEDVLGNKVERKEDGFEDGVEDNKLKENMERACLMSLDITEHELQILEQQSQEEYLSDIAYKSTEHLSPNDNENDTSYVIESDEDLEMEMLKHLSPNDNENDTSYVIESDEDLEMEMLKSLENLNSGTVEPTHSKCLKMERNLGLPTKEEEEDDENEANEGEEDDDKDFLWPAPNEEQVTCLKMYFGHSSFKPVQWKVIHSVLEERRDNVAVMATGYGKSLCFQYPPVYVGKIGLVISPLISLMEDQVLQLKMSNIPACFLGSAQSENVLTDIKLGKYRIVYVTPEYCSGNMGLLQQLEADIGITLIAVDEAHCISEWGHDFRDSFRKLGSLKTALPMVPIVALTATASSSIREDIVRCLNLRNPQITCTGFDRPNLYLEVRRKTGNILQDLQPFLVKTSSHWEFEGPTIIYCPSRKMTQQVTGELRKLNLSCGTYHAGMSFSTRKDIHHRFVRDEIQCVIATIAFGMGINKADIRQVIHYGAPKDMESYYQEIGRAGRDGLQSSCHVLWAPADINLNRHLLTEIRNEKFRLYKLKMMAKMEKYLHSSRCRRQIILSHFEDKQVQKASLGIMGTEKCCDNCRSRLDHCYSMDDSEDTSWDFGPQAFKLLSAVDILGEKFGIGLPILFLRGSNSQRLADQYRRHSLFGTGKDQTESWWKAFSRQLITEGFLVEVSRYNKFMKICALTKKGRNWLHKANTESQSLILQANEELCPKKFLLPSSKTVSSGTKEHCYNQVPVELSTEKKSNLEKLYSYKPCDKISSGSNISKKSIMVQSPEKAYSSSQPVISAQEQETQIVLYGKLVEARQKHANKMDVPPAILATNKILVDMAKMRPTTVENVKRIDGVSEGKAAMLAPLLEVIKHFCQTNSVQTDLFSSTKPQEEQKTSLVAKNKICTLSQSMAITYSLFQEKKMPLKSIAESRILPLMTIGMHLSQAVKAGCPLDLERAGLTPEVQKIIADVIRNPPVNSDMSKISLIRMLVPENIDTYLIHMAIEILKHGPDSGLQPSCDVNKRRCFPGSEEICSSSKRSKEEVGINTETSSAERKRRLPVWFAKGSDTSKKLMDKTKRGGLFS

SEQ ID NO: 804839 - protein, 1432 aa, Homo sapiens; identical to SEQ ID NO: 804838

SEQ ID NO: 804840 - protein, 1337 aa, Homo sapiens
MSEKKLETTAQQRKCPEWMNVQNKRCAVEERKACVRKSVFEDDLPFLEFTGSIVYSYDASDCSFLSEDISMSLSDGDVVGFDMEWPPLYNRGKLGKVALIQLCVSESKCYLFHVSSMSVFPQGLKMLLENKAVKKAGVGIEGDQWKLLRDFDIKLKNFVELTDVANKKLKCTETWSLNSLVKHLLGKQLLKDKSIRCSNWSKFPLTEDQKLYAATDAYAGFIIYRNLEILDDTVQRFAINKEEEILLSDMNKQLTSISEEVMDLAKHLPHAFSKLENPRRVSILLKDISENLYSLRRMIIGSTNIETELRPSNNLNLLSFEDSTTGGVQQKQIREHEVLIHVEDETWDPTLDHLAKHDGEDVLGNKVERKEDGFEDGVEDNKLKENMERACLMSLDITEHELQILEQQSQEEYLSDIAYKSTEHLSPNDNENDTSYVIESDEDLEMEMLKHLSPNDNENDTSYVIESDEDLEMEMLKSLENLNSGTVEPTHSKCLKMERNLGLPTKEEEEDDENEANEGEEDDDKDFLWPAPNEEQVTCLKMYFGHSSFKPVQWKVIHSVLEERRDNVAVMATGYGKSLCFQYPPVYVGKIGLVISPLISLMEDQVLQLKMSNIPACFLGSAQSENVLTDIKLGKYRIVYVTPEYCSGNMGLLQQLEADIGITLIAVDEAHCISEWGHDFRDSFRKLGSLKTALPMVPIVALTATASSSIREDIVRCLNLRNPQITCTGFDRPNLYLEVRRKTGNILQDLQPFLVKTSSHWEFEGPTIIYCPSRKMTQQVTGELRKLNLSCGTYHAGMSFSTRKDIHHRFVRDEIQCVIATIAFGMGINKADIRQVIHYGAPKDMESYYQEIGRAGRDGLQSSCHVLWAPADINLNRHLLTEIRNEKFRLYKLKMMAKMEKYLHSSRCRRQIILSHFEDKQVQKASLGIMGTEKCCDNCRSRLDHCYSMDDSEDTSWDFGPQAFKLLSAVDILGEKFGIGLPILFLRGSNSQRLADQYRRHSLFGTGKDQTESWWKAFSRQLITEGFLVEVSRYNKFMKICALTKKGRNWLHKANTESQSLILQANEELCPKKFLLPSSKTVSSGTKEHCYNQVPVELSTEKKSNLEKLYSYKPCDKISSGSNISKKSIMVQSPEKAYSSSQPVISAQEQETQIVLYGKLVEARQKHANKMDVPPAILATNKILVDMAKMRPTTVENVKRIDGVSEGKAAMLAPLLEVIKHFCQTNSVQTDLFSSTKPQEEQKTSLVAKNKICTLSQSMAITYSLFQEKKMPLKSIAESRILPLMTIGMHLSQAVKAGCPLDLERAGLTPEVQKIIADVIRNPPVNSGERHGLALHP

SEQ ID NO: 804841 - protein, 177 aa, Homo sapiens
SVRRVLRYADSFDTLDSAHLGRISMSINMRDIVVIALLAILRTLIDILICCSCEPVSIVASTCLLSHILRLHVKLQAPPSITHKCCRWLASTLGRRFLQTSCTGKHLSLPNYCRLASTSPFRIAPGGMGWLIPNSSSWACCLLRATWKHTTMSHPPALQNQLCQNTEAPPIPDTMIH

SEQ ID NO: 804842 - protein, 230 aa, Homo sapiens
RQPAVRLVRLGRVPYAELLGLQDRWLRRLQAEPGIEAPSGTEAGALLLCEPAGPVYTAGLRGGLTPEETARLRALGAEVRVTGRGGLATFHGPGQLLCHPVLDLRRLGLRLRMHVASLEACAVRLCELQGLQDARARPPPYTGVWLDDRKICAIGVRCGRHITSHGLALNCSTDLTWFEHIVPCGLVGSGVTSLSKELQRHVTVEEVMPPFLVAFKEIYKCTLISEDSPN

SEQ ID NO: 804843 - protein, 206 aa, Homo sapiens
RQPAVRLVRLGRVPYAELLGLQDRWLRRLQAEPGIEAPSGTEAGALLLCEPAGPVYTAGLRGGLTPEETARLRALGAEVRVTGRGGLATFHGPGQLLCHPVLDLRRLGLRLRMHVASLEACAVRLCELQGLQDARARPPPYTGVWLDDRKICAIGERRGAGRYLRAEESAVEGTSHPTAWLSTALPTSRGLSTSCPVDWLGQASLP

SEQ ID NO: 804844 - protein, 170 aa, Homo sapiens
RQPAVRLVRLGRVPYAELLGLQDRWLRRLQAEPGIEAPSGTEAGALLLCEPAGPVYTAGLRGGLTPEETARLRALGAEVRVTGRGGLATFHGPGQLLCHPVLDLRRLGLRLRMHVASLEACAVRLCELQGLQDARARPPPYTGVWLDDRKICAIGERRGAGRYLRAEVGA

SEQ ID NO: 804845 - protein, 925 aa, Homo sapiens
MKGKERSPVKAKRSRGGEDSTSRGERSKKLGGSGGSNGSSSGKTDSGGGSRRSLLLDKSSSRGGSREYDTGGGSSSSRLHSYSSPSTKNSSGGGESRSSSRGGGGESRSSGAASSAPGGGDGAEYKTLKISELGSQLSDEAVEDGLFHEFKRFGDVSVKISHLSGSGSGDERVAFVNFRRPEDARAAKHARGRLVLYDRPLKIEAVYVSRRRSRSPLDKDTYPPSASVVGASVGGHRHPPGGGGGQRSLSPGGAALGYRDYRLQQLALGRLPPPPPPPLPRDLERERDYPFYERVRPAYSLEPRVGAGAGAAPFREVDEISPEDDQRANRTLFLGNLDITVTESDLRRAFDRFGVITEVDIKRPSRGQTSTYGFLKFENLDMSHRAKLAMSGKIIIRNPIKIGYGKATPTTRLWVGGLGPWVPLAALAREFDRFGTIRTIDYRKGDSWAYIQYESLDAAHAAWTHMRGFPLGGPDRRLRVDFADTEHRYQQQYLQPLPLTHYELVTDAFGHRAPDPLRGARDRTPPLLYRDRDRDLYPDSDWVPPPPPVRERSTRTAATSVPAYEPLDSLDRRRDGWSLDRDRGDRDLPSSRDQPRKRRLPEESGGRHLDRSPESDRPRKRHCAPSPDRSPELSSSRDRYNSDNDRSSRLLLERPSPIRDGRGSLEKSQGDKRDRKNSASAERDRKHRTTAPTEGKSPLKKEDRSDGSAPSTSTASSKLKSPSQKQDGGTAPVASASPKLCLAWQGMLLLKNSNFPSNMHLLQGDLQVASSLLVEGSTGGKVAQLKITQRLRLDQPKLDEVTRRIKVAGPNGYAILLAVPGSSDSRSSSSSAASDTATSTQRPLRNLVSYLKQKQAAGVISLPVGGNKDKENTGVLHAFPPCEFSQQFLDSPAKALAKSEEDYLVMIIVRAKLVEQRMKIWNSKL

SEQ ID NO: 804846 - protein, 933 aa, Homo sapiens
MKGKERSPVKAKRSRGGEDSTSRGERSKKLGGSGGSNGSSSGKTDSGGGSRRSLLLDKSSSRGGSREYDTGGGSSSSRLHSYSSPSTKNSSGGGESRSSSRGGGGESRSSGAASSAPGGGDGAEYKTLKISELGSQLSDEAVEDGLFHEFKRFGDVSVKISHLSGSGSGDERVAFVNFRRPEDARAAKHARGRLVLYDRPLKIEAVYVSRRRSRSPLDKDTYPPSASVVGASVGGHRHPPGGGGGQRSLSPGGAALGYRDYRLQQLALGRLPPPPPPPLPRDLERERDYPFYERVRPAYSLEPRVGAGAGAAPFREVDEISPEDDQRANRTLFLGNLDITVTESDLRRAFDRFGVITEVDIKRPSRGQTSTYGFLKFENLDMSHRAKLAMSGKIIIRNPIKIGYGKATPTTRLWVGGLGPWVPLAALAREFDRFGTIRTIDYRKGDSWAYIQYESLDAAHAAWTHMRGFPLGGPDRRLRVDFADTEHRYQQQYLQPLPLTHYELVTDAFGHRAPDPLRGARDRTPPLLYRDRDRDLYPDSDWVPPPPPVRERSTRTAATSVPAYEPLDSLDRRRDGWSLDRDRGDRDLPSSRDQPRKRRLPEESGGRHLDRSPESDRPRKRHCAPSPDRSPELSSSRDRYNSDNDRSSRLLLERPSPIRDGRGSLEKSQGDKRDRKNSASAERDRKHRTTAPTEGKSPLKKEDRSDGSAPSTSTASSKLKSPSQKQDGGTAPVASASPKLCLAWQGMLLLKNSNFPSNMHLLQGDLQVASSLLVEGSTGGKVAQLKITQRLRLDQPKLDEVTRRIKVAGPNGYAILLAVPGSSDSRSSSSSAASDTATSTQRPLRNLVSYLKQKQAAGVISLPVGGNKDKENTGVLHAFPPCEFSQQFLDSPAKALAKSEEDYLVMIIVRGFGFQIGVRYENKKRENLALTLL

SEQ ID NO: 804847 - protein, 913 aa, Homo sapiens
MKGKERSPVKAKRSRGGEDSTSRGERSKKLGGSGGSNGSSSGKTDSGGGSRRSLLLDKSSSRGGSREYDTGGGSSSSRLHSYSSPSTKNSSGGGESRSSSRGGGGESRSSGAASSAPGGGDGAEYKTLKISELGSQLSDEAVEDGLFHEFKRFGDVSVKISHLSGSGSGDERVAFVNFRRPEDARAAKHARGRLVLYDRPLKIEAVYVSRRRSRSPLDKDTYPPSASVVGASVGGHRHPPGGGGGQRSLSPGGAALGYRDYRLQQLALGRLPPPPPPPLPRDLERERDYPFYERVRPAYSLEPRVGAGAGAAPFREVDEISPEDDQRANRTLFLGNLDITVTESDLRRAFDRFGVITEVDIKRPSRGQTSTYGFLKFENLDMSHRAKLAMSGKIIIRNPIKIGYGKATPTTRLWVGGLGPWVPLAALAREFDRFGTIRTIDYRKGDSWAYIQYESLDAAHAAWTHMRGFPLGGPDRRLRVDFADTEHRYQQQYLQPLPLTHYELVTDAFGHRAPDPLRGARDRTPPLLYRDRDRDLYPDSDWVPPPPPVRERSTRTAATSVPAYEPLDSLDRRRDGWSLDRDRGDRDLPSSRDQPRKRRLPEESGGRHLDRSPESDRPRKRHCAPSPDRSPELSSSRDRYNSDNDRSSRLLLERPSPIRDGRGSLEKSQGDKRDRKNSASAERDRKHRTTAPTEGKSPLKKEDRSDGSAPSTSTASSKLKSPSQKQDGGTAPVASASPKLCLAWQGMLLLKNSNFPSNMHLLQGDLQVASSLLVEGSTGGKVAQLKITQRLRLDQPKLDEVTRRIKVAGPNGYAILLAVPGSSDSRSSSSSAASDTATSTQRPLRNLVSYLKQKQAAGVISLPVGGNKDKENTGVLHAFPPCEFSQQFLDSPAKALAKSEEDYLVMIIVRGAS

SEQ ID NO: 804848 - protein, 413 aa, Homo sapiens
MKGKERSPVKAKRSRGGEDSTSRGERSKKLGGSGGSNGSSSGKTDSGGGSRRSLLLDKSSSRGGSREYDTGGGSSSSRLHSYSSPSTKNSSGGGESRSSSRGGGGESRSSGAASSAPGGGDGAEYKTLKISELGSQLSDEAVEDGLFHEFKRFGDVSVKISHLSGSGSGDERVAFVNFRRPEDARAAKHARGRLVLYDRPLKIEAVYVSRRRSRSPLDKDTYPPSASVVGASVGGHRHPPGGGGGQRSLSPGGAALGYRDYRLQQLALGRLPPPPPPPLPRDLERERDYPFYERVRPAYSLEPRVGAGAGAAPFREVDEISPEDDQRANRTLFLGNLDITVTESDLRRAFDRFGVITEVDIKRPSRGQTSTYGFLKFENLDMSHRAKLAMSGKIIIRNPIKIGYGKQQPYSFL

SEQ ID NO: 804849 - protein, 925 aa, Homo sapiens; identical to SEQ ID NO: 804845

SEQ ID NO: 804850 - protein, 933 aa, Homo sapiens; identical to SEQ ID NO: 804846

SEQ ID NO: 804851 - protein, 933 aa, Homo sapiens; identical to SEQ ID NO: 804846

SEQ ID NO: 804852 - protein, 242 aa, Homo sapiens
MNLHQVLTGAVNPGDHCFSVGSIGDQRFTAYASGCDIVILGSDFERLQIIPGAKHGNIQVGCVDCSMQQGKIAASYGNVISIFEPVNLPKQKKNLELYSQWQKSGQFFLESIAHNITWDPTGSRLLTGSSYLQLWSNTNLEKPTEDENLNKTDLIFGDWKCIWHCKTASQVHLMKFSPDGEFFATAGKDDCLLTVRYNVENWRTAVTSPDGSSEKQSQGDIDFSFVYLAHPRAVNGFSWRKT

SEQ ID NO: 804853 - protein, 242 aa, Homo sapiens; identical to SEQ ID NO: 804852

SEQ ID NO: 804854 - protein, 70 aa, Homo sapiens
GVGPAAQGKPRLSDPATGNGAPFGEEPQPGVGTHRLSDSSNTDRSSRAEGISFRRSHYSPRPLIATKPSC

SEQ ID NO: 804855 - protein, 297 aa, Homo sapiens
RRQDLEAQIRGLREEVEKGEGRLQTTHEELLLLRRERREHSLELERARSEAGEALSALRRLQRRVSELEEESRLQDADVSAASLQSELAHSLDDGDQGQGADAPGDTPTTRSPKTRKASSPQPSPPEEILEPPKKRTSLSPAEILEEKEVEVAKLQDEISLQQAELQSLREELQRQKELRAQEDPGEALHSALSDRDEAVNKALELSLQLNRVSLERDSLSRELLRAIRQKVALTQELEAWQDDMQVVIGQQLRSQRQKELSASASSSTPRRAAPRFSLRLGPGPAGGFLSNLFRRT

SEQ ID NO: 804856 - protein, 342 aa, Homo sapiens
QLLNEEVDWAGEEMGLFEVRPCSIGEETVYIRWGRCTAQGAQRSRNGNSLGRWGAGLSAAPPCGPAAGCRRCVRPADRPRFRLRDRPQLERARSEAGEALSALRRLQRRVSELEEESRLQDADVSAASLQSELAHSLDDGDQGQGADAPGDTPTTRSPKTRKASSPQPSPPEEILEPPKKRTSLSPAEILEEKEVEVAKLQDEISLQQAELQSLREELQRQKELRAQEDPGEALHSALSDRDEAVNKALELSLQLNRVSLERDSLSRELLRAIRQKVALTQELEAWQDDMQVVIGQQLRSQRQKELSASASSSTPRRAAPRFSLRLGPGPAGGFLSNLFRRT

SEQ ID NO: 804857 - protein, 140 aa, Homo sapiens
ELLQVGVDSPAAGTRHNSAGPAHLHRALSTASSMQRLPAATRATLILSLAFASLHSACSAEASSSNSSSLTAHHPDPGTLEQCLNVDFCPQAARCCRTGVDEYGWIAAAVGWSLWFLTLILLCVDKLMKLTPDEPKDLQA

SEQ ID NO: 804858 - protein, 586 aa, Homo sapiens
AAAEARPIAAPRSERLSACAIAPPWLVSSRPARPAQLQRPGKMVEDGAEELEDLVHFSVSELPSRGYGVMEEIRRQGKLCDVTLKIGDHKFSAHRIVLAASIPYFHAMFTNDMMECKQDEIVMQGMDPSALEALINFAYNGNLAIDQQNVQSLLMGASFLQLQSIKDACCTFLREGFTQKNCLGVRQFAETMMCAVLYDAANSFIHQHFVEVSMSEEFLALPLEDVLELVSRDELNVKSEEQVFEAALAWVRYDREQRGPYLPELLSNIRLPLCRPQFLSDRVQQDDLVRCCHKCRDLVDEAKDYHLMPERRPHLPAFRTRPRCCTSIAGLIYAVGGLNSAGDSLNVVEVFDPIANCWERCRPMTTARSRVGVAVVNGLLYAIGGYDGQLRLSTVEAYNPETDTWTRVGSMNSKRSAMGTVVLDGQIYVCGGYDGNSSLSSVETYSPETDKWTVVTSMSSNRSAAGVTVFEGRIYVSGGHDGLQIFSSVEHYNHHTATWHPAAGMLNKRCRHGAASLGSKMFVCGGYDGSGFLSIAEMYSSVADQWCLIVPMHTRRSRVSLGGQLWAPLRCWGLRRTVKPKLSGDV

SEQ ID NO: 804859 - protein, 581 aa, Homo sapiens
MSRGSEKTIREWYFTGGPPWLVSSRPARPAQLQRPGKMVEDGAEELEDLVHFSVSELPSRGYGVMEEIRRQGKLCDVTLKIGDHKFSAHRIVLAASIPYFHAMFTNDMMECKQDEIVMQGMDPSALEALINFAYNGNLAIDQQNVQSLLMGASFLQLQSIKDACCTFLRERLHPKNCLGVRQFAETMMCAVLYDAANSFIHQHFVEVSMSEEFLALPLEDVLELVSRDELNVKSEEQVFEAALAWVRYDREQRGPYLPELLSNIRLPLCRPQFLSDRVQQDDLVRCCHKCRDLVDEAKDYHLMPERRPHLPAFRTRPRCCTSIAGLIYAVGGLNSAGDSLNVVEVFDPIANCWERCRPMTTARSRVGVAVVNGLLYAIGGYDGQLRLSTVEAYNPETDTWTRVGSMNSKRSAMGTVVLDGQIYVCGGYDGNSSLSSVETYSPETDKWTVVTSMSSNRSAAGVTVFEGRIYVSGGHDGLQIFSSVEHYNHHTATWHPAAGMLNKRCRHGAASLGSKMFVCGGYDGSGFLSIAEMYSSVADQWCLIVPMHTRRSRVSLGGQLWAPLRCWGLRRTVKPKLSGDV

SEQ ID NO: 804860 - protein, 468 aa, Homo sapiens
MRLHDRYTVPSALEALINFAYNGNLAIDQQNVQSLLMGASFLQLQSIKDACCTFLRERLHPKNCLGVRQFAETMMCAVLYDAANSFIHQHFVEVSMSEEFLALPLEDVLELVSRDELNVKSEEQVFEAALAWVRYDREQRGPYLPELLSNIRLPLCRPQFLSDRVQQDDLVRCCHKCRDLVDEAKDYHLMPERRPHLPAFRTRPRCCTSIAGLIYAVGGLNSAGDSLNVVEVFDPIANCWERCRPMTTARSRVGVAVVNGLLYAIGGYDGQLRLSTVEAYNPETDTWTRVGSMNSKRSAMGTVVLDGQIYVCGGYDGNSSLSSVETYSPETDKWTVVTSMSSNRSAAGVTVFEGRIYVSGGHDGLQIFSSVEHYNHHTATWHPAAGMLNKRCRHGAASLGSKMFVCGGYDGSGFLSIAEMYSSVADQWCLIVPMHTRRSRVSLGGQLWAPLRCWGLRRTVKPKLSGDV

SEQ ID NO: 804861 - protein, 320 aa, Homo sapiens
  misc_feature (10)..(10): Xaa can be any naturally occurring amino acid
LGTRLGLNRXRFLSDRVQQDDLVRCCHKCRDLVDEAKDYHLMPERRPHLPAFRTRPRCCTSIAGLIYAVGGLNSAGDSLNVVEVFDPIANCWERCRPMTTARSRVGVAVVNGLLYAIGGYDGQLRLSTVEAYNPETDTWTRVGSMNSKRSAMGTVVLDGQIYVCGGYDGNSSLSSVETYSPETDKWTVVTSMSSNRSAAGVTVFEGRIYVSGGHDGLQIFSSVEHYNHHTATWHPAAGMLNKRCRHGAASLGSKMFVCGGYDGSGFLSIAEMYSSVADQWCLIVPMHTRRSRVSLGGQLWAPLRCWGLRRTVKPKLSGDV

SEQ ID NO: 804862 - protein, 109 aa, Homo sapiens
MELFSGPHEHRLHPGPAPTHRLSVGQLFTEGLPSDAPHRLLALQPSLANLPWGGCSVQACWKLGCSWGRKDRPKRSPCLRWCGHSSGRLHTGTFLLPQWGTKDSVLIAG

SEQ ID NO: 804863 - protein, 428 aa, Homo sapiens
AAAEARPIAAPRSERLSACAIAPPWLVSSRPARPAQLQRPGKMVEDGAEELEDLVHFSVSELPSRGYGVMEEIRRQGKLCDVTLKIGDHKFSAHRIVLAASIPYFHAMFTNDMMECKQDEIVMQGMDPSALEALINFAYNGNLAIDQQNVQSLLMGASFLQLQSIKDACCTFLREGFTQKNCLGVRQFAETMMCAVLYDAANSFIHQHFVEVSMSEEFLALPLEDVLELVSRDELNVKSEEQVFEAALAWVRYDREQRGPYLPELLSNIRLPLCRPQFLSDRVQQDDLVRCCHKCRDLVDEAKDYHLMPERRPHLPAFRTRPRCCTSIAGLIYAVGGLNSAGDSLNVVEVFDPIANCWERCRPMTTARSRVGVAVVNGLLYAIGGYDGQLRLSTVEAYNPETDTWTRVGSMNSKRRYSGSHVQPEHTH

SEQ ID NO: 804864 - protein, 637 aa, Homo sapiens
AAAEARPIAAPRSERLSACAIAPPWLVSSRPARPAQLQRPGKMVEDGAEELEDLVHFSVSELPSRGYGVMEEIRRQGKLCDVTLKIGDHKFSAHRIVLAASIPYFHAMFTNDMMECKQDEIVMQGMDPSALEALINFAYNGNLAIDQQNVQSLLMGASFLQLQSIKDACCTFLREGFTQKNCLGVRQFAETMMCAVLYDAANSFIHQHFVEVSMSEEFLALPLEDVLELVSRDELNVKSEEQVFEAALAWVRYDREQRGPYLPELLSNIRLPLCRPQFLSDRVQQDDLVRCCHKCRDLVDEAKDYHLMPERRPHLPAFRTRPRCCTSIAGLIYAVGGLNSAGDSLNVVEVFDPIANCWERCRPMTTARSRVGVAVVNGLLYAIGGYDGQLRLSTVEAYNPETDTWTRVGSMNSKRSAMGTVVLDGQIYVCGGYDGNSSLSSVETYSPETDKWTVVTSMSSNRSAAGVTVFEGRIYVSGGHDGLQIFSSVEQLKQHTALEPEVGNCPKGLAETEPASLGEQECSALGGYKRTRVPPELRKCHVLGNPLCLLCPMVQAKETGIPGGTHERPKRRGGTKERTTHHHREPVAPRRNSGENKSTKQRTQKTTTGRNNPTKKKERRRASKDKTEQRTHTRKEA

SEQ ID NO: 804865 - protein, 187 aa, Homo sapiens
MEHAATTGPRPGPPSRRVENVVLRAKDWLPGAPGGTAVWATSLEAEVPPDLALNKEQQLQISKELVDIQITTHHLHEQHEAEIFQLKSEILRLESRVLELELRGDGTSQGCAVPVESDPRHPRAAAQELRHKAQVPGHSDDHRFQVQPKNTMNPENEQHRLGSGLQGEVKWALEHQEARQQALVTRV

SEQ ID NO: 804866 - protein, 252 aa, Homo sapiens
MEHAATTGPRPGPPSRRVENVVLRAKDWLPGAPGGTAVWATSLEAEVPPDLALNKEQQLQISKELVDIQITTHHLHEQHEAEIFQLKSEILRLESRVLELELRGDGTSQGCAVPVESDPRHPRAAAQELRHKAQVPGHSDDHRFQVQPKNTMNPENEQHRLGSGLQGEVKWALEHQEARQQALVTRVATLGRQLQGAREEARAAGQRLATQAVVLCSCQGQLRQAEAENARLQLQLKKLKDEYVLRLQHCAW

SEQ ID NO: 804867 - protein, 223 aa, Homo sapiens
AGGARARWGATRTLRPRRARRWHLLQEALPTPRLSQSFPSSPAPDGDVCAPLLRPEVVLRAKDWLPGAPGGTAVWATSLEAEVPPDLALNKEQQLQISKELVDIQITTHHLHEQHEAEIFQLKSEILRLESRVLELELRGDGTSQGCAVPVESDPRHPRAAAQELRHKAQVPGHSDDHRFQVQPKNTMNPENEQHRLGSGLQGEVKWALEHQEARQQALVTRV

SEQ ID NO: 804868 - protein, 119 aa, Homo sapiens
ENEQHRLGSGVSVQPPSSGERAAPETPSLGSHPASPVCPTAAGGSEVGAGASGGPAAGTGDACVSGHLTWGPILEQREPLIVGLLSLTPVSSGQPWAGSCREPERRPGQPGSDWPHRLW

SEQ ID NO: 804869 - protein, 501 aa, Homo sapiens
KRKSDRVGGSLSKLEDRQAAAATTAAAAEPSSDVEVETHRSPGLHLSYLSGHQEWQDKENPELGGTRMPDRDSYANGTGSSGGGPGGGGSEEASGAGVGSGGASSDAICRDFLRNVCKRGKRCRYRHPDMSEVSNLGVSKNEFIFCHDFQNKECSRPNCRFIHGSKEDEDGYKKTGELPPRLRQKVAAGLGLSPADLPNGKEEVPICRDFLKGDCQRGAKCKFRHLQRDFEFDARGGGGTGGGSTGSVLPGRRHDLYDIYDLPDRGFEDHEPGPKRRRGGCCPPDGPHFESYEYSLAPPRGVECRLLEEENAMLRKRVEELKKQVSNLLATNEVLLEQNAQFRNQAKVITLSSTAPATEQTLAPTVGTVATFNHGIAQTHTTLSSQALQPRPVSQQELVAPAGAPAAPPTNAAPPAAPPPPPPHLTPEITPLSAALAQTIAQGMAPPPVSMAPVAVSVAPVAPVAVSMAQPLAGITMSHTTTPMVTYPIASQSMRITAMPH

SEQ ID NO: 804870 - protein, 434 aa, Homo sapiens
MPDRDSYANGTGSSGGGPGGGGSEEASGAGVGSGGASSDAICRDFLRNVCKRGKRCRYRHPDMSEVSNLGVSKNEFIFCHDFQNKECSRPNCRFIHGSKEDEDGYKKTGELPPRLRQKVAAGLGLSPADLPNGKEEVPICRDFLKGDCQRGAKCKFRHLQRDFEFDARGGGGTGGGSTGSVLPGRRHDLYDIYDLPDRGFEDHEPGPKRRRGGCCPPDGPHFESYEYSLAPPRGVECRLLEEENAMLRKRVEELKKQVSNLLATNEVLLEQNAQFRNQAKVITLSSTAPATEQTLAPTVGTVATFNHGIAQTHTTLSSQALQPRPVSQQELVAPAGAPAAPPTNAAPPAAPPPPPPHLTPEITPLSAALAQTIAQGMAPPPVSMAPVAVSVAPVAPVAVSMAQPLAGITMSHTTTPMVTYPIASQSMRITAMPH

SEQ ID NO: 804871 - protein, 314 aa, Homo sapiens
KRKSDRVGGSLSKLEDRQAAAATTAAAAEPSSDVEVETHRSPGLHLSYLSGHQEWQDKENPELGGTRMPDRDSYANGTGSSGGGPGGGGSEEASGAGVGSGGASSDAICRDFLRNVAELLEEENAMLRKRVEELKKQVSNLLATNEVLLEQNAQFRNQAKVITLSSTAPATEQTLAPTVGTVATFNHGIAQTHTTLSSQALQPRPVSQQELVAPAGAPAAPPTNAAPPAAPPPPPPHLTPEITPLSAALAQTIAQGMAPPPVSMAPVAVSVAPVAPVAVSMAQPLAGITMSHTTTPMVTYPIASQSMRITAMPH

SEQ ID NO: 804872 - protein, 378 aa, Homo sapiens
KRKSDRVGGSLSKLEDRQAAAATTAAAAEPSSDVEVETHRSPGLHLSYLSGHQEWQDKENPELGGTRMPDRDSYANGTGSSGGGPGGGGSEEASGAGVGSGGASSDAICRDFLRNVCKRGKRCRYRHPDMSEVSNLGVSKNEFIFCHDFQNKECSRPNCRFIHGSKEDEDGYKKTGELPPRLRQKVAAGLGLSPADLPNGKEEVPICRDFLKGDCQRGAKCKFRHLQRDFEFDARGGGGTGGGSTGSVLPGRRHDLYDIYDLPDRGFEDHEPGPKRRRGGCCPPDGPHFESYEYSLAPPRGVECRLLEEENAMLRKRVEELKKQVSNLLATNEVLLEQNAQFRNQAKVITLSSTAPATEQTLAPTVGSIHLELVCQPR

SEQ ID NO: 804873 - protein, 2224 aa, Homo sapiens
MQPGSAPPPGRMDPSAPQPRAETSGKDIWHPGERCLAPSPDNGKLCEASIKSITVDENGKSFAVVLYADFQERKIPLKQLQEVKFVKDCPRNLIFDDEDLEKPYFPNRKFPSSSVAFKLSDNGDSIPYTINRYLRDYQREGTRFLYGHYIHGGGCILGDDMGLGKTVQVISFLAAVLHKKGTREDIENNMPEFLLRSMKKEPLSSTAKKMFLIVAPLSVLYNWKDELDTWGYFRVTVLHGNRKDNELIRVKQRKCEIALTTYETLRLCLDELNSLEWSAVIVDEAHRIKNPKARVTEVMKALKCNVRIGLTGTILQNNMKELWCVMDWAVPGLLGSGTYFKKQFSDPVEHGQRHTATKRELATGRKAMQRLAKKMSGWFLRRTKTLIKDQLPKKEDRMVYCSLTDFQKAVYQTVLETEDVTLILQSSEPCTCRSGQKRRNCCYKTNSHGETVKTLYLSYLTVLQKVANHVALLQAASTSKQQETLIKRICDQVFSRFPDFVQKSKDAAFETLSDPKYSGKMKVSSSKVYPGLASLNFGGIKNKAYAYMTPYSHIFSYYTVGNSELLDVLQQYCMASGLDYRRLDGSTKSEERLKIVKEFNSTQDVNICLVSTMAGGLGLNFVGANVVVLFDPTWNPANDLQAIDRTQTHCRRERDAEPLSSAPGLQNGSENAVPYPWWCCVTGASISCWRCEICRIQDVLEYKSIVRRDRAYRIGQCRDVKVLRLISLGTVEEIMYLRQIYKQQLHCVVVGSENAKRYFEAVQGSKEHQGELFGIHNLFKFRSQGSCLTKDILEVLNFFSDLFNNILNTVFLPQEICNTIAVAFSEKLLVFFIKNALEFLLLENEEMNYCTSKLKIFPCIITNNAHTQMYMLGSMNSKAILNRQREVYSFENSCRSQELKKEVFLNKQKYKMCFELKVTKYSLRCTLMSHGDFCFLFPIKIPHQYFKLSLLCSSSAYRCFLFLKQNILYPFLKKSLSSFIYRNTKDINHFLIDIHIGIIKSWSIIFFNLLMVEMRKLSLRELQDISLDFQDFVENLNVLHLFSKYHKGSSRSNWFLSLRNLNHLDLEVEENVYIITMQCQESYAEQVKQYDHGWLGERKREGQVEAGIMTATTWLKEGPPAHKLEMPRQPDCQECRGTEQAAEPLAKEACDLCSDFSDEEPVGATGIKTAKNKAPDSSKASSSPGQLTLLQCGFSKLLETKCKAVEDSDGNTASDDESSDEQPTCLSTEAKDAGCEKNQDSLGTSKHQKLDNILNPKEKHIFYKSEKILEQNISSKSDEKKIKNTDKHCILQNVTESEDSDVICPTQYTTERFPDNSIRFKPPLEGSEDSETEHTVKTRNNDNSRNTDDKRNGIISKKLSPENTTLKSILKRKGTSDISDESDDIEISSKSRVRKRASSLRFKRIKETKKELHNSPKTMNKTNQVYAANEDHNSQFIDDYSSSDESLSVSHFSFSKQSHRPRTIRDRTSFSSKLPSHNKKNSTFIPRKPMKCSNEKVVNQEQSYESMDKFLDGVQEVAYIHSNQNVIGSSKAENHMSRWAAHDVFELKQFSQLPANIAVCSSKKTFEEMASYFNSSSVNEFAKHITNATSEERQKMLRDFYASQYPEVKEFFVDSVSQFNNSSFEKGEQRTRKKSDKRESLIKPRLSDSETLSFKDSTNKISQVCSLKTYKRKSVKFQNHISYREEVFFNDAETKKSPVSSTQEIDSGKNSQASEDTVTSRSLNSESETRERRLENTMKDQQDLTRTGISRKEPLLKLENKKIENPVLENTSVISLLGDTSILDDLFKSHGNSPTQLPKKVLSGPMEKAKQRPKDFWDILNEQNDESLSKLTDLAVIETLCEKAPLQHPLKGEKSQQLLFGNQMRNFYGRNLAQVIQMKTQPIHRVPHKHINELLHQKTAAITVYGTGFHTDSIILNTVVDIYFYEIIALGFFEVYKYCHGSVFLDIDLIFQEYDCIYSINLCYELEKILGLLIGDLGIFLTILHNDVTLAPVSMFPSMKDEESVPNQHECPSSLKKLCFALLMAHRLNHVCPSNQVYTNVFFTSTGKVIKYFLFPWASCSIIILEKSHNWYCIYGIYNIKMVILQQLKIKRLMLYTLLYELVITTISHRYQCLNFLCTYCDFNVNKGLYSTFVVLKYEEMGKLFILLETVDILSVIFMVYSKMNVLIVECMYLEAFTPAPVFCARSLSSTGKAELPVNEEEIMSVKNHGGKPLASHVHAVGRT

SEQ ID NO: 804874 - protein, 2266 aa, Homo sapiens
MQPGSAPPPGRMDPSAPQPRAETSGKDIWHPGERCLAPSPDNGKLCEASIKSITVDENGKSFAVVLYADFQERKIPLKQLQEVKFVKDCPRNLIFDDEDLEKPYFPNRKFPSSSVAFKLSDNGDSIPYTINRYLRDYQREGTRFLYGHYIHGGGCILGDDMGLGKTVQVISFLAAVLHKKGTREDIENNMPEFLLRSMKKEPLSSTAKKMFLIVAPLSVLYNWKDELDTWGYFRVTVLHGNRKDNELIRVKQRKCEIALTTYETLRLCLDELNSLEWSAVIVDEAHRIKNPKARVTEVMKALKCNVRIGLTGTILQNNMKELWCVMDWAVPGLLGSGTYFKKQFSDPVEHGQRHTATKRELATGRKAMQRLAKKMSGWFLRRTKTLIKDQLPKKEDRMVYCSLTDFQKAVYQTVLETEDVTLILQSSEPCTCRSGQKRRNCCYKTNSHGETVKTLYLSYLTVLQKVANHVALLQAASTSKQQETLIKRICDQVFSRFPDFVQKSKDAAFETLSDPKYSGKMKVSSSKVYPGLASLNFGGIKNKAYAYMTPYSHIFSYYTVGNSELLDVLQQYCMASGLDYRRLDGSTKSEERLKIVKEFNSTQDVNICLVSTMAGGLGLNFVGANVVVLFDPTWNPANDLQAIDRTQTHCRRERDAEPLSSAPGLQNGSENAVPYPWWCCVTGASISCWRCEICRIQDVLEYKSIVRRDRAYRIGQCRDVKVLRLISLGTVEEIMYLRQIYKQQLHCVVVGSENAKRYFEAVQGSKEHQGELFGIHNLFKFRSQGSCLTKDILEVLNFFSDLFNNILNTVFLPQEICNTIAVAFSEKLLVFFIKNALEFLLLENEEMNYCTSKLKIFPCIITNNAHTQMYMLGSMNSKAILNRQREVYSFENSCRSQELKKEVFLNKQKYKMCFELKVTKYSLRCTLMSHGDFCFLFPIKIPHQYFKLSLLCSSSAYRCFLFLKQNILYPFLKKSLSSFIYRNTKDINHFLIDIHIGIIKSWSIIFFNLLMVEMRKLSLRELQDISLDFQDFVENLNVLHLFSKYHKGSSRSNWFLSLRNLNHLDLEVEENVYIITMQCQESYAEQVKQYDHGWLGERKREGQVEAGIMTATTWLKEGPPAHKLEMPRQPDCQECRGTEQAAEPLAKEACDLCSDFSDEEPVGATGIKTAKNKAPDSSKASSSPGQLTLLQCGFSKLLETKCKAVEDSDGNTASDDESSDEQPTCLSTEAKDAGCEKNQDSLGTSKHQKLDNILNPKEKHIFYKSEKILEQNISSKSDEKKIKNTDKHCILQNVTESEDSDVICPTQYTTERFPDNSIRFKPPLEGSEDSETEHTVKTRNNDNSRNTDDKRNGIISKKLSPENTTLKSILKRKGTSDISDESDDIEISSKSRVRKRASSLRFKRIKETKKELHNSPKTMNKTNQVYAANEDHNSQFIDDYSSSDESLSVSHFSFSKQSHRPRTIRDRTSFSSKLPSHNKKNSTFIPRKPMKCSNEKVVNQEQSYESMDKFLDGVQEVAYIHSNQNVIGSSKAENHMSRWAAHDVFELKQFSQLPANIAVCSSKTYKEKVDADTLPHTKKGQQPSEGSISLPLYISNPVNQKKKKVYHTNQTTFIIGETPKGIRRKQFEEMASYFNSSSVNEFAKHITNATSEERQKMLRDFYASQYPEVKEFFVDSVSQFNNSSFEKGEQRTRKKSDKRESLIKPRLSDSETLSFKDSTNKISQVCSLKTYKRKSVKFQNHISYREEVFFNDAETKKSPVSSTQEIDSGKNSQASEDTVTSRSLNSESETRERRLENTMKDQQDLTRTGISRKEPLLKLENKKIENPVLENTSVISLLGDTSILDDLFKSHGNSPTQLPKKVLSGPMEKAKQRPKDFWDILNEQNDESLSKLTDLAVIETLCEKAPLQHPLKGEKSQQLLFGNQMRNFYGRNLAQVIQMKTQPIHRVPHKHINELLHQYTAAITVYGTGFHTDSIILNTVVDIYFYEIIALGFFEVYKYCHGSVFLDIDLIFQEYDCIYSINLCYELEKILGLLIGDLGIFLTILHNDVTLAPVSMFPSMKDEESVPNQHECPSSLKKLCFALLMAHRLNHVCPSNQVYTNVFFTSTGKVIKYFLFPWASCSIIILEKSHNWYCIYGIYNIKMVILQQLKIKRLMLYTLLYELVITTISHRYQCLNFLCTYCDFNVNKGLYSTFVVLKYEEMGKLFILLETVDILSVIFMVYSKMNVLIVECMYLEAFTAAPVFCARSLSSTGKAELPVNERKSCQ

SEQ ID NO: 804875 - protein, 530 aa, Homo sapiens
MQPGSAPPPGRMDPSAPQPRAETSGKDIWHPGERCLAPSPDNGKLCEASIKSITVDENGKSFAVVLYADFQERKIPLKQLQEVKFVKDCPRNLIFDDEDLEKPYFPNRKFPSSSVAFKLSDNGDSIPYTINRYLRDYQREGTRFLYGHYIHGGGCILGDDMGLGKTVQVISFLAAVLHKKGTREDIENNMPEFLLRSMKKEPLSSTAKKMFLIVAPLSVLYNWKDELDTWGYFRVTVLHGNRKDNELIRVKQRKCEIALTTYETLRLCLDELNSLEWSAVIVDEAHRIKNPKARVTEVMKALKCNVRIGLTGTILQNNMKELWCVMDWAVPGLLGSGTYFKKQFSDPVEHGQRHTATKRELATGRKAMQRLAKKMSGWFLRRTKTLIKDQLPKKEDRMVYCSLTDFQKAVYQTVLETEDVTLILQSSEPCTCRSGQKRRNCCYKTNSHGETVKTLYLSYLTVLQKVANHVALLQAASTSKQQETLIKRICDQVFSRFPDFVQKSKDAAFETLSDPKYSGKMKVSSSKVYP

SEQ ID NO: 804876 - protein, 683 aa, Homo sapiens
MQPGSAPPPGRMDPSAPQPRAETSGKDIWHPGERCLAPSPDNGKLCEASIKSITVDENGKSFAVVLYADFQERKIPLKQLQEVKFVKDCPRNLIFDDEDLEKPYFPNRKFPSSSVAFKLSDNGDSIPYTINRYLRDYQREGTRFLYGHYIHGGGCILGDDMGLGKTVQVISFLAAVLHKKGTREDIENNMPEFLLRSMKKEPLSSTAKKMFLIVAPLSVLYNWKDELDTWGYFRVTVLHGNRKDNELIRVKQRKCEIALTTYETLRLCLDELNSLEWSAVIVDEAHRIKNPKARVTEVMKALKCNVRIGLTGTILQNNMKELWCVMDWAVPGLLGSGTYFKKQFSDPVEHGQRHTATKRELATGRKAMQRLAKKMSGWFLRRTKTLIKDQLPKKEDRMVYCSLTDFQKAVYQTVLETEDVTLILQSSEPCTCRSGQKRRNCCYKTNSHGETVKTLYLSYLTVLQKVANHVALLQAASTSKQQETLIKRICDQVFSRFPDFVQKSKDAAFETLSDPKYSGKMKVLQQLLNHCRKNRDKVLLFSFSTKLLDVLQQYCMASGLDYRRLDGSTKSEERLKIVKEFNSTQDVNICLVSTMAGGLGLNFVGANVVVLFDPTWNPANDLQAIDRTQTHCRRERDAEPLSSAPGLQNGSENAVPYPWWCCVTGASISCWRCEICRIQDVLE

SEQ ID NO: 804877 - protein, 530 aa, Homo sapiens; identical to SEQ ID NO: 804875

SEQ ID NO: 804878 - protein, 602 aa, Homo sapiens
MQPGSAPPPGRMDPSAPQPRAETSGKDIWHPGERCLAPSPDNGKLCEASIKSITVDENGKSFAVVLYADFQERKIPLKQLQEVKFVKDCPRNLIFDDEDLEKPYFPNRKFPSSSVAFKLSDNGDSIPYTINRYLRDYQREGTRFLYGHYIHGGGCILGDDMGLGKTVQVISFLAAVLHKKGTREDIENNMPEFLLRSMKKEPLSSTAKKMFLIVAPLSVLYNWKDELDTWGYFRVTVLHGNRKDNELIRVKQRKCEIALTTYETLRLCLDELNSLEWSAVIVDEAHRIKNPKARVTEVMKALKCNVRIGLTGTILQNNMKELWCVMDWAVPGLLGSGTYFKKQFSDPVEHGQRHTATKRELATGRKAMQRLAKKMSGWFLRRTKTLIKDQLPKKEDRMVYCSLTDFQKAVYQTVLETEDVTLILQSSEPCTCRSGQKRRNCCYKTNSHGETVKTLYLSYLTVLQKVANHVALLQAASTSKQQETLIKRICDQVFSRFPDFVQKSKDAAFETLSDPKYSGKMKVLQQLLNHCRKNRDKVLLFSFSTKLLDVLQQYCMASGLDYRRLDGSTKSEERLKIVKEFNSTQDVNICLVSTIRDGVSPF

SEQ ID NO: 804879 - protein, 957 aa, Homo sapiens
MNFAEREGSKRYCIQTKHVAILCAVVVGVGLIVGLAVGLTRSCDSSGDGGPGTAPAPSHLPSSTASPSGPPAQDQDICPASEDESGQWKNFRLPDFVNPVHYDLHVKPLLEEDTYTGTVSISINLSAPTRYLWLHLRETRITRLPELKRPSGDQVQVRRCFEYKKQEYVVVEAEEELTPSSGDGLYLLTMEFAGWLNGSLVGFYRTTYTENGRVKSIVATDHEPTDARKSFPCFDEPNKKATYTISITHPKEYGALSNMPVAKEESVDDKWTRTTFEKSVPMSTYLVCFAVHQFDSVKRISNSGKPLTIYVQPEQKHTAEYAANITKSVFDYFEEYFAMNYSLPKLDKIAIPDFGTGAMENWGLITYRETNLLYDPKESASSNQQRVATVVAHELVHQWFGNIVTMDWWEDLWLNEGFASFFEFLGVNHAETDWQMRDQMLLEDVLPVQEDDSLMSSHPIIVTVTTPDEITSVFDGISYSKGSSILRMLEDWIKPENFQKGCQMYLEKYQFKNAKTSDFWAALEEASRLPVKEVMDTWTRQMGYPVLNVNGVKNITQKRFLLDPRANPSQPPSDLGYTWNIPVKWTEDNITSSVLFNRSEKEGITLNSSNPSGNAFLKINPDHIGFYRVNYEVATWDSIATALSLNHKTFSSADRASLIDDAFALARAQLLDYKVALNLTKYLKREENFLPWQRVISAVTYIISMFEDDKELYPMIEEYFQGQVKPIADSLGWNDAGDHVTKLLRSSVLGFACKMGDREALNNASSLFEQWLNGTVSLPVNLRLLVYRYGMQNSGNEISWNYTLEQYQKTSLAQEKEKLLYGLASVKNVTLLSRYLDLLKDTNLIKTQDVFTVIRYISYNSYGKNMAWNWIQLNWDYLVNRYTLNNRNLGRIVTIAEPFNTELQLWQMESFFAKYPQAGAGEKPREQVLETVKNNIEWLKQHRNTIREWFFNLLESG

SEQ ID NO: 804880 - protein, 957 aa, Homo sapiens; identical to SEQ ID NO: 804879

SEQ ID NO: 804881 - protein, 957 aa, Homo sapiens; identical to SEQ ID NO: 804879

SEQ ID NO: 804882 - protein, 878 aa, Homo sapiens
ADICASNQRDSVGVEPSEPGVGYNLVVRRFLSQSEKRSIRVGVTRFSSESVTPFFDSERELPDPLRFPSEAMPRPASARARCAHPLTCAHCLALPSEMNPVPQMEMQKSPVFCVVTLGAVDQSCFLFGNLGSSTERSIVATDHEPTDARKSFPCFDEPNKKATYTISITHPKEYGALSNMPVAKEESVDDKWTRTTFEKSVPMSTYLVCFAVHQFDSVKRISNSGKPLTIYVQPEQKHTAEYAANITKSVFDYFEEYFAMNYSLPKLDKIAIPDFGTGAMENWGLITYRETNLLYDPKESASSNQQRVATVVAHELVHQWFGNIVTMDWWEDLWLNEGFASFFEFLGVNHAETDWQMRDQMLLEDVLPVQEDDSLMSSHPIIVTVTTPDEITSVFDGISYSKGSSILRMLEDWIKPENFQKGCQMYLEKYQFKNAKTSDFWAALEEASRLPVKEVMDTWTRQMGYPVLNVNGVKNITQKRFLLDPRANPSQPPSDLGYTWNIPVKWTEDNITSSVLFNRSEKEGITLNSSNPSGNAFLKINPDHIGFYRVNYEVATWDSIATALSLNHKTFSSADRASLIDDAFALARAQLLDYKVALNLTKYLKREENFLPWQRVISAVTYIISMFEDDKELYPMIEEYFQGQVKPIADSLGWNDAGDHVTKLLRSSVLGFACKMGDREALNNASSLFEQWLNGTVSLPVNLRLLVYRYGMQNSGNEISWNYTLEQYQKTSLAQEKEKLLYGLASVKNVTLLSRYLDLLKDTNLIKTQDVFTVIRYISYNSYGKNMAWNWIQLNWDYLVNRYTLNNRNLGRIVTIAEPFNTELQLWQMESFFAKYPQAGAGEKPREQVLETVKNNIEWLKQHRNTIREWFFNLLESG

SEQ ID NO: 804883 - protein, 416 aa, Homo sapiens
MGYPVLNVNGVKNITQKRFLLDPRANPSQPPSDLGYTWNIPVKWTEDNITSSVLFNRSEKEGITLNSSNPSGNAFLKINPDHIGFYRVNYEVATWDSIATALSLNHKTFSSADRASLIDDAFALARAQLLDYKVALNLTKYLKREENFLPWQRVISAVTYIISMFEDDKELYPMIEEYFQGQVKPIADSLGWNDAGDHVTKLLRSSVLGFACKMGDREALNNASSLFEQWLNGTVSLPVNLRLLVYRYGMQNSGNEISWNYTLEQYQKTSLAQEKEKLLYGLASVKNVTLLSRYLDLLKDTNLIKTQDVFTVIRYISYNSYGKNMAWNWIQLNWDYLVNRYTLNNRNLGRIVTIAEPFNTELQLWQMESFFAKYPQAGAGEKPREQVLETVKNNIEWLKQHRNTIREWFFNLLESG

SEQ ID NO: 804884 - protein, 867 aa, Homo sapiens
MNFAEREGSKRYCIQTKHVAILCAVVVGVGLIVGLAVGLTRSCDSSGDGGPGTAPAPSHLPSSTASPSGPPAQDQDICPASEDESGQWKNFRLPDFVNPVHYDLHVKPLLEEDTYTGTVSISINLSAPTRYLWLHLRETRITRLPELKRPSGDQVQVRRCFEYKKQEYVVVEAEEELTPSSGDGLYLLTMEFAGWLNGSLVGFYRTTYTENGRVKSIVATDHEPTDARKSFPCFDEPNKKATYTISITHPKEYGALSNMPVAKEESVDDKWTRTTFEKSVPMSTYLVCFAVHQFDSVKRISNSGKPLTIYVQPEQKHTAEYAANITKSVFDYFEEYFAMNYSLPKLDKIAIPDFGTGAMENWGLITYRETNLLYDPKESASSNQQRVATVVAHELVHQWFGNIVTMDWWEDLWLNEGFASFFEFLGVNHAETDWQMRDQMLLEDVLPVQEDDSLMSSHPIIVTVTTPDEITSVFDGISYSKGSSILRMLEDWIKPENFQKGCQMYLEKYQFKNAKTSDFWAALEEASRLPVKEVMDTWTRQMGYPVLNVNGVKNITQKRFLLDPRANPSQPPSDLGYTWNIPVKWTEDNITSSVLFNRSEKEGITLNSSNPSGNAFLKINPDHIGFYRVNYEVATWDSIATALSLNHKTFSSADRASLIDDAFALARAQLLDYKVALNLTKYLKREENFLPWQRVISAVTYIISMFEDDKELYPMIEEYFQGQVKPIADSLGWNDAGDHVTKLLRSSVLGFACKMGDREALNNASSLFEQWLNGTVSLPVNLRLLVYRYGMQNSGNEISWNYTLEQYQKTSLAQEKEKLLYGLASVKNVTLLSRYLDLLKDTNLIKKHGLELDTTQLGLSSQQIYTQ

SEQ ID NO: 804885 - protein, 932 aa, Homo sapiens
MNFAEREGSKRYCIQTKHVAILCAVVVGVGLIVGLAVGLTRSCDSSGDGGPGTAPAPSHLPSSTASPSGPPAQDQDICPASEDESGQWKNFRLPDFVNPVHYDLHVKPLLEEDTYTGTVSISINLSAPTRYLWLHLRETRITRLPELKRPSGDQVQVRRCFEYKKQEYVVVEAEEELTPSSGDGLYLLTMEFAGWLNGSLVGFYRTTYTENGRVKSIVATDHEPTDARKSFPCFDEPNKKATYTISITHPKEYGALSNMPVAKEESVDDKWTRTTFEKSVPMSTYLVCFAVHQFDSVKRISNSGKPLTIYVQPEQKHTAEYAANITKSVFDYFEEYFAMNYSLPKLDKIAIPDFGTGAMENWGLITYRETNLLYDPKESASSNQQRVATVVAHELVHQWFGNIVTMDWWEDLWLNEGFASFFEFLGVNHAETDWQMRDQMLLEDVLPVQEDDSLMSSHPIIVTVTTPDEITSVFDGISYSKGSSILRMLEDWIKPENFQKGCQMYLEKYQFKNAKTSDFWAALEEASRLPVKEVMDTWTRQMGYPVLNVNGVKNITQKRFLLDPRANPSQPPSDLGYTWNIPVKWTEDNITSSVLFNRSEKEGITLNSSNPSGNAFLKINPDHIGFYRVNYEVATWDSIATALSLNHKTFSSADRASLIDDAFALARAQLLDYKVALNLTKYLKREENFLPWQRVISAVTYIISMFEDDKELYPMIEEYFQGQVKPIADSLGWNDAGDHVTKLLRSSVLGFACKMGDREALNNASSLFEQWLNGTVSLPVNLRLLVYRYGMQNSGNEISWNYTLEQYQKTSLAQEKEKLLYGLASVKNVTLLSRYLDLLKDTNLIKTQDVFTVIRYISYNSYGKNMAWNWIQLNWDYLVNRYTLNNRNLGRIVTIAEPFNTELQLWQMEKFLKYSQGGQEKTWDQCGDVETY

SEQ ID NO: 804886 - protein, 50 aa, Homo sapiens
VALNLTKYLKREENFLPWQRVISAVTYIISMFEDDKELYPMIEVTLMLWY

SEQ ID NO: 804887 - protein, 972 aa, Homo sapiens
  misc_feature (916)..(918): Xaa can be any naturally occurring amino acid
  misc_feature (921)..(921): Xaa can be any naturally occurring amino acid
MNFAEREGSKRYCIQTKHVAILCAVVVGVGLIVGLAVGLTRSCDSSGDGGPGTAPAPSHLPSSTASPSGPPAQDQDICPASEDESGQWKNFRLPDFVNPVHYDLHVKPLLEEDTYTGTVSISINLSAPTRYLWLHLRETRITRLPELKRPSGDQVQVRRCFEYKKQEYVVVEAEEELTPSSGDGLYLLTMEFAGWLNGSLVGFYRTTYTENGRVKSIVATDHEPTDARKSFPCFDEPNKKATYTISITHPKEYGALSNMPVAKEESVDDKWTRTTFEKSVPMSTYLVCFAVHQFDSVKRISNSGKPLTIYVQPEQKHTAEYAANITKSVFDYFEEYFAMNYSLPKLDKIAIPDFGTGAMENWGLITYRETNLLYDPKESASSNQQRVATVVAHELVHQWFGNIVTMDWWEDLWLNEGFASFFEFLGVNHAETDWQMRDQMLLEDVLPVQEDDSLMSSHPIIVTVTTPDEITSVFDGISYSKGSSILRMLEDWIKPENFQKGCQMYLEKYQFKNAKTSDFWAALEEASRLPVKEVMDTWTRQMGYPVLNVNGVKNITQKRFLLDPRANPSQPPSDLGYTWNIPVKWTEDNITSSVLFNRSEKEGITLNSSNPSGNAFLKINPDHIGFYRVNYEVATWDSIATALSLNHKTFSSADRASLIDDAFALARAQLLDYKVALNLTKYLKREENFLPWQRVISAVTYIISMFEDDKELYPMIEEYFQGQVKPIADSLGWNDAGDHVTKLLRSSVLGFACKMGDREALNNASSLFEQWLNGTVSLPVNLRLLVYRYGMQNSGNEISWNYTLEQYQKTSLAQEKEKLLYGLASVKNVTLLSRYLDLLKDTNLIKTQDVFTVIRYISYNSYGKNMAWNWIQLNWDYLVNRYTLNNRNLGRIVTIAEPFNTELQLWQMESFFCKYXXXCSXRPHRTPFEMGFNYLGMVKDSMVRVIWESMVSFEEIGGLIPGPCRGFKPVRF

SEQ ID NO: 804888 - protein, 604 aa, Homo sapiens
MNFAEREGSKRYCIQTKHVAILCAVVVGVGLIVGLAVGLTRSCDSSGDGGPGTAPAPSHLPSSTASPSGPPAQDQDICPASEDESGQWKNFRLPDFVNPVHYDLHVKPLLEEDTYTGTVSISINLSAPTRYLWLHLRETRITRLPELKRPSGDQVQVRRCFEYKKQEYVVVEAEEELTPSSGDGLYLLTMEFAGWLNGSLVGFYRTTYTENGRVKSIVATDHEPTDARKSFPCFDEPNKKATYTISITHPKEYGALSNMPVAKEESVDDKWTRTTFEKSVPMSTYLVCFAVHQFDSVKRISNSGKPLTIYVQPEQKHTAEYAANITKSVFDYFEEYFAMNYSLPKLDKIAIPDFGTGAMENWGLITYRETNLLYDPKESASSNQQRVATVVAHELVHQWFGNIVTMDWWEDLWLNEGFASFFEFLGVNHAETDWQMRDQMLLEDVLPVQEDDSLMSSHPIIVTVTTPDEITSVFDGISYSKGSSILRMLEDWIKPENFQKGCQMYLEKYQFKNAKTSDFWAALEEASRLPVKEVMDTWTRQMGYPVLNVNGVKNITQKRFLLDPRANPSQPPSDLGYTWNIPVKWTEDNITSSVLFNRSEKEVN

SEQ ID NO: 804889 - protein, 538 aa, Homo sapiens
AERALGGGSGRAEGGGFGVGAQGRAGGRRVEAGRMRLSKTLVDMDMADYSAALDPAYTTLEFENVQVLTMGNDFVAAASRQIEASPPTSLEHSGGVDSSPQGDTSPSEGTNLNAPNSLGVSALCAICGDRATGKHYGASSCDGCKGFFRRSVRKNHMYSCRFSRQCVVDKDKRNQCRYCRLKKCFRAGMKKEAVQNERDRISTRRSSYEDSSLPSINALLQAEVLSRQITSPVSGINGDIRAKKIASIADVCESMKEQLLVLVEWAKYIPAFCELPLDDQVALLRAHAGEHLLLGATKRSMVFKDVLLLGNDYIVPRHCPELAEMSRVSIRILDELVLPFQELQIDDNEYAYLKAIIFFDPDAKGLSDPGKIKRLRSQVQVSLEDYINDRQYDSRGRFGELLLLLPTLQSITWQMIEQIQFIKLFGMAKIDNLLQEMLLGGSPSDAPHAHHPLHPHLMQEHMGTNVIVANTMPTHLSNGQMCEWPRPRGQAATPETPQPSPPGGSGSEPYKLLPGAVATIVKPLSAIPQPTITKQEVI

SEQ ID NO: 804890 - protein, 451 aa, Homo sapiens
AERALGGGSGRAEGGGFGVGAQGRAGGRRVEAGRMRLSKTLVDMDMADYSAALDPAYTTLEFENVQVLTMGNDTSPSEGTNLNAPNSLGVSALCAICGDRATGKHYGASSCDGCKGFFRRSVRKNHMYSCRFSRQCVVDKDKRNQCRYCRLKKCFRAGMKKEAVQNERDRISTRRSSYEDSSLPSINALLQAEVLSRQITSPVSGINGDIRAKKIASIADVCESMKEQLLVLVEWAKYIPAFCELPLDDQVALLRAHAGEHLLLGATKRSMVFKDVLLLGNDYIVPRHCPELAEMSRVSIRILDELVLPFQELQIDDNEYAYLKAIIFFDPDAKGLSDPGKIKRLRSQVQVSLEDYINDRQYDSRGRFGELLLLLPTLQSITWQMIEQIQFIKLFGMAKIDNLLQEMLLGGPCQAQEGRGWSGDSPGDRPHTVSSPLSSLASPLCRFGQVA

SEQ ID NO: 804891 - protein, 83 aa, Homo sapiens
PSSVLRGGSCVFSIQPSKALPRFSRQCVVDKDKRNQCRYCRLKKCFRAGMKKEGEPRPSPPHHHCPTCTHSSPTVIYNCSHTL

SEQ ID NO: 804892 - protein, 508 aa, Homo sapiens
AERALGGGSGRAEGGGFGVGAQGRAGGRRVEAGRMRLSKTLVDMDMADYSAALDPAYTTLEFENVQVLTMGNDTSPSEGTNLNAPNSLGVSALCAICGDRATGKHYGASSCDGCKGFFRRSVRKNHMYSCRFSRQCVVDKDKRNQCRYCRLKKCFRAGMKKEAVQNERDRISTRRSSYEDSSLPSINALLQAEVLSRQITSPVSGINGDIRAKKIASIADVCESMKEQLLVLVEWAKYIPAFCELPLDDQVALLRAHAGEHLLLGATKRSMVFKDVLLLGNDYIVPRHCPELAEMSRVSIRILDELVLPFQELQIDDNEYAYLKAIIFFDPDAKGLSDPGKIKRLRSQVQVSLEDYINDRQYDSRGRFGELLLLLPTLQSITWQMIEQIQFIKLFGMAKIDNLLQEMLLGGSPSDAPHAHHPLHPHLMQEHMGTNVIVANTMPTHLSNGQMCEWPRPRGQAATPETPQPSPPGGSGSEPYKLLPGAVATIVKPLSAIPQPTITKQEVI

SEQ ID NO: 804893 - protein, 498 aa, Homo sapiens
AERALGGGSGRAEGGGFGVGAQGRAGGRRVEAGRMRLSKTLVDMDMADYSAALDPAYTTLEFENVQVLTMGNDTSPSEGTNLNAPNSLGVSALCAICGDRATGKHYGASSCDGCKGFFRRSVRKNHMYSCRFSRQCVVDKDKRNQCRYCRLKKCFRAGMKKEAVQNERDRISTRRSSYEDSSLPSINALLQAEVLSRQITSPVSGINGDIRAKKIASIADVCESMKEQLLVLVEWAKYIPAFCELPLDDQVALLRAHAGEHLLLGATKRSMVFKDVLLLGNDYIVPRHCPELAEMSRVSIRILDELVLPFQELQIDDNEYAYLKAIIFFDPDAKGLSDPGKIKRLRSQVQVSLEDYINDRQYDSRGRFGELLLLLPTLQSITWQMIEQIQFIKLFGMAKIDNLLQEMLLGGSPSDAPHAHHPLHPHLMQEHMGTNVIVANTMPTHLSNGQMSTPETPQPSPPGGSGSEPYKLLPGAVATIVKPLSAIPQPTITKQEVI

SEQ ID NO: 804894 - protein, 161 aa, Homo sapiens [sequence omitted]

SEQ ID NO: 804895 - protein, 347 aa, Homo sapiens
MEQYTANSNSSTEQIVVQAGQIQQQQQGGVTAVQLQTEAQVASASGQQVQTLQVVQGQPLMVQVSGGQLITSTGQPIMVQAVPGGQGQTIMQVPVSGTQGLQQIQLVPPGQIQIQGGQAVQVQGQQGQTQQIIIQQPQTAVTAGQTQTQQQIAVQGQQVAQTAEGQTIVYQPVNADGTILQQVTVPVSGMITIPAASLAGAQIVQTGANTNTTSSGQGTVTVTLPVAGNVVNSGGMVMMVPGAGSVPAIQRIPLPGAEMLEEEPLYVNAKQYHRILKRRQARAKLEAEGKIPKERRKYLHESRHRHAMARKRGEGGRFFSPKEKDSPHMQDPNQADEEAMTQIIRVS

SEQ ID NO: 804896 - protein, 318 aa, Homo sapiens
MEQYTANSNSSTEQIVVQAGQIQQQVQGQPLMVQVSGGQLITSTGQPIMVQAVPGGQGQTIMQVPVSGTQGLQQIQLVPPGQIQIQGGQAVQVQGQQGQTQQIIIQQPQTAVTAGQTQTQQQIAVQGQQVAQTAEGQTIVYQPVNADGTILQQVTVPVSGMITIPAASLAGAQIVQTGANTNTTSSGQGTVTVTLPVAGNVVNSGGMVMMVPGAGSVPAIQRIPLPGAEMLEEEPLYVNAKQYHRILKRRQARAKLEAEGKIPKERRKYLHESRHRHAMARKRGEGGRFFSPKEKDSPHMQDPNQADEEAMTQIIRVS

SEQ ID NO: 804897 - protein, 347 aa, Homo sapiens; identical to SEQ ID NO: 804895

SEQ ID NO: 804898 - protein, 318 aa, Homo sapiens; identical to SEQ ID NO: 804896

SEQ ID NO: 804899 - protein, 203 aa, Homo sapiens
MLSYRSVDIRKSLQLEELLAREQLEYTIEEEVAKQTIRMWLKKCLKRIRAKQQQSCSIIHSLRESQQQELSRFLNPPSIETTQPSEDTNANSQDNSMQPETSSQQQLLSPTLSDRGGSRQDAADAGKPQRKFGQWRLPSAPKPISHSVSSVNLRFGGRTTMKSVVCKMNPMTDAASCGSEVKKWWTRQLTVESDESGDDLLDI

SEQ ID NO: 804900 - protein, 213 aa, Homo sapiens
MLSYRSVDIRKSLQLEELLAREQLEYTIEEEVAKQTIRMWLKKCLKRIRAKQQQSCSIIHSLRESQQQELSRFLNPPSIETTQPSEDTNANSQDNSMQPETSSQQQLLSPTLSDRGGSRQDAADAGKPQRKFGQWRLPSAPKPISHSVSSVNLRFGGRTTMKSVVCKMNPMTDAASCGSEVKKWWTRQLTVESDLVGGTRFLMKALNGPGAIV

SEQ ID NO: 804901 - protein, 170 aa, Homo sapiens
MLSYRSVDIRKSLQLEELLAREQLEYTIEEEVAKQTIRMWLKKCLKRIRAKQQQSCSIIHSLRESQQQELSRFLNPPSIETTQPSEDTNANSQDNSMQPETSSQQQLLSPTLSDRGGSRQDAADAGKPQRKFGQWRLPSAPKPISHSVSSVNLRFGGRTTMKSVVGGPGS

SEQ ID NO: 804902 - protein, 242 aa, Homo sapiens
MGDAGAVRSSRGDQELRRLQSDCRAHRRDEDQLGTAAALASAVRDGELWRLPLFGPISILLSTCCMLSVLLRASTWMEAVCSGWTGGECILCRRDNQVLRPEVITRPGALRQGLVARPEEQSSGCAQNSEVRPLNSDRTFQPIGNEAAQAARGLVKSEVCRDGAVILCFLWQSQHQPRCTLLLASLGSPALRVVAASCKYPTLRFCNIHFCSLSLAKPAQSVPNLYPLCLKYLVWFLFPDLT

SEQ ID NO: 804903 - protein, 242 aa, Homo sapiens; identical to SEQ ID NO: 804902

SEQ ID NO: 804904 - protein, 242 aa, Homo sapiens; identical to SEQ ID NO: 804902

SEQ ID NO: 804905 - protein, 242 aa, Homo sapiens; identical to SEQ ID NO: 804902

SEQ ID NO: 804906 - protein, 641 aa, Homo sapiens
PDARWPDGRKDYIRLTRPGLTLPGRAMFARGSRRRRSGRAPPEAEDPDRGQPCNSCREQCPGFLLHGWRKICQHCKCPREEHAVHAVPVDLERIMCRLISDFQRHSISDDDSGCASEEYAWVPPGLKPEQVYQFFSCLPEDKVPYVNSPGEKYRIKQLLHQLPPHDSEAQYCTALEEEEKKELRAFSQQRKRENLGRGIVRIFPVTITGAICEECGKQIGGGDIAVFASRAGLGACWHPQCFVCTTCQELLVDLIYFYHVGKVYCGRHHAECLRPRCQACDEIIFSPECTEAEGRHWHMDHFCCFECEASLGGQRYVMRQSRPHCCACYEARHAEYCDGCGEHIGLDQGQMAYEGQHWHASDRCFCCSRCGRALLGRPFLPRRGLIFCSRACSLGSEPTAPGPSRRSWSAGPVTAPLAASTASFSAVKGASETTTKGTSTELAPATGPEEPSRFLRGAPHRHSMPELGLRSVPEPPPESPGQPNLRPDDSAFGRQSTPRVSFRDPLVSEGGPRRTLSAPPAQRRRPRSPPPRAPSRRRHHHHNHHHHHNRHPSRRRHYQCDAGSGSDSESCSSSPSSSSSESSEDDGFFLGERIPLPPHLCRPMPAQDTAMETFNSPSLSLPRDSRAGMPRQARDKNCIVA

SEQ ID NO: 804907 - protein, 641 aa, Homo sapiens; identical to SEQ ID NO: 804906

SEQ ID NO: 804908 - protein, 131 aa, Homo sapiens
MPTPLWERAPWERKGGVRERFTSQSPGENQNLFPAFSKRAPFWRREEGTQGCPASDSPPLLEKGLVHEGWGYAWGFCLSFSPSSFPTGLDQGQMAYEGQHWHASDRCFCCSRCGRALLGRPFLPRRGLIFC

SEQ ID NO: 804909 - protein, 105 aa, Homo sapiens
LDLTGSFTAKGPPPRILRSLAPTWRTGGFRCPRRKLRPADRRYLTWDLLSDRGPNAARDQKKSRGPNAARDQKESRSFAIYRSLRAEGRTVGTISQGDFHFLPYM

SEQ ID NO: 804910 - protein, 105 aa, Homo sapiens; identical to SEQ ID NO: 804909

SEQ ID NO: 804911 - protein, 105 aa, Homo sapiens; identical to SEQ ID NO: 804909

SEQ ID NO: 804912 - protein, 105 aa, Homo sapiens; identical to SEQ ID NO: 804909

SEQ ID NO: 804913 - protein, 42 aa, Homo sapiens
MQRKPGKQADTGWFVEQHSPSSLRPSLLTSADLFQNKQTLKP

SEQ ID NO: 804914 - protein, 118 aa, Homo sapiens
PRVRGRVGPLAPRRSPTPFFMASLLCCGPKLAACGIVLSAWGVIMLIMLGIFFNVHSAVLIEDVPFTEKDFENGPQNIYNLYEQVSYNCFIAAGLYLLLGGFSFCQVRLNKRKEYMVR

SEQ ID NO: 804915 - protein, 71 aa, Homo sapiens
RIQASNDVRGHGALGPRRVSPLQPLLYLKTPCTVSPRSRPTLAGALCGTGFPGRETESLLPSLASGPRGEG

SEQ ID NO: 804916 - protein, 71 aa, Homo sapiens; identical to SEQ ID NO: 804915

SEQ ID NO: 804917 - protein, 85 aa, Homo sapiens
LHPRRPLYLKTPCTVSHRGRRQGWDATWVTRCRESLNRGGAGAGKRAGALAHHVFLAGALCGTGFPGRETESLLPSLASGPRGEG

SEQ ID NO: 804918 - protein, 78 aa, Homo sapiens
QANLANKDSAGSTSTTTLPTTFRVVGVQLQDQQVVIHYSIVKRLKDNQATPTFPQWGKARQVYGFNFASKEEATTFSC

SEQ ID NO: 804919 - protein, 192 aa, Homo sapiens
MTSASTKVGEIFSAAGAAFTKLGELTMQLHPVADSSPAGAKWTETEIEMLRAAVKRFGDDLNHISCVIKERTVAQIKATVKRKVYEDSGIPLPAESPKKGPKKVASGVLSPPPAAPPPSSSSVPEAGGPPIKKQKADVTLSALNDSDANSDVVDIEGLGETPPAKKLNFDQDSLTLDSGLLMTSADPPLLSC

SEQ ID NO: 804920 - protein, 137 aa, Homo sapiens
IRGRVDTAGEDDRRGRASWAFSHRFPSPLAPRRSPTPFFMASLLCCGPKLAACGIVLSAWGVIMLIMLGIFFNVHSAVLIEDVPFTEKDFENGPQNIYNLYEQVSYNCFIAAGLYLLLGGFSFCQVRLNKRKEYMVR

SEQ ID NO: 804921 - protein, 192 aa, Homo sapiens; identical to SEQ ID NO: 804919

SEQ ID NO: 804922 - protein, 253 aa, Homo sapiens
MTSASTKVRPPSRTALPGGHGRAGPPLGSRLFRPGRGAGGSRAWGGARGSGRDGEGGRRPPVTLPRPQVGEIFSAAGAAFTKLGELTMQLHPVADSSPAGAKWTETEIEMLRAAVKRFGDDLNHISCVIKERTVAQIKATVKRKVYEDSGIPLPAESPKKGPKKVASGVLSPPPAAPPPSSSSVPEAGGPPIKKQKADVTLSALNDSDANSDVVDIEGLGETPPAKKLNFDQDSLTLDSGLLMTSADPPLLSC

SEQ ID NO: 804923 - protein, 192 aa, Homo sapiens; identical to SEQ ID NO: 804919

SEQ ID NO: 804924 - protein, 137 aa, Homo sapiens; identical to SEQ ID NO: 804920

SEQ ID NO: 804925 - protein, 192 aa, Homo sapiens; identical to SEQ ID NO: 804919

SEQ ID NO: 804926 - protein, 192 aa, Homo sapiens; identical to SEQ ID NO: 804919

SEQ ID NO: 804927 - protein, 192 aa, Homo sapiens; identical to SEQ ID NO: 804919

SEQ ID NO: 804928 - protein, 166 aa, Homo sapiens
MQLHPVADSSPAGAKWTETEIEMLRAAVKRFGDDLNHISCVIKERTVAQIKATVKRKVYEDSGIPLPAESPKKGPKKVASGVLSPPPAAPPPSSSSVPEAGGPPIKKQKADVTLSALNDSDANSDVVDIEGLGETPPAKKLNFDQDSLTLDSGLLMTSADPPLLSC

SEQ ID NO: 804929 - protein, 137 aa, Homo sapiens; identical to SEQ ID NO: 804920

SEQ ID NO: 804930 - protein, 225 aa, Homo sapiens
MTSASTKVGEIFSAAGAAFTKLGELTMQLHPVADSSPAGAKWTETEIEMLRAAVKRFGDDLNHISCVIKERTVAQIKATVKRKVYEDSGIPLPAESPKKGPKKVASGVLSPPPAAPPPSSSSVPEAGGPPIKKQKADVTLSALNDSDANSDVVDIEGLGETPPAKKLNFDQDQGRSPPPPTQLTGLGRKGSPGWQGTVSAGAPPLYRGFRREGALIHSAGHWIST

SEQ ID NO: 804931 - protein, 157 aa, Homo sapiens
MTSASTKVGEIFSAAGAAFTKLGELTMQLHPVADSSPAGAKWTETEIEMLRAAVKRFGDDLNHISCVIKERTVAQIKATVKRKVYEDSGIPLPAESPKKGPKKVASGVLSPPPAAPPPSSSSVPEAGGPPIKKQKADSLTLDSGLLMTSADPPLLSC

SEQ ID NO: 804932 - protein, 77 aa, Homo sapiens
NSRPRRHGWRRRQKGEGILGFLPPLSEPACTSAIPDSLLYGVAPVLWAEAGRLRHRPQRLGSDHVVIHPPPLQEEMI

SEQ ID NO: 804933 - protein, 157 aa, Homo sapiens
MTSASTKVRPPSRTALPGGHGRAGPPLGSRLFRPGRGAGGSRAWGGARGSGRDGEGGRRPPVTLPRPQVGEIFSAAGAAFTKLGELTMQLHPVADSSPAGAKWTETEIEMLRAAVKRFGDDLNHISCVIKERTVAQIKATVKRKCDTQCSERLRCQQ

SEQ ID NO: 804934 - protein, 137 aa, Homo sapiens; identical to SEQ ID NO: 804920

SEQ ID NO: 804935 - protein, 137 aa, Homo sapiens; identical to SEQ ID NO: 804920

SEQ ID NO: 804936 - protein, 137 aa, Homo sapiens; identical to SEQ ID NO: 804920

SEQ ID NO: 804937 - protein, 137 aa, Homo sapiens; identical to SEQ ID NO: 804920

SEQ ID NO: 804938 - protein, 137 aa, Homo sapiens; identical to SEQ ID NO: 804920

SEQ ID NO: 804939 - protein, 192 aa, Homo sapiens; identical to SEQ ID NO: 804919

SEQ ID NO: 804940 - protein, 192 aa, Homo sapiens; identical to SEQ ID NO: 804919

SEQ ID NO: 804941 - protein, 192 aa, Homo sapiens; identical to SEQ ID NO: 804919

SEQ ID NO: 804942 - protein, 157 aa, Homo sapiens; identical to SEQ ID NO: 804931

SEQ ID NO: 804943 - protein, 137 aa, Homo sapiens; identical to SEQ ID NO: 804920

SEQ ID NO: 804944 - protein, 103 aa, Homo sapiens
PRVRGRVGPLAPRRSPTPFFMASLLCCGPKLAACGIVLSAWGVIMLVRGLPGKDRRGPEGLRAGRAGRRGNSGPQAGRRGRGSTGPGEGDRLKLKNGNCSRPA

SEQ ID NO: 804945 - protein, 152 aa, Homo sapiens
MTSASTKVRPPSRTALPGGHGRAGPPLGSRLFRPGRGAGGSRAWGGARGSGRDGEGGRRPPVTLPRPQVGEIFSAAGAAFTKLGELTMQLHPVADSSPAGAKWTETEIEMLRAAVKRFGDDLNHISCVIKERTVAQIKATVKRKVTWWILKG

SEQ ID NO: 804946 - protein, 137 aa, Homo sapiens; identical to SEQ ID NO: 804920

SEQ ID NO: 804947 - protein, 137 aa, Homo sapiens; identical to SEQ ID NO: 804920

SEQ ID NO: 804948 - protein, 137 aa, Homo sapiens; identical to SEQ ID NO: 804920

SEQ ID NO: 804949 - protein, 83 aa, Homo sapiens
RAWGGARGSGRDGEGGRRPPVTLPRPQVGEIFSAAGAAFTKLGELTMQLHPVADSSPAGYVSPDWDVDAESGRLDSVTDTDPL

SEQ ID NO: 804950 - protein, 124 aa, Homo sapiens
QSQQAHFTGTKLWADPTDLKRQLKKVGCDRCPWPRQWSTQASSSMLGKGKPPILVMEVAMTMSGFQRQLCKNRNQQLPNIWPYLLCKPQGPGPFRGASGILWNQLLSGISDAIPGQLPLLCAIL

SEQ ID NO: 804951 - protein, 209 aa, Homo sapiens
STHGVGACAPRRSAGWQSQRSLRVRAGPDFVRGPGGGGGRGVRGRLSPPRWALPGAPPWAAASARAAMSYMLPHLHNGWQVDQAILSEEDRVVVIRFGHDWDPTCMKMDEVLYSIAEKVKNFAVIYLVDITEVPDFNKMYELYDPCTVMFFFRNKHIMIDLGTGNNNKINWAMEDKQEMVDIIETVYRGARKGRGLVVSPKDYSTKYRY

SEQ ID NO: 804952 - protein, 209 aa, Homo sapiens; identical to SEQ ID NO: 804951

SEQ ID NO: 804953 - protein, 209 aa, Homo sapiens; identical to SEQ ID NO: 804951

SEQ ID NO: 804954 - protein, 209 aa, Homo sapiens; identical to SEQ ID NO: 804951

SEQ ID NO: 804955 - protein, 103 aa, Homo sapiens
MAENVKGFVCVNVKNFAVIYLVDITEVPDFNKMYELYDPCTVMFFFRNKHIMIDLGTGNNNKINWAMEDKQEMVDIIETVYRGARKGRGLVVSPKDYSTKYRY

SEQ ID NO: 804956 - protein, 103 aa, Homo sapiens
MLLARKQILCVNVKNFAVIYLVDITEVPDFNKMYELYDPCTVMFFFRNKHIMIDLGTGNNNKINWAMEDKQEMVDIIETVYRGARKGRGLVVSPKDYSTKYRY

SEQ ID NO: 804957 - protein, 103 aa, Homo sapiens; identical to SEQ ID NO: 804956

SEQ ID NO: 804958 - protein, 119 aa, Homo sapiens
RLKREGQREVGDDQSERAACRRGEDKRQVKNFAVIYLVDITEVPDFNKMYELYDPCTVMFFFRNKHIMIDLGTGNNNKINWAMEDKQEMVDIIETVYRGARKGRGLVVSPKDYSTKYRY

SEQ ID NO: 804959 - protein, 104 aa, Homo sapiens
YGVTDSLTNQRYQVKNFAVIYLVDITEVPDFNKMYELYDPCTVMFFFRNKHIMIDLGTGNNNKINWAMEDKQEMVDIIETVYRGARKGRGLVVSPKDYSTKYRY

SEQ ID NO: 804960 - protein, 119 aa, Homo sapiens; identical to SEQ ID NO: 804958

SEQ ID NO: 804961 - protein, 124 aa, Homo sapiens
STHGVGACAPRRSAGWQSQRSLRVRAGPDFVRGPGGGGGRGVRGRLSPPRWALPGAPPWAAASARAAMSYMLPHLHNGWQVDQAILSEEDRVVVIRFGHDWDPTCMKMDEVLYSIAEKEQAHHD

SEQ ID NO: 804962 - protein, 209 aa, Homo sapiens; identical to SEQ ID NO: 804951

SEQ ID NO: 804963 - protein, 209 aa, Homo sapiens; identical to SEQ ID NO: 804951

SEQ ID NO: 804964 - protein, 143 aa, Homo sapiens
LEDPVQAALHNGWQVDQAILSEEDRVVVIRFGHDWDPTCMKMDEVLYSIAEKVKNFAVIYLVDITEVPDFNKMYELYDPCTVMFFFRNKHIMIDLGTGNNNKINWAMEDKQEMVDIIETVYRGARKGRGLVVSPKDYSTKYRY

SEQ ID NO: 804965 - protein, 134 aa, Homo sapiens
PTTTTKFAAASTEEDRVVVIRFGHDWDPTCMKMDEVLYSIAEKVKNFAVIYLVDITEVPDFNKMYELYDPCTVMFFFRNKHIMIDLGTGNNNKINWAMEDKQEMVDIIETVYRGARKGRGLVVSPKDYSTKYRY

SEQ ID NO: 804966 - protein, 103 aa, Homo sapiens; identical to SEQ ID NO: 804956

SEQ ID NO: 804967 - protein, 107 aa, Homo sapiens
RSRYLNIRVLYSIAEKVKNFAVIYLVDITEVPDFNKMYELYDPCTVMFFFRNKHIMIDLGTGNNNKINWAMEDKQEMVDIIETVYRGARKGRGLVVSPKDYSTKYRY

SEQ ID NO: 804968 - protein, 209 aa, Homo sapiens; identical to SEQ ID NO: 804951

SEQ ID NO: 804969 - protein, 121 aa, Homo sapiens
STHGVGACAPRRSAGWQSQRSLRVRAGPDFVRGPGGGGGRGVRGRLSPPRWALPGAPPWAAASARAAMSYMLPHLHNGWQVDQAILSEEDRVVVIRFGHDWDPTCMKMDEVLYSIAEKVVA

SEQ ID NO: 804970 - protein, 96 aa, Homo sapiens
AFFSDVNKSLSQWEKYGIVFKEFFFKETSMRMDALVSRCRNKHIMIDLGTGNNNKINWAMEDKQEMVDIIETVYRGARKGRGLVVSPKDYSTKYRY

SEQ ID NO: 804971 - protein, 121 aa, Homo sapiens; identical to SEQ ID NO: 804969

SEQ ID NO: 804972 - protein, 209 aa, Homo sapiens; identical to SEQ ID NO: 804951

SEQ ID NO: 804973 - protein, 103 aa, Homo sapiens; identical to SEQ ID NO: 804956

SEQ ID NO: 804974 - protein, 119 aa, Homo sapiens; identical to SEQ ID NO: 804958

SEQ ID NO: 804975 - protein, 158 aa, Homo sapiens
STHGVGACAPRRSAGWQSQRSLRVRAGPDFVRGPGGGGGRGVRGRLSPPRWALPGAPPWAAASARAAMSYMLPHLHNGWQVDQAILSEEDRVVVIRFGHDWDPTCMKMDEVLYSIAEKVKNFAVIYLVDITEVPDFNKMYELYDPCTVMFFFSYHRGW

SEQ ID NO: 804976 - protein, 124 aa, Homo sapiens; identical to SEQ ID NO: 804961

SEQ ID NO: 804977 - protein, 103 aa, Homo sapiens; identical to SEQ ID NO: 804956

SEQ ID NO: 804978 - protein, 162 aa, Homo sapiens
AAAAEVGPRAGDGPAPGSQGTSVRSSCCQAEGGPGQAQVWSYLQPTGPSSGGPPLGTSYGKRVTDLVLLCVSAASVGPLRETAGGSSSSLSAEPAFSSLLLKSGPGRVRAYRPCLRSPGLQELRAAPARWRGRGRFSGRLAWTRTGLWKLPALTGLPVTTAK

SEQ ID NO: 804979 - protein, 224 aa, Homo sapiens
RDPPGPVSGSGGQASGHTGTRGQLDTVGRGCPMDGVCLSGQQGRRVGVSEIIRGLCCPPLGGAEAGPDTLLEGTFFSLCVQGTSVRSSCCQAEGGPGQAQVWSYLQPTGPSSGGPPLGTSYGKRVTDLVLLCVSAASVGPLRETAGGSSSSLSAEPAFSSLLLKSGPGRVRAYRPCLRSPGLQELRAAPARWRGRGRFSGRLAWTRTGLWKLPALTGLPVTTAK

SEQ ID NO: 804980 - protein, 169 aa, Homo sapiens
AAAAEVGPRAGDGPAPGSQVTREGSQGTSVRSSCCQAEGGPGQAQVWSYLQPTGPSSGGPPLGTSYGKRVTDLVLLCVSAASVGPLRETAGGSSSSLSAEPAFSSLLLKSGPGRVRAYRPCLRSPGLQELRAAPARWRGRGRFSGRLAWTRTGLWKLPALTGLPVTTAK

SEQ ID NO: 804981 - protein, 162 aa, Homo sapiens; identical to SEQ ID NO: 804978

SEQ ID NO: 804982 - protein, 162 aa, Homo sapiens; identical to SEQ ID NO: 804978

SEQ ID NO: 804983 - protein, 98 aa, Homo sapiens
TISYIACCLSRTRTCTLIKGRSLRRVVEMSDSDPRCCLSRERNKLSTSASPRGPRPEPHAQDSPTAVPPLPADSNSSESAHSGLQGKCLGWFPAPRWR

SEQ ID NO: 804984 - protein, 127 aa, Homo sapiens
MAFPINDIVIFYALVFSLHCINVVAIKFWLRTRSVCGPRTYSKGALLGNAHPVGAGDPEGKDAALEPSACLPGHLCCLTLRRLHSEAFKIIIKKRKILQDTAPTLSAQSSPTRSIPKPFAGLARLVF

SEQ ID NO: 804985 - protein, 117 aa, Homo sapiens
MQRRGQPLENHVALIHWQSAGIPASKVHNYCNMKKSRLGRSRAVRISQPLLSPRRCPLHLTERGAGLLQPQPQGPVRTPGPPSGSHPSGRGQLNKHPKALRSVKGGDSHTARGARRP

SEQ ID NO: 804986 - protein, 146 aa, Homo sapiens
MKKSRLGRSRAVRISQPLLSPRRCPLHLTERGAGLLQPQPQGPVRTPGPPSGSHPAAADNWINTPKRCGRSRAGTATLRAGPAGRNKEWLDLAAACRGRGTSFRLAPLPGARAPSPTRKTAQQLFLPSPPTPTLRNLPTRGCRASV

SEQ ID NO: 804987 - protein, 105 aa, Homo sapiens
MDRRKGEPSKCENSSLLCHLFSQNPCGGGEGKSTGANPGVPPRPTWTSPTKEVGGVPCSLRGQEESAKLRSRSRRTPGTRQEVSVRPQRIHMPGSPGDTKPALGN

SEQ ID NO: 804988 - protein, 121 aa, Homo sapiens
DQRHPIPDPRAVAWAWQGGRLLGHHLRGPQGFGLGAGSAALLQALAVLAFRLTLPPLKQGIFRERKREPAEPRSVWRSHVSHGKPAHKTQQNPTQRSVLYRAHGLGACLKEDRPVYFCGCF

SEQ ID NO: 804989 - protein, 108 aa, Homo sapiens
QQRTINMQQSQVEKYKTLFEEANKKYDGLQQQLSSVERELENKRRLQKQAASSQSATEVRLNRALEEAEKYKLELSKLRQNNKMHIEAAKMLSFTEEEFMKALEWGNS

SEQ ID NO: 804990 - protein, 153 aa, Homo sapiens
QQRTINMQQSQVEKYKTLFEEANKKYDGLQQQLSSVERELENKRRLQKQAASSQSATEVRLNRALEEAEKYKLELSKLRQNNKDIANEEHKKIEVLKSENKKLEKQKGELMIGFKKQLKLIDVLKRQKMHIEAAKMLSFTEEEFMKALEWGNS

SEQ ID NO: 804991 - protein, 80 aa, Homo sapiens
SAQSSTPAFGVRGGKEQKQEPRDHSRLTRLGSPGTGHLGKSREDMAWSGKKVRMKKTVVQGDSQCLNHMAASCCHNPLAH

SEQ ID NO: 804992 - protein, 75 aa, Homo sapiens
RTEVPDVFTEFPNAISSFAISVPAIRPHVASAQSSTPAFGVRGGKEQKQEPRDHSRLTRYGRCRLNFYKTKPIRP

SEQ ID NO: 804993 - protein, 192 aa, Homo sapiens
MALLRKSYSEPQLKGIVTKLYSRQGYHLQLQADGTIDGTKDEDSTYTLFNLIPVGLRVVAIQGVQTKLYLAMNSEGYLYTSELFTPECKFKESVFENYYVTYSSMIYRQQQSGRGWYLGLNKEGEIMKGNHVKKNKPAAHFLPKPLKVAMYKEPSLHDLTEFSRSGSGTPTKSRSVSGVLNGGKSMSHNEST

SEQ ID NO: 804994 - protein, 245 aa, Homo sapiens
MAAAIASSLIRQKRQAREREKSNACKCVSSPSKGKTSCDKNKLNVFSRVKLFGSKKRRRRRPEPQLKGIVTKLYSRQGYHLQLQADGTIDGTKDEDSTYTLFNLIPVGLRVVAIQGVQTKLYLAMNSEGYLYTSELFTPECKFKESVFENYYVTYSSMIYRQQQSGRGWYLGLNKEGEIMKGNHVKKNKPAAHFLPKPLKVAMYKEPSLHDLTEFSRSGSGTPTKSRSVSGVLNGGKSMSHNEST

SEQ ID NO: 804995 - protein, 245 aa, Homo sapiens; identical to SEQ ID NO: 804994

SEQ ID NO: 804996 - protein, 255 aa, Homo sapiens
MSGKVTKPKEEKDASKVLDDAPPGTQEYIMLRQDSIQSAELKKKESPFRAKCHEIFCCPLKQVHHKENTEPEEPQLKGIVTKLYSRQGYHLQLQADGTIDGTKDEDSTYTLFNLIPVGLRVVAIQGVQTKLYLAMNSEGYLYTSELFTPECKFKESVFENYYVTYSSMIYRQQQSGRGWYLGLNKEGEIMKGNHVKKNKPAAHFLPKPLKVAMYKEPSLHDLTEFSRSGSGTPTKSRSVSGVLNGGKSMSHNEST

SEQ ID NO: 804997 - protein, 226 aa, Homo sapiens
MLRQDSIQSAELKKKESPFRAKCHEIFCCPLKQVHHKENTEPEEPQLKGIVTKLYSRQGYHLQLQADGTIDGTKDEDSTYTLFNLIPVGLRVVAIQGVQTKLYLAMNSEGYLYTSELFTPECKFKESVFENYYVTYSSMIYRQQQSGRGWYLGLNKEGEIMKGNHVKKNKPAAHFLPKPLKVAMYKEPSLHDLTEFSRSGSGTPTKSRSVSGVLNGGKSMSHNEST

SEQ ID NO: 804998 - protein, 261 aa, Homo sapiens
MRTSMKKVGMHHLSSSGGSYYLILDDAPPGTQEYIMLRQDSIQSAELKKKESPFRAKCHEIFCCPLKQVHHKENTEPEEPQLKGIVTKLYSRQGYHLQLQADGTIDGTKDEDSTYTLFNLIPVGLRVVAIQGVQTKLYLAMNSEGYLYTSELFTPECKFKESVFENYYVTYSSMIYRQQQSGRGWYLGLNKEGEIMKGNHVKKNKPAAHFLPKPLKVAMYKEPSLHDLTEFSRSGSGTPTKSRSVSGVLNGGKSMSHNEST

SEQ ID NO: 804999 - protein, 226 aa, Homo sapiens; identical to SEQ ID NO: 804997

SEQ ID NO: 805000 - protein, 226 aa, Homo sapiens; identical to SEQ ID NO: 804997

SEQ ID NO: 805001 - protein, 188 aa, Homo sapiens
  misc_feature (58)..(58): Xaa can be any naturally occurring amino acid
MSGKVTKPKEEKDASKEPQLKGIVTKLYSRQGYHLQLQADGTIDGTKDEDSTYTLFNXSSLWRSCQERSGVWGTFEFPPKTGTTAFPRKEPPEKTALGLNLFWGGPQKRLGPKNPERFADNGADKFHRLCGLNQEPQFQGPKTLFSLPKPNPPLGERVGPEEQFFRRLRPTIPKVVFILGERNFAILT

SEQ ID NO: 805002 - protein, 116 aa, Homo sapiens
MSGKVTKPKEEKDASKGKPARRVRLLSFPSFPSPPRVRAALRRLLASFPEPKLPMTSATPGEKGGQRSLGGGSRFAPLSLLPRGIVDPRVPPASSTSPLDARWWRCGQTKLLQPGA

SEQ ID NO: 805003 - protein, 394 aa, Homo sapiens
MAVPPSAPQPRASFHLRRHTPCPQCSWGMEEKAAASASCREPPGPPRAAAVAYFGISVDPDDILPGALRLIQELRPHWKPEQVRTKRFTDGITNKLVACYVEEDMQDCVLVRVYGERTELLVDRENEVRNFQLLRAHSCAPKLYCTFQNGLCYEYMQGVALEPEHIREPRLFRLIALEMAKIHTIHANGSLPKPILWHKMHNYFTLVKNEINPSLSADVPKVEVLERELAWLKEHLSQLESPVVFCHNDLLCKNIIYDSIKGHVRFIDYEYAGYNYQAFDIGNHFNEFAGVNEVDYCLYPARETQLQWLHYYLQAQKGMAVTPREVQRLYVQVNKFALGPSCVSSTMTASLQCCRVGNRHGEIARLTLSGLFPGVSLLLGSLGPHPEPVLHHRL

SEQ ID NO: 805004 - protein, 386 aa, Homo sapiens
MAVPPSAPQPRASFHLRRHTPCPQCSWGMEEKAAASASCREPPGPPRAAAVAYFGISVDPDDILPGALRLIQELRPHWKPEQVRTKRFTDGITNKLVACYVEEDMQDCVLVRVYGERTELLVDRENEVRNFQLLRAHSCAPKLYCTFQNGLCYEYMQGVALEPEHIREPRLFRLIALEMAKIHTIHANGSLPKPILWHKMHNYFTLVKNEINPSLSADVPKVEVLERELAWLKEHLSQLESPVVFCHNDLLCKNIIYDSIKGHVRFIDYEYAGYNYQAFDIGNHFNEFAGVNEVDYCLYPARETQLQWLHYYLQAQKGMAVTPREVQRLYVQVNKFALASHFFWALWALIQNQYSTIDFDFLRYAVIRFNQYFKVKPQASALEMPK

SEQ ID NO: 805005 - protein, 345 aa, Homo sapiens
MAVPPSAPQPRASFHLRRHTPCPQCSWGMEEKAAASASCREPPGPPRAAAVAYFGISVDPDDILPGALRLIQELRPHWKPEQVRTKRFTDGITNKLVACYVEEDMQDCVLVRVYGERTELLVDRENEVRNFQLLRAHSCAPKLYCTFQNGLCYEYMQGVALEPEHIREPRLFSLSADVPKVEVLERELAWLKEHLSQLESPVVFCHNDLLCKNIIYDSIKGHVRFIDYEYAGYNYQAFDIGNHFNEFAGVNEVDYCLYPARETQLQWLHYYLQAQKGMAVTPREVQRLYVQVNKFALASHFFWALWALIQNQYSTIDFDFLRYAVIRFNQYFKVKPQASALEMPK

SEQ ID NO: 805006 - protein, 386 aa, Homo sapiens; identical to SEQ ID NO: 805004

SEQ ID NO: 805007 - protein, 386 aa, Homo sapiens; identical to SEQ ID NO: 805004

SEQ ID NO: 805008 - protein, 208 aa, Homo sapiens
MAKIHTIHANGSLPKPILWHKMHNYFTLVKNEINPSLSADVPKVEVLERELAWLKEHLSQLESPVVFCHNDLLCKNIIYDSIKGHVRFIDYEYAGYNYQAFDIGNHFNEFAGVNEVDYCLYPARETQLQWLHYYLQAQKGMAVTPREVQRLYVQVNKFALASHFFWALWALIQNQYSTIDFDFLRYAVIRFNQYFKVKPQASALEMPK

SEQ ID NO: 805009 - protein, 225 aa, Homo sapiens
MGSLSRPSFSDRLIALEMAKIHTIHANGSLPKPILWHKMHNYFTLVKNEINPSLSADVPKVEVLERELAWLKEHLSQLESPVVFCHNDLLCKNIIYDSIKGHVRFIDYEYAGYNYQAFDIGNHFNEFAGVNEVDYCLYPARETQLQWLHYYLQAQKGMAVTPREVQRLYVQVNKFALASHFFWALWALIQNQYSTIDFDFLRYAVIRFNQYFKVKPQASALEMPK

SEQ ID NO: 805010 - protein, 141 aa, Homo sapiens
MWIAYSPGIQDQPRQCGHVRFIDYEYAGYNYQAFDIGNHFNEFAGVNEVDYCLYPARETQLQWLHYYLQAQKGMAVTPREVQRLYVQVNKFALASHFFWALWALIQNQYSTIDFDFLRYAVIRFNQYFKVKPQASALEMPK

SEQ ID NO: 805011 - protein, 148 aa, Homo sapiens
QGFGWLVSWLHGAVLPAGTWTSKSHVRFIDYEYAGYNYQAFDIGNHFNEFAGVNEVDYCLYPARETQLQWLHYYLQAQKGMAVTPREVQRLYVQVNKFALASHFFWALWALIQNQYSTIDFDFLRYAVIRFNQYFKVKPQASALEMPK

SEQ ID NO: 805012 - protein, 385 aa, Homo sapiens
MAVPPSAPQPRASFHLRRHTPCPQCSWGMEEKAAASASCREPPGPPRAAAVAYFGISVDPDDILPGALRLIQELRPHWKPEQVRTKRFTDGITNKLVACYVEEDMQDCVLVRVYGERTELLVDRENEVRNFQLLRAHSCAPKLYCTFQNGLCYEYMQGVALEPEHIREPRLFRLIALEMAKIHTIHANGSLPKPILWHKMHNYFTLVKNEINPSLSADVPKVEVLERELAWLKEHLSQLESPVVFCHNDLLCKNIIYDSIKGHVRFIDYEYAGYNYQAFDIGNHFNEFAGVNEVDYCLYPARETQLQWLHYYLQAQKGMAVTPREVQRLYVQVNKFALASHFFWALWALIQNQYSTIDFDFLRYAVIRFNQYFKLLGPSWLWPRK

SEQ ID NO: 805013 - protein, 145 aa, Homo sapiens
TARAPHAWGELPARRQAMQPPLRLRSQDQPGQEGPGDTEASQTEPGSSAVTLQEQPSLSQNESDVFSWVIRREFQELRHPVDEEKARCLEGIGGHTRGLVASLDMQLEQAQGTRERLAQAECVLEQFGNEDHHEFIWKFHSMASR

SEQ ID NO: 805014 - protein, 315 aa, Homo sapiens
MPELLVFPAQTDLHEHPLYRAGHLILQDRASCLPAMLLDPRQAPMSWMPVPPQAIKTSHLAALLKNQGKIFAFDLDARRLASMATLLAWAGVSCCELAEEDFLAVSPLDPRYREVHYVLLDPSCSGSGMPSRQLEEPGAGTPSPVRLHALAGFQQRALCHALTFPSLQRLVYSMCSLCQEENEDMVQDALQQNPGAFRLAPALPARPHRGLSTFPGAEHCLRASPKTTLSGGFFVAVIERVEMPTSASQAKASAPERTPSPAPKRKKRAKSCSRCLHTALHIAEAPGSLLPGGKGRCLSSPWRTLGPHRRQQFAF

SEQ ID NO: 805015 - protein, 315 aa, Homo sapiens; identical to SEQ ID NO: 805014

SEQ ID NO: 805016 - protein, 81 aa, Homo sapiens
RGNMGLYAAVAGVLAGVESRQGSIKGLVYSSNFQNVKQLYALVCETQRYSAVLDAVISSAGLLSAKKLQPHLAKGRGGAGK

SEQ ID NO: 805017 - protein, 78 aa, Homo sapiens
RGNMGLYAAVAGVLAGVESRQGSIKGLVYSSNFQNVKQLYALVCETQRYSAVLDAVISSAGLLSAKKLQPHLAKGASV

SEQ ID NO: 805018 - protein, 366 aa, Homo sapiens
RGTWGCTLRWQACWPAWRAARALSRGWCTPATSSLDDLRALKGKHFLLDPLMPELLVFPAQTDLHEHPLYRAGHLILQDRASCLPAMLLDPRQAPMSWMPVPPQAIKTSHLAALLKNQGKIFAFDLDARRLASMATLLAWAGVSCCELAEEDFLAVSPLDPRYREVHYVLLDPSCSGSGMPSRQLEEPGAGTPSPVRLHALAGFQQRALCHALTFPSLQRLVYSMCSLCQEENEDMVQDALQQNPGAFRLAPALPARPHRGLSTFPGAEHCLRASPKTTLSGGFFVAVIERVEMPTSASQAKASAPERTPSPAPKRKKRAKSCSRCLHTALHIAEAPGSLLPGGKGRCLSSPWRTLGPHRRQQFAF

SEQ ID NO: 805019 - protein, 265 aa, Homo sapiens
MAWQVSLLELEDWLQCPICLEVFKESLMLQCGHSYCKGCLVSLSYHLDTKVRCPMCWQVVDGSSSLPNVSLAWVIEALRLPGDPEPKVCVHHRNPLSLFCEKDQELICGLCGLLGSHQHHPVTPVSTVCSRMKEELAALFSELKQEQKKVDELIAKLVKNRTRIVNESDVFSWVIRREFQELRHPVDEEKARCLEGIGGHTRGLVASLDMQLEQAQGTRERLAQAECVLEQFGNEDHHEFIWKFHSMASSLTSASQAAAYSWLYN

SEQ ID NO: 805020 - protein, 187 aa, Homo sapiens
MPSRQLEEPGAGTPSPVRLHALAGFQQRALCHALTFPSLQRLVYSMCSLCQEENEDMVQDALQQNPGAFRLAPALPARPHRGLSTFPGAEHCLRASPKTTLSGGFFVAVIERVEMPTSASQAKASAPERTPSPAPKRKKRAKSCSRCLHTALHIAEAPGSLLPGGKGRCLSSPWRTLGPHRRQQFAF

SEQ ID NO: 805021 - protein, 213 aa, Homo sapiens
MPELLVFPAQTDLHEHPLYRAGHLILQDRASCLPAMLLDPRQAPMSWMPVPPQAIKTSHLAALLKNQGKIFAFDLDARRLASMATLLAWAGVSCCELAEEDFLAVSPLDPRYREVHYVLLDPSCSGSGMPSRQLEEPGAGTPSPRLVYSMCSLCQEENEDMVQDALQQNPGAFRLKSRPGCRAHRRPETSRVQHWSGVPPDQLGGYSGRLTGQ

SEQ ID NO: 805022 - protein, 455 aa, Homo sapiens
AREHGAVRCGGRRAGRRGEPPGLYQGAGVLQQLPEREAAVRAGVRNAALLRRAGCRDLQRRPPQCEEAAAAPGQGLDGVPWRDLGSPQPLPPGFKRFSCFSLLSSWDYEGVACPSTSVGYLISLDDLRALKGKHFLLDPLMPELLVFPAQTDLHEHPLYRAGHLILQDRASCLPAMLLDPRQAPMSWMPVPPQAIKTSHLAALLKNQGKIFAFDLDARRLASMATLLAWAGVSCCELAEEDFLAVSPLDPRYREVHYVLLDPSCSGSGMPSRQLEEPGAGTPSPVRLHALAGFQQRALCHALTFPSLQRLVYSMCSLCQEENEDMVQDALQQNPGAFRLAPALPARPHRGLSTFPGAEHCLRASPKTTLSGGFFVAVIERVEMPTSASQAKASAPERTPSPAPKRKKRAKSCSRCLHTALHIAEAPGSLLPGGKGRCLSSPWRTLGPHRRQQFAF

SEQ ID NO: 805023 - protein, 78 aa, Homo sapiens; identical to SEQ ID NO: 805017

SEQ ID NO: 805024 - protein, 222 aa, Homo sapiens
AREHGAVRCGGRRAGRRGEPPGLYQGAGVLQQLPEREAAVRAGVRNAALLRRAGCRDLQRRPPQCEEAAAAPGQGLDDLRALKGKHFLLDPLMPELLVFPAQTDLHEHPLYRAGHLILQDRASCLPAMLLDPRQAPMSWMPVPPQAIKTSHLAALLKNQGKIFAFDLDARRLASMATLLAWAGVSCCELAEEDFLAVSPLDPRYREVHYVLLDPSCSGSGRW

SEQ ID NO: 805025 - protein, 142 aa, Homo sapiens
MCSLCQEENEDMVQDALQQNPGAFRLAPALPARPHRGLSTFPGAEHCLRASPKTTLSGGFFVAVIERVEMPTSASQAKASAPERTPSPAPKRKKRAKSCSRCLHTALHIAEAPGSLLPGGKGRCLSSPWRTLGPHRRQQFAF

SEQ ID NO: 805026 - protein, 250 aa, Homo sapiens
MAWQVSLLELEDWLQCPICLEVFKESLMLQCGHSYCKGCLVSLSYHLDTKVRCPMCWQVVDGSSSLPNVSLAWVIEALRLPGDPEPKVCVHHRNPLSLFCEKDQELICGLCGLLGSHQHHPVTPVSTVCSRMKEELAALFSELKQEQKKVDELIAKLVKNRTRIVNESDVFSWVIRREFQELRHPVDEEKARCLEGIGGHTRGLVASLDMQLEQAQGTRERLAQAECVLEQFGNEDHHEFIWKFHSMASR

SEQ ID NO: 805027 - protein, 187 aa, Homo sapiens; identical to SEQ ID NO: 805020

SEQ ID NO: 805028 - protein, 1058 aa, Homo sapiens
MDLGPLNICEEMTILHGGFLLAEQLFHPKALAELTKSDWERVGRPIVEALREISSAAAHSQPFAWKKKALIIIWAKVLQPHPVTPSDTETRWQEDLFFSVGNMIPTINHTILFELLKSLEASGLFIQLLMALPTTICHAELERFLEHVTVDTSAEDVAFFLDVWWEVMKHKGHPQDPLLSQFSAMAHKYLPALDEFPHPPKRLRSDPDACPTMPLLAMLLRGLTQIQSRILGPGRKCCALANLADMLTVFALTEDDPQEVSATVYLDKLATVISVWNSDTQNPYHQQALAEKVKEAERDVSLTSLAKLPSETIFVGCEFLHHLLREWGEELQAVLRSSQGTSYDSYRLCDSLTSFSQNATLYLNRTSLSKEDRQVVSELAECVRDFLRKTSTVLKNRALEDITASIAMAVIQQKMDRHMEVCYIFASEKKWAFSDEWVACLGSNRALFREPDLVLRLLETVIDVSTADRAIPESQIRQVIHLILECYADLSLPGKNKVLAGILRSWGRKGLSEKLLAYVEGFQEDLNTTFNQLTQSASEQGLAKAVASVARLVIVHPEVTVKKMCSLAVVNLGTHKFLGQILTAFPALRFVEEQGPNSSATFMVSCLKETVWMKFSTPKEEKQFLELLNCLMSPVKPQGIPVAALLEPDEVLKEFVLPFLRLDVEEVDLSLRIFIQTLEANACREEYWLQTCSPFPLLFSLCQLLDRFSKYWQLPKEKRCLSLDRKDLAIHILELLCEIVSANAETFSPDVWIKSLSWLHRKLEQLDWTVGLRLKSFFEGHFKCEVPATLFEICKLSEDEWTSQAHPGYGAGTGLLAWMECCCVSSGISERMLSLLVVDVGNPEEVRLFSKGFLVALVQVMPWCSPQEWQRLHQLTRRLLEKQLLHVPYSLEYIQFVPLLNLKPFAQELQLSVLFLRTFQFLCSHSCRNWLPLEGWNHVVKLLCGSLTRLLDSVRAIQAAGPWVQGPEQDLTQEALFVYTQVFCHALHIMAMLHPEVCEPLYVLALETLTCYETLSKTNPSVSSLLQRAHEQRFLKSIAEGIGPEERRQTLLQKMSSF

SEQ ID NO: 805029 - protein, 1047 aa, Homo sapiens
MTILHGGFLLAEQLFHPKALAELTKSDWERVGRPIVEALREISSAAAHSQPFAWKKKALIIIWAKVLQPHPVTPSDTETRWQEDLFFSVGNMIPTINHTILFELLKSLEASGLFIQLLMALPTTICHAELERFLEHVTVDTSAEDVAFFLDVWWEVMKHKGHPQDPLLSQFSAMAHKYLPALDEFPHPPKRLRSDPDACPTMPLLAMLLRGLTQIQSRILGPGRKCCALANLADMLTVFALTEDDPQEVSATVYLDKLATVISVWNSDTQNPYHQQALAEKVKEAERDVSLTSLAKLPSETIFVGCEFLHHLLREWGEELQAVLRSSQGTSYDSYRLCDSLTSFSQNATLYLNRTSLSKEDRQVVSELAECVRDFLRKTSTVLKNRALEDITASIAMAVIQQKMDRHMEVCYIFASEKKWAFSDEWVACLGSNRALFREPDLVLRLLETVIDVSTADRAIPESQIRQVIHLILECYADLSLPGKNKVLAGILRSWGRKGLSEKLLAYVEGFQEDLNTTFNQLTQSASEQGLAKAVASVARLVIVHPEVTVKKMCSLAVVNLGTHKFLGQILTAFPALRFVEEQGPNSSATFMVSCLKETVWMKFSTPKEEKQFLELLNCLMSPVKPQGIPVAALLEPDEVLKEFVLPFLRLDVEEVDLSLRIFIQTLEANACREEYWLQTCSPFPLLFSLCQLLDRFSKYWQLPKEKRCLSLDRKDLAIHILELLCEIVSANAETFSPDVWIKSLSWLHRKLEQLDWTVGLRLKSFFEGHFKCEVPATLFEICKLSEDEWTSQAHPGYGAGTGLLAWMECCCVSSGISERMLSLLVVDVGNPEEVRLFSKGFLVALVQVMPWCSPQEWQRLHQLTRRLLEKQLLHVPYSLEYIQFVPLLNLKPFAQELQLSVLFLRTFQFLCSHSCRNWLPLEGWNHVVKLLCGSLTRLLDSVRAIQAAGPWVQGPEQDLTQEALFVYTQVFCHALHIMAMLHPEVCEPLYVLALETLTCYETLSKTNPSVSSLLQRAHEQRFLKSIAEGIGPEERRQTLLQKMSSF

SEQ ID NO: 805030 - protein, 1047 aa, Homo sapiens; identical to SEQ ID NO: 805029

SEQ ID NO: 805031 - protein, 1062 aa, Homo sapiens
MFEACSQGPLNICEEMTILHGGFLLAEQLFHPKALAELTKSDWERVGRPIVEALREISSAAAHSQPFAWKKKALIIIWAKVLQPHPVTPSDTETRWQEDLFFSVGNMIPTINHTILFELLKSLEASGLFIQLLMALPTTICHAELERFLEHVTVDTSAEDVAFFLDVWWEVMKHKGHPQDPLLSQFSAMAHKYLPALDEFPHPPKRLRSDPDACPTMPLLAMLLRGLTQIQSRILGPGRKCCALANLADMLTVFALTEDDPQEVSATVYLDKLATVISVWNSDTQNPYHQQALAEKVKEAERDVSLTSLAKLPSETIFVGCEFLHHLLREWGEELQAVLRSSQGTSYDSYRLCDSLTSFSQNATLYLNRTSLSKEDRQVVSELAECVRDFLRKTSTVLKNRALEDITASIAMAVIQQKMDRHMEVCYIFASEKKWAFSDEWVACLGSNRALFREPDLVLRLLETVIDVSTADRAIPESQIRQVIHLILECYADLSLPGKNKVLAGILRSWGRKGLSEKLLAYVEGFQEDLNTTFNQLTQSASEQGLAKAVASVARLVIVHPEVTVKKMCSLAVVNLGTHKFLGQILTAFPALRFVEEQGPNSSATFMVSCLKETVWMKFSTPKEEKQFLELLNCLMSPVKPQGIPVAALLEPDEVLKEFVLPFLRLDVEEVDLSLRIFIQTLEANACREEYWLQTCSPFPLLFSLCQLLDRFSKYWQLPKEKRCLSLDRKDLAIHILELLCEIVSANAETFSPDVWIKSLSWLHRKLEQLDWTVGLRLKSFFEGHFKCEVPATLFEICKLSEDEWTSQAHPGYGAGTGLLAWMECCCVSSGISERMLSLLVVDVGNPEEVRLFSKGFLVALVQVMPWCSPQEWQRLHQLTRRLLEKQLLHVPYSLEYIQFVPLLNLKPFAQELQLSVLFLRTFQFLCSHSCRNWLPLEGWNHVVKLLCGSLTRLLDSVRAIQAAGPWVQGPEQDLTQEALFVYTQVFCHALHIMAMLHPEVCEPLYVLALETLTCYETLSKTNPSVSSLLQRAHEQRFLKSIAEGIGPEERRQTLLQKMSSF

SEQ ID NO: 805032 - protein, 1062 aa, Homo sapiens; identical to SEQ ID NO: 805031

SEQ ID NO: 805033 - protein, 971 aa, Homo sapiens
MDLGPLNICEEMTILHGGFLLAEQLFHPKALAELTKSDWERVGRPIVEALREISSAAAHSQPFAWKKKALIIIWAKVLQPHPVTPSDTETRWQEDLFFSVGNMIPTINHTILFELLKSLEASGLFIQLLMALPTTICHAELERFLEHVTVDTSAEDVAFFLDVWWERTTRQEVSATVYLDKLATVISVWNSDTQNPYHQQALAEKVKEAERDVSLTSLAKLPSETIFVGCEFLHHLLREWGEELQAVLRSSQGTSYDSYRLCDSLTSFSQNATLYLNRTSLSKEDRQVVSELAECVRDFLRKTSTVLKNRALEDITASIAMAVIQQKMDRHMEVCYIFASEKKWAFSDEWVACLGSNRALFREPDLVLRLLETVIDVSTADRAIPESQIRQVIHLILECYADLSLPGKNKVLAGILRSWGRKGLSEKLLAYVEGFQEDLNTTFNQLTQSASEQGLAKAVASVARLVIVHPEVTVKKMCSLAVVNLGTHKFLGQILTAFPALRFVEEQGPNSSATFMVSCLKETVWMKFSTPKEEKQFLELLNCLMSPVKPQGIPVAALLEPDEVLKEFVLPFLRLDVEEVDLSLRIFIQTLEANACREEYWLQTCSPFPLLFSLCQLLDRFSKYWQLPKEKRCLSLDRKDLAIHILELLCEIVSANAETFSPDVWIKSLSWLHRKLEQLDWTVGLRLKSFFEGHFKCEVPATLFEICKLSEDEWTSQAHPGYGAGTGLLAWMECCCVSSGISERMLSLLVVDVGNPEEVRLFSKGFLVALVQVMPWCSPQEWQRLHQLTRRLLEKQLLHVPYSLEYIQFVPLLNLKPFAQELQLSVLFLRTFQFLCSHSCRNWLPLEGWNHVVKLLCGSLTRLLDSVRAIQAAGPWVQGPEQDLTQEALFVYTQVFCHALHIMAMLHPEVCEPLYVLALETLTCYETLSKTNPSVSSLLQRAHEQRFLKSIAEGIGPEERRQTLLQKMSSF

SEQ ID NO: 805034 - protein, 1058 aa, Homo sapiens; identical to SEQ ID NO: 805028

SEQ ID NO: 805035 - protein, 1058 aa, Homo sapiens; identical to SEQ ID NO: 805028

SEQ ID NO: 805036 - protein, 1058 aa, Homo sapiens; identical to SEQ ID NO: 805028

SEQ ID NO: 805037 - protein, 116 aa, Homo sapiens
THTHHAPRHHHHAHRRRFLELFPPVLCLRHLHPMSCPDLVFWAWLLLLLFKRSLWFYEGCLAGRGWARPGFRCLWPCQPREEAAEAEQLLLKTARDSSSQPPPAALSTPLSLPSGC

SEQ ID NO: 805038 - protein, 107 aa, Homo sapiens
VGAGRTVTPSLRVNTGLDCQKGPRPGTRDDAGPGDAFLEAEKPGGRPPKLLSSPTPWSQRERRWAVPQQGRRHCRGITLVRACWHGGHSAQGGRTHAPNGRHAVVPA

SEQ ID NO: 805039 - protein, 81 aa, Homo sapiens
VGAGRTVTPSLRVNTGLDCQKGPRPGTRDDAGPGDAFLEAEKPGGRPPKLLSSPTPWSQRERSIPKEHSSLSLKEPLRLGV

SEQ ID NO: 805040 - protein, 81 aa, Homo sapiens; identical to SEQ ID NO: 805039

SEQ ID NO: 805041 - protein, 50 aa, Homo sapiens
MFNHQESSRRRGRGTGRGDCAQNEGSGQKQLRKRAKAGRRVTAGGGHQRP

SEQ ID NO: 805042 - protein, 579 aa, Homo sapiens
GVRSSRQRPHPGALRNPTACPLPHFPPSLPPTHSPTHPPRAGTAAQAPGPRRLLAAILDFLLLQDPASTCVPEPASQHTLRSGPGCLQQPEQQGVRDPGGIWAKLGAAEASAERLQGRRSRGASGSEPQQMGSDVRDLNALLPAVPSLGGGGGCALPVSGAAQWAPVLDFAPPGASAYGSLGGPAPPPAPPPPPPPPPHSFIKQEPSWGGAEPHEEQCLSAFTVHFSGQFTGTAGACRYGPFGPPPPSQASSGQARMFPNAPYLPSCLESQPAIRNQGYSTVTFDGTPSYGHTPSHHAAQFPNHSFKHEDPMGQQGSLGEQQYSVPPPVYGCHTPTDSCTGSQALLLRTPYSSDNLYQMTSQLECMTWNQMNLGATLKGVAAGSSSSVKWTEGQSNHSTGYESDNHTTPILCGAQYRIHTHGVFRGIQDVRRVPGVAPTLVRSASETSEKRPFMCAYPGCNKRYFKLSHLQMHSRKHTGEKPYQCDFKDCERRFSRSDQLKRHQRRHTGVKPFQCKTCQRKFSRSDHLKTHTRTHTGKTSEKPFSCRWPSCQKKFARSDELVRHHNMHQRNMTKLQLAL

SEQ ID NO: 805043 - protein, 562 aa, Homo sapiens
GVRSSRQRPHPGALRNPTACPLPHFPPSLPPTHSPTHPPRAGTAAQAPGPRRLLAAILDFLLLQDPASTCVPEPASQHTLRSGPGCLQQPEQQGVRDPGGIWAKLGAAEASAERLQGRRSRGASGSEPQQMGSDVRDLNALLPAVPSLGGGGGCALPVSGAAQWAPVLDFAPPGASAYGSLGGPAPPPAPPPPPPPPPHSFIKQEPSWGGAEPHEEQCLSAFTVHFSGQFTGTAGACRYGPFGPPPPSQASSGQARMFPNAPYLPSCLESQPAIRNQGYSTVTFDGTPSYGHTPSHHAAQFPNHSFKHEDPMGQQGSLGEQQYSVPPPVYGCHTPTDSCTGSQALLLRTPYSSDNLYQMTSQLECMTWNQMNLGATLKGHSTGYESDNHTTPILCGAQYRIHTHGVFRGIQDVRRVPGVAPTLVRSASETSEKRPFMCAYPGCNKRYFKLSHLQMHSRKHTGEKPYQCDFKDCERRFSRSDQLKRHQRRHTGVKPFQCKTCQRKFSRSDHLKTHTRTHTGKTSEKPFSCRWPSCQKKFARSDELVRHHNMHQRNMTKLQLAL

SEQ ID NO: 805044 - protein, 305 aa, Homo sapiens
MEKGYSTVTFDGTPSYGHTPSHHAAQFPNHSFKHEDPMGQQGSLGEQQYSVPPPVYGCHTPTDSCTGSQALLLRTPYSSDNLYQMTSQLECMTWNQMNLGATLKGVAAGSSSSVKWTEGQSNHSTGYESDNHTTPILCGAQYRIHTHGVFRGIQDVRRVPGVAPTLVRSASETSEKRPFMCAYPGCNKRYFKLSHLQMHSRKHTGEKPYQCDFKDCERRFSRSDQLKRHQRRHTGVKPFQCKTCQRKFSRSDHLKTHTRTHTGKTSEKPFSCRWPSCQKKFARSDELVRHHNMHQRNMTKLQLAL

SEQ ID NO: 805045 - protein, 171 aa, Homo sapiens
MGHHHHHHHHHHSSGHIEGRDVRRVPGVAPTLVRSASETSEKRPFMCAYPGCNKRYFKLSHLQMHSRKHTGEKPYQCDFKDCERRFSRSDQLKRHQRRHTGVKPFQCKTCQRKFSRSDHLKTHTRTHTGKTSEKPFSCRWPSCQKKFARSDELVRHHNMHQRNMTKLQLAL

SEQ ID NO: 805046 - protein, 305 aa, Homo sapiens; identical to SEQ ID NO: 805044

SEQ ID NO: 805047 - protein, 107 aa, Homo sapiens
LRLFLDFLQSQCTSCRACVGKSARTHRRESLMKARACWKTNRAFEKRGAAFVLTRARDLYCLNTPSNDHLQACAATPVRRHAGQYERRGSQHRHKTLCYYFRLTCGC

SEQ ID NO: 805048 - protein, 107 aa, Homo sapiens; identical to SEQ ID NO: 805047

SEQ ID NO: 805049 - protein, 271 aa, Homo sapiens
ALRARAGSAAAAGGQAGRPAGGCAEGWCPAAGGRGAVGGGGWAGGCRLRSGRARRPCGHAMDFNMKKLASDAGIFFTRAVQFTEEKFGQAEKTELDAHFENLLARADSTKNWTEKILRQTEVLLQPNPSARVEEFLYEKLDRKVPSRVTNGELLAQYMADAASELGPTTPYGKTLIKVAEAEKQLGAAERDFIHTASISFLTPLRNFLEGDWKTISKERRLLQNRRLDLDACKARLKKAKAAEAKATTVPDFQETRPRNYILSASASAALE

SEQ ID NO: 805050 - protein, 216 aa, Homo sapiens
GTREHLAFWKNPCLGWDCARQTRWHGPEPTWTDFCTEANKWRVGWWVGEFTEEKFGQAEKTELDAHFENLLARADSTKNWTEKILRQTEVLLQPNPSARVEEFLYEKLDRKVPSRVTNGELLAQYMADAASELGPTTPYGKTLIKVAEAEKQLGAAERDFIHTASISFLTPLRNFLEGDWKTISKERRFLQNPPLDLVSCQRGSKRAQGLKPQPPF

SEQ ID NO: 805051 - protein, 207 aa, Homo sapiens
ALRARAGSAAAAGGQAGRPAGGCAEGWCPAAGGRGAVGGGGWAGGCRLRSGRARRPCGHAMDFNMKKLASDAGIFFTRAVQFTEEKFGQAEKTELDAHFENLLARADSTKNWTEKILRQTEVLLQPNPSARVEEFLYEKLDRKVPSRVTNGELLAQYMADAASELGPTTPYDGVSLCHPGWSAVAQSRLTASSSSRVHAILLPQPPE

SEQ ID NO: 805052 - protein, 271 aa, Homo sapiens; identical to SEQ ID NO: 805049

SEQ ID NO: 805053 - protein, 254 aa, Homo sapiens
ALRARAGSAAAAGGQAGRPAGGCAEGWCPAAGGRGAVGGGGHAMDFNMKKLASDAGIFFTRAVQFTEEKFGQAEKTELDAHFENLLARADSTKNWTEKILRQTEVLLQPNPSARVEEFLYEKLDRKVPSRVTNGELLAQYMADAASELGPTTPYGKTLIKVAEAEKQLGAAERDFIHTASISFLTPLRNFLEGDWKTISKERRLLQNRRLDLDACKARLKKAKAAEAKATTVPDFQETRPRNYILSASASAALE

SEQ ID NO: 805054 - protein, 126 aa, Homo sapiens
MLDLQKQLGARFPGTFVGTTEPASPPLSSTSPTTAAATMPVVPSVASLAPPGEASLCLEEVAPPASGTRKARVLYDYEAADSSELALLADELITVYSLPGMDPDWLIGERGNKKGKVPVTYLELLS

SEQ ID NO: 805055 - protein, 126 aa, Homo sapiens; identical to SEQ ID NO: 805054

SEQ ID NO: 805056 - protein, 126 aa, Homo sapiens; identical to SEQ ID NO: 805054

SEQ ID NO: 805057 - protein, 250 aa, Homo sapiens
ALRARAGSAAAAGGQAGRPAGGCAEGWCPAAGGRGAVGGGGWAGGCRLRSGRARRPCGHAMDFNMKKLASDAGIFFTRAVQFTEEKFGQAEKTELDAHFENLLARADSTKNWTEKILRQTEVLLQPNPSARVEEFLYEKLDRKVPSRVTNGELLAQYMADAASELGPTTPYGKTLIKVAEAEKQLGAAERDFIHTASISFLTPLRNFLEGDWKTISKERRLLQNRRLDLDACKARLKKAKAAEAKATALE

SEQ ID NO: 805058 - protein, 271 aa, Homo sapiens; identical to SEQ ID NO: 805049

SEQ ID NO: 805059 - protein, 245 aa, Homo sapiens
MRHVRGTGTASPQLPCRASAQSQLLFGRGGRGAGTGSRVQLSSSPLPCWPLLLPSPQLWNDEVDKAEQELRVAQTEFDRQAEVTRLLLEGISSTHVNHLRCLHEFVKSQTTYYAQCYRHMLDLQKQLGARFPGTFVGTTEPASPPLSSTSPTTAAATMPVVPSVASLAPPGEASLCLEEVAPPASGTRKARVLYDYEAADSSELALLADELITVYSLPGMDPDWLIGERGNKKGKVPVTYLELLS

SEQ ID NO: 805060 - protein, 227 aa, Homo sapiens
LLHPGGAVHGGEIWPKPRRCLTFRRLDLVITFSRPAPPRLWNDEVDKAEQELRVAQTEFDRQAEVTRLLLEGISSTHVNHLRCLHEFVKSQTTYYAQCYRHMLDLQKQLGARFPGTFVGTTEPASPPLSSTSPTTAAATMPVVPSVASLAPPGEASLCLEEVAPPASGTRKARVLYDYEAADSSELALLADELITVYSLPGMDPDWLIGERGNKKGKVPVTYLELLS

SEQ ID NO: 805061 - protein, 256 aa, Homo sapiens
MGDGGRVCHCSCLWGPEWGSSFSGVGAPGVKSGIDPEGSLCSQGKGTGGSQVGSRRRLRGSWWVVCGCSWLPCPAQAEQELRVAQTEFDRQAEVTRLLLEGISSTHVNHLRCLHEFVKSQTTYYAQCYRHMLDLQKQLGARFPGTFVGTTEPASPPLSSTSPTTAAATMPVVPSVASLAPPGEASLCLEEVAPPASGTRKARVLYDYEAADSSELALLADELITVYSLPGMDPDWLIGERGNKKGKVPVTYLELLS

SEQ ID NO: 805062 - protein, 317 aa, Homo sapiens
  misc_feature (2)..(2): Xaa can be any naturally occurring amino acid
NXRPAAAGSLDRSRNLEEAAATEQGGGCDQVDSSPVPRYRVNAKKLTPLLPPPLTDMDSTLDSSTGSLLKTNNHIGGGAFSVDSPQREDALSVGQRQYLGKLAAGVPNNCQEHGSVPSLGKPLPLLSLIKDTGLSQAAEQELRVAQTEFDRQAEVTRLLLEGISSTHVNHLRCLHEFVKSQTTYYAQCYRHMLDLQKQLGARFPGTFVGTTEPASPPLSSTSPTTAAATMPVVPSVASLAPPGEASLCLEEVAPPASGTRKARVLYDYEAADSSELALLADELITVYSLPGMDPDWLIGERGNKKGKVPVTYLELLS

SEQ ID NO: 805063 - protein, 223 aa, Homo sapiens
MGDGGRVCHCSCLWGPEWGSSFSGVGAPGVKSGIDPEGSLCSQGKGTGGSQVGSRRRLRGSWWVVCGCSWLPCPAQAEQELRVAQTEFDRQAEVTRLLLEGISSTHVNHLRCLHEFVKSQTTYYAQCYRHMLDLQKQLGASSSLSTACLAWTLTGSLAREATRRARSLSPTWNCSARQVPPSPPHSGLGRRGWAQPCHLTCLLVTQLFRVGRIHPILSLPLVT

SEQ ID NO: 805064 - protein, 271 aa, Homo sapiens; identical to SEQ ID NO: 805049

SEQ ID NO: 805065 - protein, 271 aa, Homo sapiens; identical to SEQ ID NO: 805049

SEQ ID NO: 805066 - protein, 271 aa, Homo sapiens; identical to SEQ ID NO: 805049

SEQ ID NO: 805067 - protein, 271 aa, Homo sapiens; identical to SEQ ID NO: 805049

SEQ ID NO: 805068 - protein, 271 aa, Homo sapiens; identical to SEQ ID NO: 805049

SEQ ID NO: 805069 - protein, 271 aa, Homo sapiens; identical to SEQ ID NO: 805049

SEQ ID NO: 805070 - protein, 271 aa, Homo sapiens; identical to SEQ ID NO: 805049

SEQ ID NO: 805071 - protein, 271 aa, Homo sapiens; identical to SEQ ID NO: 805049

SEQ ID NO: 805072 - protein, 271 aa, Homo sapiens; identical to SEQ ID NO: 805049

SEQ ID NO: 805073 - protein, 338 aa, Homo sapiens
ALRARAGSAAAAGGQAGRPAGGCAEGWCPAAGGRGAVGGGGWAGGCRLRSGRARRPCGHAMDFNMKKLASDAGIFFTRAVQFTEEKFGQAEKTELDAHFENLLARADSTKNWTEKILRQTEVLLQPNPSARVEEFLYEKLDRKVPSRVTNGELLAQYMADAASELGPTTPYGKTLIKVAEAEKQLGAAERDFIHTASISFLTPLRNFLEGDWKTISKERRLLQNRRLDLDACKARLKKAKAAEAKATTVPDFQETRPRNYILSASASAFSPHTPEPSTLSNTRAPYTHTHQIPPTHTSEPNTHTPEPPTHTPEPPTHTPEPPTHTHQSLQHIHTRGTS

SEQ ID NO: 805074 - protein, 248 aa, Homo sapiens
ALRARAGSAAAAGGQAGRPAGGCAEGWCPAAGGRGAVGGGGWAGGCRLRSGRARRPCGHAMDFNMKKLASDAGIFFTRAVQFTEEKFGQAEKTELDAHFENLLARADSTKNWTEKILRQTEVLLQPNPSARVEEFLYEKLDRKVPSRVTNGELLAQYMADAASELGPTTPYGKTLIKVAEAEKQLGAAERDFIHTASISFLTPLRNFLEGDWKTISKERRFLQNPPLDLVSCQRGSKRAQGLKPQPPF

SEQ ID NO: 805075 - protein, 187 aa, Homo sapiens
ALRARAGSAAAAGGQAGRPAGGCAEGWCPAAGGRGAVGGGGWAGGCRLRSGRARRPCGHAMDFNMKKLASDAGIFFTRAVQFTEEKFGQAEKTELDAHFENLLARADSTKNWTEKILRQTEVLLQPNPSARVEEFLYEKLDRKVPSRVTNGELLAQYMADAASELGPTTPYDRILLCHPDWSAVVQS

SEQ ID NO: 805076 - protein, 122 aa, Homo sapiens
MKAWPGLVLGPEQHLPVLSSPPTPHSSSQVQRPQSSPLHTHFLSGVFTSACVCSLANKPPLCATEKKSKKKWATLTNKKPPGGARSPIGPLGGPFTIKMAAVLNRRNWKNPGFPQLIRLAEH

SEQ ID NO: 805077 - protein, 846 aa, Homo sapiens
FRHSLGRESLMTATVENLTFQKDTLGNAVDKNRRHGSTEPLVLAWSSQFRRLTWGCALDALHRSPCVAASQHGVTHLIRSSRTPHSTRCRKEDAQPGHHGNGAASVTAQARGQRSVLQVPLPVPRSCLFSESFVVSVSSQSRFLASVPGTGVQRSTAADMAASTAAGKQRIPKVAKVKNKAPAEVQITAEQLLREAKERELELLPPPPQQKITDEEELNDYKLRKRKTFEDNIRKNRTVISNWIKYAQWEESLKEIQRARSIYERALDVDYRNITLWLKYAEMEMKNRQVNHARNIWDRAITTLPRVNQFWYKYTYMEEMLGNVAGARQVFERWMEWQPEEQAWHSYINFELRYKEVDRARTIYERFVLVHPDVKNWIKYARFEEKHAYFAHARKVYERAVEFFGDEHMDEHLYVAFAKFEENQKEFERVRVIYKYALDRISKQDAQELFKNYTIFEKKFGDRRGIEDIIVSKRRFQYEEEVKANPHNYDAWFDYLRLVESDAEAEAVREVYERAIANVPPIQEKRHWKRYIYLWINYALYEELEAKDPERTRQVYQASLELIPHKKFTFAKMWILYAQFEIRQKNLSLARRALGTSIGKCPKNKLFKVYIELELQLREFDRCRKLYEKFLEFGPENCTSWIKFAELETILGDIDRARAIYELAISQPRLDMPEVLWKSYIDFEIEQEETERTRNLYRRLLQRTQHVKVWISFAQFELSSGKEGSLTKCRQIYEEANKTMRNCEEKEERLMLLESWRSFEEEFGTASDKERVDKLMPEKVKKRRKVQTDDGSDAGWEEYFDYIFPEDAANQPNLKLLAMAKLWKKQQQEKEDAEHHPDEDVDESES

SEQ ID NO: 805078 - protein, 846 aa, Homo sapiens; identical to SEQ ID NO: 805077

SEQ ID NO: 805079 - protein, 858 aa, Homo sapiens
FRHSLGRESLMTATVENLTFQKDTLGNAVDKNTSRLELRSYSLAGRHGSTEPLVLAWSSQFRRLTWGCALDALHRSPCVAASQHGVTHLIRSSRTPHSTRCRKEDAQPGHHGNGAASVTAQARGQRSVLQVPLPVPRSCLFSESFVVSVSSQSRFLASVPGTGVQRSTAADMAASTAAGKQRIPKVAKVKNKAPAEVQITAEQLLREAKERELELLPPPPQQKITDEEELNDYKLRKRKTFEDNIRKNRTVISNWIKYAQWEESLKEIQRARSIYERALDVDYRNITLWLKYAEMEMKNRQVNHARNIWDRAITTLPRVNQFWYKYTYMEEMLGNVAGARQVFERWMEWQPEEQAWHSYINFELRYKEVDRARTIYERFVLVHPDVKNWIKYARFEEKHAYFAHARKVYERAVEFFGDEHMDEHLYVAFAKFEENQKEFERVRVIYKYALDRISKQDAQELFKNYTIFEKKFGDRRGIEDIIVSKRRFQYEEEVKANPHNYDAWFDYLRLVESDAEAEAVREVYERAIANVPPIQEKRHWKRYIYLWINYALYEELEAKDPERTRQVYQASLELIPHKKFTFAKMWILYAQFEIRQKNLSLARRALGTSIGKCPKNKLFKVYIELELQLREFDRCRKLYEKFLEFGPENCTSWIKFAELETILGDIDRARAIYELAISQPRLDMPEVLWKSYIDFEIEQEETERTRNLYRRLLQRTQHVKVWISFAQFELSSGKEGSLTKCRQIYEEANKTMRNCEEKEERLMLLESWRSFEEEFGTASDKERVDKLMPEKVKKRRKVQTDDGSDAGWEEYFDYIFPEDAANQPNLKLLAMAKLWKKQQQEKEDAEHHPDEDVDESES

SEQ ID NO: 805080 - protein, 686 aa, Homo sapiens
METVPPPSRLKREVKGVKNKAPAEVQITAEQLLREAKERELELLPPPPQQKITDEEELNDYKLRKRKTFEDNIRKNRTVISNWIKYAQWEESLKEIQRARSIYERALDVDYRNITLWLKYAEMEMKNRQVNHARNIWDRAITTLPRVNQFWYKYTYMEEMLGNVAGARQVFERWMEWQPEEQAWHSYINFELRYKEVDRARTIYERFVLVHPDVKNWIKYARFEEKHAYFAHARKVYERAVEFFGDEHMDEHLYVAFAKFEENQKEFERVRVIYKYALDRISKQDAQELFKNYTIFEKKFGDRRGIEDIIVSKRRFQYEEEVKANPHNYDAWFDYLRLVESDAEAEAVREVYERAIANVPPIQEKRHWKRYIYLWINYALYEELEAKDPERTRQVYQASLELIPHKKFTFAKMWILYAQFEIRQKNLSLARRALGTSIGKCPKNKLFKVYIELELQLREFDRCRKLYEKFLEFGPENCTSWIKFAELETILGDIDRARAIYELAISQPRLDMPEVLWKSYIDFEIEQEETERTRNLYRRLLQRTQHVKVWISFAQFELSSGKEGSLTKCRQIYEEANKTMRNCEEKEERLMLLESWRSFEEEFGTASDKERVDKLMPEKVKKRRKVQTDDGSDAGWEEYFDYIFPEDAANQPNLKLLAMAKLWKKQQQEKEDAEHHPDEDVDESES

SEQ ID NO: 805081 - protein, 753 aa, Homo sapiens
FRHSLGRESLMTATVENLTFQKDTLGNAVDKNILASLLVSTALPTSSAAPGRRTPRAAARRTRSLVTMETVPPPSRLKREVKGVKNKAPAEVQITAEQLLREAKERELELLPPPPQQKITDEEELNDYKLRKRKTFEDNIRKNRTVISNWIKYAQWEESLKEIQRARSIYERALDVDYRNITLWLKYAEMEMKNRQVNHARNIWDRAITTLPRVNQFWYKYTYMEEMLGNVAGARQVFERWMEWQPEEQAWHSYINFELRYKEVDRARTIYERFVLVHPDVKNWIKYARFEEKHAYFAHARKVYERAVEFFGDEHMDEHLYVAFAKFEENQKEFERVRVIYKYALDRISKQDAQELFKNYTIFEKKFGDRRGIEDIIVSKRRFQYEEEVKANPHNYDAWFDYLRLVESDAEAEAVREVYERAIANVPPIQEKRHWKRYIYLWINYALYEELEAKDPERTRQVYQASLELIPHKKFTFAKMWILYAQFEIRQKNLSLARRALGTSIGKCPKNKLFKVYIELELQLREFDRCRKLYEKFLEFGPENCTSWIKFAELETILGDIDRARAIYELAISQPRLDMPEVLWKSYIDFEIEQEETERTRNLYRRLLQRTQHVKVWISFAQFELSSGKEGSLTKCRQIYEEANKTMRNCEEKEERLMLLESWRSFEEEFGTASDKERVDKLMPEKVKKRRKVQTDDGSDAGWEEYFDYIFPEDAANQPNLKLLAMAKLWKKQQQEKEDAEHHPDEDVDESES

SEQ ID NO: 805082 - protein, 752 aa, Homo sapiens
MRNCEEEEERLMLLESWRSFEEEFGTASDKERVDKLMPEKVKKRRKVQTDDGSDAGWEEYFDYIFPEDAANQPNLKLLAMAKVKNKAPAEVQITAEQLLREAKERELELLPPPPQQKITDEEELNDYKLRKRKTFEDNIRKNRTVISNWIKYAQWEESLKEIQRARSIYERALDVDYRNITLWLKYAEMEMKNRQVNHARNIWDRAITTLPRVNQFWYKYTYMEEMLGNVAGARQVFERWMEWQPEEQAWHSYINFELRYKEVDRARTIYERFVLVHPDVKNWIKYARFEEKHAYFAHARKVYERAVEFFGDEHMDEHLYVAFAKFEENQKEFERVRVIYKYALDRISKQDAQELFKNYTIFEKKFGDRRGIEDIIVSKRRFQYEEEVKANPHNYDAWFDYLRLVESDAEAEAVREVYERAIANVPPIQEKRHWKRYIYLWINYALYEELEAKDPERTRQVYQASLELIPHKKFTFAKMWILYAQFEIRQKNLSLARRALGTSIGKCPKNKLFKVYIELELQLREFDRCRKLYEKFLEFGPENCTSWIKFAELETILGDIDRARAIYELAISQPRLDMPEVLWKSYIDFEIEQEETERTRNLYRRLLQRTQHVKVWISFAQFELSSGKEGSLTKCRQIYEEANKTMRNCEEKEERLMLLESWRSFEEEFGTASDKERVDKLMPEKVKKRRKVQTDDGSDAGWEEYFDYIFPEDAANQPNLKLLAMAKLWKKQQQEKEDAEHHPDEDVDESES

SEQ ID NO: 805083 - protein, 846 aa, Homo sapiens; identical to SEQ ID NO: 805077

SEQ ID NO: 805084 - protein, 438 aa, Homo sapiens
MDEHLYVAFAKFEENQKEFERVRVIYKYALDRISKQDAQELFKNYTIFEKKFGDRRGIEDIIVSKRRFQYEEEVKANPHNYDAWFDYLRLVESDAEAEAVREVYERAIANVPPIQEKRHWKRYIYLWINYALYEELEAKDPERTRQVYQASLELIPHKKFTFAKMWILYAQFEIRQKNLSLARRALGTSIGKCPKNKLFKVYIELELQLREFDRCRKLYEKFLEFGPENCTSWIKFAELETILGDIDRARAIYELAISQPRLDMPEVLWKSYIDFEIEQEETERTRNLYRRLLQRTQHVKVWISFAQFELSSGKEGSLTKCRQIYEEANKTMRNCEEKEERLMLLESWRSFEEEFGTASDKERVDKLMPEKVKKRRKVQTDDGSDAGWEEYFDYIFPEDAANQPNLKLLAMAKLWKKQQQEKEDAEHHPDEDVDESES

SEQ ID NO: 805085 - protein, 492 aa, Homo sapiens
MLFAWDFLNSLALVLVHPDVKNWIKYARFEEKHAYFAHARKVYERAVEFFGDEHMDEHLYVAFAKFEENQKEFERVRVIYKYALDRISKQDAQELFKNYTIFEKKFGDRRGIEDIIVSKRRFQYEEEVKANPHNYDAWFDYLRLVESDAEAEAVREVYERAIANVPPIQEKRHWKRYIYLWINYALYEELEAKDPERTRQVYQASLELIPHKKFTFAKMWILYAQFEIRQKNLSLARRALGTSIGKCPKNKLFKVYIELELQLREFDRCRKLYEKFLEFGPENCTSWIKFAELETILGDIDRARAIYELAISQPRLDMPEVLWKSYIDFEIEQEETERTRNLYRRLLQRTQHVKVWISFAQFELSSGKEGSLTKCRQIYEEANKTMRNCEEKEERLMLLESWRSFEEEFGTASDKERVDKLMPEKVKKRRKVQTDDGSDAGWEEYFDYIFPEDAANQPNLKLLAMAKLWKKQQQEKEDAEHHPDEDVDESES

SEQ ID NO: 805086 - protein, 229 aa, Homo sapiens
MRNCEEEEERLMLLESWRSFEEEFGTASDKERVDKLMPEKVKKRRKVQTDDGSDAGWEEYFDYIFPEDAANQPNLKLLAMAKLWKKQQHVKVWISFAQFELSSGKEGSLTKCRQIYEEANKTMRNCEEKEERLMLLESWRSFEEEFGTASDKERVDKLMPEKVKKRRKVQTDDGSDAGWEEYFDYIFPEDAANQPNLKLLAMAKLWKKQQQEKEDAEHHPDEDVDESES

SEQ ID NO: 805087 - protein, 846 aa, Homo sapiens; identical to SEQ ID NO: 805077

SEQ ID NO: 805088 - protein, 783 aa, Homo sapiens
  misc_feature (766)..(766): Xaa can be any naturally occurring amino acid
FRHSLGRESLMTATVENLTFQKDTLGNAVDKNRRHGSTEPLVLAWSSQFRRLTWGCALDALHRSPCVAASQHGVTHLIRSSRTPHSTRCRKEDAQPGHHGNGAASVTAQARGQRSVLQVPLPVPRSCLFSESFVVSVSSQSRFLASVPGTGVQRSTAADMAASTAAGKQRIPKVAKVKNKAPAEVQITAEQLLREAKERELELLPPPPQQKITDEEELNDYKLRKRKTFEDNIRKNRTVISNWIKYAQWEESLKEIQRARSIYERALDVDYRNITLWLKYAEMEMKNRQVNHARNIWDRAITTLPRVNQFWYKYTYMEEMLGNVAGARQVFERWMEWQPEEQAWHSYINFELRYKEVDRARTIYERFVLVHPDVKNWIKYARFEEKHAYFAHARKVYERAVEFFGDEHMDEHLYVAFAKFEENQKEFERVRVIYKYALDRISKQDAQELFKNYTIFEKKFGDRRGIEDIIVSKRRFQYEEEVKANPHNYDAWFDYLRLVESDAEAEAVREVYERAIANVPPIQEKRHWKRYIYLWINYALYEELEAKDPERTRQVYQASLELIPHKKFTFAKMWILYAQFEIRQKNLSLARRALGTSIGKCPKNKLFKVYIELELQLREFDRCRKLYEKFLEFGPENCTSWIKFAELETILGDIDRARAIYELAISQPRLDMPEVLWKSYIDFEIEQEETERTRNLYRRLLQRTQHVKVWISFAQFELSSGKEGSLTKCRQIYEEANKTMRNCEEKEERLFEVNEILESPLKKGIXPGLRTKNPQGHLDLVDE

SEQ ID NO: 805089 - protein, 472 aa, Homo sapiens
  misc_feature (472)..(472): Xaa can be any naturally occurring amino acid
FRHSLGRESLMTATVENLTFQKDTLGNAVDKNRRHGSTEPLVLAWSSQFRRLTWGCALDALHRSPCVAASQHGVTHLIRSSRTPHSTRCRKEDAQPGHHGNGAASVTAQARGQRSVLQVPLPVPRSCLFSESFVVSVSSQSRFLASVPGTGVQRSTAADMAASTAAGKQRIPKVAKVKNKAPAEVQITAEQLLREAKERELELLPPPPQQKITDEEELNDYKLRKRKTFEDNIRKNRTVISNWIKYAQWEESLKEIQRARSIYERALDVDYRNITLWLKYAEMEMKNRQVNHARNIWDRAITTLPRVNQFWYKYTYMEEMLGNVAGARQVFERWMEWQPEEQAWHSYINFELRYKEVDRARTIYERFVLVHPDVKNWIKYARFEEKHAYFAHARKVYERAVEFFGDEHMDEHLYVAFAKFEENQKEFERVRVIYKYALDRISKQDAQELFKNYTIFEKKFGDRRGFLKISLX

SEQ ID NO: 805090 - protein, 365 aa, Homo sapiens
FRHSLGRESLMTATVENLTFQKDTLGNAVDKNRRHGSTEPLVLAWSSQFRRLTWGCALDALHRSPCVAASQHGVTHLIRSSRTPHSTRCRKEDAQPGHHGNGAASVTAQARGQRSVLQVPLPVPRSCLFSESFVVSVSSQSRFLASVPGTGVQRSTAADMAASTAAGKQRIPKVAKVKNKAPAEVQITAEQLLREAKERELELLPPPPQQKITDEEELNDYKLRKRKKKTKKKKKTPRESFLSLSLSLAPRGGPKRGGPPARGSPEKGGHLVSDTVGFLAESPCTVGGPVRSPAGGPLFLMRELGCPLYSPAGGAIQKTLVAPGYLGIFVGALYPSGVWGATSSLTAGLSREHVGTQRSRGSCPP

SEQ ID NO: 805091 - protein, 238 aa, Homo sapiens
EPLVLAWSSQFRRLTWGCALDALHRSPCVAASQHGVTHLIRSSRTPHSTRCRKEDAQPGHHGNGAASVTAQARGQRSVLQVPLPVPRSCLFSESFVVSVSSQSRFLASVPGTGVQRSTAADMAASTAAGKQRIPKVAKVGDREGPCRRWPRKGASLSPEGARVGRECSRRGEAHPERWRGRAAGGGARALVIAEHDPRWRGLRSGVVLLGSGVGWFGEDLLSQALHWALGSYARTLAT

SEQ ID NO: 805092 - protein, 412 aa, Homo sapiens
MPIMGSSVYITVELAIAVLAILGNVLVCWAVWLNSNLQNVTNYFVVSLAAADIAVGVLAIPFAITISTGFCAACHGCLFIACFVLVLTQSSIFSLLAIAIDRYIAIRIPLRYNGLVTGTRAKGIIAICWVLSFAIGLTPMLGWNNCGQPKEGKNHSQGCGEGQVACLFEDVVPMNYMVYFNFFACVLVPLLLMLGVYLRIFLAARRQLKQMESQPLPGERARSTLQKEVHAAKSLAIIVGLFALCWLPLHIINCFTFFCPDCSHAPLWLMYLAIVLSHTNSVVNPFIYAYRIREFRQTFRKIIRSHVLRQQEPFKAAGTSARVLAAHGSDGEQVSLRLNGHPPGVWANGSAPHPERRPNGYALGLVSGGSAQESQGNTGLPDVELLSHELKGVCPEPPGLDDPLAQDGAGVS

SEQ ID NO: 805093 - protein, 412 aa, Homo sapiens; identical to SEQ ID NO: 805092

SEQ ID NO: 805094 - protein, 412 aa, Homo sapiens; identical to SEQ ID NO: 805092

SEQ ID NO: 805095 - protein, 412 aa, Homo sapiens; identical to SEQ ID NO: 805092

SEQ ID NO: 805096 - protein, 412 aa, Homo sapiens; identical to SEQ ID NO: 805092

SEQ ID NO: 805097 - protein, 412 aa, Homo sapiens; identical to SEQ ID NO: 805092

SEQ ID NO: 805098 - protein, 403 aa, Homo sapiens
MFSPSKNHALISSNQTKSQDYSENYSMTIWAFVHGFPFLGCLLSCYLPEACEKGKAYYFHLTEEDAGARWQEMTGPRPYSQEMWKRVLLWGSELLALLNPGFSDLCCWSLLPRYNGLVTGTRAKGIIAICWVLSFAIGLTPMLGWNNCGQPKEGKNHSQGCGEGQVACLFEDVVPMNYMVYFNFFACVLVPLLLMLGVYLRIFLAARRQLKQMESQPLPGERARSTLQKEVHAAKSWLPLHIINCFTFFCPDCSHAPLWLMYLAIVLSHTNSVVNPFIYAYRIREFRQTFRKIIRSHVLRQQEPFKAAGTSARVLAAHGSDGEQVSLRLNGHPPGVWANGSAPHPERRPNGYALGLVSGGSAQESQGNTGLPDVELLSHELKGVCPEPPGLDDPLAQDGAGVS

SEQ ID NO: 805099 - protein, 403 aa, Homo sapiens; identical to SEQ ID NO: 805098

SEQ ID NO: 805100 - protein, 108 aa, Homo sapiens
MPIMGSSVYITVELAIAVLAILGNVLVCWAVWLNSNLQNVTNYFVVSLAAADIAVGVLAIPFAITISTGFCAACHGCLFIACFVLVLTQKHGPRSQGRGWGWQATGMC

SEQ ID NO: 805101 - protein, 138 aa, Homo sapiens
PGQYTVDVEGRGCTFIQATLKYNVLLPKKASGFSLSLEIVKNYSLTVFDLTVNLKYTGIRNKSSMVVIDVKMLSGFTPTMSSIEELENKGQVMKTEVKNDHVLFYLENVFGRADSFTFSAEQSNLVFNIQPAPGMVYD

SEQ ID NO: 805102 - protein, 144 aa, Homo sapiens
MGVLARGGRGAGSQSPPRGGCLPPCDGGPKSLGGKRGWLSSPPLRGCLQPTAMGVRRAWGGKRGRLSVPASRGEPPHTAMGVPRARGEVGLALSSRLGVCVCPAAMGVLRASGGRGAGSGRLQMTCFLSDLELCSDTCRIVNPK

SEQ ID NO: 805103 - protein, 103 aa, Homo sapiens
RLAEDASPTCNVSPKSQRWEGLALSSRLAVCACPAAMEVLRARGGRGAGSGRLQMTCFFSDPELRSDPCRIVNPSKVPAVGRSELSSWTPHTHSPPGTCRGQI

SEQ ID NO: 805104 - protein, 138 aa, Homo sapiens; identical to SEQ ID NO: 805101

SEQ ID NO: 805105 - protein, 138 aa, Homo sapiens; identical to SEQ ID NO: 805101

SEQ ID NO: 805106 - protein, 237 aa, Homo sapiens
MTRCPAGQAEVEMAELYVKPGNKERGWNDPPQFSYGLQTQAGGPRRSLLTKRVAAPQDGSPRVPASETSPGPPPMGPPPPSSKAPRSPPVGSGPASGVEPTSFPVESEARLMEDVLRPLEQALEDCRGHTRKQVCDDISRRLALLQEQWAGGKLSIPVKKRMALLVQELSSHRWDAADDIHRSLMVDHVTEVSQWMVGVKRLIAEKRSLFSEEAANEEKSAATAEKNHTIPGFQQAS

SEQ ID NO: 805107 - protein, 163 aa, Homo sapiens [sequence omitted]

SEQ ID NO: 805108 - protein, 237 aa, Homo sapiens; identical to SEQ ID NO: 805106

SEQ ID NO: 805109 - protein, 237 aa, Homo sapiens; identical to SEQ ID NO: 805106

SEQ ID NO: 805110 - protein, 163 aa, Homo sapiens [sequence omitted]

SEQ ID NO: 805111 - protein, 229 aa, Homo sapiens
PPGVDRPRVREAGNKERGWNDPPQFSYGLQTQAGGPRRSLLTKRVAAPQDGSPRVPASETSPGPPPMGPPPPSSKAPRSPPVGSGPASGVEPTSFPVESEARLMEDVLRPLEQALEDCRGHTRKQVCDDISRRLALLQEQWAGGKLSIPVKKRMALLVQELSSHRWDAADDIHRSLMVDHVTEVSQWMVGVKRLIAEKRSLFSEEAANEEKSAATAEKNHTIPGFQQAS

SEQ ID NO: 805112 - protein, 231 aa, Homo sapiens
MCTSTSPGCHFGPGALALSVIDSVRQFSYGLQTQAGGPRRSLLTKRVAAPQDGSPRVPASETSPGPPPMGPPPPSSKAPRSPPVGSGPASGVEPTSFPVESEARLMEDVLRPLEQALEDCRGHTRKQVCDDISRRLALLQEQWAGGKLSIPVKKRMALLVQELSSHRWDAADDIHRSLMVDHVTEVSQWMVGVKRLIAEKRSLFSEEAANEEKSAATAEKNHTIPGFQQAS

SEQ ID NO: 805113 - protein, 229 aa, Homo sapiens; identical to SEQ ID NO: 805111

SEQ ID NO: 805114 - protein, 80 aa, Homo sapiens
EDLGRHPGGDELSSHRWDAADDIHRSLMVDHVTEVSQWMVGVKRLIAEKRSLFSEEAANEEKSAATAEKNHTIPGFQQAS

SEQ ID NO: 805115 - protein, 145 aa, Homo sapiens
MGPPPPSSKAPRSPPVGSGPASGVEPTSFPVESEARLMEDVLRPLEQALEDCRGHTRKQVCDDISRRLALLQEQWAGGKLSIPVKKRMALLVQELSSHRWDAADDIHRSLMVDHVTEELSFNGKPTAYLRYPSRERARQLYLTQH

SEQ ID NO: 805116 - protein, 139 aa, Homo sapiens
MDPPEKQVCDDISRRLALLQEQWAGGKLSIPVKKRMALLVQELSSHRWDAADDIHRSLMVDHVTEELSFNGKTYSLLKISLQRESKAIVPDTALTPNDQIPLCPTGATKLVPAGACATDPPCRIRASLSVPIGGGIFRS

SEQ ID NO: 805117 - protein, 585 aa, Homo sapiens
TGSRLNRAMAGLTVRDPAVDRSLRSVFVGNIPYEATEEQLKDIFSEVGPVVSFRLVYDRETGKPKGYGFCEYQDQETALSAMRNLNGREFSGRALRVDNAASEKNKEELKSLGTGAPVIESPYGETISPEDAPESISKAVASLPPEQMFELMKQMKLCVQNSPQEARNMLLQNPQLAYALLQAQVVMRIVDPEIALKILHRQTNIPTLIAGNPQPVHGAGPGSGSNVSMNQQNPQAPQAQSLGGMHVNGAPPLMQASMQGGVPAPGQMPAAVTGPGPGSLAPGGGMQAQVGMPGSGPVSMERGQVPMQDPRAAMQRGSLPANVPTPRGLLGDAPNDPRGGTLLSVTGEVEPRGYLGPPHQGPPMHHVPGHESRGPPPHELRGGPLPEPRPLMAEPRGPMLDQRGPPLDGRGGRDPRGIDARGMEARAMEARGLDARGLEARAMEARAMEARAMEARAMEARAMEVRGMEARGMDTRGPVPGPRGPIPSGMQGPSPINMGAVVPQGSRQVPVMQGTGMQGASIQGGSQPGGFSPGQNQVTPQDHEKAALIMQVLQLTADQIAMLPPEQRQSILILKEQIQKSTGAP

SEQ ID NO: 805118 - protein, 585 aa, Homo sapiens; identical to SEQ ID NO: 805117

SEQ ID NO: 805119 - protein, 585 aa, Homo sapiens; identical to SEQ ID NO: 805117

SEQ ID NO: 805120 - protein, 568 aa, Homo sapiens
MSKEIFPFCRVGNIPYEATEEQLKDIFSEVGPVVSFRLVYDRETGKPKGYGFCEYQDQETALSAMRNLNGREFSGRALRVDNAASEKNKEELKSLGTGAPVIESPYGETISPEDAPESISKAVASLPPEQMFELMKQMKLCVQNSPQEARNMLLQNPQLAYALLQAQVVMRIVDPEIALKILHRQTNIPTLIAGNPQPVHGAGPGSGSNVSMNQQNPQAPQAQSLGGMHVNGAPPLMQASMQGGVPAPGQMPAAVTGPGPGSLAPGGGMQAQVGMPGSGPVSMERGQVPMQDPRAAMQRGSLPANVPTPRGLLGDAPNDPRGGTLLSVTGEVEPRGYLGPPHQGPPMHHVPGHESRGPPPHELRGGPLPEPRPLMAEPRGPMLDQRGPPLDGRGGRDPRGIDARGMEARAMEARGLDARGLEARAMEARAMEARAMEARAMEARAMEVRGMEARGMDTRGPVPGPRGPIPSGMQGPSPINMGAVVPQGSRQVPVMQGTGMQGASIQGGSQPGGFSPGQNQVTPQDHEKAALIMQVLQLTADQIAMLPPEQRQSILILKEQIQKSTGAP

SEQ ID NO: 805121 - protein, 233 aa, Homo sapiens
TGSRLNRAMAGLTVRDPAVDRSLRSVFVGNIPYEATEEQLKDIFSEVGPVVSFRLVYDRETGKPKGYGFCEYQDQETALSAMRNLNGREFSGRALRVDNAASEKNKEELKSLGTGAPVIESPYGETISPEDAPESISKAVASLPPEQMFELMKQMKVPVMQGTGMQGASIQGGSQPGGFSPGQNQVTPQDHEKAALIMQVLQLTADQIAMLPPEQRQSILILKEQIQKSTGAP

SEQ ID NO: 805122 - protein, 365 aa, Homo sapiens
TGSRLNRAMAGLTVRDPAVDRSLRSVFVGNIPYEATEEQLKDIFSEVGPVVSFRLVYDRETGKPKGYGFCEYQDQETALSAMRNLNGREFSGRALRVDNAASEKNKEELKSLGTGAPVIESPYGETISPEDAPESISKAVASLPPEQMFELMKQMKLCVQNSPQEARNMLLQNPQLAYALLQAQVVMRIVDPEIALPVHGAGPGSGSNVSMNQQNPQAPQAQSLARAMEARAMEARAMEARAMEVRGMEARGMDTRGPVPGPRGPIPSGMQGPSPINMGAVVPQGSRQVPVMQGTGMQGASIQGGSQPGGFSPGQNQVTPQDHEKAALIMQVLQLTADQIAMLPPEQRQSILILKEQIQKSTGAP

SEQ ID NO: 805123 - protein, 70 aa, Homo sapiens
APGQMEGGVRCAYRPLTGPEPRLMVQGDSPAAASSSVLALRCLQPTRPSPNAGAPGIWAEEPGEAGRHGV

SEQ ID NO: 805124 - protein, 72 aa, Homo sapiens
YSKYHYSIKLHNKMKVIESRDGTPSGSECMYLSTKESHLHVSRVMMKSHFKVVSTGALCQMPLPIKETAELF

SEQ ID NO: 805125 - protein, 495 aa, Homo sapiens
MGSKRRNLSCSERHQKLVDENYCKKLHVQALKNVNSQIRNQMVQNENDNRVQRKQFLRLLQNEQFELDMEEAIQKAEENKRLKELQLKQEEKLAMELAKLKHESLKDEKMRQQVRENSIELRELEKKLKAAYMNKERAAQIAEKDAIKYEQMKRDAEIAKTMMEEHKRIIKEENAAEDKRNKAKAQYYLDLEKQLEEQEKKKQEAYEQLLKEKLMIDEIVRKIYEEDQLEKQQKLEKMNAMRRYIEEFQKEQALWRKKKREEMEEENRKIIEFANMQQQREEDRMAKVQENEEKRLQLQNALTQKLEEMLRQREDLEQVRQELYQEEQAEIYKSKLKEEAEKKLRKQKEMKQDFEEQMALKELVLQAAKEEEENFRKTMLAKFAEDDRIELMNAQKQRMKQLEHRRAVEKLIEERRQQFLADKQRELEEWQLQQRRQGFINAIIEEERLKLLKEHATNLLGYLPKGVFKKEDDIDLLGEEFRKVYQQRSEICEEK

SEQ ID NO: 805126 - protein, 32 aa, Homo sapiens
  misc_feature (32)..(32): Xaa can be any naturally occurring amino acid
MVPLSSTVSRILNIAKINLASLASAVELCGSX

SEQ ID NO: 805127 - protein, 306 aa, Homo sapiens
RVAAEPGAARGMVDSVYRTRSLGVAAEGLPDQYADGEAARVWQLYIGDTRSRTAEYKAWLLGLLRQHGCQRVLDVACGTGVDSIMLVEEGFSVTSVDASDKMLKYALKERWNRRHEPAFDKWVIEEANWMTLDKDVPQSAEGGFDAVICLGNSFAHLPDCKGDQSEHRLALKNIASMVRAGGLLVIDHRNYDHILSTGCAPPGKNIYYKSDLTKDVTTSVLIVNNKAHMVTLDYTVQVPGAGQDGSPGLSKFRLSYYPHCLASFTELLQAAFGGKCQHSVLGDFKPYKPGQTYIPCYFIHVLKRTD

SEQ ID NO: 805128 - protein, 178 aa, Homo sapiens
RVAAEPGAARGMVDSVYRTRSLGVAAEGLPDQYADGEAARVWQLYIGDTRSRTAEYKAWLLGLLRQHGCQRVLDVACGTGVDSIMLVEEGFSVTSVDASDKMLKYALKERWNRRHEPAFDKWVIEEANWMTLDKDVPQSAEGGFDAVICLGNSFAHLPDCKGDQSEHRLALRHISVRL

SEQ ID NO: 805129 - protein, 306 aa, Homo sapiens; identical to SEQ ID NO: 805127

SEQ ID NO: 805130 - protein, 288 aa, Homo sapiens
RVAAEPGAARGMVDSVYRTRSLGVAAEGLPDQYADGEAARVWQLYIGDTRSRTAEYKAWLLGLLRQHGCQRVLDVACGTGVDSIMLVEEGFSVTSVDASDKMLKYALKERWNRRHEPAFDKWVIEEANWMTLDKDVPQSAEGGFDAVICLGNSFAHLPDCKGDQSEHRLALNYDHILSTGCAPPGKNIYYKSDLTKDVTTSVLIVNNKAHMVTLDYTVQVPGAGQDGSPGLSKFRLSYYPHCLASFTELLQAAFGGKCQHSVLGDFKPYKPGQTYIPCYFIHVLKRTD

SEQ ID NO: 805131 - protein, 116 aa, Homo sapiens
TRAPGPKPGRGVSARSPAIGQVGLSAASSAYALSAERVAAEPGAARGMVDSVYRTRSLGVAAEGLPDQYADGEAARVWQLYIGDTRSRTAEYKAWLLGLLRQHGCQRVLDVACGTG

SEQ ID NO: 805132 - protein, 66 aa, Homo sapiens
  misc_feature (32)..(32): Xaa can be any naturally occurring amino acid
  misc_feature (34)..(34): Xaa can be any naturally occurring amino acid
  misc_feature (36)..(36): Xaa can be any naturally occurring amino acid
ESGAQHDGDGGARAEDREKPVLECNDSTSVHXQXPXLLGSSNSPASASQVAGITGICHHDQLILYL

SEQ ID NO: 805133 - protein, 128 aa, Homo sapiens [sequence omitted]

SEQ ID NO: 805134 - protein, 136 aa, Homo sapiens
MRTGGDNAGPSHSHIKRLPTSGLSTWLQGTQTCVLHLPTGTRPPAHHPLLGYSSRRSYRLLENPAAGCWARFSFCQGAAWDWDLEGVQWLRALAGGVSTAPSAPPGNLVFLSVSIFLCGSLLLETCPAYFSSLDPD

SEQ ID NO: 805135 - protein, 185 aa, Homo sapiens
MAGPRPRWRDQLLFMSIIVLVIVVICLMLYALLWEAGNLTDLPNLRIGFYNFCLWNEDTSTLQCHQFPELEALGVPRVGLGLARLGVYGSLVLTLFAPQPLLLAQCNSDERAWRLAVGFLAVSSVLLAGGLGLFLSYVWKWVRLSLPGPGFLALGSAQALLILLLIAMAVFPLRAERAESKLESC

SEQ ID NO: 805136 - protein, 185 aa, Homo sapiens; identical to SEQ ID NO: 805135

SEQ ID NO: 805137 - protein, 184 aa, Homo sapiens [sequence omitted]

SEQ ID NO: 805138 - protein, 196 aa, Homo sapiens
LSVALSQRGQLGLQRAVLRLQLMHLLDEHGEAVVEALQLLLLVGADDLVLVGARRRLAQVQPVGRRRPAIGQAEAERRGRGAGGRGGHIAAGQRLRAEAARAAGPREAGGQARAIPEHLAVGGGGAQVVLRAEAHGAGIGAGRAASTRATEERRGLSAVAPISAHCNLRLLGSKWSSRLSLPKCWDYRCEPPHLAA

SEQ ID NO: 805139 - protein, 102 aa, Homo sapiens
MAQARTTSCWKGGCRLLCLEHYILKYFERSIFKPGDFTCKEIGFLASSENGKSWDAHSGRGLSAVAPISAHCNLRLLGSKWSSRLSLPKCWDYRCEPPHLAA

SEQ ID NO: 805140 - protein, 561 aa, Homo sapiens
MNSSLTAQRRGSDAELGPWVMAARSKDAAPSQRDGLLPVKVEEDSPGSWEPNYPAASPDPETSRLHFRQLRYQEVAGPEEALSRLRELCRRWLRPELLSKEQILELLVLEQFLTILPEELQAWVREHCPESGEEAVAVVRALQRALDGTSSQGMVTFEDTAVSLTWEEWERLDPARRDFCRESAQKDSGSTVPPSLESRVENKELIPMQQILEEAEPQGQLQEAFQGKRPLFSKCGSTHEDRVEKQSGDPLPLKLENSPEAEGLNSISDVNKNGSIEGEDSKNNELQNSARCSNLVLCQHIPKAERPTDSEEHGNKCKQSFHMVTWHVLKPHKSDSGDSFHHSSLFETQRQLHEERPYKCGNCGKSFKQRSDLFRHQRIHTGEKPYGCQECGKSFSQSAALTKHQRTHTGEKPYTCLKCGERFRQNSHLNRHQSTHSRDKHFKCEECGETCHISNLFRHQRLHKGERPYKCEECEKSFKQRSDLFKHHRIHTGEKPYGCSVCGKRFNQSATLIKHQRIHTGEKPYKCLECGERFRQSTHLIRHQRIHQNKVLSAGRGGSRL

SEQ ID NO: 805141 - protein, 201 aa, Homo sapiens
MNSSLTAQRRGSDAELGPWVMAARSKDAAPSQRDGLLPVKVEEDSPGSWEPNYPAASPDPETSRLHFRQLRYQEVAGPEEALSRLRELCRRWLRPELLSKEQILELLVLEQFLTILPEELQAWVREHCPESGEEAVAVVRALQRALDGTSSQGMVTFEDTAVSLTWEEWERLDPARRDFCRESAQKDSGSTVPPSDTVYGP

SEQ ID NO: 805142 - protein, 104 aa, Homo sapiens [sequence omitted]

SEQ ID NO: 805143 - protein, 354 aa, Homo sapiens [sequence omitted]

SEQ ID NO: 805144 - protein, 70 aa, Homo sapiens
SPVHLLFLNSRPRRPNVKKRLVRIQPLFDIRCSVYCESVDDIEGLNAGQRLFHTQGIYGVFLHYGSPDVE

SEQ ID NO: 805145 - protein, 354 aa, Homo sapiens [sequence omitted]

SEQ ID NO: 805146 - protein, 217 aa, Homo sapiens
MNSSLTAQRRGSDAELGPWVMAARSKDAAPSQRDGLLPVKVEEDSPGSWEPNYPAASPDPETSRLHFRQLRYQEVAGPEEALSRLRELCRRWLRPELLSKEQILELLVLEQFLTILPEELQAWVREHCPESGEEAVAVVRALQRALDGTSSQGMVTFEDTAVSLTWEEWERLDPARRDFCRESAQKDSGSTVPPSECCCSAGLLRCVVCEGLVHYHP

SEQ ID NO: 805147 - protein, 354 aa, Homo sapiens [sequence omitted]

SEQ ID NO: 805148 - protein, 66 aa, Homo sapiens
AVRGHRGDLPEPHTWCHSGVEPGSLALSSAPITAAEFTVSAQHVFTCLEDEPNPSSRGSPASMKTV

SEQ ID NO: 805149 - protein, 66 aa, Homo sapiens; identical to SEQ ID NO: 805148

SEQ ID NO: 805150 - protein, 129 aa, Homo sapiens [sequence omitted]

SEQ ID NO: 805151 - protein, 312 aa, Homo sapiens
RAPSATLLDTGESVAAVASGEDKGIAASAAAAAVFACSCSPDPQSSTMNPVYSPVQPGAPYGNPKNMAYTGYPTAYPAAAPAYNPSLYPTNSPSYAPEFQFLHSAYATLLMKQAWPQNSSSCGTEGTFHLPVDTGTENRTYQASSAAFRYTAGTPYKVPPTQSNTAPPPYSPSPNPYQTAMYPIRSAYPQQNLYAQGAYYTQPVYAAQPHVIHHTTVVQPNSIPSAIYPAPVAAPRTNGVAMGMVAGTTMAMSAGTLLTTPQHTAIGAHPVSMPTYRAQGTPAYSYVPFQLYPLPPTLHGGGWQEQKLQMKK

SEQ ID NO: 805152 - protein, 129 aa, Homo sapiens [sequence omitted]

SEQ ID NO: 805153 - protein, 129 aa, Homo sapiens [sequence omitted]

SEQ ID NO: 805154 - protein, 129 aa, Homo sapiens [sequence omitted]

SEQ ID NO: 805155 - protein, 129 aa, Homo sapiens [sequence omitted]

SEQ ID NO: 805156 - protein, 129 aa, Homo sapiens [sequence omitted]

SEQ ID NO: 805157 - protein, 129 aa, Homo sapiens [sequence omitted]

SEQ ID NO: 805158 - protein, 119 aa, Homo sapiens [sequence omitted]

SEQ ID NO: 805159 - protein, 119 aa, Homo sapiens [sequence omitted]

SEQ ID NO: 805160 - protein, 119 aa, Homo sapiens [sequence omitted]

SEQ ID NO: 805161 - protein, 210 aa, Homo sapiens
MPGVKLTTQAYCKMVLHGAKYPHCAVNGLLVAEKQKPRKEHLPLGGPGAHHTLFVDCIPLFHGTLALAPMLEVALTLIDSWCKDHSYVIAGYYQANERVKDASPNQVAEKVASRIAEGFSDTALIMVDNTKFTMDCVAPTIHVYEHHENRWRCRDPHHDYCEDWPEAQRISASLLDSRSYETLVDFDNHLDDIRNDWTNPEINKAVLHLC

SEQ ID NO: 805162 - protein, 210 aa, Homo sapiens; identical to SEQ ID NO: 805161

SEQ ID NO: 805163 - protein, 210 aa, Homo sapiens; identical to SEQ ID NO: 805161

SEQ ID NO: 805164 - protein, 126 aa, Homo sapiens
MPGVKLTTQAYCKMVLHGAKYPHCAVNGLLVAEKQKPRKEHLPLGGPGAHHTLFVDCIPLFHGTLALAPMLEVALTLIDSWCKDHSYVIAGYYQANERVKDASPNQVAEKVASRIAEGFSDTALIM

SEQ ID NO: 805165 - protein, 141 aa, Homo sapiens [sequence omitted]

SEQ ID NO: 805166 - protein, 124 aa, Homo sapiens
MPGVKLTTQAYCKMVLHGAKYPHCAVNGLLVAEKQKPRKEHLPLGGPGAHHTLFVDCIPLFHGTLALAPMLEVALTLIDSWCKDHSYVIAGYYQANERVKDASPNQVAREGGLLYSLISFIVPN

SEQ ID NO: 805167 - protein, 128 aa, Homo sapiens
MPGVKLTTQAYCKMVLHGAKYPHCAVNGLLVAEKQKPRKEHLPLGGPGAHHTLFVDCIPLFHGTLALAPMLEVALTLIDSWCKDHSYVIAGYYQANERVKDARYVDAEPSVGEEVSTCWADPVSRVLF

SEQ ID NO: 805168 - protein, 210 aa, Homo sapiens; identical to SEQ ID NO: 805161

SEQ ID NO: 805169 - protein, 141 aa, Homo sapiens [sequence omitted]

SEQ ID NO: 805170 - protein, 237 aa, Homo sapiens
MPGVKLTTQAYCKMVLHGAKYPHCAVNGLLVAEKQKPRKEHLPLGGPGAHHTLFVDCIPLFHGTLALAPMLEVALTLMEFRSVSPSLECSGVISARCNFPSRIQIDSWCKDHSYVIAGYYQANERVKDASPNQVAEKVASRIAEGFSDTALIMVDNTKFTMDCVAPTIHVYEHHENRWRCRDPHHDYCEDWPEAQRISASLLDSRSYETLVDFDNHLDDIRNDWTNPEINKAVLHLC

SEQ ID NO: 805171 - protein, 163 aa, Homo sapiens [sequence omitted]

SEQ ID NO: 805172 - protein, 827 aa, Homo sapiens
RAPAAMEEEEEAIGLLDKVLEDEDVFLLEECELGTPTSPGSGSPFLVAVKVEAGKGLEMRKLVLSGFLASEEIYINQLEALLLPMKPLKATATTSQPVLTIQQIETIFYKIQDIYEIHKEFYDNLCPKVQQWDSQVTMGHLFQKLASQLGVYKAFVDNYKVALETAEKCSQSNNQFQKISEELKVKGPKDSKDSHTSVTMEALLYKPIDRVTRSTLVLHDLLKHTPVDHPDYPLLQDALRISQNFLSSINEDIDPRRTAVTTPKGETRQLVKDGFLVEVSESSRKLRHVFLFTDVLLCAKLKKTSAGKHQQYDCKWYIPLADLVFPSPEESEASPQVHPFPDHELEDMKMKISALKSEIQKEKANKGQSRAIERLKKKMFENEFLLLLNSPTIPFRIHNRNGKSYLFLLSSDYERSEWREAIQKLQKKDLQAFVLSSVELQVLTGSCFKLRTVHNIPVTSNKDDDESPGLYGFLHVIVHSAKGFKQSANLYCTLEVDSFGYFVSKAKTRVFRDTAEPKWDEEFEIELEGSQSLRILCYEKCYDKTKVNKDNNEIVDKIMGKGQIQLDPQTVETKNWHTDVIEMNGIKVEFSMKFTSRDMSLKRTPSKKQTGVFGVKISVVTKRERSKVPYIVRQCVEEVEKRGIEEVGIYRISGVATDIQALKAVFDANNKDILLMLSDMDINAIAGTLKLYFRELPEPLLTDRLYPAFMEGIALSDPAAKENCMMHLLRSLPDPNLITFLFLLEHLKRVAEKEPINKMSLHNLATVFGPTLLRPSEVESKAHLTSAADIWSHDVMAQVQVLLYYLQHPPISFAELKRNTLYFSTDV

SEQ ID NO: 805173 - protein, 176 aa, Homo sapiens
MRKLVLSGFLASEEIYINQLEALLLPMKPLKATATTSQPVLTIQQIETIFYKIQDIYEIHKEFYDNLCPKVQQWDSQVTMGHLFQKLASQLGVYKAFVDNYKVALETAEKCSQSNNQFQKISEELKVKGPKDSKDSHTSVTMEALLYKPIDRVTRSTLVLHELLKHNLWPPDYRCA

SEQ ID NO: 805174 - protein, 109 aa, Homo sapiens [sequence omitted]

SEQ ID NO: 805175 - protein, 882 aa, Homo sapiens
RPQRGTRDLEQREAEAKGRPGSPLAAEETPGREHLPPWRRRRFLRVPERDSPGHSSPERDSDGSRHSSDREDDFSADFSYGTDEYDGEGNEEQKGPPEGSETMPYIDESPTMSPQLSARSQGGGDGVSPTPPEGLAPGPMKPLKATATTSQPVLTIQQIETIFYKIQDIYEIHKEFYDNLCPKVQQWDSQVTMGHLFQKLASQLGVYKAFVDNYKVALETAEKCSQSNNQFQKISEELKVKGPKDSKDSHTSVTMEALLYKPIDRVTRSTLVLHDLLKHTPVDHPDYPLLQDALRISQNFLSSINEDIDPRRTAVTTPKGETRQLVKDGFLVEVSESSRKLRHVFLFTDVLLCAKLKKTSAGKHQQYDCKWYIPLADLVFPSPEESEASPQVHPFPDHELEDMKMKISALKSEIQKEKANKGQSRAIERLKKKMFENEFLLLLNSPTIPFRIHNRNGKSYLFLLSSDYERSEWREAIQKLQKKDLQAFVLSSVELQVLTGSCFKLRTVHNIPVTSNKDDDESPGLYGFLHVIVHSAKGFKQSANLYCTLEVDSFGYFVSKAKTRVFRDTAEPKWDEEFEIELEGSQSLRILCYEKCYDKTKVNKDNNEIVDKIMGKGQIQLDPQTVETKNWHTDVIEMNGIKVEFSMKFTSRDMSLKRTPSKKQTGVFGVKISVVTKRERSKVPYIVRQCVEEVEKRGIEEVGIYRISGVATDIQALKAVFDANNKDILLMLSDMDINAIAGTLKLYFRELPEPLLTDRLYPAFMEGIALSDPAAKENCMMHLLRSLPDPNLITFLFLLEHLKRVAEKEPINKMSLHNLATVFGPTLLRPSEVESKAHLTSAADIWSHDVMAQVQVLLYYLQHPPISFAELKRNTLYFSTDV

SEQ ID NO: 805176 - protein, 743 aa, Homo sapiens
MKPLKATATTSQPVLTIQQIETIFYKIQDIYEIHKEFYDNLCPKVQQWDSQVTMGHLFQKLASQLGVYKAFVDNYKVALETAEKCSQSNNQFQKISEELKVKGPKDSKDSHTSVTMEALLYKPIDRVTRSTLVLHDLLKHTPVDHPDYPLLQDALRISQNFLSSINEDIDPRRTAVTTPKGETRQLVKDGFLVEVSESSRKLRHVFLFTDVLLCAKLKKTSAGKHQQYDCKWYIPLADLVFPSPEESEASPQVHPFPDHELEDMKMKISALKSEIQKEKANKGQSRAIERLKKKMFENEFLLLLNSPTIPFRIHNRNGKSYLFLLSSDYERSEWREAIQKLQKKDLQAFVLSSVELQVLTGSCFKLRTVHNIPVTSNKDDDESPGLYGFLHVIVHSAKGFKQSANLYCTLEVDSFGYFVSKAKTRVFRDTAEPKWDEEFEIELEGSQSLRILCYEKCYDKTKVNKDNNEIVDKIMGKGQIQLDPQTVETKNWHTDVIEMNGIKVEFSMKFTSRDMSLKRTPSKKQTGVFGVKISVVTKRERSKVPYIVRQCVEEVEKRGIEEVGIYRISGVATDIQALKAVFDANNKDILLMLSDMDINAIAGTLKLYFRELPEPLLTDRLYPAFMEGIALSDPAAKENCMMHLLRSLPDPNLITFLFLLEHLKRVAEKEPINKMSLHNLATVFGPTLLRPSEVESKAHLTSAADIWSHDVMAQVQVLLYYLQHPPISFAELKRNTLYFSTDV

SEQ ID NO: 805177 - protein, 922 aa, Homo sapiens
RPQRGTRDLEQREAEAKGRPGSPLAAEETPGREHLPPWRRRRFLRVPERDSPGHSSPERDSDGSRHSSDREDDFSADFSYGTDEYDGEGNEEQKGPPEGSETMPYIDESPTMSPQLSARSQGGGDGVSPTPPEGLAPGVEAGKGLEMRKLVLSGFLASEEIYINQLEALLLPMKPLKATATTSQPVLTIQQIETIFYKIQDIYEIHKEFYDNLCPKVQQWDSQVTMGHLFQKLASQLGVYKAFVDNYKVALETAEKCSQSNNQFQKISEELKVKGPKDSKDSHTSVTMEALLYKPIDRVTRSTLVLHDLLKHTPVDHPDYPLLQDALRISQNFLSSINEDIDPRRTAVTTPKGETRQLVKDGFLVEVSESSRKLRHVFLFTDVLLCAKLKKTSAGKHQQYDCKWYIPLADLVFPSPEESEASPQVHPFPDHELEDMKMKISALKSEIQKEKANKGQSRAIERLKKKMFENEFLLLLNSPTIPFRIHNRNGKSYLFLLSSDYERSEWREAIQKLQKKDLQAFVLSSVELQVLTGSCFKLRTVHNIPVTSNKDDDESPGLYGFLHVIVHSAKGFKQSANLYCTLEVDSFGYFVSKAKTRVFRDTAEPKWDEEFEIELEGSQSLRILCYEKCYDKTKVNKDNNEIVDKIMGKGQIQLDPQTVETKNWHTDVIEMNGIKVEFSMKFTSRDMSLKRTPSKKQTGVFGVKISVVTKRERSKVPYIVRQCVEEVEKRGIEEVGIYRISGVATDIQALKAVFDANNKDILLMLSDMDINAIAGTLKLYFRELPEPLLTDRLYPAFMEGIALSDPAAKENCMMHLLRSLPDPNLITFLFLLEHLKRVAEKEPINKMSLHNLATVFGPTLLRPSEVESKAHLTSAADIWSHDVMAQNSSGTHCTSPPTCSPRQGGCGRVVEPAPPAWGPTQT

SEQ ID NO: 805178 - protein, 283 aa, Homo sapiens
KTLINRWRHTEIVNHIYKMPVSGGGFEAKVMFGCKVKYCWRIKVEFSMKFTSRDMSLKRTPSKKQTGVFGVKISVVTKRERSKVPYIVRQCVEEVEKRGIEEVGIYRISGVATDIQALKAVFDANNKDILLMLSDMDINAIAGTLKLYFRELPEPLLTDRLYPAFMEGIALSDPAAKENCMMHLLRSLPDPNLITFLFLLEHLKRVAEKEPINKMSLHNLATVFGPTLLRPSEVESKAHLTSAADIWSHDVMAQVQVLLYYLQHPPISFAELKRNTLYFSTDV

SEQ ID NO: 805179 - protein, 179 aa, Homo sapiens
AGKQLQKLTRADSLAQDDPTYNKDILLMLSDMDINAIAGTLKLYFRELPEPLLTDRLYPAFMEGIALSDPAAKENCMMHLLRSLPDPNLITFLFLLEHLKRVAEKEPINKMSLHNLATVFGPTLLRPSEVESKAHLTSAADIWSHDVMAQVQVLLYYLQHPPISFAELKRNTLYFSTDV

SEQ ID NO: 805180 - protein, 156 aa, Homo sapiens
AAQVRAAGVVQGGKETYAFQFLEAGFPRVWSAGFGSFLLSLSSLSWTPGWRDWFRHLLRSLPDPNLITFLFLLEHLKRVAEKEPINKMSLHNLATVFGPTLLRPSEVESKAHLTSAADIWSHDVMAQVQVLLYYLQHPPISFAELKRNTLYFSTDV

SEQ ID NO: 805181 - protein, 100 aa, Homo sapiens
LHRCELPALYKVAQETYAFQFLEAGFPRVWSAGFGSSLLQSFKSDVGPQAGVSKDEAKDREPSLRLPVSPQVQVLLYYLQHPPISFAELKRNTLYFSTDV

SEQ ID NO: 805182 - protein, 915 aa, Homo sapiens
RPQRGTRDLEQREAEAKGRPGSPLAAEETPGREHLPPWRRRRFLRVPERDSPGHSSPERDSDGSRHSSDREDDFSADFSYGTDEYDGEGNEEQKGPPEGSETMPYIDESPTMSPQLSARSQGGGDGVSPTPPEGLAPGVEAGKGLEMRKLVLSGFLASEEIYINQLEALLLPMKPLKATATTSQPVLTIQQIETIFYKIQDIYEIHKEFYDNLCPKVQQWDSQVTMGHLFQKLASQLGVYKAFVDNYKVALETAEKCSQSNNQFQKISEELKVKGPKDSKDSHTSVTMEALLYKPIDRVTRSTLVLHDLLKHTPVDHPDYPLLQDALRISQNFLSSINEDIDPRRTAVTTPKGETRQLVKDGFLVEVSESSRKLRHVFLFTDVLLCAKLKKTSAGKHQQYDCKWYIPLADLVFPSPEESEASPQVHPFPDHELEDMKMKISALKSEIQKEKANKGQSRAIERLKKKMFENEFLLLLNSPTIPFRIHNRNGKSYLFLLSSDYERSEWREAIQKLQKKDLQAFVLSSVELQVLTGSCFKLRTVHNIPVTSNKDDDESPGLYGFLHVIVHSAKGFKQSANLYCTLEVDSFGYFVSKAKTRVFRDTAEPKWDEEFEIELEGSQSLRILCYEKCYDKTKVNKDNNEIVDKIMGKGQIQLDPQTVETKNWHTDVIEMNGIKVEFSMKFTSRDMSLKRTPSKKQTGVFGVKISVVTKRERSKVPYIVRQCVEEVEKRGIEEVGIYRISGVATDIQALKAVFDANNKDILLMLSDMDINAIAGTLKLYFRELPEPLLTDRLYPAFMEGIALSDPAAKENCMMHLLRSLPDPNLITFLFLLEHLKRVAEKEPINKMSLHNLATVFGPTLLRPSEVESKAHLTSAADIWSHDVMAQVQVLLYYLQHPPISFAELKRNTLYFSTDV

SEQ ID NO: 805183 - protein, 915 aa, Homo sapiens; identical to SEQ ID NO: 805182

SEQ ID NO: 805184 - protein, 915 aa, Homo sapiens; identical to SEQ ID NO: 805182

SEQ ID NO: 805185 - protein, 912 aa, Homo sapiens
  misc_feature (910)..(910): Xaa can be any naturally occurring amino acid
RPQRGTRDLEQREAEAKGRPGSPLAAEETPGREHLPPWRRRRFLRVPERDSPGHSSPERDSDGSRHSSDREDDFSADFSYGTDEYDGEGNEEQKGPPEGSETMPYIDESPTMSPQLSARSQGGGDGVSPTPPEGLAPGVEAGKGLEMRKLVLSGFLASEEIYINQLEALLLPMKPLKATATTSQPVLTIQQIETIFYKIQDIYEIHKEFYDNLCPKVQQWDSQVTMGHLFQKLASQLGVYKAFVDNYKVALETAEKCSQSNNQFQKISEELKVKGPKDSKDSHTSVTMEALLYKPIDRVTRSTLVLHDLLKHTPVDHPDYPLLQDALRISQNFLSSINEDIDPRRTAVTTPKGETRQLVKDGFLVEVSESSRKLRHVFLFTDVLLCAKLKKTSAGKHQQYDCKWYIPLADLVFPSPEESEASPQVHPFPDHELEDMKMKISALKSEIQKEKANKGQSRAIERLKKKMFENEFLLLLNSPTIPFRIHNRNGKSYLFLLSSDYERSEWREAIQKLQKKDLQAFVLSSVELQVLTGSCFKLRTVHNIPVTSNKDDDESPGLYGFLHVIVHSAKGFKQSANLYCTLEVDSFGYFVSKAKTRVFRDTAEPKWDEEFEIELEGSQSLRILCYEKCYDKTKVNKDNNEIVDKIMGKGQIQLDPQTVETKNWHTDVIEMNGIKVEFSMKFTSRDMSLKRTPSKKQTGVFGVKISVVTKRERSKVPYIVRQCVEEVEKRGIEEVGIYRISGVATDIQALKAVFDANNKDILLMLSDMDINAIAGTLKLYFRELPEPLLTDRLYPAFMEGIALSDPAAKENCMMHLLRSLPDPNLITFLFLLEHLKRVAEKEPINKMSLHNLATVFGPTLLRPSEVESKAHLTSAADIWSHDVMAQPGPPLLPTATITKTGPSLNASIAXAA

SEQ ID NO: 805186 - protein, 77 aa, Homo sapiens
ESCRGGCPPPILTLHPRRERSKVPYIVRQCVEEVEKRGIEEVGIYRISGVATDIQALKAVFDASESGRPSRGRCGCV

SEQ ID NO: 805187 - protein, 859 aa, Homo sapiens
MEPLSHRGLPRLSWIDTLYSNFSYGTDEYDGEGNEEQKGPPEGSETMPYIDESPTMSPQLSARSQGGGDGVSPTPPEGLAPGVEAGKGLEMRKLVLSGFLASEEIYINQLEALLLPMKPLKATATTSQPVLTIQQIETIFYKIQDIYEIHKEFYDNLCPKVQQWDSQVTMGHLFQKLASQLGVYKAFVDNYKVALETAEKCSQSNNQFQKISEELKVKGPKDSKDSHTSVTMEALLYKPIDRVTRSTLVLHDLLKHTPVDHPDYPLLQDALRISQNFLSSINEDIDPRRTAVTTPKGETRQLVKDGFLVEVSESSRKLRHVFLFTDVLLCAKLKKTSAGKHQQYDCKWYIPLADLVFPSPEESEASPQVHPFPDHELEDMKMKISALKSEIQKEKANKGQSRAIERLKKKMFENEFLLLLNSPTIPFRIHNRNGKSYLFLLSSDYERSEWREAIQKLQKKDLQAFVLSSVELQVLTGSCFKLRTVHNIPVTSNKDDDESPGLYGFLHVIVHSAKGFKQSANLYCTLEVDSFGYFVSKAKTRVFRDTAEPKWDEEFEIELEGSQSLRILCYEKCYDKTKVNKDNNEIVDKIMGKGQIQLDPQTVETKNWHTDVIEMNGIKVEFSMKFTSRDMSLKRTPSKKQTGVFGVKISVVTKRERSKVPYIVRQCVEEVEKRGIEEVGIYRISGVATDIQALKAVFDANNKDILLMLSDMDINAIAGTLKLYFRELPEPLLTDRLYPAFMEGIALSDPAAKENCMMHLLRSLPDPNLITFLFLLEHLKRVAEKEPINKMSLHNLATVFGPTLLRPSEVESKAHLTSAADIWSHDVMAQVQVLLYYLQHPPISFAELKRNTLYFSTDV

SEQ ID NO: 805188 - protein, 191 aa, Homo sapiens
RPQRGTRDLEQREAEAKGRPGSPLAAEETPGREHLPPWRRRRFLRVPERDSPGHSSPERDSDGSRHSSDREDDFSADFSYGTDEYDGEGNEEQKGPPEGSETMPYIDESPTMSPQLSARSQGGGDGVSPTPPEGLAPGVEAGKGLEMRKLVLSGFLASEEIYINQLEALLLPMKPLKHAALQPCTSAMNIL

SEQ ID NO: 805189 - protein, 915 aa, Homo sapiens; identical to SEQ ID NO: 805182

SEQ ID NO: 805190 - protein, 769 aa, Homo sapiens
MRKLVLSGFLASEEIYINQLEALLLPMKPLKATATTSQPVLTIQQIETIFYKIQDIYEIHKEFYDNLCPKVQQWDSQVTMGHLFQKLASQLGVYKAFVDNYKVALETAEKCSQSNNQFQKISEELKVKGPKDSKDSHTSVTMEALLYKPIDRVTRSTLVLHDLLKHTPVDHPDYPLLQDALRISQNFLSSINEDIDPRRTAVTTPKGETRQLVKDGFLVEVSESSRKLRHVFLFTDVLLCAKLKKTSAGKHQQYDCKWYIPLADLVFPSPEESEASPQVHPFPDHELEDMKMKISALKSEIQKEKANKGQSRAIERLKKKMFENEFLLLLNSPTIPFRIHNRNGKSYLFLLSSDYERSEWREAIQKLQKKDLQAFVLSSVELQVLTGSCFKLRTVHNIPVTSNKDDDESPGLYGFLHVIVHSAKGFKQSANLYCTLEVDSFGYFVSKAKTRVFRDTAEPKWDEEFEIELEGSQSLRILCYEKCYDKTKVNKDNNEIVDKIMGKGQIQLDPQTVETKNWHTDVIEMNGIKVEFSMKFTSRDMSLKRTPSKKQTGVFGVKISVVTKRERSKVPYIVRQCVEEVEKRGIEEVGIYRISGVATDIQALKAVFDANNKDILLMLSDMDINAIAGTLKLYFRELPEPLLTDRLYPAFMEGIALSDPAAKENCMMHLLRSLPDPNLITFLFLLEHLKRVAEKEPINKMSLHNLATVFGPTLLRPSEVESKAHLTSAADIWSHDVMAQVQVLLYYLQHPPISFAELKRNTLYFSTDV

SEQ ID NO: 805191 - protein, 689 aa, Homo sapiens
LEEHSGAAARCWSPCGSISKVAEWPGCWWAPGSLERWLHAPAAGTEAAMEILLIIRFCCNCTYALLYKPIDRVTRSTLVLHDLLKHTPVDHPDYPLLQDALRISQNFLSSINEDIDPRRTAVTTPKGETRQLVKDGFLVEVSESSRKLRHVFLFTDVLLCAKLKKTSAGKHQQYDCKWYIPLADLVFPSPEESEASPQVHPFPDHELEDMKMKISALKSEIQKEKANKGQSRAIERLKKKMFENEFLLLLNSPTIPFRIHNRNGKSYLFLLSSDYERSEWREAIQKLQKKDLQAFVLSSVELQVLTGSCFKLRTVHNIPVTSNKDDDESPGLYGFLHVIVHSAKGFKQSANLYCTLEVDSFGYFVSKAKTRVFRDTAEPKWDEEFEIELEGSQSLRILCYEKCYDKTKVNKDNNEIVDKIMGKGQIQLDPQTVETKNWHTDVIEMNGIKVEFSMKFTSRDMSLKRTPSKKQTGVFGVKISVVTKRERSKVPYIVRQCVEEVEKRGIEEVGIYRISGVATDIQALKAVFDANNKDILLMLSDMDINAIAGTLKLYFRELPEPLLTDRLYPAFMEGIALSDPAAKENCMMHLLRSLPDPNLITFLFLLEHLKRVAEKEPINKMSLHNLATVFGPTLLRPSEVESKAHLTSAADIWSHDVMAQVQVLLYYLQHPPISFAELKRNTLYFSTDV

SEQ ID NO: 805192 - protein, 189 aa, Homo sapiens
MLLRVKSVQCLPERGLAMERFQSEGSCRPHDNKDILLMLSDMDINAIAGTLKLYFRELPEPLLTDRLYPAFMEGIALSDPAAKENCMMHLLRSLPDPNLITFLFLLEHLKRVAEKEPINKMSLHNLATVFGPTLLRPSEVESKAHLTSAADIWSHDVMAQVQVLLYYLQHPPISFAELKRNTLYFSTDV

SEQ ID NO: 805193 - protein, 191 aa, Homo sapiens
ADDGQGCFRGVKHLQDIRRSPEEQALKANFDANNKDILLMLSDMDINAIAGTLKLYFRELPEPLLTDRLYPAFMEGIALSDPAAKENCMMHLLRSLPDPNLITFLFLLEHLKRVAEKEPINKMSLHNLATVFGPTLLRPSEVESKAHLTSAADIWSHDVMAQVQVLLYYLQHPPISFAELKRNTLYFSTDV

SEQ ID NO: 805194 - protein, 915 aa, Homo sapiens; identical to SEQ ID NO: 805182

SEQ ID NO: 805195 - protein, 915 aa, Homo sapiens; identical to SEQ ID NO: 805182

SEQ ID NO: 805196 - protein, 915 aa, Homo sapiens; identical to SEQ ID NO: 805182

SEQ ID NO: 805197 - protein, 915 aa, Homo sapiens; identical to SEQ ID NO: 805182

SEQ ID NO: 805198 - protein, 677 aa, Homo sapiens
RPQRGTRDLEQREAEAKGRPGSPLAAEETPGREHLPPWRRRRFLRVPERDSPGHSSPERDSDGSRHSSDREDDFSADFSYGTDEYDGEGNEEQKGPPEGSETMPYIDESPTMSPQLSARSQGGGDGVSPTPPEGLAPGVEAGKGLEMRKLVLSGFLASEEIYINQLEALLLPMKPLKATATTSQPVLTIQQIETIFYKIQDIYEIHKEFYDNLCPKVQQWDSQVTMGHLFQKLASQLGVYKAFVDNYKVALETAEKCSQSNNQFQKISEELKVKGPKDSKDSHTSVTMEALLYKPIDRVTRSTLVLHDLLKHTPVDHPDYPLLQDALRISQNFLSSINEDIDPRRTAVTTPKGETRQLVKDGFLVEVSESSRKLRHVFLFTDVLLCAKLKKTSAGKHQQYDCKWYIPLADLVFPSPEESEASPQVHPFPDHELEDMKMKISALKSEIQKEKANKGQSRAIERLKKKMFENEFLLLLNSPTIPFRIHNRNGKSYLFLLSSDYERSEWREAIQKLQKKDLQAFVLSSVELQVLTGSCFKLRTVHNIPVTSNKDDDESPGLYGFLHVIVHSAKGFKQSANLYCTLEVDSFGYFVSKAKTRVFRDTAEPKWDEEFEIELEGSQSLRILCYEKCYDKTKVNKDNNEIVDKIMGKGQIQVRPGRRGEAEGASRRWFQLKRNSG

SEQ ID NO: 805199 - protein, 106 aa, Homo sapiens
GLPPRPRPCPGRPALLPGTWFPASSPLRARNFGLPRLPPALPPLLRDEGRVSDLTEPPPRDGAAQPPGPAAPVLDRHPLQQYVCRAGAGPQDRDRDPRMEIGTPGS

SEQ ID NO: 805200 - protein, 840 aa, Homo sapiens
MASVFRSEEMCLSQLFLQVEAAYCCVAELGELGLVQFKDLNMNVNSFQRKFVNEVRRCESLERILRFLEDEMQNEIVVQLLEKSPLTPLPREMITLETVLEKLEGELQEANQNQQALKQSFLELTELKYLLKKTQDFFETETNLADDFFTEDTSGLLELKAVPAYMTGKLGFIAGVINRERMASFERLLWRICRGNVYLKFSEMDAPLEDPVTKEEIQKNIFIIFYQGEQLRQKIKKICDGFRATVYPCPEPAVERREMLESVNVRLEDLITVITQTESHRQRLLQEAAANWHSWLIKVQKMKAVYHILNMCNIDVTQQCVIAEIWFPVADATRIKRALEQGMELSGSSMAPIMTTVQSKTAPPTFNRTNKFTAGFQNIVDAYGVGSYREINPAPYTIITFPFLFAVMFGDCGHGTVMLLAALWMILNERRLLSQKTDNEIWNTFFHGRYLILLMGIFSIYTGLIYNDCFSKSLNIFGSSWSVQPMFRNGTWNTHVMEESLYLQLDPAIPGVYFGNPYPFGIDPIWNLASNKLTFLNSYKMKMSVILGIVQMVFGVILSLFNHIYFRRTLNIILQFIPEMIFILCLFGYLVFMIIFKWCCFDVHVSQHAPSILIHFINMFLFNYSDSSNAPLYKHQQEVQSFFVVMALISVPWMLLIKPFILRASHRKSQLQASRIQEDATENIEGDSSSPSSRSGQRTSADTHGALDDHGEEFNFGDVFVHQAIHTIEYCLGCISNTASYLRLWALSLAHAQLSEVLWTMVMNSGLQTRGWGGIVGVFIIFAVFAVLTVAILLIMEGLSAFLHALRLHWVEFQNKFYVGDGYKFSPFSFKHILDGTAEE

SEQ ID NO: 805201 - protein, 498 aa, Homo sapiens
MLESVNVRLEDLITVITQTESHRQRLLQEAAANWHSWLIKVQKMKAVYHILNMCNIDVTQQCVIAEIWFPVADATRIKRALEQGMELSGSSMAPIMTTVQSKTAPPTFNRTNKFTAGFQNIVDAYGVGSYREINPAPYTIITFPFLFAVMFGDCGHGTVMLLAALWMILNERRLLSQKTDNEIWNLASNKLTFLNSYKMKMSVILGIVQMVFGVILSLFNHIYFRRTLNIILQFIPEMIFILCLFGYLVFMIIFKWCCFDVHVSQHAPSILIHFINMFLFNYSDSSNAPLYKHQQEVQSFFVVMALISVPWMLLIKPFILRASHRKSQLQASRIQEDATENIEGDSSSPSSRSGQRTSADTHGALDDHGEEFNFGDVFVHQAIHTIEYCLGCISNTASYLRLWALSLAHAQLSEVLWTMVMNSGLQTRGWGGIVGVFIIFAVFAVLTVAILLIMEGLSAFLHALRLHWVEFQNKFYVGDGYKFSPFSFKHILDGTAEE

SEQ ID NO: 805202 - protein, 185 aa, Homo sapiens
MLESVNVRLEDLITVITQTESHRQRLLQEAAANWHSWLIKVQKMKAVYHILNMCNIDVTQQCVIAEIWFPVADATRIKRALEQGMELSGSSMAPIMTTVQSKTAPPTFNRTNKFTAGFQNIVDAYGVGSYREINPAILLIMEGLSAFLHALRLHWVEFQNKFYVGDGYKFSPFSFKHILDGTAEE

SEQ ID NO: 805203 - protein, 68 aa, Homo sapiens
SADTHGALDDHGEEVSGTRAPEEDSPVCTNSRMDIGSRAGWVWRAPRGSSPVTAESWEAVKVSGKGTY

SEQ ID NO: 805204 - protein, 582 aa, Homo sapiens
MLESVNVRLEDLITVITQTESHRQRLLQEAAANWHSWLIKVQKMKAVYHILNMCNIDVTQQCVIAEIWFPVADATRIKRALEQGMELSGSSMAPIMTTVQSKTAPPTFNRTNKFTAGFQNIVDAYGVGSYREINPAPYTIITFPFLFAVMFGDCGHGTVMLLAALWMILNERRLLSQKTDNEIWNTFFHGRYLILLMGIFSIYTGLIYNDCFSKSLNIFGSSWSVQPMFRNGTWNTHVMEESLYLQLDPAIPGVYFGNPYPFGIDPIWNLASNKLTFLNSYKMKMSVILGIVQMVFGVILSLFNHIYFRRTLNIILQFIPEMIFILCLFGYLVFMIIFKWCCFDVHVSQHAPSILIHFINMFLFNYSDSSNAPLYKHQQEVQSFFVVMALISVPWMLLIKPFILRASHRKSQLQASRIQEDATENIEGDSSSPSSRSGQRTSADTHGALDDHGEEFNFGDVFVHQAIHTIEYCLGCISNTASYLRLWALSLAHAQLSEVLWTMVMNSGLQTRGWGGIVGVFIIFAVFAVLTVAILLIMEGLSAFLHALRLHWVEFQNKFYVGDGYKFSPFSFKHILDGTAEE

SEQ ID NO: 805205 - protein, 349 aa, Homo sapiens
MFGDCGHGTVMLLAALWMILNERRLLSQKTDNEIWNLASNKLTFLNSYKMKMSVILGIVQMVFGVILSLFNHIYFRRTLNIILQFIPEMIFILCLFGYLVFMIIFKWCCFDVHVSQHAPSILIHFINMFLFNYSDSSNAPLYKHQQEVQSFFVVMALISVPWMLLIKPFILRASHRKSQLQASRIQEDATENIEGDSSSPSSRSGQRTSADTHGALDDHGEEFNFGDVFVHQAIHTIEYCLGCISNTASYLRLWALSLAHAQLSEVLWTMVMNSGLQTRGWGGIVGVFIIFAVFAVLTVAILLIMEGLSAFLHALRLHWVEFQNKFYVGDGYKFSPFSFKHILDGTAEE

SEQ ID NO: 805206 - protein, 582 aa, Homo sapiens; identical to SEQ ID NO: 805204

SEQ ID NO: 805207 - protein, 141 aa, Homo sapiens
RRGVGRKTPVVQPGRGTRNVNLKSSSDPEASLTPPPVPTLQVAPEAPCPQSHLSFTSEGSSGTSRGATGKSMGHSSQRPVSSRARCWTRSGWRLKESGEEEEDKSSEAAQRCRAQEPGASSAAALLASSVPALPIKILFIS

SEQ ID NO: 805208 - protein, 121 aa, Homo sapiens
MDTKECLLSTEEIFLAKIEKFINIHQNSFLVLSAALHGPEEWKLMFRIQQRFLGCNLRILPVHNTVNAINLMCTIAKTTSKPYIDSICYRMITAKAYIIEQSPVWKTLQKIKLNSDSVNPN

SEQ ID NO: 805209 - protein, 357 aa, Homo sapiens
DGSKGAKTMAKAGDKSGSSGKKSLKRKAAAEELQEAAGAGDGATENGVQPPKAAAFPPGFSISEIKNKQRRHLMFTRWKQQQRKEKLAAKKKLKKEREALGDKAPPKPVPKTIDNQRVYDETTVDPNDEEVAYDEATDEFASYFNKQTSPKILITTSDRPHGRTVRLCEQLSTVIPNSHVYYRRGLALKKIIPQCIARDFTDLIVINEDRKTPNGLILSHLPNGPTAHFKMSSVRLRKEIKRRGKDPTEHIPEIILNNFTTRLGHSIGRMFASLFPHNPQFIGRQVATFHNQRDYIFFRFHRYIFRSEKKVGIQELGPRFTLKLRSLQKGTFDSKYGEYEWVHKPREMDTSRRKFHL

SEQ ID NO: 805210 - protein, 357 aa, Homo sapiens; identical to SEQ ID NO: 805209

SEQ ID NO: 805211 - protein, 330 aa, Homo sapiens
TEAKEPRASLSFFKFFLSCQLFLPQAAAFPPGFSISEIKNKQRRHLMFTRWKQQQRKEKLAAKKKLKKEREALGDKAPPKPVPKTIDNQRVYDETTVDPNDEEVAYDEATDEFASYFNKQTSPKILITTSDRPHGRTVRLCEQLSTVIPNSHVYYRRGLALKKIIPQCIARDFTDLIVINEDRKTPNGLILSHLPNGPTAHFKMSSVRLRKEIKRRGKDPTEHIPEIILNNFTTRLGHSIGRMFASLFPHNPQFIGRQVATFHNQRDYIFFRFHRYIFRSEKKVGIQELGPRFTLKLRSLQKGTFDSKYGEYEWVHKPREMDTSRRKFHL

SEQ ID NO: 805212 - protein, 357 aa, Homo sapiens; identical to SEQ ID NO: 805209

SEQ ID NO: 805213 - protein, 302 aa, Homo sapiens
DGSKGAKTMAKAGDKSGSSGKKSLKRKAAAEELQEAAGAGDGATENGVQPPKAAAFPPGFSISEIKNKQRRHLMFTRWKQQQRKEKLAAKKKLKKEREALGDKAPPKPVPKTIDNQRVYDETTVDPNDEEVAYDEATDEFASYFNKQTSPKILITTSDRPHGRTVRLCEQLSTVIPNSHVYYRRGLALKKIIPQCIARDFTDLIVINEDRKTPNGLILSHLPNGPTAHFKMSSVRLRKEIKRRGKDPTEHIPEIILNNFTTRLGHSIGRMFASLFPHNPQFIGRQVAHNFPPTTPQKKIFFP

SEQ ID NO: 805214 - protein, 393 aa, Homo sapiens
  misc_feature (35)..(35): Xaa can be any naturally occurring amino acid
SNHVLCEHGGQGDCSISDVCETQDGDEPRATPLVXRHNVQRIGCRRRLERVCVAEEDYTEEVANSADDLRLHLYPGSRLLIFYSSKDFTSSNIRREETTSLVQPLRANNISIDTRMRCVSGTRTAFRDSVVEFMSRYVIYRIHWSAGFIDNQRVYDETTVDPNDEEVAYDEATDEFASYFNKQTSPKILITTSDRPHGRTVRLCEQLSTVIPNSHVYYRRGLALKKIIPQCIARDFTDLIVINEDRKTPNGLILSHLPNGPTAHFKMSSVRLRKEIKRRGKDPTEHIPEIILNNFTTRLGHSIGRMFASLFPHNPQFIGRQVATFHNQRDYIFFRFHRYIFRSEKKVGIQELGPRFTLKLRSLQKGTFDSKYGEYEWVHKPREMDTSRRKFHL

SEQ ID NO: 805215 - protein, 409 aa, Homo sapiens
MEGESTSAVLSGFVLGALAFQHLNTDSDTEGFLLGEVKGEAKNSITDSQMDDVEVVYTIDIQKYIPCYQLFSFYNSSGEVNEQALKKILSNVKKNVVGWYKFRRHSDQIMTFRERLLHKNLQEHFSNQDLVFLLLTPSIITESCSTHRLEHSLYKPQKGLFHRVPLVVANLGMSEQLGYKTVSGSCMSTGFSRAVQTHSSKFFEEDGSLKEVHKINEMYASLQEELKSICKKVEDSEQAVDKLVKDVNRLKREIEKRRGAQIQAAREKNIQKDPQENIFLCQALRTFFPNSEFLHSCVMSLKNRHVSKSSCNYNHHLDVVDNLTLMVEHTDIPEASPASTPQIIKHKALDLDDRWQFKRSRLLDTQDKRSKADTGSSNQDKASKMSSPETDEEIEKMKGFGEYSRSPTF

SEQ ID NO: 805216 - protein, 409 aa, Homo sapiens; identical to SEQ ID NO: 805215

SEQ ID NO: 805217 - protein, 402 aa, Homo sapiens
MKTSSPKENCLFLCFTSMKNGQEGFLLGEVKGEAKNSITDSQMDDVEVVYTIDIQKYIPCYQLFSFYNSSGEVNEQALKKILSNVKKNVVGWYKFRRHSDQIMTFRERLLHKNLQEHFSNQDLVFLLLTPSIITESCSTHRLEHSLYKPQKGLFHRVPLVVANLGMSEQLGYKTVSGSCMSTGFSRAVQTHSSKFFEEDGSLKEVHKINEMYASLQEELKSICKKVEDSEQAVDKLVKDVNRLKREIEKRRGAQIQAAREKNIQKDPQENIFLCQALRTFFPNSEFLHSCVMSLKNRHVSKSSCNYNHHLDVVDNLTLMVEHTDIPEASPASTPQIIKHKALDLDDRWQFKRSRLLDTQDKRSKADTGSSNQDKASKMSSPETDEEIEKMKGFGEYSRSPTF

SEQ ID NO: 805218 - protein, 300 aa, Homo sapiens
MTFRERLLHKNLQEHFSNQDLVFLLLTPSIITESCSTHRLEHSLYKPQKGLFHRVPLVVANLGMSEQLGYKTVSGSCMSTGFSRAVQTHSSKFFEEDGSLKEVHKINEMYASLQEELKSICKKVEDSEQAVDKLVKDVNRLKREIEKRRGAQIQAAREKNIQKDPQENIFLCQALRTFFPNSEFLHSCVMSLKNRHVSKSSCNYNHHLDVVDNLTLMVEHTDIPEASPASTPQIIKHKALDLDDRWQFKRSRLLDTQDKRSKADTGSSNQDKASKMSSPETDEEIEKMKGFGEYSRSPTF

SEQ ID NO: 805219 - protein, 313 aa, Homo sapiens
MEGESTSAVLSGFVLGALAFQHLNTDSDTEGFLLGEVKGEAKNSITDSQMDDVEVVYTIDIQKYIPCYQLFSFYNSSGEVNEQALKKILSNVKKNVVGWYKFRRHSDQIMTFRERLLHKNLQEHFSNQDLVFLLLTPSIITESCSTHRLEHSLYKPQKGLFHRVPLVVANLGMSEQLGYKTVSGSCMSTGFSRAVQTHSSKFFEEDGSLKEVHKINEMYASLQEELKLYSFSECHLHPGSRLKEQPLFGTCPHGIRQRARKLVDYRREPPQLAHELIFQFISVYFQRTNWHDKSCINEKLHVKKHFTTYKAYL

SEQ ID NO: 805220 - protein, 300 aa, Homo sapiens; identical to SEQ ID NO: 805218

SEQ ID NO: 805221 - protein, 360 aa, Homo sapiens
MDDVEVVYTIDIQKYIPCYQLFSFYNSSGEVNEQALKKILSNVKKNVVGWYKFRRHSDQIMTFRERLLHKNLQEHFSNQDLVFLLLTPSIITESCSTHRLEHSLYKPQKGLFHRVPLVVANLGMSEQLGYKTVSGSCMSTGFSRAVQTHSSKFFEEDGSLKEVHKINEMYASLQEELKSICKKVEDSEQAVDKLVKDVNRLKREIEKRRGAQIQAAREKNIQKDPQENIFLCQALRTFFPNSEFLHSCVMSLKNRHVSKSSCNYNHHLDVVDNLTLMVEHTDIPEASPASTPQIIKHKALDLDDRWQFKRSRLLDTQDKRSKADTGSSNQDKASKMSSPETDEEIEKMKGFGEYSRSPTF

SEQ ID NO: 805222 - protein, 193 aa, Homo sapiens
MFKNTFQSGFLSILYSIGSKPLQIWDKKVRNGHIKRITDNDIQSLVLEIEGTNVSTTYITCPADPKKTLGIKLPFLVMIIKNLKKYFTFEVQVLDDKNVRRRFRASNYQSTTRVKPFICTMPMRLDDGWNQIQFNLLDFTRRAYGTNYIETLRVQIHANCRIRRVYFSDRLYSEDELPAEFKLYLPVQNKAKQ

SEQ ID NO: 805223 - protein, 193 aa, Homo sapiens; identical to SEQ ID NO: 805222

SEQ ID NO: 805224 - protein, 198 aa, Homo sapiens [sequence omitted]

SEQ ID NO: 805225 - protein, 174 aa, Homo sapiens
MFKNTFQSGFLSILYSIGSKPLQIWDKKVRNGHIKRITDNDIQSLVLEIEGTNVSTTYITCPADPKKTLGIKLPFLVMIIKNLKKYFTFEVQVLDDKNVRRRFRASNYQSTTRVKPFICTMPMRLDDGWNQIQFNLLDFTRRAYGTNYIETLRVQQVLLLSQIEPWVGDRAHCV

SEQ ID NO: 805226 - protein, 102 aa, Homo sapiens
RPPTSTKFAAASTSMQIVASDGFTSQTDSTQKMSCRQSSNCISQFRTRQSNNWNCDSRDRPLDVTLLFKRKLCGGRCKNIFILVCSAVVLLFILGVACHGHR

SEQ ID NO: 805227 - protein, 133 aa, Homo sapiens
MFKNTFQSGFLSILYSIGSKPLQIWDKKVRNGHIKRITDNDIQSLVLEIEGTNVSTTYITCPADPKKTLGIKLPFLVMIIKNLKKYFTFEVQVKYVYMNVSTLGYTKVIAFELMGKSDPTKYLYPFACILFCF

SEQ ID NO: 805228 - protein, 193 aa, Homo sapiens; identical to SEQ ID NO: 805222

SEQ ID NO: 805229 - protein, 193 aa, Homo sapiens; identical to SEQ ID NO: 805222

SEQ ID NO: 805230 - protein, 174 aa, Homo sapiens; identical to SEQ ID NO: 805225

SEQ ID NO: 805231 - protein, 266 aa, Homo sapiens
  misc_feature (18)..(18): Xaa can be any naturally occurring amino acid
MIQVGCRLTEDPWDLLTXARFCQCIPAELRQDALCALSRTSVLRIGNLHITGVLRSSIQWGIVSNEEGRPEHHVLKLRSQHGFLSILYSIGSKPLQIWDKKVRNGHIKRITDNDIQSLVLEIEGTNVSTTYITCPADPKKTLGIKLPFLVMIIKNLKKYFTFEVQVLDDKNVRRRFRASNYQSTTRVKPFICTMPMRLDDGWNQIQFNLLDFTRRAYGTNYIETLRVQIHANCRIRRVYFSDRLYSEDELPAEFKLYLPVQNKAKQ

SEQ ID NO: 805232 - protein, 137 aa, Homo sapiens
LSLGKASCGNSGPCLDKVVCFFQDRASVMLLLCISQVLDDKNVRRRFRASNYQSTTRVKPFICTMPMRLDDGWNQIQFNLLDFTRRAYGTNYIETLRVQIHANCRIRRVYFSDRLYSEDELPAEFKLYLPVQNKAKQ

SEQ ID NO: 805233 - protein, 102 aa, Homo sapiens
QLSVDQSKARTDQAAVMEKGRAENALLQDSEKKRSHSSPSQIPKKILSHMTHEVTEDFSPRDPRTVVGKQDGRGCTSVTTALSLPELEREDGKEDISDPMDP

SEQ ID NO: 805234 - protein, 103 aa, Homo sapiens
MPRRHEPVWEMTGFFLPDVLLSDSSDTSEGFRLHLEPGSIFMPLSEPPSDFLTSSPDHREFLSTCECFSASVCGQRLSELVLPQSQAGKPLTPKAKMPKHWSS

SEQ ID NO: 805235 - protein, 69 aa, Homo sapiens
PPRTRSPHERARQAHSAAFRQSPPTSPQIMTSGQLQFSLGPINNRSNNHKDLRGQRKPNLTVCLQDLFT

SEQ ID NO: 805236 - protein, 159 aa, Homo sapiens
MVVGRAIRSWIKSPEASRDLSSSKRMVWLMVGIMLPTEKNRSSCHRVSVSDGVTGCGCRTLAQMMIRAFFFQAKGWECAAAEEISLKASTMGRPTRSQSDFVNSASALGWNSCSASKKPPCRIVISSQMFKGPGSCFEGDQAFRDDNVMKQLMRQNTAV

SEQ ID NO: 805237 - protein, 141 aa, Homo sapiens
MDAMRGYAAKVEELTKKEVGGVEREQRGGKMDAMRGYAAKVEELTKKEVGGVEREQRGVQDGRHEGLRGQSGGADEEGSGGRGALNKGASKMDAMRGYAAKVEELTKKEVGGVEREQRGVQDGRHEGLRGQSEEMRKKEAG

SEQ ID NO: 805238 - protein, 113 aa, Homo sapiens
MSSCRGLQGSQKDHRGPGATCKRRSLWTPRASPSKAGSQPCALKPLKGLEVPIGKEARDCHGIRGPQGGSQESLPAWAKGTAYGKAAGTRPSSRRCAQRRSGGTGSRDRADTR

SEQ ID NO: 805239 - protein, 113 aa, Homo sapiens; identical to SEQ ID NO: 805238

SEQ ID NO: 805240 - protein, 379 aa, Homo sapiens
GRGTYLSLLLPPRLCRLRSGMVRLAWMVALGLSPSFSLAKQWLLRIRCREDFTIRPLGSETRKTSAASLRAAAAARRSQNGASAAARLYRCCAQATPPAPPGTRPHEGQSRGAAGKKSRARPSQRLIGERERERKRLSGDWLPGPGPAAAPAMSMTTRAWEELDGGLGSCQALEDHSALAETQEDRASATPRLADSGSVPHDSQVAEGPSVDTRPKKMEKEPAARGTPGTGKERLKAGASPRSVPARKKAQTAPPLQPPPPPPALSEELPWGDLSLNKCLVLASLVALLGSAFQLCRDAVPGEAALQARVPEPWVPPSSAPREPSSPLPKFEAQAPPSAPPAPRARQRSDPRFPGVGRLQRTTKRSPARPPERPSGRTV

SEQ ID NO: 805241 - protein, 245 aa, Homo sapiens
KAQQSGWRPGPGPAAAPAMSMTTRAWEELDGGLGSCQALEDHSALAETQEDRASATPRLADSGSVPHDSQVAEGPSVDTRPKKMEKEPAARGTPGTGKERLKAGASPRSVPARKKAQTAPPLQPPPPPPALSEELPWGDLSLNKCLVLASLVALLGSAFQLCRDAVPGEAALQARVPEPWVPPSSAPREPSSPLPKFEAQAPPSAPPAPRARQRSDPRFPGVGRLQRTTKRSPARPPERPSGRTV

SEQ ID NO: 805242 - protein, 151 aa, Homo sapiens
GRGTYLSLLLPPRLCRLRSGMVRLAWMVALGLSPSFSLAKQWLLRIRCREDFTIRPLGSETRKTSAASLRAAAAARRSQNGASAAARLYRCCAQATPPAPPGTRPHEGQSRGAAGKKSRARPSQRLIGERERERKRLSGDWLINSDFSCGN

SEQ ID NO: 805243 - protein, 245 aa, Homo sapiens
MAEDLSAATSYTEDDFYCPVCQEVLKTPVRTTACQHVFCRKCFLTAMRESGAHCPLCRGNVTRRERACPERALDLENIMRKFSGSCRCCAKQIKFYRMRHHYKSCKKYQDEYGVSSIIPNFQISQDSVGNSNRSETSTSDNTETYQENTSSSGHPTFKCPLCQESNFTRQRLLDHCNSNHLFQIVPVTCPICVSLPWGDPSQITRNFVSHLNQRHQFDYGEFVNLQLDEETQYQTAVEESFQVNI

SEQ ID NO: 805244 - protein, 245 aa, Homo sapiens; identical to SEQ ID NO: 805243

SEQ ID NO: 805245 - protein, 245 aa, Homo sapiens; identical to SEQ ID NO: 805243

SEQ ID NO: 805246 - protein, 245 aa, Homo sapiens; identical to SEQ ID NO: 805243

SEQ ID NO: 805247 - protein, 211 aa, Homo sapiens
  misc_feature (5)..(5): Xaa can be any naturally occurring amino acid
RPTRXSTHASRTRGSSGAHCPLCRGNVTRRERACPERALDLENIMRKFSGSCRCCAKQIKFYRMRHHYKSCKKYQDEYGVSSIIPNFQISQDSVGNSNRSETSTSDNTETYQENTSSSGHPTFKCPLCQESNFTRQRLLDHCNSNHLFQIVPVTCPICVSLPWGDPSQITRNFVSHLNQRHQFDYGEFVNLQLDEETQYQTAVEESFQVNI

SEQ ID NO: 805248 - protein, 151 aa, Homo sapiens
MAEDLSAATSYTEDDFYCPVCQEVLKTPVRTTACQHVNRSETSTSDNTETYQENTSSSGHPTFKCPLCQESNFTRQRLLDHCNSNHLFQIVPVTCPICVSLPWGDPSQITRNFVSHLNQRHQFDYGEFVNLQLDEETQYQTAVEESFQVNI

SEQ ID NO: 805249 - protein, 226 aa, Homo sapiens
MAEDLSAATSYTEDDFYCPVCQEVLKTPVRTTACQHVFCRKCFLTAMRESGAHCPLCRGNVTRRERACPERALDLENIMRKFSGSCRCCAKQIKFYRMRHHYKSCKKYQDEYGVSSIIPNFQISQDSVGNSSSGHPTFKCPLCQESNFTRQRLLDHCNSNHLFQIVPVTCPICVSLPWGDPSQITRNFVSHLNQRHQFDYGEFVNLQLDEETQYQTAVEESFQVNI

SEQ ID NO: 805250 - protein, 199 aa, Homo sapiens
MAEDLSAATSYTEDDFYCPVCQEVLKTPVRTTACQHVFCRKCFLTAMRESGAHCPLCRGNVTRRERACPERALDLENIMRKFSGSCRCCAKQIKFYRMRHHYKSCKKYQDEYGVSSIIPNFQISQDSVGNSNRSETSTSDNTETYQENTSSSGHPTFKCPLCQESNFTRQRLLDHCNSNHLFQIVPVILARLPEISLVI

SEQ ID NO: 805251 - protein, 245 aa, Homo sapiens
MAEDLSAATSYTEDDFYCPVCQEVLKTPVRTTACQHVFCRKCFLTAMRESGAHCPLCRGNVTRRERACPERALDLENIMRKFSGSCRCCAKQIKFYRMRHHYKSCKKYQDEYGVSSIIPNFQISQDSVGNSNRSETSTSDNTETYQENTSSSGHPTFKCPLCQESNFTRQRLLDHCNSNHLFQIVPVTCSIWVSLPWGDPSRFPVSVALYLETHLIQGMVISADENPYQRCGQSSRTSAVPGCSA

SEQ ID NO: 805252 - protein, 236 aa, Homo sapiens
MVSAIGRSSLRQGVVRPRGNSLRLRGAPVGAPLAVQAAMDSLRKMLISVAMLGAGAGVGYALLVIVTPGERRKQEMLKVEATGSPEEGCGGWRAPDWSSCELPFLPSGDATAGPKEQGGGGQDPAAIAGHSAGGSDHAGERGLEEELDGWRRRRRQREVTVRPDLPPWAPDLGLGAGIRGSLSPSWAQRRVRTEIPCQDSPGSCELPSGEHVSPKPWTDCFKVRKAGQGRDASRMW

SEQ ID NO: 805253 - protein, 144 aa, Homo sapiens
VSSSRSSLAGRLSMVSAIGRSSLRQGVVRPRGNSLRLRGAPVGAPLAVQAAMDSLRKMLISVAMLGAGAGVGYALLVIVTPGERRKQEMLKEMPLQDPRSREEAARTQQLLLATLQEAATTQENVAWRKNWMVGGEGGASGRSP

SEQ ID NO: 805254 - protein, 144 aa, Homo sapiens; identical to SEQ ID NO: 805253

SEQ ID NO: 805255 - protein, 144 aa, Homo sapiens; identical to SEQ ID NO: 805253

SEQ ID NO: 805256 - protein, 119 aa, Homo sapiens
VSSSRSSLAGRLSMVSAIGRSSLRQGVVRPRGNSLRLRGAPVGAPLAVQAAMDSLRKMLISVAMLGAGAGVGYALLVIVTPGERRKQEMLKEAATTQENVAWRKNWMVGGEGGASGRSP

SEQ ID NO: 805257 - protein, 236 aa, Homo sapiens; identical to SEQ ID NO: 805252

SEQ ID NO: 805258 - protein, 195 aa, Homo sapiens
RQPAPAMASGAGGSWGRSPPQSAVPTPWVTFLQPLSWAVPPAPPQPGRVKEDLLELMMLQNAQMHQLLLSRLVAGALQPRPASPCPQVYLEVPQEEPEEEEEEMDVREKGPLVFHHHYLPYLMPSPGALLPWPAPFFPTPACQPYLQDVPSIQHCPASREREVRAVPPPPPPSATGTVGADVPPASDYYDAESLL

SEQ ID NO: 805259 - protein, 255 aa, Homo sapiens
ERLSLGDGRVGSCPWRGQILEGWGTRRDSPKPRGRGVAGSREATGRGGENLAPAGLGRPLAGRGWGSRRVPIHSRHRTWLSPRTPPPWVTFLQPLSWAVPPAPPQPGRVKEDLLELMMLQNAQMHQLLLSRLVAGALQPRPASPCPQVYLEVPQEEPEEEEEEMDVREKGPLVFHHHYLPYLMPSPGALLPWPAPFFPTPACQPYLQDVPSIQHCPASREREVRAVPPPPPPSATGTVGADVPPASDYYDAESLL

SEQ ID NO: 805260 - protein, 356 aa, Homo sapiens
RQPAPAMASGAGGSWGRSPPQSAVPTPWVTFLQPLSWAVPPAPPQPGRVKEDLLELMMLQNAQMHQLLLSRLVAGALQPRPASPCPQVYLEVPQEEPEEEEEEMDVREKGPLVFHHHYLPYLMPSPGALLPWPAPFFPTPACQPYLQDVPSIQHCPASREREVRAVPPPPPPSATGTVGADVPPASDYYDAESLLGGQTPALGTAPASCSGYSPGAASCTSLVDSPVPMAGSPSHSLNLSQALFSWGNQSLPHANEFLDGPDLCCCVPIRCWRKCWPKMKQSRTDVTNRDSNTDTTVTMMTIWLSDTGSGEGGGKGLRRPVIPVTRDQKGVEVHPQPRPPDPAARSCIQQSPQLQR

SEQ ID NO: 805261 - protein, 121 aa, Homo sapiens
MRSPSSLVMEQEGRGGFLLLSTALKAPLRWLEGPRVVGERLCWAAPLSRVSSLGPPPLIPGSSSVGRKERSELCPAVARSGLRSPGARWEQCVLCPLGQGVFPPPSLSSNELLGPDGGLLH

SEQ ID NO: 805262 - protein, 513 aa, Homo sapiens
MGAAAKLAFAVFLISCSSGAILGRSETQECLFFNANWEKDRTNQTGVEPCYGDKDKRRHCFATWKNISGSIEIVKQGCWLDDINCYDRTDCVEKKDSPEVYFCCCEGNMCNEKFSYFPEMEVTQPTSNPVTPKPPYYNILLYSLVPLMLIAGIVICAFWVYRHHKMAYPPVLVPTQDPGPPPPSPLLGLKPLQLLEVKARGRFGCVWKAQLLNEYVAVKIFPIQDKQSWQNEYEVYSLPGMKHENILQFIGAEKRGTSVDVDLWLITAFHEKGSLSDFLKANVVSWNELCHIAETMARGLAYLHEDIPGLKDGHKPAISHRDIKSKNVLLKNNLTACIADFGLALKFEAGKSAGDTHGQVGTRRYMAPEVLEGAINFQRDAFLRIDMYAMGLVLWELASRCTAADGPVDEYMLPFEEEIGQHPSLEDMQEVVVHKKKRPVLRDYWQKHAGMAMLCETIEECWDHDAEARLSAGCVGERITQMQRLTNIITTEDIVTVVTMVTNVDFPPKESSL

SEQ ID NO: 805263 - protein, 513 aa, Homo sapiens; identical to SEQ ID NO: 805262

SEQ ID NO: 805264 - protein, 116 aa, Homo sapiens
FFGLGFRICFMTVDFTPGGLSPRKTQGTGYLARTSSGFPGASGKWELLQSWRLPSFLSPVLQVLYLVDQKLRSVFSLMLIGKKTEPIKLVLNRVMVTKINGGIVLLPGRIFLVPLK

SEQ ID NO: 805265 - protein, 112 aa, Homo sapiens
PKTRPSPEPGAGARAWTRTWPPPAPPPPLPPAAPSPRRSRLAATAASSAASGPRTLGVWVEGRSGHRTQSVPRLSGRQRTPLPPPPLRRLSLAFCSERRERRAELTVILTVI

SEQ ID NO: 805266 - protein, 586 aa, Homo sapiens
PKTRPSPEPGAGARAWTRTWPPPAPPPPLPPAAPSPRRSRLAATAASSAASGPRTLGVWVEGAILGRSETQECLFFNANWEKDRTNQTGVEPCYGDKDKRRHCFATWKNISGSIEIVKQGCWLDDINCYDRIVREVRGKEDSRIVKVWKKENDKKKNEIEWTDCVEKKDSPEVYFCCCEGNMCNEKFSYFPEMEVTQPTSNPVTPKPPYYNILLYSLVPLMLIAGIVICAFWVYRHHKMAYPPVLVPTQDPGPPPPSPLLGLKPLQLLEVKARGRFGCVWKAQLLNEYVAVKIFPIQDKQSWQNEYEVYSLPGMKHENILQFIGAEKRGTSVDVDLWLITAFHEKGSLSDFLKANVVSWNELCHIAETMARGLAYLHEDIPGLKDGHKPAISHRDIKSKNVLLKNNLTACIADFGLALKFEAGKSAGDTHGQVGTRRYMAPEVLEGAINFQRDAFLRIDMYAMGLVLWELASRCTAADGPVDEYMLPFEEEIGQHPSLEDMQEVVVHKKKRPVLRDYWQKHAGMAMLCETIEECWDHDAEARLSAGCVGERITQMQRLTNIITTEDIVTVVTMVTNVDFPPKESSL

SEQ ID NO: 805267 - protein, 405 aa, Homo sapiens
MCNEKFSYFPEMEVTQPTSNPVTPKPPYYNILLYSLVPLMLIAGIVICAFWVYRHHKMAYPPVLVPTQDPGPPPPSPLLGLKPLQLLEVKARGRFGCVWKAQLLNEYVAVKIFPIQDKQSWQNEYEVYSLPGMKHENILQFIGAEKRGTSVDVDLWLITAFHEKGSLSDFLKANVVSWNELCHIAETMARGLAYLHEDIPGLKDGHKPAISHRDIKSKNVLLKNNLTACIADFGLALKFEAGKSAGDTHGQVGTRRYMAPEVLEGAINFQRDAFLRIDMYAMGLVLWELASRCTAADGPVDEYMLPFEEEIGQHPSLEDMQEVVVHKKKRPVLRDYWQKHAGMAMLCETIEECWDHDAEARLSAGCVGERITQMQRLTNIITTEDIVTVVTMVTNVDFPPKESSL

SEQ ID NO: 805268 - protein, 148 aa, Homo sapiens
MAPEVLEGAINFQRDAFLRIDMYAMGLVLWELASRCTAADGPVDEYMLPFEEEIGQHPSLEDMQEVVVHKKKRPVLRDYWQKHAGMAMLCETIEECWDHDAEARLSAGCVGERITQMQRLTNIITTEDIVTVVTMVTNVDFPPKESSL

SEQ ID NO: 805269 - protein, 412 aa, Homo sapiens
MGAAAKLAFAVFLISCSSGAILGRSETQECLFFNANWEKDRTNQTGVEPCYGDKDKRRHCFATWKNISGSIEIVKQGCWLDDINCYDRTDCVEKKDSPEVYFCCCEGNMCNEKFSYFPEMEVTQPTSNPVTPKPPYYNILLYSLVPLMLIAGIVICAFWVYRHHKMAYPPVLVPTQDPGPPPPSPLLGLKPLQLLEVKARGRFGCVWKAQLLNEYVAVKIFPIQDKQSWQNEYEVYSLPGMKHENILQFIGAEKRGTSVDVDLWLITAFHEKGSLSDFLKANVVSWNELCHIAETMARGLAYLHEDIPGLKDGHKPAISHRDIKSKNVLLKNNLTACIADFGLALKFEAGKSAGDTHGQVGTRRYMAPEVLEGAINFQRDAFLRIDMYAMGLVLWELASRCTAADGKGKKYF

SEQ ID NO: 805270 - protein, 238 aa, Homo sapiens
MGAAAKLAFAVFLISCSSGAILGRSETQECLFFNANWEKDRTNQTGVEPCYGDKDKRRHCFATWKNISGSIEIVKQGCWLDDINCYDRTDCVEKKDSPEVYFCCCEGNMCNEKFSYFPEMEVTQPTSNPVTPKPPYYNILLYSLVPLMLIAGIVICAFWVYRHHKMAYPPVLVPTQDPGPPPPSPLLGLKPLQLLEVKARGRFGCVWKAQLLNEYVAVKIFPIQDKHIAVSWYRADCI

SEQ ID NO: 805271 - protein, 311 aa, Homo sapiens
PKTRPSPEPGAGARAWTRTWPPPAPPPPLPPAAPSPRRSRLAATAASSAASGPRTLGVWVEGAILGRSETQECLFFNANWEKDRTNQTGVEPCYGDKDKRRHCFATWKNISGSIEIVKQGCWLDDINCYDRIVREVRGKEDSRIVKVWKKENDKKKNEIEWTDCVEKKDSPEVYFCCCEGNMCNEKFSYFPEMEVTQPTSNPVTPKPPYYNILLYSLVPLMLIAGIVICAFWVYRHHKMAYPPVLVPTQDPGPPPPSPLLGLKPLQLLEVKARGRFGCVWKAQLLNEYVAVKIFPIQDKHIAVSWYRADCI

SEQ ID NO: 805272 - protein, 194 aa, Homo sapiens
RTSGGHPLSGRRPRSEDLDIAVWLATVHLEQYADTFRRHGLATAGAARGLGHEELKQLGISATGHRKRILRLLQTGTEEGSLDPKSDSAMEPSPSPAPQAQPPKPVPKPRTVFGGLSGPATTQRPGLSPALGGPGVSRSPEPSPRPPPLPTSSSEQSSALNTVEMMPNSIYFGLDSRGRAQAAQDKAPDSSQIS

SEQ ID NO: 805273 - protein, 183 aa, Homo sapiens
MAAPQDLDIAVWLATVHLEQYADTFRRHGLATAGAARGLGHEELKQLGISATGHRKRILRLLQTGTEEGSLDPKSDSAMEPSPSPAPQAQPPKPVPKPRTVFGGLSGPATTQRPGLSPALGGPGVSRSPEPSPRPPPLPTSSSEQSSALNTVEMMPNSIYFGLDSRGRAQAAQDKAPDSSQIS

SEQ ID NO: 805274 - protein, 183 aa, Homo sapiens; identical to SEQ ID NO: 805273

SEQ ID NO: 805275 - protein, 71 aa, Homo sapiens
SPCKKQGHSRGQRLGPRRALPARGIGFSLTPQNDQGPGNGDLCSLARHPPNSTVRAPAKAGQKAVNWGEDR

SEQ ID NO: 805276 - protein, 54 aa, Homo sapiens
MHPGAHPGIILYLKYPQELSCPRTFAHAGPTTCDALFWLTTWLAPSHSLVSAQW

SEQ ID NO: 805277 - protein, 135 aa, Homo sapiens
RGLRAEGPEEREHCLPPGSPAWGVQVVSVAAVASRERRCLVNARMGTRKKVHAFVRVKPTDDFAHEMIRYGDDKRSIDIHLKKDIRRGVVNNQQTDWSFKLDGVLHDASQDLVYETVAKDVVSQALDGYNGNLIN

SEQ ID NO: 805278 - protein, 725 aa, Homo sapiens
MGTRKKVHAFVRVKPTDDFAHEMIRYGDDKRSIDIHLKKDIRRGVVNNQQTDWSFKLDGVLHDASQDLVYETVAKDVVSQALDGYNGTIMCYGQTGAGKTYTMMGATENYKHRGILPRALQQVFRMIEERPTHAITVRVSYLEIYNESLFDLLSTLPYVGPSVTPMTIVENPQGVFIKGLSVHLTSQEEDAFSLLFEGETNRIIASHTMNKNSSRSHCIFTIYLEAHSRTLSEEKYITSKINLVDLAGSERLGKSGSEGQVLKEATYINKSLSFLEQAIIALGDQKRDHIPFRQCKLTHALKDSLGGNCNMVLVTNIYGEAAQLEETLSSLRFASRMKLVTTEPAINEKYDAERMVKNLEKELALLKQELAIHDSLTNRTFVTYDPMDEIQIAEINSQVRRYLEGTLDEIDIISLRQIKEVFNQFRVVLSQQEQEVESTLRRKYTLIDRNDFAAISAIQKAGLVDVDGHLVGEPEGQNFGLGVAPFSTKPGKKAKSKKTFKEPLRPDTPPSKPVAFEEFKNEQGSEINRIFKENKSILNERRKRASETTQHINAIKREIDVTKEALNFQKSLREKQGKYENKGLMIIDEEEFLLILKLKDLKKQYRSEYQDLRDLRAEIQYCQHLVDQCRHRLLMEFDIWYNESFVIPEDMQMALKPGGSIRPGMVPVNRIVSLGEDDQDKFSQLQQRVLPEGPDSISFYNAKVKIEQKHNYLKTMMGLQQAHRK

SEQ ID NO: 805279 - protein, 725 aa, Homo sapiens; identical to SEQ ID NO: 805278

SEQ ID NO: 805280 - protein, 725 aa, Homo sapiens; identical to SEQ ID NO: 805278

SEQ ID NO: 805281 - protein, 664 aa, Homo sapiens
MGTRKKVHAFVRVKPTDDFAHEMIRYGDDKRSIDIHLKKDIRRGVVNNQQTDWSFKLDGVLHDASQDLVYETVAKDVVSQALDGYNGTIMCYGQTGAGKTYTMMGATENYKHRGILPRALQQVFRMIEERPTHAITVRVSYLEIYNESLFDLLSTLPYVGPSVTPMTIVENPQGVFIKGLSVHLTSQEEDAFSLLFEGETNRIIASHTMNKNSSRSHCIFTIYLEAHSRTLSEEKYITSKINLVDLAGSERLGKSGSEGQVLKEATYINKSLSFLEQAIIALGDQKRDHIPFRQCKLTHALKDSLGGNCNMVLVTNIYGEAAQLEETLSSLRFASRMKLVTTEPAINEKYDAERMVKNLEKELALLKQELAIHDSLTNRTFVTYDPMDEIQIAEINSQVRRYLEGTLDEIDIISLRQIKEVFNQFRVVLSQQEQEVESTLRRKYTLIDRNDFAAISAIQKAGLVDVDGHLVGEPEGQNFGLGVAPFSTKPGKKAKSKKTFKEPLSSLARKEGASSPVNGKDLDYVSTSKTQLVPSSKDGDVKDMLSRDRETSSIEPLPSDSPKEELRPIRPDTPPSKPVAFEEFKNEQGSEINRIFKENKSILNERRKRASETTQHINAIKREIDVTKEALNFQKSLREKQDRKHHRLLGFPSLNHNPVPGQLP

SEQ ID NO: 805282 - protein, 725 aa, Homo sapiens; identical to SEQ ID NO: 805278

SEQ ID NO: 805283 - protein, 739 aa, Homo sapiens [sequence omitted]

SEQ ID NO: 805284 - protein, 151 aa, Homo sapiens
FSGAHQHVEPATAPASIEARCRPVRGTLRVTSHSLPCRRISSMTPEPRLGNSDTEKCTRSSSSSAPSSTIFPGRCNCAGLAGRLDTNQGGAIAHADSRSERGAAIGRASAAAVVESPRRRKPRHSASWFMCGLRSLAISTLTSHVHPPKSF

SEQ ID NO: 805285 - protein, 670 aa, Homo sapiens
MGTRKKVHAFVRVKPTDDFAHEMIRYGDDKRSIDIHLKKDIRRGVVNNQQTDWSFKLDGVLHDASQDLVYETVAKDVVSQALDGYNGTIMCYGQTGAGKTYTMMGATENYKHRGILPRALQQVFRMIEERPTHAITVRVSYLEIYNESLFDLLSTLPYVGPSVTPMTIVENPQGVFIKGLSVHLTSQEEDAFSLLFEGETNRIIASHTMNKNSSRSHCIFTIYLEAHSRTLSEEKYITSKINLVDLAGSERLGKSGSEGQVLKEATYINKSLSFLEQAIIALGDQKRDHIPFRQCKLTHALKDSLGGNCNMVLVTNIYGEAAQLEETLSSLRFASRMKLVTTEPAINEKYDAERMVKNLEKELALLKQELAIHDSLTNRTFVTYDPMDEIQIAEINSQVRRYLEGTLDEIDIISLRQIKEVFNQFRVVLSQQEQEVESTLRRKYTLIDRNDFAAISAIQKAGLVDVDGHLVGEPEGQNFGLGVAPFSTKPGKKAKSKKTFKEPLSSLARKEGASSPVNGKDLDYVSTSKTQLVPSSKDGDVKDMLSRDRETSSIEPLPSDSPKEELRPIRPDTPPSKPVAFEEFKNEQGSEINRIFKENKSILNERRKRASETTQHINAIKREIDVTKEALNFQKSLREKQGKCVGKRARELWGLRVMLVEAEQHLALEV

SEQ ID NO: 805286 - protein, 333 aa, Homo sapiens
MGTRKKVHAFVRVKPTDDFAHEMIRYGDDKRSIDIHLKKDIRRGVVNNQQTDWSFKLDGVLHDASQDLVYETVAKDVVSQALDGYNGTIMCYGQTGAGKTYTMMGATENYKHRGILPRALQQVFRMIEERPTHAITVRVSYLEIYNESLFDLLSTLPYVGPSVTPMTIVENPQGVFIKGLSVHLTSQEEDAFSLLFEGETNRIIASHTMNKNSSRSHCIFTIYLEAHSRTLSEEKYITSKINLVDLAGSERLGKSGSEGQVLKEATYINKSLSFLEQAIIALGDQKRDHIPFRQCKLTHALKDSLGGNCNMVLVTNIYGEAAQLEETVCKDSQ

SEQ ID NO: 805287 - protein, 105 aa, Homo sapiens
MKRRKNGNKQYFTRMGTRKKVHAFVRVKPTDDFAHEMIRYGDDKRSIDIHLKKDIRRGVVNNQQTDWSFKLDGVLHDASQDLVYETVAKDVVSQALDGYNGNLIN

SEQ ID NO: 805288 - protein, 715 aa, Homo sapiens
MGTRKKVHAFVRVKPTDDFAHEMIRYGDDKRSIDIHLKKDIRRGVVNNQQTDWSFKLDGVLHDASQDLVYETVAKDVVSQALDGYNGTIMCYGQTGAGKTYTMMGATENYKHRGILPRALQQGETNRIIASHTMNKNSSRSHCIFTIYLEAHSRTLSEEKYITSKINLVDLAGSERLGKSGSEGQVLKEATYINKSLSFLEQAIIALGDQKRDHIPFRQCKLTHALKDSLGGNCNMVLVTNIYGEAAQLEETLSSLRFASRMKLVTTEPAINEKYDAERMVKNLEKELALLKQELAIHDSLTNRTFVTYDPMDEIQIAEINSQVRRYLEGTLDEIDIISLRQIKEVFNQFRVVLSQQEQEVESTLRRKYTLIDRNDFAAISAIQKAGLVDVDGHLVGEPEGQNFGLGVAPFSTKPGKKAKSKKTFKEPLSSLARKEGASSPVNGKDLDYVSTSKTQLVPSSKDGDVKDMLSRDRETSSIEPLPSDSPKEELRPIRPDTPPSKPVAFEEFKNEQGSEINRIFKENKSILNERRKRASETTQHINAIKREIDVTKEALNFQKSLREKQGKYENKGLMIIDEEEFLLILKLKDLKKQYRSEYQDLRDLRAEIQYCQHLVDQCRHRLLMEFDIWYNESFVIPEDMQMALKPGGSIRPGMVPVNRIVSLGEDDQDKFSQLQQRVLPEGPDSISFYNAKVKIEQKHNYLKTMMGLQQAHRK

SEQ ID NO: 805289 - protein, 701 aa, Homo sapiens
MCYGQTGAGKTYTMMGATENYKHRGILPRALQQVFRMIEERPTHAITVRVSYLEIYNESLFDLLSTLPYVGPSVTPMTIVENPQGVFIKGLSVHLTSQEEDAFSLLFEGETNRIIASHTMNKNSSRSHCIFTIYLEAHSRTLSEEKYITSKINLVDLAGSERLGKSGSEGQVLKEATYINKSLSFLEQAIIALGDQKRDHIPFRQCKLTHALKDSLGGNCNMVLVTNIYGEAAQLEETLSSLRFASRMKLVTTEPAINEKYDAERMVKNLEKELALLKQELAIHDSLTNRTFVTYDPMDEIQIAEINSQVRRYLEGTLDEIDIISLRQIKEVFNQFRVVLSQQEQEVESTLRRKYTLIDRNDFAAISAIQKAGLVDVDGHLVGEPEGQNFGLGVAPFSTKPGKKAKSKKTFKEPLSSLARKEGASSPVNGKDLDYVSTSKTQLVPSSKDGDVKDMLSRDRETSSIEPLPSDSPKEELRPIRPDTPPSKPVAFEEFKNEQGSEINRIFKENKSILNERRKRASETTQHINAIKREIDVTKEALNFQKSLREKQGKYENKGLMIIDEEEFLLILKLKDLKKQYRSEYQDLRDLRAEIQYCQHLVDQCRHRLLMEFDIWYNESFVIPEDMQMALKPGGSIRPGMVPVNRIVSLGEDDQDKFSQLQQRVLPEGPDSISFYNAKVKIEQKHNYLKTMMGLQQAHRK

SEQ ID NO: 805290 - protein, 221 aa, Homo sapiens
MPDTPPSKPVAFEEFKNEQGSEINRIFKENKSILNERRKRASETTQHINAIKREIDVTKEALNFQKSLREKQGKYENKGLMIIDEEEFLLILKLKDLKKQYRSEYQDLRDLRAEIQYCQHLVDQCRHRLLMEFDIWYNESFVIPEDMQMALKPGGSIRPGMVPVNRIVSLGEDDQDKFSQLQQRVLPEGPDSISFYNAKVKIEQKHNYLKTMMGLQQAHRK

SEQ ID NO: 805291 - protein, 427 aa, Homo sapiens
GTRPPAQETCWLLPSGRSRARTRNPAMEDPSGAREPRARPRERDPGRRPHPDQGRTHDRPRDRPGDPRRKRSSDGNRRRDGDRDPKRDQERDGNRDRNRDRERERERERDPDRGPRRDTHRDAGPRAGEHGVWEKPRQSRTRDGARGLTWDAAAPPGPAPWEAPEPPQPQRKGDPGRRRPESEPPSERYLPSTPRPGREEVEYYQSEAEGLLECHKCKYLCTGRACCQMLEVLLNLLILACSSVSYSSTGGYTGITSLGGIYYYQFGGAYSGFDGADGEKAQQLDVQFYQLKLPMVTVAMACSGALTALCCLFVAMGVLRVPWHCPLLLVTEGLLDMLIAGGYIPALYFYFHYLSAAYGSPVCKERQALYQSKGYSGFGCSFHGADIGAGIFAALGIVVFALGAVLAIKGYRKVRKLKEKPAEMFEF

SEQ ID NO: 805292 - protein, 245 aa, Homo sapiens
GTRPPAQETCWLLPSGRSRARTRNPAMEDPSGAREPRARPRERDPGRRPHPDQGRTHDRPRDRPGDPRRKRSSDGNRRRDGDRDPKRDQERDGNRDRNRDRERERERERDPDRGPRRDTHRDAGPRAGEHGVWEKPRQSRTRDGARGLTWDAAAPPGPAPWEAPEPPQPQRKGDPGRRRPESEPPSERYLPSTPRPGREEVEYYQSEAEGLLECHKCKYLCTGRGEPFCRLFDHLLSLVVLEGMV

SEQ ID NO: 805293 - protein, 453 aa, Homo sapiens
MRPRFNSDEVLPSCVAPWAADTEPGHGRVVVWCSLMPLCVPVLDDDAGDPGIVRLPPHDLNVPATPLYSDLLCDLIPGVTTDCSVICCYAMLDGVNAVREMCDCGDLVTPIDDDQERDGNRDRNRDRERERERERDPDRGPRRDTHRDAGPRAGEHGVWEKPRQSRTRDGARGLTWDAAAPPGPAPWEAPEPPQPQRKGDPGRRRPESEPPSERYLPSTPRPGREEVEYYQSEAEGLLECHKCKYLCTGRACCQMLEVLLNLLILACSSVSYSSTGGYTGITSLGGIYYYQFGGAYSGFDGADGEKAQQLDVQFYQLKLPMVTVAMACSGALTALCCLFVAMGVLRVPWHCPLLLVTEGLLDMLIAGGYIPALYFYFHYLSAAYGSPVCKERQALYQSKGYSGFGCSFHGADIGAGIFAALGIVVFALGAVLAIKGYRKVRKLKEKPAEMFEF

SEQ ID NO: 805294 - protein, 427 aa, Homo sapiens; identical to SEQ ID NO: 805291

SEQ ID NO: 805295 - protein, 351 aa, Homo sapiens
MPGPPRSLEMGLLTFRDVAIEFSLEEWQHLDIAQQNLYRNVMLENYRNLAFLGIAVSKPDLITCLEQGKEPWNMKRHEMVDEPPGMCPHFAQDLWPEQGMEDSFQKAILRRYGKYGHENLQLRKGCKSVDEYKVNKEGYNGLNQCFTTAQSKVFQCDKYLKVFYKFLNSNRPKIRHTEKKSFKCKKRVKLFCMLSHKTQHKSIYHREKSYKCKECGKTFNWSSTLTNHRKIYTEEKPYKCEEYNKSPKQLSTLTTHEIIHAGEKLYKCEECGKAFNRSSTFTKHKVIHTGVKPYKCEECGKAFFWSSTLTKHKRIHTGEQPYKWEKFGKAFNRSSHLTTDKITHWREILQV

SEQ ID NO: 805296 - protein, 124 aa, Homo sapiens
SSLNISDGVIMTCDFILQQSELILPPEPSPQKGLSHIVGPRIEGLLTFRDVAIEFSLEEWQHLDIAQQNLYRNVMLENYRNLAFLGIAVSKPDLITCLEQGKEPWNMKRHEMVDEPPGLDFSLL

SEQ ID NO: 805297 - protein, 351 aa, Homo sapiens; identical to SEQ ID NO: 805295

SEQ ID NO: 805298 - protein, 402 aa, Homo sapiens
LCDGLCCPVICRSGETHSYDVRTSWKLGKGLAISKLDLVTFLEGKKEPWTVKSEETIAAQPGLLTFRDVAIEFSLEEWQHLDIAQQNLYRNVMLENYRNLAFLGIAVSKPDLITCLEQGKEPWNMKRHEMVDEPPGMCPHFAQDLWPEQGMEDSFQKAILRRYGKYGHENLQLRKGCKSVDEYKVNKEGYNGLNQCFTTAQSKVFQCDKYLKVFYKFLNSNRPKIRHTEKKSFKCKKRVKLFCMLSHKTQHKSIYHREKSYKCKECGKTFNWSSTLTNHRKIYTEEKPYKCEEYNKSPKQLSTLTTHEIIHAGEKLYKCEECGKAFNRSSTFTKHKVIHTGVKPYKCEECGKAFFWSSTLTKHKRIHTGEQPYKWEKFGKAFNRSSHLTTDKITHWREILQV

SEQ ID NO: 805299 - protein, 310 aa, Homo sapiens
MLENYRNLAFLGIAVSKPDLITCLEQGKEPWNMKRHEMVDEPPGMCPHFAQDLWPEQGMEDSFQKAILRRYGKYGHENLQLRKGCKSVDEYKVNKEGYNGLNQCFTTAQSKVFQCDKYLKVFYKFLNSNRPKIRHTEKKSFKCKKRVKLFCMLSHKTQHKSIYHREKSYKCKECGKTFNWSSTLTNHRKIYTEEKPYKCEEYNKSPKQLSTLTTHEIIHAGEKLYKCEECGKAFNRSSTFTKHKVIHTGVKPYKCEECGKAFFWSSTLTKHKRIHTGEQPYKWEKFGKAFNRSSHLTTDKITHWREILQV

SEQ ID NO: 805300 - protein, 224 aa, Homo sapiens
  misc_feature (7)..(7): Xaa can be any naturally occurring amino acid
FDGDSLXICFHIKPNTKAFIIERSPTNVKNVEKPLIGPQPLLIIGKFILKRNLTNVKNITNLPFSQSSTLTTHKIIHTGEKPYKCEECGKAFNWSSTLTKHKIIHTEEKPYKCEKCGKAFKQSSILTNHKRIHTGEKPYKCEECGKAFNRSSTFTKHKVIHTGVKPYKCEECGKAFFWSSTLTKHKRIHTGEQPYKWEKFGKAFNRSSHLTTDKITHWREILQV

SEQ ID NO: 805301 - protein, 273 aa, Homo sapiens
MVDEPPGMCPHFAQDLWPEQGMEDSFQKAILRRYGKYGHENLQLRKGCKSVDEYKVNKEGYNGLNQCFTTAQSKVFQCDKYLKVFYKFLNSNRPKIRHTEKKSFKCKKRVKLFCMLSHKTQHKSIYHREKSYKCKECGKTFNWSSTLTNHRKIYTEEKPYKCEEYNKSPKQLSTLTTHEIIHAGEKLYKCEECGKAFNRSSTFTKHKVIHTGVKPYKCEECGKAFFWSSTLTKHKRIHTGEQPYKWEKFGKAFNRSSHLTTDKITHWREILQV

SEQ ID NO: 805302 - protein, 230 aa, Homo sapiens
MPGPPRSLEMGLLTFRDVAIEFSLEEWQHLDIAQQNLYRNVMLENYRNLAFLGIAVSKPDLITCLEQGKEPWNMKRHEMVDEPPGMCPHFAQDLWPEQGMEDSFQKAILRRYGKYGHENLQLRKGCKSVDEYKVNKEGYNGLNQCFTTAQSKVFQCDKYLKVFYKFLNSNRPKIRHTEKKSFKCKKRVKLFCMLSHKTQHKSIYHREKSYKCKECGKTFNWSSTLTNHRK

SEQ ID NO: 805303 - protein, 262 aa, Homo sapiens
RLRHSEGQGLALIFAERYLDSPSLSCLWSSLGWVSCSASSEARSCDLCRGFLDLLSSLLTSSAPSPPRSDGILPSEKQERCESPRAKPFQVSGHHDLADKLVRVKEWGVRRCVLPLGGIAAWECGPRSTEACPGRPRPLVQSPHTQLAGSGTGVGPRSPGRRPGMENERKEVPYHEKSCEPRARPRTCNADTFRTSSSGSMGANCQARPRACEVRHWSASLLSMRGRGLCPSRSHGNLLPSRVEASWRQAYLRPPSPRLPLP

SEQ ID NO: 805304 - protein, 111 aa, Homo sapiens
RLRHSEGQGLALIFAERYLDSPSLSCLWSSLGWVSCSASSEARSCDLCRGFLDLLSSLLTSSAPSPPRSDGILPSEKQERCESPRAKPFQVSGHHDLADKLVRVKEWGVRR

SEQ ID NO: 805305 - protein, 350 aa, Homo sapiens
MASREDELRNCVVCGDQATGYHFNALTCEGCKGFFRRTVRTVSKSIGPTCPFAGSCEVSSQRRHCPACRLQKCLDAGMRKDMILSAEALALRRAKQAQRRAQQTPVQLSKEQEELIRTLLGAHTRHMGTMFEQFVQFRPPAHLFIHHQPLPTLAPVLPLVTHFADINTFMVLQVIKFTKDLPVFRSLPIEDQISLLKGAAVEICHIVLNTTFCLQTQNFLCGPLRYTIEDGARVGFQVEFLELLFHFHGTLRKLQLQEPEYVLLAAMALFSPDRPGVTQRDEIDQLQEEMALTLQSYIKGQQRRPRDRFLYAKLLGLLAELRSINEAYGYQIQHIQGLSAMMPLLQEICS

SEQ ID NO: 805306 - protein, 330 aa, Homo sapiens
MASREDELRNCVVCGDQATGYHFNALTCEGCKGFFRRTVSQRRHCPACRLQKCLDAGMRKDMILSAEALALRRAKQAQRRAQQTPVQLSKEQEELIRTLLGAHTRHMGTMFEQFVQFRPPAHLFIHHQPLPTLAPVLPLVTHFADINTFMVLQVIKFTKDLPVFRSLPIEDQISLLKGAAVEICHIVLNTTFCLQTQNFLCGPLRYTIEDGARVGFQVEFLELLFHFHGTLRKLQLQEPEYVLLAAMALFSPDRPGVTQRDEIDQLQEEMALTLQSYIKGQQRRPRDRFLYAKLLGLLAELRSINEAYGYQIQHIQGLSAMMPLLQEICS

SEQ ID NO: 805307 - protein, 291 aa, Homo sapiens
MASREDELRNCVVCGDQATGYHFNALTCEGCKGFFRRTVSQRRHCPACRLQKCLDAGMRKDMILSAEALALRRAKQAQRRAQQTPVQLSKEQEELIRTLLGAHTRHMGTMFEQFVQFRPPAHLFIHHQPLPTLAPVLPLVTHFADINTFMVLQVIKFTKDLPVFRSLPIEDQISLLKGAAVEICHIVLNTTFCLQTQNFLCGPLRYTIEDGARDRPGVTQRDEIDQLQEEMALTLQSYIKGQQRRPRDRFLYAKLLGLLAELRSINEAYGYQIQHIQGLSAMMPLLQEICS

SEQ ID NO: 805308 - protein, 220 aa, Homo sapiens
MASREDELRNCVVCGDQATGYHFNALTCEGCKGFFRRTVSQRRHCPACRLQKCLDAGMRKDMILSAEALALRRAKQAQRRAQQTPVQLSKEQEELIRTLLGAHTRHMGTMFEQFVQFRPPAHLFIHHQPLPTLAPVLPLVTHFADINTFMVLQVIKFTKDLPVFRSLPIEDQISLLKGAAVEICHIVLNTTFCLQTQNFLCGPLRYTIEDGARGEMVLEQ

SEQ ID NO: 805309 - protein, 220 aa, Homo sapiens; identical to SEQ ID NO: 805308

SEQ ID NO: 805310 - protein, 121 aa, Homo sapiens
MAGQHLPVPRLEGVSREQFMQHLYPQRKPLVLEGIDLGPCTSKWTVDYLSQVGGKKEVKIHVAAVAQMDFIKLYLLTSWSRGQLKRNIKNSLFQRMRNTTYGHLEKTLERMLQISESSFLC

SEQ ID NO: 805311 - protein, 308 aa, Homo sapiens
MAGQHLPVPRLEGVSREQFMQHLYPQRKPLVLEGIDLGPCTSKWTVDYLSQVGGKKEVKIHVAAVAQMDFIKLYLLTSWSRGQLKRNIKNSLFQRMRNTTYGHLEKTLESVADIRKQFPLLKGDIKFPEFFKEEQFFSSVFRISSPGLQLWTHYDVMDNLLIQVTGKKRVVLFSPRDAQYLYLKGTKSEVLNIDNPDLAKYPLFSKARRYECSLEAGDVLFIPALWFHNVISEEFGVGVNIFWKHLPSECYDKTDTYGNKDPTAASRAAQILDRALKTLAELPEEYRDFYARRMVLHIQDKAYSKNSE

SEQ ID NO: 805312 - protein, 210 aa, Homo sapiens
DRVGTPSFRSFDVADIRKQFPLLKGDIKFPEFFKEEQFFSSVFRISSPGLQLWTHYDVMDNLLIQVTGKKRVVLFSPRDAQYLYLKGTKSEVLNIDNPDLAKYPLFSKARRYECSLEAGDVLFIPALWFHNVISEEFGVGVNIFWKHLPSECYDKTDTYGNKDPTAASRAAQILDRALKTLAELPEEYRDFYARRMVLHIQDKAYSKNSE

SEQ ID NO: 805313 - protein, 121 aa, Homo sapiens; identical to SEQ ID NO: 805310

SEQ ID NO: 805314 - protein, 110 aa, Homo sapiens
MAGQHLPVPRLEGVSREQFMQHLYPQRKPLVLEGIDLGPCTSKWTVDYLSQVGGKKEVKIHVAAVAQMDFIKLYLLTSWSRGQLKRNIKNSLFQRMRNTTYGHLEKTLER

SEQ ID NO: 805315 - protein, 315 aa, Homo sapiens
MAGQHLPVPRLEGVSREQFMQHLYPQRKPLVLEGIDLGPCTSKWTVDYLSQVGGKKEVKIHVAAVAQMDFISKNFVYRTLPFDQLVQRAAEEKHKEFFVSEDEKYYLRSLGEDPRKDVADIRKQFPLLKGDIKFPEFFKEEQFFSSVFRISSPGLQLWTHYDVMDNLLIQVTGKKRVVLFSPRDAQYLYLKGTKSEVLNIDNPDLAKYPLFSKARRYECSLEAGDVLFIPALWFHNVISEEFGVGVNIFWKHLPSECYDKTDTYGNKDPTAASRAAQILDRALKTLAELPEEYRDFYARRMVLHIQDKAYSKNSE

SEQ ID NO: 805316 - protein, 75 aa, Homo sapiens
MAGQHLPVPRLEGVSREQFMQHLYPQVRPSRGAEPRETSERHVFTFRTAGNWFLETQGVGKRRRTAADHWLALRP

SEQ ID NO: 805317 - protein, 106 aa, Homo sapiens
MGSAVMDTKKKKDVSSPGGSGGKKNASQKRRSLRVHIPDLSSFAMPLLDGDLEGSGKHSSRKVDSPFGPGSPSKGFFFRGPQPRPSSPMSAPVRPKTSPGSPKTVF

SEQ ID NO: 805318 - protein, 154 aa, Homo sapiens
MDLLWTFQEPRGNSGQGESVCSESLRSVLNPNSNRTSPFSGAPQLHSVGAWLPVTGPQQEGHRLAHCFQATGSWHCPASCGTRKHKISGSLILTSTLHSTDSVPDTVLSALQIVIYIVLIDWEAILILTLFLRKAYPFLGSGPVNRNVLKLCLS

SEQ ID NO: 805319 - protein, 97 aa, Homo sapiens
ERPRPQLVLDMRGVGAVARSGPGLNAPRKGHLWGHSKKAAVCKPGGEPSPETSQKSANTLISGFQLQNNEKTNFCCVLVPICNWHPNETVFCSPGNG

SEQ ID NO: 805320 - protein, 509 aa, Homo sapiens
LTPDTHCTGVSATIMSMLVVFLLLWGVTWGPVTEAAIFYETQPSLWAESESLLKPLANVTLTCQARLETPDFQLFKNGVAQEPVHLDSPAIKHQFLLTGDTQGRYRCRSGLSTGWTQLSKLLELTGPKSLPAPWLSMAPVSWITPGLKTTAVCRGVLRGVTFLLRREGDHEFLEVPEAQEDVEATFPVHQPGNYSCSYRTDGEGALSEPSATVTIEELAAPPPPVLMHHGESSQVLHPGNKVTLTCVAPLSGVDFQLRRGEKELLVPRSSTSPDRIFFHLNAVALGDGGHYTCRYRLHDNQNGWSGDSAPVELILSDETLPAPEFSPEPESGRALRLRCLAPLEGARFALVREDRGGRRVHRFQSPAGTEALFELHNISVADSANYSCVYVDLKPPFGGSAPSERLELHVDGPPPRPQLRATWSGAVLAGRDAVLRCEGPIPDVTFELLREGETKAVKTVRTPGAAANLELIFVGPQHAGNYRCRYRSWVPHTFESELSDPVELLVAES

SEQ ID NO: 805321 - protein, 467 aa, Homo sapiens
  misc_feature (460)..(460): Xaa can be any naturally occurring amino acid
  misc_feature (466)..(466): Xaa can be any naturally occurring amino acid
LTPDTHCTGVSATIMSMLVVFLLLWGVTWGPVTEAAIFYETQPSLWAESESLLKPLANVTLTCQARLETPDFQLFKNGVAQEPVHLDSPAIKHQFLLTGDTQGRYRCRSGLSTGWTQLSKLLELTGPKSLPAPWLSMAPVSWITPGLKTTAVCRGVLRGVTFLLRREGDHEFLEVPEAQEDVEATFPVHQPGNYSCSYRTDGEGALSEPSATVTIEELAAPPPPVLMHHGESSQVLHPGNKVTLTCVAPLSGVDFQLRRGEKELLVPRSSTSPDRIFFHLNAVALGDGGHYTCRYRLHDNQNGWSGDSAPVELILSDETLPAPEFSPEPESGRALRLRCLAPLEGARFALVREDRGGRRVHRFQSPAGTEALFELHNISVADSANYSCVYVDLKPPFGGSAPSERLELHVDGPPPSLSPGTSEDTNSTLGPRLHQLSATRELHKGAELRFEGVGAPRSGXAPVVAXR

SEQ ID NO: 805322 - protein, 584 aa, Homo sapiens
KGKSTLHRTVKGRFAEMEKQRQEEQRKRTEEERKRRIEQDMLEKRKIQRELAKRAEQIEDINNTGTESASEEGDDSLLITVVPVKSYKTSGKMKKNFEDLEKEREEKERIKYEEDKRIRYEEQRPSLKEAKCLSLVMDDEIESEAKKESLSPGKLKLTFEELERQRQENRKKQAEEEARKRLEEEKRAFEEARRQMVNEDEENQDTAKIFKGYRPGKLKLSFEEMERQRREDEKRKAEEEARRRIEEEKKAFAEARRNMVVDDDSPEMYKTISQEFLTPGKLEINFEELLKQKMEEEKRRTEEERKHKLEMEKQEFEQLRQEMGEEEEENETFGLSREYEELIKLKRSGSIQAKNLKSKFEKIGQLSEKEIQKKIEEERARRRAIDLEIKEREAENFHEEDDVDVRPARKSEAPFTHKVNMKARFEQMAKAREEEEQRRIEEQKLLRMQFEQREIDAALQKKREEEEEEEGSIMNGSTAEDEEQTRSGAPWFKKPLKNTSVVDSEPVRFTVKVTGEPKPEITWWFEGEILQDGEDYQYIERGETYCLYLPETFPEDGGEYMCKAVNNKGSAASTCILTIETDDY

SEQ ID NO: 805323 - protein, 90 aa, Homo sapiens
  misc_feature (1)..(1): Xaa can be any naturally occurring amino acid
XRGSPLCGPSLKEAKCLSLVMDDEIESEAKKESLSPGKLKLTFEELERQRQENRKKQAEEEARKRLEEEKRAFEEARRQMEVEDGPHRAL

SEQ ID NO: 805324 - protein, 230 aa, Homo sapiens
MNDISQKAEIKEMLASDDEEDVSSKVEKAYVPKLTGTVKGRFAEMEKQRQEEQRKRTEEERKRRIEQDMLEKRKIQRELAKRAEQIEDINNTGTESASEEGDDSLLITVVPVKSYKTSGKKPNKKTKKKHTPNNTLKNTLNPGDVVRKKIYEINRQPRSEGSPNPSRREQNKTVRVHKDNISHRTSNPRRMRETKNNTRSGSTSTTTNTRRKTSCKRPKTAEEIPPTATE

SEQ ID NO: 805325 - protein, 52 aa, Homo sapiens
IPYFCLFTAVSRQENRKKQAEEEARKRLEEEKRAFEEARRQMEVEDGPHRAL

SEQ ID NO: 805326 - protein, 675 aa, Homo sapiens
MNDISQKAEILLSSSKPVPKTYVPKLGKGDVKDKFEAMQRAREERNQRRSRDEKQRRKEQYIREREWNRRKQEIKEMLASDDEEDVSSKVEKAYVPKLTGTVKGRFAEMEKQRQEEQRKRTEEERKRRIEQDMLEKRKIQRELAKRAEQIEDINNTGTESASEEGDDSLLITVVPVKSYKTSGKMKKNFEDLEKEREEKERIKYEEDKRIRYEEQRPSLKEAKCLSLVMDDEIESEAKKESLSPGKLKLTFEELERQRQENRKKQAEEEARKRLEEEKRAFEEARRQMVNEDEENQDTAKIFKGYRPGKLKLSFEEMERQRREDEKRKAEEEARRRIEEEKKAFAEARRNMVVDDDSPEMYKTISQEFLTPGKLEINFEELLKQKMEEEKRRTEEERKHKLEMEKQEFEQLRQEMGEEEEENETFGLSREYEELIKLKRSGSIQAKNLKSKFEKIGQLSEKEIQKKIEEERARRRAIDLEIKEREAENFHEEDDVDVRPARKSEAPFTHKVNMKARFEQMAKAREEEEQRRIEEQKLLRMQFEQREIDAALQKKREEEEEEEGSIMNGSTAEDEEQTRSGAPWFKKPLKNTSVVDSEPVRFTVKVTGEPKPEITWWFEGEILQDGEDYQYIERGETYCLYLPETFPEDGGEYMCKAVNNKGSAASTCILTIESKN

SEQ ID NO: 805327 - protein, 661 aa, Homo sapiens
MNDISQKAEILLSSSKPVPKTYVPKLGKGDVKDKFEAMQRAREERNQRRSRDEKQRRKEQYIREREWNRRKQEIKEMLASDDEEDVSSKVEKAYVPKLTGTVKGRFAEMEKQRQEEQRKRTEEERKRRIEQDMLEKRKIQRELAKRAEQEGDDSLLITVVPVKSYKTSGKMKKNFEDLEKEREEKERIKYEEDKRIRYEEQRPSLKEAKCLSLVMDDEIESEAKKESLSPGKLKLTFEELERQRQENRKKQAEEEARKRLEEEKRAFEEARRQMVNEDEENQDTAKIFKGYRPGKLKLSFEEMERQRREDEKRKAEEEARRRIEEEKKAFAEARRNMVVDDDSPEMYKTISQEFLTPGKLEINFEELLKQKMEEEKRRTEEERKHKLEMEKQEFEQLRQEMGEEEEENETFGLSREYEELIKLKRSGSIQAKNLKSKFEKIGQLSEKEIQKKIEEERARRRAIDLEIKEREAENFHEEDDVDVRPARKSEAPFTHKVNMKARFEQMAKAREEEEQRRIEEQKLLRMQFEQREIDAALQKKREEEEEEEGSIMNGSTAEDEEQTRSGAPWFKKPLKNTSVVDSEPVRFTVKVTGEPKPEITWWFEGEILQDGEDYQYIERGETYCLYLPETFPEDGGEYMCKAVNNKGSAASTCILTIESKN

SEQ ID NO: 805328 - protein, 576 aa, Homo sapiens
  misc_feature (4)..(4): Xaa can be any naturally occurring amino acid
GKLXLRFEEMERQRREDEKRKAEEEARRRIEEEKKAFAEARRNMEEEENETFGLSREYEELIKLKRSGSIQAKNLKSKFEKIGQFLKKNFEDLEKEREEKERIKYEEDKRIRYEEQRPSLKEAKCLSLVMDDEIESEAKKESLSPGKLKLTFEELERQRQENRKKQAEEEARKRLEEEKRAFEEARRQMVNEDEENQDTAKIFKGYRPGKLKLSFEEMERQRREDEKRKAEEEARRRIEEEKKAFAEARRNMVVDDDSPEMYKTISQEFLTPGKLEINFEELLKQKMEEEKRRTEEERKHKLEMEKQEFEQLRQEMGEEEEENETFGLSREYEELIKLKRSGSIQAKNLKSKFEKIGQLSEKEIQKKIEEERARRRAIDLEIKEREAENFHEEDDVDVRPARKSEAPFTHKVNMKARFEQMAKAREEEEQRRIEEQKLLRMQFEQREIDAALQKKREEEEEEEGSIMNGSTAEDEEQTRSGAPWFKKPLKNTSVVDSEPVRFTVKVTGEPKPEITWWFEGEILQDGEDYQYIERGETYCLYLPETFPEDGGEYMCKAVNNKGSAASTCILTIESKN

SEQ ID NO: 805329 - protein, 562 aa, Homo sapiens
EDPLIAFLMEERKRRIEQDMLEKRKIQRELAKRAEQIEDINNTGTESASEEGDDSLLITVVPVKSYKTSGKMKKNFEDLEKEREEKERIKYEEDKRIRYEEQRPSLKEAKCLSLVMDDEIESEAKKESLSPGKLKLTFEELERQRQENRKKQAEEEARKRLEEEKRAFEEARRQMVNEDEENQDTAKIFKGYRPGKLKLSFEEMERQRREDEKRKAEEEARRRIEEEKKAFAEARRNMVVDDDSPEMYKTISQEFLTPGKLEINFEELLKQKMEEEKRRTEEERKHKLEMEKQEFEQLRQEMGEEEEENETFGLSREYEELIKLKRSGSIQAKNLKSKFEKIGQLSEKEIQKKIEEERARRRAIDLEIKEREAENFHEEDDVDVRPARKSEAPFTHKVNMKARFEQMAKAREEEEQRRIEEQKLLRMQFEQREIDAALQKKREEEEEEEGSIMNGSTAEDEEQTRSGAPWFKKPLKNTSVVDSEPVRFTVKVTGEPKPEITWWFEGEILQDGEDYQYIERGETYCLYLPETFPEDGGEYMCKAVNNKGSAASTCILTIESKN

SEQ ID NO: 805330 - protein, 657 aa, Homo sapiens
MNDISQKAEILLSSSKPVPKTYVPKLGKGDVKDKFEAMQRAREERNQRRSRDEKQRRKEQYIREREWNRRKQEIKEMLASDDEEDVSSKVEKAYVPKLTGTVKGRFAEMEKQRQEEQRKRTEEERKRRIEQDMLEKRKIQRELAKRAEQIEDINNTGTESASEEGDDSLLITVVPVKSYKTSGKMKKNFEDLEKEREEKERIKYEEDKRIRYEEQRPSLKEAKCLSLVMDDEIESEAKKESLSPGKLKLTFEELERQRQENRKKQAEEEARKRLEEEKRAFEEARRQMVNEDEENQDTAKIFKGYRPGKLKLSFEEMERQRREDEKRKAEEEARRRIEEEKKAFAEARRNMVVDDDSPEMYKTISQEFLTPGKLEINFEELLKQKMEEEKRRTEEERKHKLEMEKQEFEQLRQEMGEEEEENETFGLSREYEELIKLKRSGSIQAKNLKSKFEKIGQLSEKEIQKKIEEERARRRAIDLEIKEREAENFHEEDDVDVRPARKSEAPFTHKVNMKARFEQMAKAREEEEQRRIEEQKLLRMQFEQREIDAALQKKREEEEEEEGSIMNGSTAEDEEQTRSGAPWFKKPLREPKPEITWWFEGEILQDGEDYQYIERGETYCLYLPETFPEDGGEYMCKAVNNKGSAASTCILTIESKN

SEQ ID NO: 805331 - protein, 573 aa, Homo sapiens
MNDISQKAEILLSSSKPVPKTYVPKLGKGDVKDKFEAMQRAREERNQRRSRDEKQRRKEQYIREREWNRRKQEIKEMLASDDEEDVSSKVEKAYVPKLTGTVKGRFAEMEKQRQEEQRKRTEEERKRRIEQDMLEKRKIQRELAKRAEQEGDDSLLITVVPVKSYKTSGKMKKNFEDLEKEREEKERIKYEEDKRIRYEEQRPSLKEAKCLSLVMDDEIESEAKKESLSPGKLKLTFEELERQRQENRKKQAEEEARKRLEEEKRAFEEARRQMVNEDEENQDTAKIFKGYRPGKLKLSFEEMERQRREDEKRKAEEEARRRIEEEKKAFAEARRNMVVDDDSPEMYKTISQEFLTPGKLEINFEELLKQKMEEEKRRTEEERKHKLEMEDDVDVRPARKSEAPFTHKVNMKARFEQMAKAREEEEQRRIEEQKLLRMQFEQREIDAALQKKREEEEEEEGSIMNGSTAEDEEQTRSGAPWFKKPLKNTSVVDSEPVRFTVKVTGEPKPEITWWFEGEILQDGEDYQYIERGETYCLYLPETFPEDGGEYMCKAVNNKGSAASTCILTIESKN

SEQ ID NO: 805332 - protein, 658 aa, Homo sapiens
MNDISQKAEILLSSSKPVPKTYVPKLGKGDVKDKFEAMQRAREERNQRRSRDEKQRRKEQYIREREWNRRKQEIKEMLASDDEEDVSSKVEKAYVPKLTGTVKGRFAEMEKQRQEEQRKRTEEERKRRIEQDMLEKRKIQRELAKRAEQIEDINNTGTESASEEGDDSLLITVVPVKSYKTSGKMKKNFEDLEKEREEKERIKYEEDKRIRYEEQRPSLKEAKCLSLVMDDEIESEAKKESLSPGKLKLTFEELERQRQENRKKQAEEEARKRLEEEKRAFEEARRQMVNEDEENQDTAKIFKGYRPGKLKLSFEEMERQRREDEKRKAEEEARRRIEEEKKAFAEARRNMVVDDDSPEMYKTISQEFLTPGKLEINFEELLKQKMEEEKRRTEEERKHKLEMEKQEFEQLRQEMGEEEEENETFGLSREYEELIKLKRSGSIQAKNLKSKFEKIGQLSEKEIQKKIEEERARRRAIDLEIKEREAENFHEEDDVDVRPARKSEAPFTHKVNMKARFEQMAKAREEEEQRRIEEQKLLRMQFEQREIDAALQKKREEEEEEEGSIMNGSTAEDEEQTRSGAPWFKKPLKNTSVVDSEPVRFTVKVTGEPKPEITWWFEGEILQNFLFHSNFLTTSIFSVAGPKKETRSATMLTSYSFS

SEQ ID NO: 805333 - protein, 675 aa, Homo sapiens; identical to SEQ ID NO: 805326

SEQ ID NO: 805334 - protein, 536 aa, Homo sapiens
MNDISQKAEILLSSSKPVPKTYVPKLGKGDVKDKFEAMQRAREERNQRRSRDEKQRRKEQYIREREWNRRKQEIKEMLASDDEEDVSSKVEKAYVPKLTGTVKGRFAEMEKQRQEEQRKRTEEERKRRIEQDMLEKRKIQRELAKRAEQVNEDEENQDTAKIFKGYRPGKLKLSFEEMERQRREDEKRKAEEEARRRIEEEKKAFAEARRNMVVDDDSPEMYKTISQEFLTPGKLEINFEELLKQKMEEEKRRTEEERKHKLEMEKQEFEQLRQEMGEEEEENETFGLSREYEELIKLKRSGSIQAKNLKSKFEKIGQLSEKEIQKKIEEERARRRAIDLEIKEREAENFHEEDDVDVRPARKSEAPFTHKVNMKARFEQMAKAREEEEQRRIEEQKLLRMQFEQREIDAALQKKREEEEEEEGSIMNGSTAEDEEQTRSGAPWFKKPLKNTSVVDSEPVRFTVKVTGEPKPEITWWFEGEILQDGEDYQYIERGETYCLYLPETFPEDGGEYMCKAVNNKGSAASTCILTIESKN

SEQ ID NO: 805335 - protein, 202 aa, Homo sapiens
LLIDYITPPPPEKTQQTEGAACCVLPARKSEAPFTHKVNMKARFEQMAKAREEEEQRRIEEQKLLRMQFEQREIDAALQKKREEEEEEEGSIMNGSTAEDEEQTRSGAPWFKKPLKNTSVVDSEPVRFTVKVTGEPKPEITWWFEGEILQDGEDYQYIERGETYCLYLPETFPEDGGEYMCKAVNNKGSAASTCILTIESKN

SEQ ID NO: 805336 - protein, 497 aa, Homo sapiens
MNDISQKAEILLSSSKPVPKTYVPKLGKGDVKDKFEAMQRAREERNQRRSRDEKQRRKEQYIREREWNRRKQEIKEMLASDDEEDVSSKVEKAYVPKLTGTVKGRFAEMEKQRQEEQRKRTEEERKRRIEQDMLEKRKIQRELAKRAEQIEDINNTGTESASEEGDDSLLITVVPVKSYKTSGKMKKNFEDLEKEREEKERIKYEEDKRIRYEEQRPSLKEAKCLSLVMDDEIESEAKKESLSPGKLKLTFEELERQRQENRKKQAEEEARKRLEEEKRAFEEARRQMVNEDEENQDTAKIFKGYRPGKLKLSFEEMERQRREDEKRKAEEEARRRIEEEKKAFAEARRNMVVDDDSPEMYKTISQEFLTPGKLEINFEELLKQKMEEEKRRTEEERKHKLEMEKQEFEQLRQEMGEEEEENETFGLSREYEELIKLKRSGSIQAKNLKSKFEKIGQLSEKEIQKKIEEERARRRAIDLEIKEREAENFHEVYYLYI

SEQ ID NO: 805337 - protein, 347 aa, Homo sapiens
MNDISQKAEILLSSSKPVPKTYVPKLGKGDVKDKFEAMQRAREERNQRRSRDEKQRRKEQYIREREWNRRKQEIKEMLASDDEEDVSSKVEKAYVPKLTGTVKGRFAEMEKQRQEEQRKRTEEERKRRIEQDMLEKRKIQRELAKRAEQEGDDSLLITVVPVKSYKTSGKMKKNFEDLEKEREEKERIKYEEDKRIRYEEQRPSLKEAKCLSLVMDDEIESEAKKESLSPGKLKLTFEELERQRQENRKKQAEEEARKRLEEEKRAFEEARRQMVNEDEENQDTAKIFKGYRPGKLKLSFEEMERQRREDEKRKAEEEARRRIEEEKKAFAEARRNMVRQKLTGECY

SEQ ID NO: 805338 - protein, 284 aa, Homo sapiens
MNDISQKAEILLSSSKPVPKTYVPKLGKGDVKDKFEAMQRAREERNQRRSRDEKQRRKEQYIREREWNRRKQEIKEMLASDDEEDVSSKVEKAYVPKLTGTVKGRFAEMEKQRQEEQRKRTEEERKRRIEQDMLEKRKIQRELAKRAEQEGDDSLLITVVPVKSYKTSGKMKKNFEDLEKEREEKERIKYEEDKRIRYEEQRPSLKEAKCLSLVMDDEIESEAKKESLSPGKLKLTFEELERQRQENRKKQAEEEARKRLEEEKRAFEEARRQMEVEDGPHRAL

SEQ ID NO: 805339 - protein, 471 aa, Homo sapiens
WQLAPMEPELLVRKVSALQACVRGFLVRRQFQSLRAEYEAIVREVEGDLGTLQWTEGRIPRPRFLPEKAKSHQTWKAGDRVANPEQGLWNHFPCEESEGEATWEEMVLKKSGESSANQGSLCRDHSSWLQMKQNRKPSQEKTRDTTRMENPEATDQRLPHSQPQLQELQYHRSHLAMELLWLQQAINSRKEYLLLKQTLRSPEAGPIREEPRVFLEHGEQACERDQSQPSAPLEDQSYRDRTTGELEQEDDSCHRVKSPHRSPGSLATTQKNIAGAKCREPCYSKSGPPSSIPSNSQALGDRLTKGPDDGRQTFGGTCLLQMKILEDQTPRGLKPRNHCPRKSRTQLSALYEDSNIKEMSPRKLDHKEPDCRTVRTQELGLSEDHIIWDGTLGGPEHSVLDLWRTKPPKGQAPTDRSSRDGTSNEPSHEGQKKQRTIPWRSKSPEILSSTKAGCTGEEQWRGRPWKTEPPG

SEQ ID NO: 805340 - protein, 461 aa, Homo sapiens
GSWRPWSQSCWFGRCLHCRPASGASWSDASSRACELSMRRLYERSRGRIPRPRFLPEKAKSHQTWKAGDRVANPEQGLWNHFPCEESEGEATWEEMVLKKSGESSANQGSLCRDHSSWLQMKQNRKPSQEKTRDTTRMENPEATDQRLPHSQPQLQELQYHRSHLAMELLWLQQAINSRKEYLLLKQTLRSPEAGPIREEPRVFLEHGEQACERDQSQPSAPLEDQSYRDRTTGELEQEDDSCHRVKSPHRSPGSLATTQKNIAGAKCREPCYSKSGPPSSIPSNSQALGDRLTKGPDDGRQTFGGTCLLQMKILEDQTPRGLKPRNHCPRKSRTQLSALYEDSNIKEMSPRKLDHKEPDCRTVRTQELGLSEDHIIWDGTLGGPEHSVLDLWRTKPPKGQAPTDRSSRDGTSNEPSHEGQKKQRTIPWRSKSPEILSSTKAGCTGEEQWRGRPWKTEPPG

SEQ ID NO: 805341 - protein, 163 aa, Homo sapiens
DSQTADARCGSRSRSGNEVQRCGEDLGASLGANQPNQPGPPNRSASDINATHRRCVGWVVEVTAEASGDCSFGAREAGKQLASPTRCASHICTAHTTKLRSRLLRCPSDTDKFLLCNPMRAADHESIAGPPKDSGKCGPGWPVCADLHLKVRLEGNFWRVGWC

SEQ ID NO: 805342 - protein, 225 aa, Homo sapiens
PGGKTTHIAALMHDQGEVIALDKIFNKVEKIKQNALLLGLNSIRAFCFDGTKAVKLDMVEDTEGEPPFLPESFDRILLDAPCSGMGQRPNMACTWSVKEVASYQPLQRKLFTAAVQLLKPEGVLVYSTCTITLAENEEQVAWALTKFPCLQLQPQEPQIGGEGMRGAGLSCEQLKQLQRFDPSAVPLPDTDMDSLREARREDMLRLANKDSIGFFIAKFVKCKST

SEQ ID NO: 805343 - protein, 142 aa, Homo sapiens
  misc_feature (11)..(11): Xaa can be any naturally occurring amino acid
QRRLAWPLRKXDTQIREAFHIFLQRKLFTAAVQLLKPEGVLVYSTCTITLAENEEQVAWALTKFPCLQLQPQEPQIGGEGMRGAGLSCEQLKQLQRFDPSAVPLPDTDMDSLREARREDMLRLANKDSIGFFIAKFVKCKST

SEQ ID NO: 805344 - protein, 120 aa, Homo sapiens
PGGKTTHIAALMHDQGEVIALDKIFNKVEKIKQNALLLGLNSIRAFCFDGTKAVKLDMVEDTEGEPPFLPESFDRILLDAPCSGMGQRPNMACTWSVKEVASYQPLQRKLFTAVCGGLFL

SEQ ID NO: 805345 - protein, 225 aa, Homo sapiens; identical to SEQ ID NO: 805342

SEQ ID NO: 805346 - protein, 201 aa, Homo sapiens
GGPSRPRARVAVGGPTCSARCEPVRPPPAPEQPASLHRLLSVLSPRAAIAVMLGAALRRCAVAATTRADPRGLLHSARTPGPAVAIQSVRCYSHGSQETDEEFDARWVTYFNKPDIDAWELRKGINTLVTYDMVPEPKIIDAALRACRRLNDFASTVRILEVVKDKAGPHKEIYPYVIQELRPTLNELGISTPEELGLDKV

SEQ ID NO: 805347 - protein, 201 aa, Homo sapiens; identical to SEQ ID NO: 805346

SEQ ID NO: 805348 - protein, 161 aa, Homo sapiens
GRVGRPTRRAVMLGAALRRCAVAATTRADPRGLLHSARTPGPAVAIQSVRCYSHGSQETDEEFDARWVTYFNKPDIDAWELRKGINTLVTYDMVPEPKIIDAALRACRRLNDFASTVRILEVVKDKAGPHKEIYPYVIQELRPTLNELGISTPEELGLDKV

SEQ ID NO: 805349 - protein, 153 aa, Homo sapiens
RERESSGRTPGPAVAIQSVRCYSHGSQETDEEFDARWVTYFNKPDIDAWELRKGINTLVTYDMVPEPKIIDAALRACRRLNDFASTVRILEVVKDKAGPHKEIYPYVIQELRPTLNELGISTPEELGLVRVQGPAATILLSVSPGFDYSQYLI

SEQ ID NO: 805350 - protein, 85 aa, Homo sapiens
GGPSRPRARVAVGGPTCSARCEPVRPPPAPEQPASLHRLLSVLSPRAAIAVMLGAALRRCAVAATTRADPRGLLHSARTPGPAVG

SEQ ID NO: 805351 - protein, 201 aa, Homo sapiens; identical to SEQ ID NO: 805346

SEQ ID NO: 805352 - protein, 131 aa, Homo sapiens
RERESSGRTPGPAVAIQSVRCYSHGSQETDEEFDARWVTYFNKPDIDAWELRKGINTLVTYDMVPEPKIIDAALRACRRLNDFASTVRILEVVKDKAGPHKEIYPYVIQELRPTLNELGISTPEELGLDKV

SEQ ID NO: 805353 - protein, 178 aa, Homo sapiens
GGPSRPRARVAVGGPTCSARCEPVRPPPAPEQPASLHRLLSVLSPRAAIAVMLGAALRRCAVAATTRADPRGLLHSARTPGPAVAIQSVRCYSHGSQETDEEFDARWVTYFNKPDIDAWELRKGINTLVTYDMVPEPKIIDAALRACRRLNDFASTVRILEVVKTKCKPHGWASPRIY

SEQ ID NO: 805354 - protein, 169 aa, Homo sapiens
GGPSRPRARVAVGGPTCSARCEPVRPPPAPEQPASLHRLLSVLSPRAAIAVMLGAALRRCAVAATTRADPRGLLHSARTPGPAVAIQSVRCYSHGSQETDEEFDARWVTYFNKPDIDAWELRKGINTLVTYDMVPEPKIIDAALRACRRLNDFASRGNGGGFHDGRGSH

SEQ ID NO: 805355 - protein, 183 aa, Homo sapiens
GGPSRPRARVAVGGPTCSARCEPVRPPPAPEQPASLHRLLSVLSPRAAIAVMLGAALRRCAVAATTRADPRGLLHSARTPGPAVAIQSVRCYSHGSQETDEEFDARWVTYFNKPDIDAWELRKGINTLVTYDMVPEPTVRILEVVKDKAGPHKEIYPYVIQELRPTLNELGISTPEELGLDKV

SEQ ID NO: 805356 - protein, 110 aa, Homo sapiens
RVGGRVGTGLWTELGNIENNFLKPLHIGLNMSKAHYEAEIKNSQEAQKSKDLCSITVSGEEIPNMPPEMQLKVLHSALFTFDLIESVLARVEELIEIKTKSTSEENIGIK

SEQ ID NO: 805357 - protein, 594 aa, Homo sapiens
MAVEELQSIIKRCQILEEQDFKEEDFGLFQLAGQRCIEEGHTDQLLEIIQNEKNKVIIKNMGWNLVGPVVRCLLCKDKEDSKRKVYFLIFDLLVKLCNPKELLLGLLELIEEPSGKQISQSILLLLQPLQTVIQKLHNKAYSIGLALSTLWNQLSLLPVPYSKEQIQMDDYGLCQCCKALIEFTKPFVEEVIDNKENSLENEKLKDELLKFCFKSLKCPLLTAQFFEQSEEGGNDPFRYFASEIIGFLSAIGHPFPKMIFNHGRKKRTWNYLEFEEEENKQLADSMASLAYLVFVQGIHIDQLPMVLSPLYLLQFNMGHIEVFLQRTEESVISKGLELLENSLLRIEDNSLLYQYLEIKSFLTVPQGLVKVMTLCPIETLRKKSLAMLQLYINKLDSQGKYTLFRCLLNTSNHSGVEAFIIQNIKNQIDMSLKRTRNNKWFTGPQLISLLDLVLFLPEGAETDLLQNSDRIMASLNLLRYLVIKDNENDNQTGLWTELGNIENNFLKPLHIGLNMSKAHYEAEIKNSQEAQKSKDLCSITVSGEEIPNMPPEMQLKVLHSALFTFDLIESVLARVEELIEIKTKSTSEENIGIK

SEQ ID NO: 805358 - protein, 417 aa, Homo sapiens
MAVEELQSIIKRCQILEEQDFKEEDFGLFQLAGQRCIEEGHTDQLLEIIQNEKNKVIIKNMGWNLVGPVVRCLLCKDKEDSKRKVYFLIFDLLVKLCNPKELLLGLLELIEEPSGKQISQSILLLLQPLQTVIQKLHNKAYSIGLALSTLWNQLSLLPVPYSKEQIQMDDYGLCQCCKALIEFTKPFVEEVIDNKENSLENEKLKDELLKFCFKSLKCPLLTAQFFEQSEEGGNDPFRYFASEIIGFLSAIGHPFPKMIFNHGRKKRTWNYLEFEEEENKQLADSMASLAYLVFVQGIHIDQLPMVLSPLYLLQFNMGHIEVFLQRTEESVISKGLELLENSLLRIEDNSLLYQYLEIKSFLTVPQGLVKVMTLCPIETLRKKSLAMLQLYINKLDSQGKYTLFREHVTTNGLQDHS

SEQ ID NO: 805359 - protein, 427 aa, Homo sapiens
MDDYGLCQCCKALIEFTKPFVEEVIDNKENSLENEKLKDELLKFCFKSLKCPLLTAQFFEQSEEGGNDPFRYFASEIIGFLSAIGHPFPKMIFNHGRKKRTWNYLEFEEEENKQLADSMASLAYLVFVQGIHIDQLPMVLSPLYLLQFNMGHIEVFLQRTEESVISKGLELLENSLLRIEDNSLLYQYLEIKSFLTVPQGLVKVMTLCPIETLRKKSLAMLQLYINKLDSQGKYTLFRCLLNTSNHSGVEAFIIQNIKNQIDMSLKRTRNNKWFTGPQLISLLDLVLFLPEGAETDLLQNSDRIMASLNLLRYLVIKDNENDNQTGLWTELGNIENNFLKPLHIGLNMSKAHYEAEIKNSQEAQKSKDLCSITVSGEEIPNMPPEMQLKVLHSALFTFDLIESVLARVEELIEIKTKSTSEENIGIK

SEQ ID NO: 805360 - protein, 427 aa, Homo sapiens; identical to SEQ ID NO: 805359

SEQ ID NO: 805361 - protein, 392 aa, Homo sapiens
MDDYGLCQCCKALIEFTKPFVEEVIDNKENSLENEKLKDELLKFCFKSLKCPLLTAQFFEQSEEGGNDPFRYFASEIIGFLSAIGHPFPKMIFNHGRKKRTWNYLEFEEEENKQLADSMASLAYLVFVQGIHIDQLPMVLSPLYLLQFNMGHIEVFLQRTEESVISKGLELLENSLLRIEDNSLLYQYLEIKSFLTVPQGLVKVMTLCPIETLEVQVWMYYMHKMDSDEVWRTRNNKWFTGPQLISLLDLVLFLPEGAETDLLQNSDRIMASLNLLRYLVIKDNENDNQTGLWTELGNIENNFLKPLHIGLNMSKAHYEAEIKNSQEAQKSKDLCSITVSGEEIPNMPPEMQLKVLHSALFTFDLIESVLARVEELIEIKTKSTSEENIGIK

SEQ ID NO: 805362 - protein, 552 aa, Homo sapiens
MAVEELQSIIKRCVIIKNMGWNLVGPVVRCLLCKDKEDSKRKVYFLIFDLLVKLCNPKELLLGLLELIEEPSGKQISQSILLLLQPLQTVIQKLHNKAYSIGLALSTLWNQLSLLPVPYSKEQIQMDDYGLCQCCKALIEFTKPFVEEVIDNKENSLENEKLKDELLKFCFKSLKCPLLTAQFFEQSEEGGNDPFRYFASEIIGFLSAIGHPFPKMIFNHGRKKRTWNYLEFEEEENKQLADSMASLAYLVFVQGIHIDQLPMVLSPLYLLQFNMGHIEVFLQRTEESVISKGLELLENSLLRIEDNSLLYQYLEIKSFLTVPQGLVKVMTLCPIETLRKKSLAMLQLYINKLDSQGKYTLFRCLLNTSNHSGVEAFIIQNIKNQIDMSLKRTRNNKWFTGPQLISLLDLVLFLPEGAETDLLQNSDRIMASLNLLRYLVIKDNENDNQTGLWTELGNIENNFLKPLHIGLNMSKAHYEAEIKNSQEAQKSKDLCSITVSGEEIPNMPPEMQLKVLHSALFTFDLIESVLARVEELIEIKTKSTSEENIGIK

SEQ ID NO: 805363 - protein, 124 aa, Homo sapiens
HVMAPEENAGTKLLLQSFERRFLAARTLRSFPWQKPEAFTVDVLYCPEAIVSLVGVLRRLAACWEHQRAPEVYMAFTVRNPETCQLFTTELGWAGIRWEAEAHHDQKLFPYGEHLEMAMLNLTL

SEQ ID NO: 805364 - protein, 180 aa, Homo sapiens
QRSPAEPLNGVLEPTGEEQRKGPFGTIWNERKWKKRGTMAAVVAVCGGLGRKKLTHLVTAAVSLTHPGTHTVLWRRGCSQQVSSNEDLPISMENPYKEPLKKCILCGKHVDYKNVQLLSQFVSPFTGCIYGRHITGLCGKKQKEITKAIKRAQIMGFMPVTYKDPAYLKDPKVCNIRYRE

SEQ ID NO: 805365 - protein, 180 aa, Homo sapiens; identical to SEQ ID NO: 805364

SEQ ID NO: 805366 - protein, 89 aa, Homo sapiens
QRSPAEPLNGVLEPTGEEQRKGPFGTIWNERKWKKRGTMAAVVAVCGGLGRKKLTHLVTAAVSLTHPGTHTVLWRRGCSQQVSSNEDLR

SEQ ID NO: 805367 - protein, 180 aa, Homo sapiens; identical to SEQ ID NO: 805364

SEQ ID NO: 805368 - protein, 152 aa, Homo sapiens
QRSPAEPLNGVLEPTGEEQRKGPFGTIWNERKWKKRGTMAAVVAVCGGLGRKKLTHLVTAAVSLTHPGTHTVLWRRGCSQQVSSNEDLLLSQFVSPFTGCIYGRHITGLCGKKQKEITKAIKRAQIMGFMPVTYKDPAYLKDPKVCNIRYRE

SEQ ID NO: 805369 - protein, 152 aa, Homo sapiens; identical to SEQ ID NO: 805368

SEQ ID NO: 805370 - protein, 132 aa, Homo sapiens
  misc_feature (1)..(1): Xaa can be any naturally occurring amino acid
XANAAARHGCERRQKGTHPGTHTVLWRRGCSQQVSSNEDLPISMENPYKEPLKKCILCGKHVDYKNVQLLSQFVSPFTGCIYGRHITGLCGKKQKEITKAIKRAQIMGFMPVTYKDPAYLKDPKVCNIRYRE

SEQ ID NO: 805371 - protein, 142 aa, Homo sapiens
QRSPAEPLNGVLEPTGEEQRKGPFGTIWNERKWKKRGTMAAVVAVCGGLGRKKLTHLVTAAVSLTHPGTHTVLWRRGCSQQVSSNEDLPISMENPYKEPLKKCILCGKHVDYKNVQLLSSLFSFLMHYGGHSGFCGGQRSKH

SEQ ID NO: 805372 - protein, 180 aa, Homo sapiens; identical to SEQ ID NO: 805364

SEQ ID NO: 805373 - protein, 180 aa, Homo sapiens; identical to SEQ ID NO: 805364

SEQ ID NO: 805374 - protein, 180 aa, Homo sapiens; identical to SEQ ID NO: 805364

SEQ ID NO: 805375 - protein, 136 aa, Homo sapiens
QRSPAEPLNGVLEPTGEEQRKGPFGTIWNERKWKKRGTMAAVVAVCGGLGRKKLTHLVTAAVSLTHPGTHTVLWRRGCSQQVSSNEDLPISMENPYKEPLKKCILCGKHVDYKNVQLQVFVGRNRKKSQKQLRELK

SEQ ID NO: 805376 - protein, 220 aa, Homo sapiens
QVPRPKIKLIKGEAGQNLLEMMACDRLSQSGHMLLNLSRGKQDFLKEVVETFANKSGQSVLYNALFSSQSSKDTSFLGSDDIGNIDVQEPELEDLARYDVGAIQAHNGSLQHLTWLGLQWNSLPALPGIRKWLKQLFHHLPQETSRLETNAPESICILDLEVFLLGVVYTSHLQLKEKCNSHHSSYQPLCLPLPVCKRLCTERQKSWWDAVCTLIHRKAV

SEQ ID NO: 805377 - protein, 292 aa, Homo sapiens
AAEVRSRAAFWGRKWGGCTLRVGVMAAAGSRKRRLAELTVDEFLASGFDSESESESENSPQAETREAREAARSPDKPGGSPSASRRKGRASEHKDQLSRLKDRDPEFYKFLQENDQSLLNFSDSDSSEEEEGPFHSLPDVLEEASEEEDGAEEGEDGDRVPRGLKGKKNSVPVTVAMVERWKQAAKQRLTPKLFHEVVQAFRAAVATTRGDQESAEANKFQVTDSAAFNALVTFCIRETSLAVSRSCCLERWQRIAAANVGQRKPVCGSWWCLGDPRGAEYQLLGLGTSCGL

SEQ ID NO: 805378 - protein, 69 aa, Homo sapiens
FFLNRRRLAELTVDEFLASGFDSESESESENSPQAETREAREAARSVYRCHSLVLPFIEVSPSDRHCAY

SEQ ID NO: 805379 - protein, 517 aa, Homo sapiens
MLQPSSSPLWGKLRVDIKAYLGSAIQLVSCLSETTVLAAVLRHISVLVPCFLTFPKQCRMLLKRMVVVWSTGEESLRVLAFLVLSRVCRHKKDTFLGPVLKQMYITYVRNCKFTSPGALPFISFMQWTLTELLALEPGVAYQHAFLYIRQLAIHLRNAMTTRKKETYQSVYNWQYVHCLFLWCRVLSTAGPSEALQPLVYPLAQVIIGCIKLIPTARFYPLRMHCIRALTLLSGSSGAFIPVLPFILEMFQQVDFNRKPGRMSSKPINFSVILKLSNVNLQEKAYRDGLVEQLYDLTLEYLHSQAHCIGFPELVLPVVLQLKSFLRECKVANYCRQVQQLLGKVQENSAYICSRRQRVSFGVSEQQAVEAWEKLTREEGTPLTLYYSHWRKLRDREIQLEISGKERLEDLNFPEIKRRKMADRKDEDRKQFKDLFDLNSSEEDDTEGFSERGILRPLSTRHGVEDDEEDEEEGEEDSSNSEGDGDPDAEAGLAPGELQQLAQGPEDELEDLQLSEDD

SEQ ID NO: 805380 - protein, 517 aa, Homo sapiens; identical to SEQ ID NO: 805379

SEQ ID NO: 805381 - protein, 517 aa, Homo sapiens; identical to SEQ ID NO: 805379

SEQ ID NO: 805382 - protein, 517 aa, Homo sapiens; identical to SEQ ID NO: 805379

SEQ ID NO: 805383 - protein, 517 aa, Homo sapiens; identical to SEQ ID NO: 805379

SEQ ID NO: 805384 - protein, 517 aa, Homo sapiens; identical to SEQ ID NO: 805379

SEQ ID NO: 805385 - protein, 517 aa, Homo sapiens; identical to SEQ ID NO: 805379

SEQ ID NO: 805386 - protein, 517 aa, Homo sapiens; identical to SEQ ID NO: 805379

SEQ ID NO: 805387 - protein, 517 aa, Homo sapiens; identical to SEQ ID NO: 805379

SEQ ID NO: 805388 - protein, 517 aa, Homo sapiens; identical to SEQ ID NO: 805379

SEQ ID NO: 805389 - protein, 517 aa, Homo sapiens; identical to SEQ ID NO: 805379

SEQ ID NO: 805390 - protein, 483 aa, Homo sapiens
MLQPSSSPLWGKLRVDIKAYLGSAIQLVSCLSETTVLAAVLRHISVLVPCFLTFPKQCRMLLKRMVVVWSTGEESLRVLAFLVLSRVCRHKKDTFLGPVLKQMYITYVRNCKFTSPGALPFISFMQWTLTELLALEPGVAYQHAFLYIRQLAIHLRNAMTTRKKETYQSVYNWQYVHCLFLWCRVLSTAGPSEALQPLVYPLAQVIIGCIKLIPTARFYPLRMHCIRALTLLSGSSGAFIPVLPFILEMFQQVDFNRKPGRMSSKPINFSVILKLSNVNLQEKAYRLKSFLRECKVANYCRQVQQLLGKVQENSAYICSRRQRVSFGVSEQQAVEAWEKLTREEGTPLTLYYSHWRKLRDREIQLEISGKERLEDLNFPEIKRRKMADRKDEDRKQFKDLFDLNSSEEDDTEGFSERGILRPLSTRHGVEDDEEDEEEGEEDSSNSEGDGDPDAEAGLAPGELQQLAQGPEDELEDLQLSEDD

SEQ ID NO: 805391 - protein, 486 aa, Homo sapiens
MLQPSSSPLWGKLRVDIKAYLGSAIQLVSCLSETTVLAAVLRHISVLVPCFLTFPKQCRMLLKRMVVVWSTGEESLRVLAFLVLSRVCRHKKDTFLGPVLKQMYITYVRNCKFTSPGALPFISFMQWTLTELLALEPGVAYQHAFLYIRQLAIHLRNAMTTRKKETYQSVYNWQYVHCLFLWCRVLSTAGPSEALQPLVYPLAQVIIGCIKLIPTARFYPLRMHCIRALTLLSGSSGAFIPVLPFILEMFQQVDFNRKPGRMSSKPINFSVILKLSNVNLQEKAYRDGLVEQLYDLTLEYLHSQAHCIGFPELVLPVVLQLKSFLRECKVANYCRQVQQLLGKVQENSAYICSRRQRVSFGVSEQQAVEAWEKLTREEGTPLTLYYSHWRKLRDREIQLEISGKERLEDLNFPEIKRRKMADRKDEDRKQFKDLFDLNSSEEDDTEGFSERDGDPDAEAGLAPGELQQLAQGPEDELEDLQLSEDD

SEQ ID NO: 805392 - protein, 508 aa, Homo sapiens
MLQPSSSPLWGKLRVDIKAYLGSAIQLVSCLSETTVLAAVLRHISVLVPCFLTFPKQCRMLLKRMVVVWSTGEESLRVLAFLVLSRVCRHKKDTFLGPVLKQMYITYVRNCKFTSPGALPFISFMQWTLTELLALEPGVAYQHAFLYIRQLAIHLRNAMTTRKKETYQSVYNWQYVHCLFLWCRVLSTAGPSEALQPLVYPLAQVIIGCIKLIPTARFYPLRMHCIRALTLLSGSSGAFIPVLPFILEMFQQVDFNRKPGRMSSKPINFSVILKLSNVNLQEKAYRDGLVEQLYDLTLEYLHSQAHCIGFPELVLPVVLQLKSFLRECKVANYCRQVQQLLGKVQENSAYICSRRQRVSFGVSEQQAVEAWEKLTREEGTPLTLYYSHWRKLRDREIQLEISGKERLEDLNFPEIKRRKMADRKDEDRKQFKDLFDLNSSEEDDTEGFSERGILRPLSTRHGVEDDEEDEEEGEEDSSNSEGVHFGGWEPLTPKRRLPPGKLEPLGPR

SEQ ID NO: 805393 - protein, 527 aa, Homo sapiens
PAKGGWSLCRMLQPSSSPLWGKLRVDIKAYLGSAIQLVSCLSETTVLAAVLRHISVLVPCFLTFPKQCRMLLKRMVVVWSTGEESLRVLAFLVLSRVCRHKKDTFLGPVLKQMYITYVRNCKFTSPGALPFISFMQWTLTELLALEPGVAYQHAFLYIRQLAIHLRNAMTTRKKETYQSVYNWQYVHCLFLWCRVLSTAGPSEALQPLVYPLAQVIIGCIKLIPTARFYPLRMHCIRALTLLSGSSGAFIPVLPFILEMFQQVDFNRKPGRMSSKPINFSVILKLSNVNLQEKAYRDGLVEQLYDLTLEYLHSQAHCIGFPELVLPVVLQLKSFLRECKVANYCRQVQQLLGKVQENSAYICSRRQRVSFGVSEQQAVEAWEKLTREEGTPLTLYYSHWRKLRDREIQLEISGKERLEDLNFPEIKRRKMADRKDEDRKQFKDLFDLNSSEEDDTEGFSERGILRPLSTRHGVEDDEEDEEEGEEDSSNSEGDGDPDAEAGLAPGELQQLAQGPEDELEDLQLSEDD

SEQ ID NO: 805394 - protein, 293 aa, Homo sapiens
MLQPSSSPLWGKLRVDIKAYLGSAIQLVSCLSETTVLAAVLRHISVLVPCFLTFPKQCRMLLKRMVVVWSTGEESLRVLAFLVLSRVCRHKKDTFLGPVLKQMYITYVRNCKFTSPGALPFISFMQWTLTELLALEPGVAYQHAFLYIRQLAIHLRNAMTTRKKWRKLRDREIQLEISGKERLEDLNFPEIKRRKMADRKDEDRKQFKDLFDLNSSEEDDTEGFSERGILRPLSTRHGVEDDEEDEEEGEEDSSNSEGDGDPDAEAGLAPGELQQLAQGPEDELEDLQLSEDD

SEQ ID NO: 805395 - protein, 573 aa, Homo sapiens
RSVSSPWGCTLRVGVMAAAGSRKRRLAELTVDEFLASGFDSESESESENSPQAETREAREAARSPDKPGGSPSASRRKGRASEHKDQLSRLKDRDPEFYKFLQENDQSLLNFSDSDSSEEEEGPFHSLPDVLEVLAFLVLSRVCRHKKDTFLGPVLKQMYITYVRNCKFTSPGALPFISFMQWTLTELLALEPGVAYQHAFLYIRQLAIHLRNAMTTRKKETYQSVYNWQYVHCLFLWCRVLSTAGPSEALQPLVYPLAQVIIGCIKLIPTARFYPLRMHCIRALTLLSGSSGAFIPVLPFILEMFQQVDFNRKPGRMSSKPINFSVILKLSNVNLQEKAYRDGLVEQLYDLTLEYLHSQAHCIGFPELVLPVVLQLKSFLRECKVANYCRQVQQLLGKVQENSAYICSRRQRVSFGVSEQQAVEAWEKLTREEGTPLTLYYSHWRKLRDREIQLEISGKERLEDLNFPEIKRRKMADRKDEDRKQFKDLFDLNSSEEDDTEGFSERGILRPLSTRHGVEDDEEDEEEGEEDSSNSEGDGDPDAEAGLAPGELQQLAQGPEDELEDLQLSEDD

SEQ ID NO: 805396 - protein, 408 aa, Homo sapiens
MCWSTSPGALPFISFMQWTLTELLALEPGVAYQHAFLYIRQLAIHLRNAMTTRKKETYQSVYNWQYVHCLFLWCRVLSTAGPSEALQPLVYPLAQVIIGCIKLIPTARFYPLRMHCIRALTLLSGSSGAFIPVLPFILEMFQQVDFNRKPGRMSSKPINFSVILKLSNVNLQEKAYRDGLVEQLYDLTLEYLHSQAHCIGFPELVLPVVLQLKSFLRECKVANYCRQVQQLLGKVQENSAYICSRRQRVSFGVSEQQAVEAWEKLTREEGTPLTLYYSHWRKLRDREIQLEISGKERLEDLNFPEIKRRKMADRKDEDRKQFKDLFDLNSSEEDDTEGFSERGILRPLSTRHGVEDDEEDEEEGEEDSSNSEGDGDPDAEAGLAPGELQQLAQGPEDELEDLQLSEDD

SEQ ID NO: 805397 - protein, 393 aa, Homo sapiens
MQWTLTELLALEPGVAYQHAFLYIRQLAIHLRNAMTTRKKETYQSVYNWQYVHCLFLWCRVLSTAGPSEALQPLVYPLAQVIIGCIKLIPTARFYPLRMHCIRALTLLSGSSGAFIPVLPFILEMFQQVDFNRKPGRMSSKPINFSVILKLSNVNLQEKAYRDGLVEQLYDLTLEYLHSQAHCIGFPELVLPVVLQLKSFLRECKVANYCRQVQQLLGKVQENSAYICSRRQRVSFGVSEQQAVEAWEKLTREEGTPLTLYYSHWRKLRDREIQLEISGKERLEDLNFPEIKRRKMADRKDEDRKQFKDLFDLNSSEEDDTEGFSERGILRPLSTRHGVEDDEEDEEEGEEDSSNSEGDGDPDAEAGLAPGELQQLAQGPEDELEDLQLSEDD

SEQ ID NO: 805398 - protein, 400 aa, Homo sapiens
  misc_feature (5)..(5): Xaa can be any naturally occurring amino acid
MPSLXRRVQWTLTELLALEPGVAYQHAFLYIRQLAIHLRNAMTTRKKETYQSVYNWQYVHCLFLWCRVLSTAGPSEALQPLVYPLAQVIIGCIKLIPTARFYPLRMHCIRALTLLSGSSGAFIPVLPFILEMFQQVDFNRKPGRMSSKPINFSVILKLSNVNLQEKAYRDGLVEQLYDLTLEYLHSQAHCIGFPELVLPVVLQLKSFLRECKVANYCRQVQQLLGKVQENSAYICSRRQRVSFGVSEQQAVEAWEKLTREEGTPLTLYYSHWRKLRDREIQLEISGKERLEDLNFPEIKRRKMADRKDEDRKQFKDLFDLNSSEEDDTEGFSERGILRPLSTRHGVEDDEEDEEEGEEDSSNSEGDGDPDAEAGLAPGELQQLAQGPEDELEDLQLSEDD

SEQ ID NO: 805399 - protein, 192 aa, Homo sapiens
MLQPSSSPLWGKLRVDIKVQENSAYICSRRQRVSFGVSEQQAVEAWEKLTREEGTPLTLYYSHWRKLRDREIQLEISGKERLEDLNFPEIKRRKMADRKDEDRKQFKDLFDLNSSEEDDTEGFSERGILRPLSTRHGVEDDEEDEEEGEEDSSNSEGDGDPDAEAGLAPGELQQLAQGPEDELEDLQLSEDD

SEQ ID NO: 805400 - protein, 323 aa, Homo sapiens
RAVNRTRPAQVIIGCIKLIPTARFYPLRMHCIRALTLLSGSSGAFIPVLPFILEMFQQVDFNRKPGRMSSKPINFSVILKLSNVNLQEKAYRDGLVEQLYDLTLEYLHSQAHCIGFPELVLPVVLQLKSFLRECKVANYCRQVQQLLGKVQENSAYICSRRQRVSFGVSEQQAVEAWEKLTREEGTPLTLYYSHWRKLRDREIQLEISGKERLEDLNFPEIKRRKMADRKDEDRKQFKDLFDLNSSEEDDTEGFSERGILRPLSTRHGVEDDEEDEEEGEEDSSNSEGDGDPDAEAGLAPGELQQLAQGPEDELEDLQLSEDD

SEQ ID NO: 805401 - protein, 401 aa, Homo sapiens
NDPFHPLGGARFGLVSWQLRGAARVQWTLTELLALEPGVAYQHAFLYIRQLAIHLRNAMTTRKKETYQSVYNWQYVHCLFLWCRVLSTAGPSEALQPLVYPLAQVIIGCIKLIPTARFYPLRMHCIRALTLLSGSSGAFIPVLPFILEMFQQVDFNRKPGRMSSKPINFSVILKLSNVNLQEKAYRDGLVEQLYDLTLEYLHSQAHCIGFPELVLPVVLQVQQLLGKVQENSAYICSRRQRVSFGVSEQQAVEAWEKLTREEGTPLTLYYSHWRKLRDREIQLEISGKERLEDLNFPEIKRRKMADRKDEDRKQFKDLFDLNSSEEDDTEGFSERGILRPLSTRHGVEDDEEDEEEGEEDSSNSEGDGDPDAEAGLAPGELQQLAQGPEDELEDLQLSEDD

SEQ ID NO: 805402 - protein, 157 aa, Homo sapiens
MDNLEDGFVIWEQRGLEIGHMGPWWWVWRCLALLWPPAPALSHLSPWFFGFQLEDLNFPEIKRRKMADRKDEDRKQFKDLFDLNSSEEDDTEGFSERGGGACVVLPGEGWAWRALLDFPEPRGPPVPILQGAHQSLAQLGPTSVLPGFWCQRLPSLK

SEQ ID NO: 805403 - protein, 511 aa, Homo sapiens
MLQPSSSPLWGKLRVDIKAYLGSAIQLVSCLSETTVLAAVLRHISVLVPCFLTFPKQCRMLLKRMVVVWSTGEESLRVLAFLVLSRVCRHKKDTFLGPVLKQMYITYVRNCKFTSPGALPFISFMQWTLTELLALEPGVAYQHAFLYIRQLAIHLRNAMTTRKKETYQSVYNWQYVHCLFLWCRVLSTAGPSEALQPLVYPLAQVIIGCIKLIPTARFYPLRMHCIRALTLLSGSSGAFIPVLPFILEMFQQVDFNRKPGRMSSKPINFSVILKLSNVNLQEKAYRDGLVEQLYDLTLEYLHSQAHCIGFPELVLPVVLQLKSFLRECKVANYCRQVQQLLGKVQENSAYICSRRQRVSFGVSEQQAVEAWEKLTREEGTPLTLYYSHWRKLRDREIQLEISGKERLEDLNFPEIKRRKMADRKDEDRKQFKDLFDLNSSEEDDTEGFSERGGGACVVLPGEGWAWRALLDFPEPRGPPVPILQGAHQSLAQLGPTSVLPGFWCQRLPSLK

SEQ ID NO: 805404 - protein, 487 aa, Homo sapiens
ARWYLPSGMFLRGLSGRSTNDVTFPKQCRMLLKRMVVVWSTGEESLRVLAFLVLSRVCRHKKDTFLGPVLKQMYITYVRNCKFTSPGALPFISFMQWTLTELLALEPGVAYQHAFLYIRQLAIHLRNAMTTRKKETYQSVYNWQYVHCLFLWCRVLSTAGPSEALQPLVYPLAQVIIGCIKLIPTARFYPLRMHCIRALTLLSGSSGAFIPVLPFILEMFQQVDFNRKPGRMSSKPINFSVILKLSNVNLQEKAYRDGLVEQLYDLTLEYLHSQAHCIGFPELVLPVVLQLKSFLRECKVANYCRQVQQLLGKVQENSAYICSRRQRVSFGVSEQQAVEAWEKLTREEGTPLTLYYSHWRKLRDREIQLEISGKERLEDLNFPEIKRRKMADRKDEDRKQFKDLFDLNSSEEDDTEGFSERGILRPLSTRHGVEDDEEDEEEGEEDSSNSEGDGDPDAEAGLAPGELQQLAQGPEDELEDLQLSEDD

SEQ ID NO: 805405 - protein, 192 aa, Homo sapiens
MLQPSSSPLWGKLRVDIKAYLGSAIQLVSCLSETTVLAAVLRHISVLVPCFLTFPKQCRMLLKRMVVVWSTGEESLRVLAFLVLSRVCRHKKDTFLGPVLKQMYITYVRNCKFTSPGALPFISFMQWTLTELLALEPGVAYQHAFLYIRQLAIHLRNAMTTRKKRKRHLPVGQWHICLLFRVPADMWHRTQP

SEQ ID NO: 805406 - protein, 417 aa, Homo sapiens
NDPFHPLGGARFGLVSWQLRGAARVQWTLTELLALEPGVAYQHAFLYIRQLAIHLRNAMTTRKKETYQSVYNWQYVHCLFLWCRVLSTAGPSEALQPLVYPLAQVIIGCIKLIPTARFYPLRMHCIRALTLLSGSSGAFIPVLPFILEMFQQVDFNRKPGRMSSKPINFSVILKLSNVNLQEKAYRDGLVEQLYDLTLEYLHSQAHCIGFPELVLPVVLQLKSFLRECKVANYCRQVQQLLGKVQENSAYICSRRQRVSFGVSEQQAVEAWEKLTREEGTPLTLYYSHWRKLRDREIQLEISGKERLEDLNFPEIKRRKMADRKDEDRKQFKDLFDLNSSEEDDTEGFSERGILRPLSTRHGVEDDEEDEEEGEEDSSNSEGDGDPDAEAGLAPGELQQLAQGPEDELEDLQLSEDD

SEQ ID NO: 805407 - protein, 502 aa, Homo sapiens
RSVSSPWGCTLRVGVMAAAGSRKRRLAELTVDEFLASGFDSESESESENSPQAETREAREAARSPDKPGGSPSASRRKGRASEHKDQLSRLKDRDPEFYKFLQENDQSLLNFSDSDSSEEEEGPFHSLPDVLERQLAIHLRNAMTTRKKETYQSVYNWQYVHCLFLWCRVLSTAGPSEALQPLVYPLAQVIIGCIKLIPTARFYPLRMHCIRALTLLSGSSGAFIPVLPFILEMFQQVDFNRKPGRMSSKPINFSVILKLSNVNLQEKAYRDGLVEQLYDLTLEYLHSQAHCIGFPELVLPVVLQLKSFLRECKVANYCRQVQQLLGKVQENSAYICSRRQRVSFGVSEQQAVEAWEKLTREEGTPLTLYYSHWRKLRDREIQLEISGKERLEDLNFPEIKRRKMADRKDEDRKQFKDLFDLNSSEEDDTEGFSERGILRPLSTRHGVEDDEEDEEEGEEDSSNSEGDGDPDAEAGLAPGELQQLAQGPEDELEDLQLSEDD

SEQ ID NO: 805408 - protein, 303 aa, Homo sapiens
MARCEAWGLPGCTLRVGVMAAAGSRKRRLAELTVDEFLASGFDSESESESENSPQAETREAREAARSPDKPGGSPSASRRKGRASEHKDQLSRLKDRDPEFYKFLQENDQSLLNFSDSDSSEEEEGPFHSLPDVLEEASEEEDGAEEGEDGDRVPRGLKGKKNSVPVTVAMVERWKQAAKQRLTPKLFHEVVQAFRAAVATTRGDQESAEANKFQVTDSAAFNALVTFCIRETSLAVSRSCCLERWQRIAAGCCSRPAARSGGSFVWTSRLTWARPYSWCPVCRRRRCWRPCCGTSACWCPAS

SEQ ID NO: 805409 - protein, 173 aa, Homo sapiens
RSVSSPWGCTLRVGVMAAAGSRKRRLAELTVDEFLASGFDSESESESENSPQAETREAREAARSPDKPGGSPSARLVGTCVSRTSCSSCPTPVGLLTSPGVSGPRPKDRRPLPPSPFSLTYSFIRCLLSSCSVPNSVLGRERMLVSCAKISSRSRRTLTFLGEITACSSVEER

SEQ ID NO: 805410 - protein, 103 aa, Homo sapiens
MAPKHVGPQRRLWIRKEYPKTRAKDQLEPTEASPSLGFSSCGTGNQNHGILKTRGMNLPRLASHWAWTCFTANVLLPKLYKLPGLLQKRWVHKIVRTGFQGKN

SEQ ID NO: 805411 - protein, 76 aa, Homo sapiens
IWEQGQEKLAAVTQRKIKGLGLDSGGKKVLEEMKEQSGLSVCPRRAGHYLFCLTSVHKTIPEQHGASDTTRAAGSP

SEQ ID NO: 805412 - protein, 192 aa, Homo sapiens
MNKRDYMNTSVQEPPLDYSFRSIHVIQDLVNEEPRTGLRPLKRSKSGKSLTQSLWLNNNVLNDLRDFNQVASQLLEHPENLAWIDLSFNDLTSIDPVLTTFFNLSVLYLHGNSIQRLGEVNKLAVLPRLRSLTLHGNPMEEEKGYRQYVLCTLSRITTFDFSGVTKADRTTAEVWKRMNIKPKKAWTKQNTL

SEQ ID NO: 805413 - protein, 192 aa, Homo sapiens; identical to SEQ ID NO: 805412

SEQ ID NO: 805414 - protein, 192 aa, Homo sapiens; identical to SEQ ID NO: 805412

SEQ ID NO: 805415 - protein, 192 aa, Homo sapiens; identical to SEQ ID NO: 805412

SEQ ID NO: 805416 - protein, 174 aa, Homo sapiens
MVEFQPSVTDLVNEEPRTGLRPLKRSKSGKSLTQSLWLNNNVLNDLRDFNQVASQLLEHPENLAWIDLSFNDLTSIDPVLTTFFNLSVLYLHGNSIQRLGEVNKLAVLPRLRSLTLHGNPMEEEKGYRQYVLCTLSRITTFDFSGVTKADRTTAEVWKRMNIKPKKAWTKQNTL

SEQ ID NO: 805417 - protein, 114 aa, Homo sapiens
LGYGGGLPLAAASPAPLLGLSTRRGAQADAKRGPAPVTWLRAPALPRDSPESYLFVGSRQRCERTISLNYGPAPSRCPLIGLCRRGPLKDPGKGSLRATGKEKGYHRFRTPACT

SEQ ID NO: 805418 - protein, 192 aa, Homo sapiens; identical to SEQ ID NO: 805412

SEQ ID NO: 805419 - protein, 192 aa, Homo sapiens; identical to SEQ ID NO: 805412

SEQ ID NO: 805420 - protein, 176 aa, Homo sapiens
PRAEFGTRTSFNLVNEEPRTGLRPLKRSKSGKSLTQSLWLNNNVLNDLRDFNQVASQLLEHPENLAWIDLSFNDLTSIDPVLTTFFNLSVLYLHGNSIQRLGEVNKLAVLPRLRSLTLHGNPMEEEKGYRQYVLCTLSRITTFDFSGVTKADRTTAEVWKRMNIKPKKAWTKQNTL

SEQ ID NO: 805421 - protein, 187 aa, Homo sapiens [sequence omitted]

SEQ ID NO: 805422 - protein, 117 aa, Homo sapiens
EEGNMQSQTMNNSKDKKVGPKELNIINPMTVKSFTEEDEDIADVVFPQGGSSVHQRGLLEGDEDERMRETSLACLLDLGLKSHSRATRSHSVPGDDSSMSFTKASSAALLFALGVYK

SEQ ID NO: 805423 - protein, 66 aa, Homo sapiens
CQMLDEDRVEHSYKKYTSHDAYMMNARRKRVGNILLDEKIRQQGCWALSRTEALELRTQPRKSSGL

SEQ ID NO: 805424 - protein, 89 aa, Homo sapiens
ISGHTGFHSSNIPETTEFWRWSTGCFTVYGKGQNVGCSRARLKSPMSFKPTQQRANSRLPDPSAKMQMDTAFWPHASEVRLKMCESLSA

SEQ ID NO: 805425 - protein, 135 aa, Homo sapiens
MPWTINVPMDLDPGELPVSWMECSAWLILPREEPGYEKMGEGRGRCETCWCFLSSWCDGCPGCSFEAGQDSHGRYEDHGDFQAPVMSQSIVCLCSGVTDSPGISSYCPLWQILHKGVLCLWTHSVSMDILFLFPW

SEQ ID NO: 805426 - protein, 175 aa, Homo sapiens
PCGGPEDVALAPCTAAAACEAGPSPVYVKVKSAEPADCAEGPVQCKNGLLVSSPHCEEPCAHSCAHPGLPPHLVHKLPLSYLQTQDTDAASRRINAPLAAGWSWLRLWLVTLASGVDFPQVSAWMRALPSPDCPGLRTTGEQMQKLLLKENKVKTRKSKRRSGEGSHLTTSILEQ

SEQ ID NO: 805427 - protein, 123 aa, Homo sapiens
PCGGPEDVALAPCTAAAACEAGPSPVYVKVKSAEPADCAEGPVQCKNGLLVSSPHCEEPCAHSCAHPGLPPHLVHKLPLSYLQTQDTGEQMQKLLLKENKVKTRKSKRRSGEGSHLTTSILEQ

SEQ ID NO: 805428 - protein, 175 aa, Homo sapiens; identical to SEQ ID NO: 805426

SEQ ID NO: 805429 - protein, 161 aa, Homo sapiens [sequence omitted]

SEQ ID NO: 805430 - protein, 161 aa, Homo sapiens [sequence omitted]

SEQ ID NO: 805431 - protein, 161 aa, Homo sapiens [sequence omitted]

SEQ ID NO: 805432 - protein, 161 aa, Homo sapiens [sequence omitted]

SEQ ID NO: 805433 - protein, 161 aa, Homo sapiens [sequence omitted]

SEQ ID NO: 805434 - protein, 131 aa, Homo sapiens
MAGILRLVVQWPPGRLQTVTKGVESLICTDWIRHKFTRSRIPEKVFQASPEDHEKYGGDPQNPHKLHIVTRIKSTRRRPYWEKDIIKMLGLEKAHTPQVHKNIPSVNAKLKVVKHLIRFVVSSQLFLKCIA

SEQ ID NO: 805435 - protein, 89 aa, Homo sapiens
VLLPALAQWLQLCSAGPCPQARTSPIILEVLLRLNPRMKLKRVLCASGKWSCDTPGACALFLGTFLSGRDFAGTKMPQFGGRAHCDGRL

SEQ ID NO: 805436 - protein, 110 aa, Homo sapiens
MAGILRLVVQWPPGRLQTVTKGVESLICTDWIRHKFTRSRIPEKVFQASPEDHEKYGGDPQNPHKLHIVTRIKSTRRRPYWEKDIIKMLGLEKIQWHDFSSLRPRPPRLK

SEQ ID NO: 805437 - protein, 161 aa, Homo sapiens [sequence omitted]

SEQ ID NO: 805438 - protein, 373 aa, Homo sapiens
MLIPFSMKNCFQLLCNCQVPAAGFKKTVKNGLILQSISNDVYQNLAVEDWIHDHMNLEGKPILFFWQNSPSVVIGRHQNPWQECNLNLMREEGIKLARRRSGGGTVYHDMGNINLTFFTTKKKYDRMENLKLIVRALNAVQPQLDVQATKRFDLLLDGQFKISGTASKIGRTTAYHHCTLLCSTDGTFLSSLLKSPYQGIRSNATASIPSLVKNLLEKDPTLTCEVLMNAVATEYAAYHQIDNHIHLINPTDETLFPGINSKAKELQTWEWIYGKTPKFSINTSFHVLYEQSHLEIKVFIDIKNGRIEICNIEAPDHWLPLEIRDKLNSSLIGSKFCPTETTMLTNILLRTCPQDHKLNSKWNILCEKIKGIM

SEQ ID NO: 805439 - protein, 405 aa, Homo sapiens
HRAQGLPVARGRMTHFSSSSPHEAVGTTGSRSMLIPFSMKNCFQLLCNCQVPAAGFKKTVKNGLILQSISNDVYQNLAVEDWIHDHMNLEGKPILFFWQNSPSVVIGRHQNPWQECNLNLMREEGIKLARRRSGGGTVYHDMGNINLTFFTTKKKYDRMENLKLIVRALNAVQPQLDVQATKRFDLLLDGQFKISGTASKIGRTTAYHHCTLLCSTDGTFLSSLLKSPYQGIRSNATASIPSLVKNLLEKDPTLTCEVLMNAVATEYAAYHQIDNHIHLINPTDETLFPGINSKAKELQTWEWIYGKTPKFSINTSFHVLYEQSHLEIKVFIDIKNGRIEICNIEAPDHWLPLEIRDKLNSSLIGSKFCPTETTMLTNILLRTCPQDHKLNSKWNILCEKIKGIM

SEQ ID NO: 805440 - protein, 289 aa, Homo sapiens
PNGSRPNGSRKLARRRSGGGTVYHDMGNINLTFFTTKKKYDRMENLKLIVRALNAVQPQLDVQATKRFDLLLDGQFKISGTASKIGRTTAYHHCTLLCSTDGTFLSSLLKSPYQGIRSNATASIPSLVKNLLEKDPTLTCEVLMNAVATEYAAYHQIDNHIHLINPTDETLFPGINSKAKELQTWEWIYGKTPKFSINTSFHVLYEQSHLEIKVFIDIKNGRIEICNIEAPDHWLPLEIRDKLNSSLIGSKFCPTETTMLTNILLRTCPQDHKLNSKWNILCEKIKGIM

SEQ ID NO: 805441 - protein, 161 aa, Homo sapiens [sequence omitted]

SEQ ID NO: 805442 - protein, 161 aa, Homo sapiens [sequence omitted]

SEQ ID NO: 805443 - protein, 373 aa, Homo sapiens; identical to SEQ ID NO: 805438

SEQ ID NO: 805444 - protein, 161 aa, Homo sapiens [sequence omitted]

SEQ ID NO: 805445 - protein, 161 aa, Homo sapiens [sequence omitted]

SEQ ID NO: 805446 - protein, 131 aa, Homo sapiens; identical to SEQ ID NO: 805434

SEQ ID NO: 805447 - protein, 161 aa, Homo sapiens [sequence omitted]

SEQ ID NO: 805448 - protein, 134 aa, Homo sapiens
MVRGWVVQAEGSRVPPLKRAITTLMAGILRLVVQWPPGRLQTVTKGVESLICTDWIRHKFTRSRIPEKVFQASPEDHEKYGGDPQNPHKLHIVTRIKSTRRRPYWEKDIIKMLGLEKIQWHDFSSLRPRPPRLK

SEQ ID NO: 805449 - protein, 356 aa, Homo sapiens
MLIPFSMKNCFQLLCNCQVPAAGFKKTVKNGLILQSISNDVYQNLAVEDWIHDHMNLEGKPILFFWQNSPSVVIGRHQNPWQECNLNLMREEGIKLARRRSGGGTVYHDMGNINLTFFTTKKKYDRMENLKLIVRALNAVQPQLDVQATKRFDLLLDGQFKISGTASKIGRTTAYHHCTLLCSTDGTFLSSLLKSPYQGIRSNATASIPSLVKNLLEYAAYHQIDNHIHLINPTDETLFPGINSKAKELQTWEWIYGKTPKFSINTSFHVLYEQSHLEIKVFIDIKNGRIEICNIEAPDHWLPLEIRDKLNSSLIGSKFCPTETTMLTNILLRTCPQDHKLNSKWNILCEKIKGIM

SEQ ID NO: 805450 - protein, 373 aa, Homo sapiens; identical to SEQ ID NO: 805438

SEQ ID NO: 805451 - protein, 190 aa, Homo sapiens
WGDSSRIFNYIRLFQGIRSNATASIPSLVKNLLEKDPTLTCEVLMNAVATEYAAYHQIDNHIHLINPTDETLFPGINSKAKELQTWEWIYGKTPKFSINTSFHVLYEQSHLEIKVFIDIKNGRIEICNIEAPDHWLPLEIRDKLNSSLIGSKFCPTETTMLTNILLRTCPQDHKLNSKWNILCEKIKGIM

SEQ ID NO: 805452 - protein, 319 aa, Homo sapiens
GPVARWRRPCWAPGLCVRSGRRRGPEGWRGDGVSPALGPSLRPLPPPIPSLLEMDLPVGPGAAGPSNVPAFLTKLWTLVSDPDTDALICWSPSGNSFHVFDQGQFAKEVLPKYFKHNNMASFVRQLNMYGFRKVVHIEQGGLVKPERDDTEFQHPCFLRGQEQLLENIKRKVTSVSTLKSEDIKIRQDSVTKLLTDVQLMKGKQECMDSKLLAMKHENEALWREVASLRQKHAQQQKVVNKLIQFLISLVQSNRILGVKRKIPLMLNDSGSAHSMPKYSRQFSLEHVHGSGPYSALPAKSPLWPVRGVWPFRPGVWAWP

SEQ ID NO: 805453 - protein, 170 aa, Homo sapiens
GPVARWRRPCWAPGLCVRSGRRRGPEGWRGDGVSPALGPSLRPLPPPIPSLLEMDLPVGPGAAGPSNVPAFLTKLWTLVSDPDTDALICWSPDGVLPCCPGQSPTPELEQPTRLGFPKCWDRRREPAQPAGKLELSSVESGSSGARTPPPPQDLSLLLFVVVICQVAFRH

SEQ ID NO: 805454 - protein, 154 aa, Homo sapiens
GPVARWRRPCWAPGLCVRSGRRRGPEGWRGDGVSPALGPSLRPLPPPIPSLLEMDLPVGPGAAGPSNVPAFLTKLWTLVSDPDTDALICWSPSGNSFHVFDQGQFAKEVLPKYFKHNNMASFVRQLNMCECCLQAAQGCGRQTCRWRDPSRRTL

SEQ ID NO: 805455 - protein, 582 aa, Homo sapiens
GPVARWRRPCWAPGLCVRSGRRRGPEGWRGDGVSPALGPSLRPLPPPIPSLLEMDLPVGPGAAGPSNVPAFLTKLWTLVSDPDTDALICWSPSGNSFHVFDQGQFAKEVLPKYFKHNNMASFVRQLNMYGFRKVVHIEQGGLVKPERDDTEFQHPCFLRGQEQLLENIKRKVTSVSTLKSEDIKIRQDSVTKLLTDVQLMKGKQECMDSKLLAMKHENEALWREVASLRQKHAQQQKVVNKLIQFLISLVQSNRILGVKRKIPLMLNDSGSAHSMPKYSRQFSLEHVHGSGPYSAPSPAYSSSSLYAPDAVASSGPIISDITELAPASPMASPGGSIDERPLSSSPLVRVKEEPPSPPQSPRVEEASPGRPSSVDTLLSPTALIDSILRESEPAPASVTALTDARGHTDTEGRPPSPPPTSTPEKCLSVACLDKNELSDHLDAMDSNLDNLQTMLSSHGFSVDTSALLDLFSPSVTVPDMSLPDLDSSLASIQELLSPQEPPRPPEAENSSPDSGKQLVHYTAQPLFLLDPGSVDTGSNDLPVLFELGEGSYFSEGDGFAEDPTISLLTGSEPPKAKDPTVS

SEQ ID NO: 805456 - protein, 373 aa, Homo sapiens
GPVARWRRPCWAPGLCVRSGRRRGPEGWRGDGVSPALGPSLRPLPPPIPSLLEMDLPVGPGAAGPSNVPAFLTKLWTLVSDPDTDALICWSPSGNSFHVFDQGQFAKEVLPKYFKHNNMASFVRQLNMYGFRKVVHIEQGGLVKPERDDTEFQHPCFLRGQEQLLENIKRKVTSVSTLKSEDIKIRQDSVTKLLTDVQLMKGKQECMDSKLLAMKHENEALWREVASLRQKHAQQQKVVNKLIQFLISLVQSNRILGVKRKIPLMLNDSGSAHSMPKYSRQFSLEHVHGSGPYSAPSPAYSSSSLYAPDAVASSGPIISDITELAPASPMASPGGSIDERPPSQPSRTPGATRTPRAGLPPPRPPPPLKSASA

SEQ ID NO: 805457 - protein, 582 aa, Homo sapiens; identical to SEQ ID NO: 805455

SEQ ID NO: 805458 - protein, 447 aa, Homo sapiens
GPVARWRRPCWAPGLCVRSGRRRGPEGWRGDGVSPALGPSLRPLPPPIPSLLEMDLPVGPGAAGPSNVPAFLTKLWTLVSDPDTDALICWSPSGNSFHVFDQGQFAKEVLPKYFKHNNMASFVRQLNMYGFRKVVHIEQGGLVKPERDDTEFQHPCFLRGQEQLLENIKRKVTSVSTLKSEDIKIRQDSVTKLLTDVQLMKGKQECMDSKLLAMKHENEALWREVASLRQKHAQQQKVVNKLIQFLISLVQSNRILGVKRKIPLMLNDSGSAHSMPKYSRQFSLEHVHGSGPYSAPSPAYSSSSLYAPDAVASSGPIISDMSLPDLDSSLASVRRRAGGEGERDQRECSQYRLPPQIQELLSPQEPPRPPEAENSSPDSGKQLVHYTAQPLFLLDPGSVDTGSNDLPVLFELGEGSYFSEGDGFAEDPTISLLTGSEPPKAKDPTVS

SEQ ID NO: 805459 - protein, 605 aa, Homo sapiens
GPVARWRRPCWAPGLCVRSGRRRGPEGWRGDGVSPALGPSLRPLPPPIPSLLEMDLPVGPGAAGPSNVPAFLTKLWTLVSDPDTDALICWSPSGNSFHVFDQGQFAKEVLPKYFKHNNMASFVRQLNMYGFRKVVHIEQGGLVKPERDDTEFQHPCFLRGQEQLLENIKRKVTSVSTLKSEDIKIRQDSVTKLLTDVQLMKGKQECMDSKLLAMKHENEALWREVASLRQKHAQQQKVVNKVGAGPEGRRGPHKGRGNCVLFSTLIQFLISLVQSNRILGVKRKIPLMLNDSGSAHSMPKYSRQFSLEHVHGSGPYSAPSPAYSSSSLYAPDAVASSGPIISDITELAPASPMASPGGSIDERPLSSSPLVRVKEEPPSPPQSPRVEEASPGRPSSVDTLLSPTALIDSILRESEPAPASVTALTDARGHTDTEGRPPSPPPTSTPEKCLSVACLDKNELSDHLDAMDSNLDNLQTMLSSHGFSVDTSALLDLFSPSVTVPDMSLPDLDSSLASIQELLSPQEPPRPPEAENSSPDSGKQLVHYTAQPLFLLDPGSVDTGSNDLPVLFELGEGSYFSEGDGFAEDPTISLLTGSEPPKAKDPTVS

SEQ ID NO: 805460 - protein, 563 aa, Homo sapiens
GPVARWRRPCWAPGLCVRSGRRRGPEGWRGDGVSPALGPSLRPLPPPIPSLLEMDLPVGPGAAAKTSRPSWSPSGNSFHVFDQGQFAKEVLPKYFKHNNMASFVRQLNMYGFRKVVHIEQGGLVKPERDDTEFQHPCFLRGQEQLLENIKRKVTSVSTLKSEDIKIRQDSVTKLLTDVQLMKGKQECMDSKLLAMKHENEALWREVASLRQKHAQQQKVVNKLIQFLISLVQSNRILGVKRKIPLMLNDSGSAHSMPKYSRQFSLEHVHGSGPYSAPSPAYSSSSLYAPDAVASSGPIISDITELAPASPMASPGGSIDERPLSSSPLVRVKEEPPSPPQSPRVEEASPGRPSSVDTLLSPTALIDSILRESEPAPASVTALTDARGHTDTEGRPPSPPPTSTPEKCLSVACLDKNELSDHLDAMDSNLDNLQTMLSSHGFSVDTSALLDLFSPSVTVPDMSLPDLDSSLASIQELLSPQEPPRPPEAENSSPDSGKQLVHYTAQPLFLLDPGSVDTGSNDLPVLFELGEGSYFSEGDGFAEDPTISLLTGSEPPKAKDPTVS

SEQ ID NO: 805461 - protein, 318 aa, Homo sapiens
MLNDSGSAHSMPKYSRQFSLEHVHGSGPYSAPSPAYSSSSLYAPDAVASSGPIISDITELAPASPMASPGGSIDERPLSSSPLVRVKEEPPSPPQSPRVEEASPGRPSSVDTLLSPTALIDSILRESEPAPASVTALTDARGHTDTEGRPPSPPPTSTPEKCLSVACLDKNELSDHLDAMDSNLDNLQTMLSSHGFSVDTSALLDLFSPSVTVPDMSLPDLDSSLASIQELLSPQEPPRPPEAENSSPDSGKQLVHYTAQPLFLLDPGSVDTGSNDLPVLFELGEGSYFSEGDGFAEDPTISLLTGSEPPKAKDPTVS

SEQ ID NO: 805462 - protein, 428 aa, Homo sapiens
MVARPGGWSALENIKRKVTSVSTLKSEDIKIRQDSVTKLLTDVQLMKGKQECMDSKLLAMKHENEALWREVASLRQKHAQQQKVVNKLIQFLISLVQSNRILGVKRKIPLMLNDSGSAHSMPKYSRQFSLEHVHGSGPYSAPSPAYSSSSLYAPDAVASSGPIISDITELAPASPMASPGGSIDERPLSSSPLVRVKEEPPSPPQSPRVEEASPGRPSSVDTLLSPTALIDSILRESEPAPASVTALTDARGHTDTEGRPPSPPPTSTPEKCLSVACLDKNELSDHLDAMDSNLDNLQTMLSSHGFSVDTSALLDLFSPSVTVPDMSLPDLDSSLASIQELLSPQEPPRPPEAENSSPDSGKQLVHYTAQPLFLLDPGSVDTGSNDLPVLFELGEGSYFSEGDGFAEDPTISLLTGSEPPKAKDPTVS

SEQ ID NO: 805463 - protein, 383 aa, Homo sapiens
MKGKQECMDSKLLAMKHENEALWREVASLRQKHAQQQKVVNKLIQFLISLVQSNRILGVKRKIPLMLNDSGSAHSMPKYSRQFSLEHVHGSGPYSAPSPAYSSSSLYAPDAVASSGPIISDITELAPASPMASPGGSIDERPLSSSPLVRVKEEPPSPPQSPRVEEASPGRPSSVDTLLSPTALIDSILRESEPAPASVTALTDARGHTDTEGRPPSPPPTSTPEKCLSVACLDKNELSDHLDAMDSNLDNLQTMLSSHGFSVDTSALLDLFSPSVTVPDMSLPDLDSSLASIQELLSPQEPPRPPEAENSSPDSGKQLVHYTAQPLFLLDPGSVDTGSNDLPVLFELGEGSYFSEGDGFAEDPTISLLTGSEPPKAKDPTVS

SEQ ID NO: 805464 - protein, 376 aa, Homo sapiens
MDSKLLAMKHENEALWREVASLRQKHAQQQKVVNKLIQFLISLVQSNRILGVKRKIPLMLNDSGSAHSMPKYSRQFSLEHVHGSGPYSAPSPAYSSSSLYAPDAVASSGPIISDITELAPASPMASPGGSIDERPLSSSPLVRVKEEPPSPPQSPRVEEASPGRPSSVDTLLSPTALIDSILRESEPAPASVTALTDARGHTDTEGRPPSPPPTSTPEKCLSVACLDKNELSDHLDAMDSNLDNLQTMLSSHGFSVDTSALLDLFSPSVTVPDMSLPDLDSSLASIQELLSPQEPPRPPEAENSSPDSGKQLVHYTAQPLFLLDPGSVDTGSNDLPVLFELGEGSYFSEGDGFAEDPTISLLTGSEPPKAKDPTVS

SEQ ID NO: 805465 - protein, 318 aa, Homo sapiens; identical to SEQ ID NO: 805461

SEQ ID NO: 805466 - protein, 373 aa, Homo sapiens
LLLVDSRVSQLWKRGVASLRQKHAQQQKVVNKLIQFLISLVQSNRILGVKRKIPLMLNDSGSAHSMPKYSRQFSLEHVHGSGPYSAPSPAYSSSSLYAPDAVASSGPIISDITELAPASPMASPGGSIDERPLSSSPLVRVKEEPPSPPQSPRVEEASPGRPSSVDTLLSPTALIDSILRESEPAPASVTALTDARGHTDTEGRPPSPPPTSTPEKCLSVACLDKNELSDHLDAMDSNLDNLQTMLSSHGFSVDTSALLDLFSPSVTVPDMSLPDLDSSLASIQELLSPQEPPRPPEAENSSPDSGKQLVHYTAQPLFLLDPGSVDTGSNDLPVLFELGEGSYFSEGDGFAEDPTISLLTGSEPPKAKDPTVS

SEQ ID NO: 805467 - protein, 387 aa, Homo sapiens
LLLVDSRVSQLWKRGVASLRQKHAQQQKVVNKLIQFLISLVQSNRILGVKRKIPLMLNDSGSAHSMPKYSRQFSLEHVHGSGPYSAPSPAYSSSSLYAPDAVASSGPIISDITELAPASPMASPGGSIDERVGAASAQPSCPPMRPLSSSPLVRVKEEPPSPPQSPRVEEASPGRPSSVDTLLSPTALIDSILRESEPAPASVTALTDARGHTDTEGRPPSPPPTSTPEKCLSVACLDKNELSDHLDAMDSNLDNLQTMLSSHGFSVDTSALLDLFSPSVTVPDMSLPDLDSSLASIQELLSPQEPPRPPEAENSSPDSGKQLVHYTAQPLFLLDPGSVDTGSNDLPVLFELGEGSYFSEGDGFAEDPTISLLTGSEPPKAKDPTVS

SEQ ID NO: 805468 - protein, 98 aa, Homo sapiens
PRVPREARVPLEAPEELGQPPTPTPSAGLVLGRQGSLAVLGTGGSAAIAPVGQTGSGLGSTSGQEGHPGLPVCLPPTPCPVVWLGLHSHTWTDPAGCS

SEQ ID NO: 805469 - protein, 582 aa, Homo sapiens; identical to SEQ ID NO: 805455

SEQ ID NO: 805470 - protein, 185 aa, Homo sapiens
MRGGHTVFLPEPAPCVGTGNGSLSRSFRVLHSAWWRKGRGPALGSGAGFAALSGSNSLFSSSTGQLIGRGTGAHVGWRSRPHTHPPTRSSPTTAILSRAQGDASISGPTSPHWGRGRIPPREPTLPSHHQFSRLLMRPLVQSWDPVQGLLKHLPCWAIAAGLGTPGPGPVLGSLIKQSPQQGKAA

SEQ ID NO: 805471 - protein, 596 aa, Homo sapiens
GPVARWRRPCWAPGLCVRSGRRRGPEGWRGDGVSPALGPSLRPLPPPIPSLLEMDLPVGPGAAGPSNVPAFLTKLWTLVSDPDTDALICWSPSGNSFHVFDQGQFAKEVLPKYFKHNNMASFVRQLNMYGFRKVVHIEQGGLVKPERDDTEFQHPCFLRGQEQLLENIKRKVTSVSTLKSEDIKIRQDSVTKLLTDVQLMKGKQECMDSKLLAMKHENEALWREVASLRQKHAQQQKVVNKLIQFLISLVQSNRILGVKRKIPLMLNDSGSAHSMPKYSRQFSLEHVHGSGPYSAPSPAYSSSSLYAPDAVASSGPIISDITELAPASPMASPGGSIDERVGAASAQPSCPPMRPLSSSPLVRVKEEPPSPPQSPRVEEASPGRPSSVDTLLSPTALIDSILRESEPAPASVTALTDARGHTDTEGRPPSPPPTSTPEKCLSVACLDKNELSDHLDAMDSNLDNLQTMLSSHGFSVDTSALLDLFSPSVTVPDMSLPDLDSSLASIQELLSPQEPPRPPEAENSSPDSGKQLVHYTAQPLFLLDPGSVDTGSNDLPVLFELGEGSYFSEGDGFAEDPTISLLTGSEPPKAKDPTVS

SEQ ID NO: 805472 - protein, 373 aa, Homo sapiens; identical to SEQ ID NO: 805456

SEQ ID NO: 805473 - protein, 582 aa, Homo sapiens; identical to SEQ ID NO: 805455

SEQ ID NO: 805474 - protein, 550 aa, Homo sapiens
CGRKEGPRAGLTPSPRQLPGRAAARCAHTAPGPSNVPAFLTKLWTLVSDPDTDALICWSPSGNSFHVFDQGQFAKEVLPKYFKHNNMASFVRQLNMYGFRKVVHIEQGGLVKPERDDTEFQHPCFLRGQEQLLENIKRKVTSVSTLKSEDIKIRQDSVTKLLTDVQLMKGKQECMDSKLLAMKHENEALWREVASLRQKHAQQQKVVNKLIQFLISLVQSNRILGVKRKIPLMLNDSGSAHSMPKYSRQFSLEHVHGSGPYSAPSPAYSSSSLYAPDAVASSGPIISDITELAPASPMASPGGSIDERPLSSSPLVRVKEEPPSPPQSPRVEEASPGRPSSVDTLLSPTALIDSILRESEPAPASVTALTDARGHTDTEGRPPSPPPTSTPEKCLSVACLDKNELSDHLDAMDSNLDNLQTMLSSHGFSVDTSALLDLFSPSVTVPDMSLPDLDSSLASIQELLSPQEPPRPPEAENSSPDSGKQLVHYTAQPLFLLDPGSVDTGSNDLPVLFELGEGSYFSEGDGFAEDPTISLLTGSEPPKAKDPTVS

SEQ ID NO: 805475 - protein, 464 aa, Homo sapiens
MASFVRQLNMYGFRKVVHIEQGGLVKPERDDTEFQHPCFLRGQEQLLENIKRKVTSVSTLKSEDIKIRQDSVTKLLTDVQLMKGKQECMDSKLLAMKHENEALWREVASLRQKHAQQQKVVNKLIQFLISLVQSNRILGVKRKIPLMLNDSGSAHSMPKYSRQFSLEHVHGSGPYSAPSPAYSSSSLYAPDAVASSGPIISDITELAPASPMASPGGSIDERPLSSSPLVRVKEEPPSPPQSPRVEEASPGRPSSVDTLLSPTALIDSILRESEPAPASVTALTDARGHTDTEGRPPSPPPTSTPEKCLSVACLDKNELSDHLDAMDSNLDNLQTMLSSHGFSVDTSALLDLFSPSVTVPDMSLPDLDSSLASIQELLSPQEPPRPPEAENSSPDSGKQLVHYTAQPLFLLDPGSVDTGSNDLPVLFELGEGSYFSEGDGFAEDPTISLLTGSEPPKAKDPTVS

SEQ ID NO: 805476 - protein, 435 aa, Homo sapiens
GPVARWRRPCWAPGLCVRSGRRRGPEGWRGDGVSPALGPSLRPLPPPIPSLLEMDLPVGPGAAGPSNVPAFLTKLWTLVSDPDTDALICWSPSGNSFHVFDQGQFAKEVLPKYFKHNNMASFVRQLNMYGFRKVVHIEQGGLVKPERDDTEFQHPCFLRGQEQLLENIKRKVTSVSTLKSEDIKIRQDSVTKLLTDVQLMKGKQECMDSKLLAMKHENEALWREVASLRQKHAQQQKVVNKLIQFLISLVQSNRILGVKRKIPLMLNDSGSAHSMPKYSRQFSLEHVHGSGPYSAPSPAYSSSSLYAPDAVASSGPIISDITELAPASPMASPGGSIDERPLSSSPLVRVKEEPDQHHGGWQEQAPYERRQKGSQEETWLIHFSKKDGYDVKAPAMFNIRNIGKDLVNRTQGTKIGSDGLKGRVFEVSLADLAEL

SEQ ID NO: 805477 - protein, 342 aa, Homo sapiens
GPVARWRRPCWAPGLCVRSGRRRGPEGWRGDGVSPALGPSLRPLPPPIPSLLEMDLPVGPGAAGPSNVPAFLTKLWTLVSDPDTDALICWSPSGNSFHVFDQGQFAKEVLPKYFKHNNMASFVRQLNMYGFRKVVHIEQGGLVKPERDDTEFQHPCFLRGQEQLLENIKRKVTSVSTLKSEDIKIRQDSVTKLLTDVQLMKGKQECMDSKLLAMKHENEALWREVASLRQKHAQQQKVVNKLIQFLISLVQSNRILGVKRKIPLMLNDSGSAHSMPKYSRQFSLEHVHGSGPYSAPSPAYSSSSLYAPDAVASSGPIISDITELAPASPMASPGGSIDERRA

SEQ ID NO: 805478 - protein, 417 aa, Homo sapiens
VVGGNFGISVSTLKSEDIKIRQDSVTKLLTDVQLMKGKQECMDSKLLAMKHENEALWREVASLRQKHAQQQKVVNKLIQFLISLVQSNRILGVKRKIPLMLNDSGSAHSMPKYSRQFSLEHVHGSGPYSAPSPAYSSSSLYAPDAVASSGPIISDITELAPASPMASPGGSIDERPLSSSPLVRVKEEPPSPPQSPRVEEASPGRPSSVDTLLSPTALIDSILRESEPAPASVTALTDARGHTDTEGRPPSPPPTSTPEKCLSVACLDKNELSDHLDAMDSNLDNLQTMLSSHGFSVDTSALLDLFSPSVTVPDMSLPDLDSSLASIQELLSPQEPPRPPEAENSSPDSGKQLVHYTAQPLFLLDPGSVDTGSNDLPVLFELGEGSYFSEGDGFAEDPTISLLTGSEPPKAKDPTVS

SEQ ID NO: 805479 - protein, 433 aa, Homo sapiens
SCPLGNPSCPPPAPAWGTGRVCGAPSALGLMGLGPTDPAWSVAVRMRLCGGRWPAFGRSMPSNRKSSTRWGQGQRAGGGPTRAGVTVSSLSTLIQFLISLVQSNRILGVKRKIPLMLNDSGSAHSMPKYSRQFSLEHVHGSGPYSAPSPAYSSSSLYAPDAVASSGPIISDITELAPASPMASPGGSIDERPLSSSPLVRVKEEPPSPPQSPRVEEASPGRPSSVDTLLSPTALIDSILRESEPAPASVTALTDARGHTDTEGRPPSPPPTSTPEKCLSVACLDKNELSDHLDAMDSNLDNLQTMLSSHGFSVDTSALLDLFSPSVTVPDMSLPDLDSSLASIQELLSPQEPPRPPEAENSSPDSGKQLVHYTAQPLFLLDPGSVDTGSNDLPVLFELGEGSYFSEGDGFAEDPTISLLTGSEPPKAKDPTVS

SEQ ID NO: 805480 - protein, 377 aa, Homo sapiens
LAVMVSSVMKHENEALWREVASLRQKHAQQQKVVNKLIQFLISLVQSNRILGVKRKIPLMLNDSGSAHSMPKYSRQFSLEHVHGSGPYSAPSPAYSSSSLYAPDAVASSGPIISDITELAPASPMASPGGSIDERPLSSSPLVRVKEEPPSPPQSPRVEEASPGRPSSVDTLLSPTALIDSILRESEPAPASVTALTDARGHTDTEGRPPSPPPTSTPEKCLSVACLDKNELSDHLDAMDSNLDNLQTMLSSHGFSVDTSALLDLFSPSVTVPDMSLPDLDSSLASIQELLSPQEPPRPPEAENSSPDSGKQLVHYTAQPLFLLDPGSVDTGSNDLPVLFELGEGSYFSEGDGFAEDPTISLLTGSEPPKAKDPTVS

SEQ ID NO: 805481 - protein, 424 aa, Homo sapiens
  misc_feature (67)..(67): Xaa can be any naturally occurring amino acid
AGGEDGGEQRSRRQEQREGAGEGAVSAEQVIAGFNRLRQEQRGLASKAAELEMELNEHSLVIDTLKXVDETRKCYRMVGGVLVERTVKEVLPALENNKEQIQKIPLMLNDSGSAHSMPKYSRQFSLEHVHGSGPYSAPSPAYSSSSLYAPDAVASSGPIISDITELAPASPMASPGGSIDERPLSSSPLVRVKEEPPSPPQSPRVEEASPGRPSSVDTLLSPTALIDSILRESEPAPASVTALTDARGHTDTEGRPPSPPPTSTPEKCLSVACLDKNELSDHLDAMDSNLDNLQTMLSSHGFSVDTSALLDLFSPSVTVPDMSLPDLDSSLASIQELLSPQEPPRPPEAENSSPDSGKQLVHYTAQPLFLLDPGSVDTGSNDLPVLFELGEGSYFSEGDGFAEDPTISLLTGSEPPKAKDPTVS

SEQ ID NO: 805482 - protein, 216 aa, Homo sapiens
GPVARWRRPCWAPGLCVRSGRRRGPEGWRGDGVSPALGPSLRPLPPPIPSLLEMDLPVGPGAAGPSNVPAFLTKLWTLVSDPDTDALICWSPSGNSFHVFDQGQFAKEVLPKYFKHNNMASFVRQLNMYGFRKVVHIEQGGLVKPERDDTEFQHPCFLRGQEQLLENIKRKVTSVSTLKSEDIKIRQDSVTKLLTDVQLMKGKQECMDSKLLAMKQ

SEQ ID NO: 805483 - protein, 301 aa, Homo sapiens
AWICIRVRGIRAPLVSWGRSRVVGCCLFPLFQRRRTIGSAGSTPLGCYKKLIEYHKNGHLSFKYVKTFNMDEYVGLPRNHPESYHSYMWNNFFKHIDIDPNNAHILDGNAADLQAECDAFENKIKEAGGIDLFVGGIGPDGHIAFNEPGSSLVSRTRLKTLAMDTILANAKYFDGDLSKVPTMALTVGVGTVMDAREVMILITGAHKAFALYKAIEEGVNHMWTVSAFQQHPRTIFVCDEDATLELRVKTVKYFKANACANKLVGSYSVEMGRRARANILLTRLFKGQTSRARHTAREAFQ

SEQ ID NO: 805484 - protein, 328 aa, Homo sapiens
AWICIRVRGIRAPLVSWGRSRVVGCCLFPLFQRRRTIGSAGLNLFWKLCVTVMRLVILDNYDLASEWAAKYICNRIIQFKPGQDRYFTLGLPTGSTPLGCYKKLIEYHKNGHLSFKYVKTFNMDEYVGLPRNHPESYHSYMWNNFFKHIDIDPNNAHILDGNAADLQAECDAFENKIKEAGGIDLFVGGIGPDGHIAFNEPGSSLVSRTRLKTLAMDTILANAKYFDGDLSKVPTMALTVGVGTVMDAREVMILITGAHKAFALYKAIEEGVNHMWTVSAFQQHPRTIFVCDEDATLELRVKTVKYFKGLMHVHNKLVDPLFSMKDGN

SEQ ID NO: 805485 - protein, 275 aa, Homo sapiens
AWICIRVRGIRAPLVSWGRSRVVGCCLFPLFQRRRTIGSAGSTPLGCYKKLIEYHKNGHLSFKYVKTFNMDEYVGLPRNHPESYHSYMWNNFFKHIDIDPNNAHILDGNAADLQAECDAFENKIKEAGGIDLFVGGIGPDGHIAFNEPGSSLVSRTRLKTLAMDTILANAKYFDGDLSKVPTMALTVGVGTVMDAREVMILITGAHKAFALYKAIEEGVNHMWTVSAFQQHPRTIFVCDEDATLELRVKTVKYFKGLMHVHNKLVDPLFSMKDGN

SEQ ID NO: 805486 - protein, 343 aa, Homo sapiens
AWICIRVRGIRAPLVSWGRSRVVGCCLFPLFQRRRTIGSAGLNLFWKLCVTVMRLVILDNYDLASEWAAKYICNRIIQFKPGQDRYFTLGLPTGSTPLGCYKKLIEYHKNGHLSFKYVKTFNMDEYVGLPRNHPESYHSYMWNNFFKHIDIDPNNAHILDGNAADLQAECDAFENKIKEAGGIDLFVGGIGPDGHIAFNEPGSSLVSRTRLKTLAMDTILANAKYFDGDLSKVPTMALTVGVGTVMDAREVMILITGAHKAFALYKAIEEGVNHMWTVSAFQQHPRTIFVCDEDATLELRVKTVKYFKEMALSYHKLIQENYLLNSVQGCASKARKKFATVWA

SEQ ID NO: 805487 - protein, 328 aa, Homo sapiens; identical to SEQ ID NO: 805484

SEQ ID NO: 805488 - protein, 180 aa, Homo sapiens
AWICIRVRGIRAPLVSWGRSRVVGCCLFPLFQRRRTIGSAGIGPDGHIAFNEPGSSLVSRTRLKTLAMDTILANAKYFDGDLSKVPTMALTVGVGTVMDAREVMILITGAHKAFALYKAIEEGVNHMWTVSAFQQHPRTIFVCDEDATLELRVKTVKYFKGLMHVHNKLVDPLFSMKDGN

SEQ ID NO: 805489 - protein, 329 aa, Homo sapiens
AWICIRVRGIRAPLVSWGRSRVVGCCLFPLFQRRRTIGSAGLNLFWKLCVTVMRLVILDNYDLASEWAAKYICNRIIQFKPGQDRYFTLGLPTGSTPLGCYKKLIEYHKNGHLSFKYVKTFNMDEYVGLPRNHPESYHSYMWNNFFKHIDIDPNNAHILDGNAADLQAECDAFENKIKEAGGIDLFVGGIGPDGHIAFNEPGSSLVSRTRLKTLAMDTILANAKYFDGDLSKVPTMALTVGVGTVMDAREVMILITGAHKAFALYKAIEEGVNHMWTVSAFQQHPRTIFVCDEDATLELRVKTVKYFKEMALSYHKLIQENYLLNSVQG

SEQ ID NO: 805490 - protein, 111 aa, Homo sapiens
MSLPKFSSYIYVCIYVIVTGTTVFMCITLLHFTGIICFLQSGGLWQPCMEQVCQHHLSNKTATATPTFKHCLCGVYVFSPHLHRFSLGAAVLATSQRCAREVNWCVFTVPV

SEQ ID NO: 805491 - protein, 411 aa, Homo sapiens [sequence omitted]

SEQ ID NO: 805492 - protein, 111 aa, Homo sapiens; identical to SEQ ID NO: 805490

SEQ ID NO: 805493 - protein, 111 aa, Homo sapiens; identical to SEQ ID NO: 805490

SEQ ID NO: 805494 - protein, 111 aa, Homo sapiens; identical to SEQ ID NO: 805490

SEQ ID NO: 805495 - protein, 111 aa, Homo sapiens; identical to SEQ ID NO: 805490

SEQ ID NO: 805496 - protein, 111 aa, Homo sapiens; identical to SEQ ID NO: 805490

SEQ ID NO: 805497 - protein, 111 aa, Homo sapiens; identical to SEQ ID NO: 805490

SEQ ID NO: 805498 - protein, 111 aa, Homo sapiens; identical to SEQ ID NO: 805490

SEQ ID NO: 805499 - protein, 111 aa, Homo sapiens; identical to SEQ ID NO: 805490

SEQ ID NO: 805500 - protein, 248 aa, Homo sapiens
LDKTRGRRLISVLEQIRHFVMMPEINTNHLDKQQVQLLAEMCILIDENDNKIGAETKKNCHLNENIEKGLLHRAFSVFLFNTENKLLLQQRSDAKITFPGCFTNTCCSHPLSNPAELEESDALGVRRAAQRRLKAELGIPLEEVPPEEINYLTRIHYKAQSDGIWGEHEIDYILLVRKNVTLNPDPNEIKSYCYVSKEELKELLKKAASGEIKITPWFKIIAATFLFKWWDNLNHLNQFVDHEKIYRM

SEQ ID NO: 805501 - protein, 228 aa, Homo sapiens
MMPEINTNHLDKQQVQLLAEMCILIDENDNKIGAETKKNCHLNENIEKGLLHRAFSVFLFNTENKLLLQQRSDAKITFPGCFTNTCCSHPLSNPAELEESDALGVRRAAQRRLKAELGIPLEEVPPEEINYLTRIHYKAQSDGIWGEHEIDYILLVRKNVTLNPDPNEIKSYCYVSKEELKELLKKAASGEIKITPWFKIIAATFLFKWWDNLNHLNQFVDHEKIYRM

SEQ ID NO: 805502 - protein, 111 aa, Homo sapiens; identical to SEQ ID NO: 805490

SEQ ID NO: 805503 - protein, 111 aa, Homo sapiens; identical to SEQ ID NO: 805490

SEQ ID NO: 805504 - protein, 111 aa, Homo sapiens; identical to SEQ ID NO: 805490

SEQ ID NO: 805505 - protein, 111 aa, Homo sapiens; identical to SEQ ID NO: 805490

SEQ ID NO: 805506 - protein, 111 aa, Homo sapiens; identical to SEQ ID NO: 805490

SEQ ID NO: 805507 - protein, 232 aa, Homo sapiens
MELPEFVTRLISVLEQIRHFVMMPEINTNHLDKQQVQLLAEMCILIDENDNKIGAETKKNCHLNENIEKGLLHRAFSVFLFNTGCFTNTCCSHPLSNPAELEESDALGVRRAAQRRLKAELGIPLEEVPPEEINYLTRIHYKAQSDGIWGEHEIDYILLVRKNVTLNPDPNEIKSYCYVSKEELKELLKKAASGEIKITPWFKIIAATFLFKWWDNLNHLNQFVDHEKIYRM

SEQ ID NO: 805508 - protein, 111 aa, Homo sapiens; identical to SEQ ID NO: 805490

SEQ ID NO: 805509 - protein, 111 aa, Homo sapiens; identical to SEQ ID NO: 805490

SEQ ID NO: 805510 - protein, 111 aa, Homo sapiens; identical to SEQ ID NO: 805490

SEQ ID NO: 805511 - protein, 111 aa, Homo sapiens; identical to SEQ ID NO: 805490

SEQ ID NO: 805512 - protein, 153 aa, Homo sapiens
MIAILVSSYILPPAEAVENPVSENQFLFCHMSIYAKYMYFVPDIGHNAEFTKTHFCAWFDRELRFTRYSVIVLITDYFNCVSNTWIVHYSVISCLTCRFLNSQVIYMCVYMSCNRHNCFHVYHFIALHRYHMFLTKWRFVAALHGASLSAPSF

SEQ ID NO: 805513 - protein, 428 aa, Homo sapiens
MARSLCPGAWLRKPYYLQARFSYVRMKYLFFSWLVVFVGSWIIYVQYSTYTELCRGKDCKKIICDKYKTGVIDGPACNSLCVTETLYFGKCLSTKPNNQMYLGIWDNLPGVVKCQMEQALHLDFGTELEPRKEIVLFDKPTRGTTVQKFKEMVYSLFKAKLGDQGNLSELVNLILTVADGDKDGQVSLGEAKSAWALLQLNEFLLMVILQDKEHTPKLMGFCGDLYVMESVEYTSLYGISLPWVIELFIPSGFRRSMDQLFTPSWPRKAKIAIGLLEFVEDVFHGPYGNFLMCDTSAKNLGYNDKYDLKMVDMRKIVPETNLKELIKDRHCESDLDCVYGTDCRTSCDQSTMKCTSEVIQPNLAKACQLLKDYLLRGAPSEIREELEKQLYSCIALKVTANQMEMEHSLILNNLKTLLWKKISYTNDS

SEQ ID NO: 805514 - protein, 369 aa, Homo sapiens
MARSLCPGAWLRKPYYLQARFSYVRMKYLFFSWLVVFVGSWIIYVQYSTYTELCRGKDCKKIICDKYKTGVIDGPACNSLCVTETLYFGKCLSTKPNNQAKLGDQGNLSELVNLILTVADGDKDGQVSLGEAKSAWALLQLNEFLLMVILQDKEHTPKLMGFCGDLYVMESVEYTSLYGISLPWVIELFIPSGFRRSMDQLFTPSWPRKAKIAIGLLEFVEDVFHGPYGNFLMCDTSAKNLGYNDKYDLKMVDMRKIVPETNLKELIKDRHCESDLDCVYGTDCRTSCDQSTMKCTSEVIQPNLAKACQLLKDYLLRGAPSEIREELEKQLYSCIALKVTANQMEMEHSLILNNLKTLLWKKISYTNDS

SEQ ID NO: 805515 - protein, 428 aa, Homo sapiens; identical to SEQ ID NO: 805513

SEQ ID NO: 805516 - protein, 428 aa, Homo sapiens; identical to SEQ ID NO: 805513

SEQ ID NO: 805517 - protein, 428 aa, Homo sapiens; identical to SEQ ID NO: 805513

SEQ ID NO: 805518 - protein, 272 aa, Homo sapiens
RALAQRQTKGNARLPMAVASTFIPGLNPQNPHYIPGYTGHCPLLRFSVGQTYGQVTGQLLRGPPGLAWPPVHRTLLPPIRPPRSPEVPRESLPVRRGQERLSSSMIPGYTGFVPRAQFIFAKNCSQVWAEALSDFTHLHEKDQVPEPEGQLEEPTLEVVEQASPYSMDDRDPRKFFMSGFTGYVPCARFLFGSSFPVLTNQALQEFGQKHSPGSAQDPKHLPPLPRTYPQNLGLLPNYGGYVPGYKFQFGHTFGHLTHDALGLSTFQKQLLA

SEQ ID NO: 805519 - protein, 272 aa, Homo sapiens; identical to SEQ ID NO: 805518

SEQ ID NO: 805520 - protein, 197 aa, Homo sapiens
EPWLKGKQKEMPGSPWLWPAPSYQGSTLRTLIISQGFVPRAQFIFAKNCSQVWAEALSDFTHLHEKDQVPEPEGQLEEPTLEVVEQASPYSMDDRDPRKFFMSGFTGYVPCARFLFGSSFPVLTNQALQEFGQKHSPGSAQDPKHLPPLPRTYPQNLGLLPNYGGYVPGYKFQFGHTFGHLTHDALGLSTFQKQLLA

SEQ ID NO: 805521 - protein, 213 aa, Homo sapiens
RALAQRQTKGNARLPMAVASTFIPGLNPQNPHYIPGYTGHCPLLRFSVGQTYGQVTGQLLRGPPGLAWPPVHRTLLPPIRPPRSPEVPRESLPVRRGQERLSSSMIPGYTGFVPRAQFIFAKNCSQVWAEALSDFTHLHEKDQVPEPEGQLEEPTLEVVEQASPYSMDDRDPRKFFMSGTAGIWAEALTRQCPGPQTSPPTSQNIPSEPGSFT

SEQ ID NO: 805522 - protein, 310 aa, Homo sapiens
RALAQRQTKGNARLPMAVASTFIPGLNPQNPHYIPGVGQTYGQVTGQLLRGPPGLAWPPVHRTLLPPIRPPRSPEVPRESLPVRRGQERLSSSMIPGYTGFVPRAQFIFAKNCSQVWAEALSDFTHLHEKQGSEELPKEAKGRKDTEKDQVPEPEGQLEEPTLEVVEQASPYSMDDRDPRKFFMSAFLCSPTRHCRNLGRSTHQAVPRTPNISPHFPEHTLRTWVFYLTMGATCQGISSSLATHLAISPMMLWASAPSRSSSWLRPLDIKFPSLFILSQPSFWKGERWVGGWEGGGTQRENGLEAEHLFY

SEQ ID NO: 805523 - protein, 294 aa, Homo sapiens
MAGQGDSGEWESLCCRYTGHCPLLRFSVGQTYGQVTGQLLRGPPGLAWPPVHRTLLPPIRPPRSPEVPRESLPVRRGQERLSSSMIPGYTGFVPRAQFIFAKNCSQVWAEALSDFTHLHEKQGSEELPKEAKGRKDTEKDQVPEPEGQLEEPTLEVVEQASPYSMDDRDPRKFFMSGGELGGQDQRRGEAPGCLGSVSPSSGFTGYVPCARFLFGSSFPVLTNQALQEFGQKHSPGSAQDPKHLPPLPRTYPQNLGLLPNYGGYVPGEKSPRGGFGDWNVCLYGYGVGWVVCGG

SEQ ID NO: 805524 - protein, 253 aa, Homo sapiens
ALAQRQTNPQNPHYIPGYTGHCPLLRFSVGQTYGQVTGQLLRGPPGLAWPPVHRTLLPPIRPPRSPEVPRESLPVRRGQERLSSSMIPGYTGFVPRAQFIFAKNCSQVWAEALSDFTHLHEKDQVPEPEGQLEEPTLEVVEQASPYSMDDRDPRKFFMSGFTGYVPCARFLFGSSFPVLTNQALQEFGQKHSPGSAQDPKHLPPLPRTYPQNLGLLPNYGGYVPGYKFQFGHTFGHLTHDALGLSTFQKQLLA

SEQ ID NO: 805525 - protein, 252 aa, Homo sapiens
MAGQGDSGEWESLCCRYTGHCPLLRFSVGQTYGQVTGQLLRGPPGLAWPPVHRTLLPPIRPPRSPEVPRESLPVRRGQERLSSSMIPGYTGFVPRAQFIFAKNCSQVWAEALSDFTHLHEKDQVPEPEGQLEEPTLEVVEQASPYSMDDRDPRKFFMSGFTGYVPCARFLFGSSFPVLTNQALQEFGQKHSPGSAQDPKHLPPLPRTYPQNLGLLPNYGGYVPGYKFQFGHTFGHLTHDALGLSTFQKQLLA

SEQ ID NO: 805526 - protein, 213 aa, Homo sapiens; identical to SEQ ID NO: 805521

SEQ ID NO: 805527 - protein, 296 aa, Homo sapiens
RALAQRQTKGNARLPMAVASTFIPGLNPQNPHYIPGYTGHCPLLRFSVGQTYGQVTGQLLRGPPGLAWPPVHRTLLPPIRPPRSPEVPRESLPVRRGQERLSSSMIPGYTGFVPRAQFIFAKNCSQVWAEALSDFTHLHEKDQVPEPEGQLEEPTLEVVEQASPYSMDDRDPRKFFMSGEELGGQDQRRGEAPGCLGSVSPSSGFTGYVPCARFLFGSSFPVLTNQALQEFGQKHSPGSAQDPKHLPPLPRTYPQNLGLLPNYGGYVPGEKSPRGGFGDWNVCLYGYGVGWVVCGG

SEQ ID NO: 805528 - protein, 432 aa, Homo sapiens
MLGNSAPGPATREAGSALLALQQTALQEDQENINPEKAAPVQQPRTRAALAVLKSGNPRGLAQQQRPKTRRVAPLKDLPVNDEHVTVPPWKANSKQPAFTIHVDEAEKEAQKKPAESQKIEREDALAFNSAISLPGPRKPLVPLDYPMDGSFESPHTMDMSIVLEDEKPVSVNEVPDYHEDIHTYLREMEVKCKPKVGYMKKQPDITNSMRAILVDWLVEVGEEYKLQNETLHLAVNYIDRFLSSMSVLRGKLQLVGTAAMLLASKFEEIYPPEVAEFVYITDDTYTKKQVLRMEHLVLKVLTFDLAAPTVNQFLTQYFLHQQPANCKVESLAMFLGELSLIDADPYLKYLPSVIAGAAFHLALYTVTGQSWPESLIRKTGYTLESLKPCLMDLHQTYLKAPQHAQQSIREKYKNSKYHGVSLLNPPETLNL

SEQ ID NO: 805529 - protein, 432 aa, Homo sapiens; identical to SEQ ID NO: 805528

SEQ ID NO: 805530 - protein, 432 aa, Homo sapiens; identical to SEQ ID NO: 805528

SEQ ID NO: 805531 - protein, 432 aa, Homo sapiens; identical to SEQ ID NO: 805528

SEQ ID NO: 805532 - protein, 432 aa, Homo sapiens; identical to SEQ ID NO: 805528

SEQ ID NO: 805533 - protein, 332 aa, Homo sapiens
MASGRSRSRTQKKPAESQKIEREDALAFNSAISLPGPRKPLVPLDYPMDGSFESPHTMDMSIVLEDEKPVSVNEVPDYHEDIHTYLREMEVKCKPKVGYMKKQPDITNSMRAILVDWLVEVGEEYKLQNETLHLAVNYIDRFLSSMSVLRGKLQLVGTAAMLLASKFEEIYPPEVAEFVYITDDTYTKKQVLRMEHLVLKVLTFDLAAPTVNQFLTQYFLHQQPANCKVESLAMFLGELSLIDADPYLKYLPSVIAGAAFHLALYTVTGQSWPESLIRKTGYTLESLKPCLMDLHQTYLKAPQHAQQSIREKYKNSKYHGVSLLNPPETLNL

SEQ ID NO: 805534 - protein, 161 aa, Homo sapiens
MLGNSAPGPATREAGSALLALQQTALQEDQENINPEKAAPVQQPRTRAALAVLKSGNPRGLAQQQRPKTRRVAPLKDLPVNDEHVTVPPWKANSKQPAFTIHVDEAEKEAQKKPAESQKIEREDALAFNSAISLPGPRKPLVPLDYPMDGSFDHTYMDCHV

SEQ ID NO: 805535 - protein, 156 aa, Homo sapiens
MSLLDGLASSPRAPLQSSKARMKKLPKKSQNEKYRLKYLRLRKAAKATVFENAAICDEIARLEEKFLKAKEERRYLLKKLLQLQALTEGEVQAAAPSHSSSLPLTYGVASSVGTIQGAGPISGPSTGAEEPFGKKTKKEKKEKGKENNKLEAPKWF

SEQ ID NO: 805536 - protein, 204 aa, Homo sapiens
MSLLDGLASSPRAPLQSSKARMKKLPKKSQNEKYRLKYLRLRKAAKATVFENAAICDEIARLEEKFLKAKEERRYLLKKLLQLQALTEGEVQAAAPSHSSSLPLTYGVASSVGTIQGAGPISGPSTGAEEPFGKKTKKEKKEKGKENNKLEVLKKTCKKKKMAGGARKLVQPIALDPSGRPVFPIGLGGLTVYSLGEVSETSDI

SEQ ID NO: 805537 - protein, 187 aa, Homo sapiens
MKCPDQKCLYTCQIKDGGVQPQFEIVPEDDPQNAIVSSSADACHAELLRTISTTMGKLMPNLLPAGADFFGFSHPAIHNLIQSCPGARKCINYQWVKFDVCKPGDGQLPEGLPENDAAMSFEAFQRQIFDEDQNDPLLPGSLDLPELQPAAFVSSYQPMYLTHEPLVDTHLQHLKSPSQGSPIQSSD

SEQ ID NO: 805538 - protein, 123 aa, Homo sapiens
MSLLDGLASSPRAPLQSSKARMKKLPKKSQNEKYRLKYLRLRKAAKATVFVSLTHVQPVPSWRLPHKIFPQAVPPSQCDSINTVLAFPYTLLLVSLVSLDKLRNFSVSSSVNELVTVLQNNEY

SEQ ID NO: 805539 - protein, 187 aa, Homo sapiens; identical to SEQ ID NO: 805537

SEQ ID NO: 805540 - protein, 156 aa, Homo sapiens; identical to SEQ ID NO: 805535

SEQ ID NO: 805541 - protein, 260 aa, Homo sapiens
MVWPALWELYRELGLFQGPALGLRNHLGRKLRRRKKKKAKRTTNWKIITDRPGFHDESAIYPVGYCSTRIYASMKCPDQKCLYTCQIKDGGVQPQFEIVPEDDPQNAIVSSSADACHAELLRTISTTMGKLMPNLLPAGADFFGFSHPAIHNLIQSCPGARKCINYQWVKFDVCKPGDGQLPEGLPENDAAMSFEAFQRQIFDEDQNDPLLPGSLDLPELQPAAFVSSYQPMYLTHEPLVDTHLQHLKSPSQGSPIQSSD

SEQ ID NO: 805542 - protein, 411 aa, Homo sapiens
MSLLDGLASSPRAPLQSSKARMKKLPKKSQNEKYRLKYLRLRKAAKATVFENAAICDEIARLEEKFLKAKEERRYLLKKLLQLQALTEGEVQAAAPSHSSSLPLTYGVASSVGTIQGAGPISGPSTGAEEPFGKKTKKEKKEKGKENNKLEVLKKTCKKKKMAGGARKLVQPIALDPSGRPVFPIGLGGLTVYSLGEIITDRPGFHDESAIYPVGYCSTRIYASMKCPDQKCLYTCQIKDGGVQPQFEIVPEDDPQNAIVSSSADACHAELLRTISTTMGKLMPNLLPAGADFFGFSHPAIHNLIQSCPGARKCINYQWVKFDVCKPGDGQLPEGLPENDAAMSFEAFQRQIFDEDQNDPLLPGSLDLPELQPAAFVSSYQPMYLTHEPLVDTHLQHLKSPSQGSPIQSSD

SEQ ID NO: 805543 - protein, 384 aa, Homo sapiens
MSLLDGLASSPRAPLQSSKARMKKLPKKSQNEKYRLKYLRLRKAAKATVFENAAICDEIARLEEKFLKAKEERRYLLKKLLQLQALTEGEVQAAAPSHSSSLPLTYGVASSVGTIQGAGPISGPSTGAEEPFGKKTKKEKKEKGKENNKLEAAASVLIHTNPSVSPVPAKIITDRPGFHDESAIYPVGYCSTRIYASMKCPDQKCLYTCQIKDGGVQPQFEIVPEDDPQNAIVSSSADACHAELLRTISTTMGKLMPNLLPAGADFFGFSHPAIHNLIQSCPGARKCINYQWVKFDVCKPGDGQLPEGLPENDAAMSFEAFQRQIFDEDQNDPLLPGSLDLPELQPAAFVSSYQPMYLTHEPLVDTHLQHLKSPSQGSPIQSSD

SEQ ID NO: 805544 - protein, 187 aa, Homo sapiens; identical to SEQ ID NO: 805537

SEQ ID NO: 805545 - protein, 187 aa, Homo sapiens; identical to SEQ ID NO: 805537

SEQ ID NO: 805546 - protein, 260 aa, Homo sapiens; identical to SEQ ID NO: 805541

SEQ ID NO: 805547 - protein, 935 aa, Homo sapiens
AGGGSGGALRRRCAQAALPEMPRGSRARGSKRKRSWNTECPSFPGERPLQVRRAGLRTAGAAASLSEAWLRCGEGFQNTSGNPSLTAEEKTITEKHLELCPRPKQETTTSKSTSGLTDITWSSSGSDLSDEDKTLSQLQRDELQFIDWEIDSDRAEASDCDEFEDDEGAVEISDCASCASNQSLTSDEKLSELPKPSSIEILEYSSDSEKEDDLENVLLIDSESPHKYHVQFASDARQIMERLIDPRTKSTETILHTPQKPTAKFPRTPENSAKKKLLRGGLAERLNGLQNRERSAISLWRHQCISYQKTLSGRKSGVLTVKILELHEECAMQVAMCEQLLGSPATSSSQSVAPRPGAGLKVLFTKETAGYLRGRPQDTVRIFPPWQKLIIPSGSCPVILNTYFCEKVVAKEDSEKTCEVYCPDIPLPRRSISLAQMFVIKGLTNNSPEIQVVCSGVATTGTAWTHGHKEAKQRIPTSTPLRDSLLDVVESQGAASWPGAGVRVVVQRVYSLPSRDSTRGQQGASSGHTDPAGTRACLLVQDACGMFGEVHLEFTMSKARQLEGKSCSLVGMKVLQKVTRGRTAGIFSLIDTLWPPAIPLKTPGRDQPCEEIKTHLPPPALCYILTAHPNLGQIDIIDEDPIYKLYQPPVTRCLRDILQMNDLGTRCSFYATVIYQKPQLKSLLLLEQREIWLLVTDVTLQTKEERDPRLPKTLLVYVAPLCVLGSEVLEALAGAAPHSLFFKDALRDQGRIVCAERTVLLLQKPLLSVVSGASSCELPGPVMLDSLDSATPVNSICSVQGTVVGVDESTAFSWPVCDMCGNGRLEQRPEDRGAFSCGDCSRVVTSPVLKRHLQVFLDCRSRPQCRVKVKLLQRSISSLLRFAAGEDGSYEVKSVLGKEVGLLNCFVQSVTAHPTSCIGLEEIELLSAGGASAEH

SEQ ID NO: 805548 - protein, 926 aa, Homo sapiens
PPTTTKFAAASTPRGSRARGSKRKRSWNTECPSFPGERPLQVRRAGLRTAGAAASLSEAWLRCGEGFQNTSGNPSLTAEEKTITEKHLELCPRPKQETTTSKSTSGLTDITWSSSGSDLSDEDKTLSQLQRDELQFIDWEIDSDRAEASDCDEFEDDEGAVEISDCASCASNQSLTSDEKLSELPKPSSIEILEYSSDSEKEDDLENVLLIDSESPHKYHVQFASDARQIMERLIDPRTKSTETILHTPQKPTAKFPRTPENSAKKKLLRGGLAERLNGLQNRERSAISLWRHQCISYQKTLSGRKSGVLTVKILELHEECAMQVAMCEQLLGSPATSSSQSVAPRPGAGLKVLFTKETAGYLRGRPQDTVRIFPPWQKLIIPSGSCPVILNTYFCEKVVAKEDSEKTCEVYCPDIPLPRRSISLAQMFVIKGLTNNSPEIQVVCSGVATTGTAWTHGHKEAKQRIPTSTPLRDSLLDVVESQGAASWPGAGVRVVVQRVYSLPSRDSTRGQQGASSGHTDPAGTRACLLVQDACGMFGEVHLEFTMSKARQLEGKSCSLVGMKVLQKVTRGRTAGIFSLIDTLWPPAIPLKTPGRDQPCEEIKTHLPPPALCYILTAHPNLGQIDIIDEDPIYKLYQPPVTRCLRDILQMNDLGTRCSFYATVIYQKPQLKSLLLLEQREIWLLVTDVTLQTKEERDPRLPKTLLVYVAPLCVLGSEVLEALAGAAPHSLFFKDALRDQGRIVCAERTVLLLQKPLLSVVSGASSCELPGPVMLDSLDSATPVNSICSVQGTVVGVDESTAFSWPVCDMCGNGRLEQRPEDRGAFSCGDCSRVVTSPVLKRHLQVFLDCRSRPQCRVKVKLLQRSISSLLRFAAGEDGSYEVKSVLGKEVGLLNCFVQSVTAHPTSCIGLEEIELLSAGGASAEH

SEQ ID NO: 805549 - protein, 947 aa, Homo sapiens
AGGGSGGALRRRCAQAALPEMPRGSRARGSKRKRSWNTECPSFPGERPLQVRRAGLRTAGAAASLSEAWLRCGEGFQNTSGNPSLTAEEKTITEKHLELCPRPKQETTTSKSTSGLTDITWSSSGSDLSDEDKTLSQLQRDELQFIDWEIDSDRAEASDCDEFEDDEGAVEISDCASCASNQSLTSDEKLSELPKPSSIEILEYSSDSEKEDDLENVLLIDSESPHKYHVQFASDARQIMERLIDPRTKSTETILHTPQKPTAKFPRTPENSAKKKLLRGGLAERLNGLQNRERSAISLWRHQCISYQKTLSGRKSGVLTVKILELHEECAMQVAMCEQLLGSPATSSSQSVAPRPGAGLKVLFTKETAGYLRGRPQDTVRIFPPWQKELIENGSPKRQKLIIPSGSCPVILNTYFCEKVVAKEDSEKTCEVYCPDIPLPRRSISLAQMFVIKGLTNNSPEIQVVCSGVATTGTAWTHGHKEAKQRIPTSTPLRDSLLDVVESQGAASWPGAGVRVVVQRVYSLPSRDSTRGQQGASSGHTDPAGTRACLLVQDACGMFGEVHLEFTMSKARQLEGKSCSLVGMKVLQKVTRGRTAGIFSLIDTLWPPAIPLKTPGRDQPCEEIKTHLPPPALCYILTAHPNLGQIDIIDEDPIYKLYQPPVTRCLRDILQMNDLGTRCSFYATVIYQKPQLKSLLLLEQREIWLLVTDVTLQTKEERDPRLPKTLLVYVAPLCVLGSEVLEALAGAAPHSLFFKDALRDQGRIVCAERTVLLLQKPLLSVVSGASSCELPGPVMLDSLDSATPVNSICSVQGTVVGVDESTAFSWPVCDMCGNGRLEQRPEDRGAFSCGDCSRVVTSPVLKRHLQVFLDCRSRPQCRVKVKLLQRSISSLLRFAAGEDGSYEVKSVLGKEVGLLNCFVQSVTAHPTSCIGLEEIELLSAGGASAEH

SEQ ID NO: 805550 - protein, 932 aa, Homo sapiens
MKRWIEQDMDIIKEFNRSTERPDEEMDRRKRSWNTECPSFPGERPLQVRRAGLRTAGAAASLSEAWLRCGEGFQNTSGNPSLTAEEKTITEKHLELCPRPKQETTTSKSTSGLTDITWSSSGSDLSDEDKTLSQLQRDELQFIDWEIDSDRAEASDCDEFEDDEGAVEISDCASCASNQSLTSDEKLSELPKPSSIEILEYSSDSEKEDDLENVLLIDSESPHKYHVQFASDARQIMERLIDPRTKSTETILHTPQKPTAKFPRTPENSAKKKLLRGGLAERLNGLQNRERSAISLWRHQCISYQKTLSGRKSGVLTVKILELHEECAMQVAMCEQLLGSPATSSSQSVAPRPGAGLKVLFTKETAGYLRGRPQDTVRIFPPWQKLIIPSGSCPVILNTYFCEKVVAKEDSEKTCEVYCPDIPLPRRSISLAQMFVIKGLTNNSPEIQVVCSGVATTGTAWTHGHKEAKQRIPTSTPLRDSLLDVVESQGAASWPGAGVRVVVQRVYSLPSRDSTRGQQGASSGHTDPAGTRACLLVQDACGMFGEVHLEFTMSKARQLEGKSCSLVGMKVLQKVTRGRTAGIFSLIDTLWPPAIPLKTPGRDQPCEEIKTHLPPPALCYILTAHPNLGQIDIIDEDPIYKLYQPPVTRCLRDILQMNDLGTRCSFYATVIYQKPQLKSLLLLEQREIWLLVTDVTLQTKEERDPRLPKTLLVYVAPLCVLGSEVLEALAGAAPHSLFFKDALRDQGRIVCAERTVLLLQKPLLSVVSGASSCELPGPVMLDSLDSATPVNSICSVQGTVVGVDESTAFSWPVCDMCGNGRLEQRPEDRGAFSCGDCSRVVTSPVLKRHLQVFLDCRSRPQCRVKVKLLQRSISSLLRFAAGEDGSYEVKSVLGKEVGLLNCFVQSVTAHPTSCIGLEEIELLSAGGASAEH

SEQ ID NO: 805551 - protein, 751 aa, Homo sapiens
MKIRHFLSYREPSSIEILEYSSDSEKEDDLENVLLIDSESPHKYHVQFASDARQIMERLIDPRTKSTETILHTPQKPTAKFPRTPENSAKKKLLRGGLAERLNGLQNRERSAISLWRHQCISYQKTLSGRKSGVLTVKILELHEECAMQVAMCEQLLGSPATSSSQSVAPRPGAGLKVLFTKETAGYLRGRPQDTVRIFPPWQKLIIPSGSCPVILNTYFCEKVVAKEDSEKTCEVYCPDIPLPRRSISLAQMFVIKGLTNNSPEIQVVCSGVATTGTAWTHGHKEAKQRIPTSTPLRDSLLDVVESQGAASWPGAGVRVVVQRVYSLPSRDSTRGQQGASSGHTDPAGTRACLLVQDACGMFGEVHLEFTMSKARQLEGKSCSLVGMKVLQKVTRGRTAGIFSLIDTLWPPAIPLKTPGRDQPCEEIKTHLPPPALCYILTAHPNLGQIDIIDEDPIYKLYQPPVTRCLRDILQMNDLGTRCSFYATVIYQKPQLKSLLLLEQREIWLLVTDVTLQTKEERDPRLPKTLLVYVAPLCVLGSEVLEALAGAAPHSLFFKDALRDQGRIVCAERTVLLLQKPLLSVVSGASSCELPGPVMLDSLDSATPVNSICSVQGTVVGVDESTAFSWPVCDMCGNGRLEQRPEDRGAFSCGDCSRVVTSPVLKRHLQVFLDCRSRPQCRVKVKLLQRSISSLLRFAAGEDGSYEVKSVLGKEVGLLNCFVQSVTAHPTSCIGLEEIELLSAGGASAEH

SEQ ID NO: 805552 - protein, 922 aa, Homo sapiens
AGGGSGGALRRRCAQAALPEMPRGSRARGSKRKRSWNTECPSFPGERPLQVRRAGLRTAGAAASLSEAWLSLTAEEKTITEKHLELCPRPKQETTTSKSTSGLTDITWSSSGSDLSDEDKTLSQLQRDELQFIDWEIDSDRAEASDCDEFEDDEGAVEISDCASCASNQSLTSDEKLSELPKPSSIEILEYSSDSEKEDDLENVLLIDSESPHKYHVQFASDARQIMERLIDPRTKSTETILHTPQKPTAKFPRTPENSAKKKLLRGGLAERLNGLQNRERSAISLWRHQCISYQKTLSGRKSGVLTVKILELHEECAMQVAMCEQLLGSPATSSSQSVAPRPGAGLKVLFTKETAGYLRGRPQDTVRIFPPWQKLIIPSGSCPVILNTYFCEKVVAKEDSEKTCEVYCPDIPLPRRSISLAQMFVIKGLTNNSPEIQVVCSGVATTGTAWTHGHKEAKQRIPTSTPLRDSLLDVVESQGAASWPGAGVRVVVQRVYSLPSRDSTRGQQGASSGHTDPAGTRACLLVQDACGMFGEVHLEFTMSKARQLEGKSCSLVGMKVLQKVTRGRTAGIFSLIDTLWPPAIPLKTPGRDQPCEEIKTHLPPPALCYILTAHPNLGQIDIIDEDPIYKLYQPPVTRCLRDILQMNDLGTRCSFYATVIYQKPQLKSLLLLEQREIWLLVTDVTLQTKEERDPRLPKTLLVYVAPLCVLGSEVLEALAGAAPHSLFFKDALRDQGRIVCAERTVLLLQKPLLSVVSGASSCELPGPVMLDSLDSATPVNSICSVQGTVVGVDESTAFSWPVCDMCGNGRLEQRPEDRGAFSCGDCSRVVTSPVLKRHLQVFLDCRSRPQCRVKVKLLQRSISSLLRFAAGEDGSYEVKSVLGKEVGLLNCFVQSVTAHPTSCIGLEEIELLSAGGASAEH

SEQ ID NO: 805553 - protein, 757 aa, Homo sapiens
DIDVVIQKSRAEDCLFEPSSIEILEYSSDSEKEDDLENVLLIDSESPHKYHVQFASDARQIMERLIDPRTKSTETILHTPQKPTAKFPRTPENSAKKKLLRGGLAERLNGLQNRERSAISLWRHQCISYQKTLSGRKSGVLTVKILELHEECAMQVAMCEQLLGSPATSSSQSVAPRPGAGLKVLFTKETAGYLRGRPQDTVRIFPPWQKLIIPSGSCPVILNTYFCEKVVAKEDSEKTCEVYCPDIPLPRRSISLAQMFVIKGLTNNSPEIQVVCSGVATTGTAWTHGHKEAKQRIPTSTPLRDSLLDVVESQGAASWPGAGVRVVVQRVYSLPSRDSTRGQQGASSGHTDPAGTRACLLVQDACGMFGEVHLEFTMSKARQLEGKSCSLVGMKVLQKVTRGRTAGIFSLIDTLWPPAIPLKTPGRDQPCEEIKTHLPPPALCYILTAHPNLGQIDIIDEDPIYKLYQPPVTRCLRDILQMNDLGTRCSFYATVIYQKPQLKSLLLLEQREIWLLVTDVTLQTKEERDPRLPKTLLVYVAPLCVLGSEVLEALAGAAPHSLFFKDALRDQGRIVCAERTVLLLQKPLLSVVSGASSCELPGPVMLDSLDSATPVNSICSVQGTVVGVDESTAFSWPVCDMCGNGRLEQRPEDRGAFSCGDCSRVVTSPVLKRHLQVFLDCRSRPQCRVKVKLLQRSISSLLRFAAGEDGSYEVKSVLGKEVGLLNCFVQSVTAHPTSCIGLEEIELLSAGGASAEH

SEQ ID NO: 805554 - protein, 604 aa, Homo sapiens
MQVAMCEQLLGSPATSSSQSVAPRPGAGLKVLFTKETAGYLRGRPQDTVRIFPPWQKLIIPSGSCPVILNTYFCEKVVAKEDSEKTCEVYCPDIPLPRRSISLAQMFVIKGLTNNSPEIQVVCSGVATTGTAWTHGHKEAKQRIPTSTPLRDSLLDVVESQGAASWPGAGVRVVVQRVYSLPSRDSTRGQQGASSGHTDPAGTRACLLVQDACGMFGEVHLEFTMSKARQLEGKSCSLVGMKVLQKVTRGRTAGIFSLIDTLWPPAIPLKTPGRDQPCEEIKTHLPPPALCYILTAHPNLGQIDIIDEDPIYKLYQPPVTRCLRDILQMNDLGTRCSFYATVIYQKPQLKSLLLLEQREIWLLVTDVTLQTKEERDPRLPKTLLVYVAPLCVLGSEVLEALAGAAPHSLFFKDALRDQGRIVCAERTVLLLQKPLLSVVSGASSCELPGPVMLDSLDSATPVNSICSVQGTVVGVDESTAFSWPVCDMCGNGRLEQRPEDRGAFSCGDCSRVVTSPVLKRHLQVFLDCRSRPQCRVKVKLLQRSISSLLRFAAGEDGSYEVKSVLGKEVGLLNCFVQSVTAHPTSCIGLEEIELLSAGGASAEH

SEQ ID NO: 805555 - protein, 913 aa, Homo sapiens
AGGGSGGALRRRCAQAALPEMPRGSRARGSKRKRSWNTECPSFPGERPLQVRRAGLRTAGAAASLSEAWLRCGEGFQNTSGNPSLTAEEKTITEKHLELCPRPKQETTTSKSTSGLTDITWSSSGSDLSDEDKTLSQLQRDELQFIDWEIDSDRAEASDCDEFEDDEGAVEISDCASCASNQSLTSDEKLSELPKPSSIEILEYSSDSEKEDDLENVLLIDSESPHKYHVQFASDARQIMERLIDPRTKSTETILHTPQKPTAKFPRTPENSAKKKLLRGGLAERLNGLQNRERSAISLWRHQCISYQKTLSGRKSGVLTVKILELHEECAMQVAMCEQLLGSPATSSSQSVAPRPGAGLKVLFTKETAGYLRGRPQDTVRIFPPWQKLIIPSGSCPVILNTYFCEKVVAKEDSEKTCEVYCPDIPLPRRSISLAQMFVIKGLTNNSPEIQVVCSGVATTGTAWTHGHKEAKQRIPTSTPLRDSLLDVVESQGAASWPGAGVRVVVQRVYSLPSRDSTRGQQGASSGHTDPAGTRACLLVQDACGMFGEVHLEFTMSKARQLEGKSCSLVGMKVLQKVTRGRTAGIFSLIDTLWPPAIPLKTPGRDQPCEEIKTHLPPPALCYILTAHPNLGQIDIIDEDPIYKLYQPPVTRCLRDILQMNDLGTRCSFYATVIYQKPQLKSLLLLEQREIWLLVTDVTLQTKEERDPRLPKTLLVYVAPLCVLGSEVLEALAGAAPHSLFFKDALRDQGRIVCAERTVLLLQKPLLSVVSGASSCELPGPVMLDSLDSATPVNSICSVQGTVVGVDESTAFSWPVCDMCGNGRLEQRPEDRGAFSCGDCSRVVTSPVLKRHLQVFLDCRSRPQCRVKVKLLQRSISSLLRFAAGEDGRSRDQEPWQKSSFLHLVSFWLRATK

SEQ ID NO: 805556 - protein, 750 aa, Homo sapiens
AGGGSGGALRRRCAQAALPEMPRGSRARGSKRKRSWNTECPSFPGERPLQVRRAGLRTAGAAASLSEAWLSLTAEEKTITEKHLELCPRPKQETTTSKSTSGLTDITWSSSGSDLSDEDKTLSQLQRGRKSGVLTVKILELHEECAMQVAMCEQLLGSPATSSSQSVAPRPGAGLKVLFTKETAGYLRGRPQDTVRIFPPWQKLIIPSGSCPVILNTYFCEKVVAKEDSEKTCEVYCPDIPLPRRSISLAQMFVIKGLTNNSPEIQVVCSGVATTGTAWTHGHKEAKQRIPTSTPLRDSLLDVVESQGAASWPGAGVRVVVQRVYSLPSRDSTRGQQGASSGHTDPAGTRACLLVQDACGMFGEVHLEFTMSKARQLEGKSCSLVGMKVLQKVTRGRTAGIFSLIDTLWPPAIPLKTPGRDQPCEEIKTHLPPPALCYILTAHPNLGQIDIIDEDPIYKLYQPPVTRCLRDILQMNDLGTRCSFYATVIYQKPQLKSLLLLEQREIWLLVTDVTLQTKEERDPRLPKTLLVYVAPLCVLGSEVLEALAGAAPHSLFFKDALRDQGRIVCAERTVLLLQKPLLSVVSGASSCELPGPVMLDSLDSATPVNSICSVQGTVVGVDESTAFSWPVCDMCGNGRLEQRPEDRGAFSCGDCSRVVTSPVLKRHLQVFLDCRSRPQCRVKVKLLQRSISSLLRFAAGEDGSYEVKSVLGKEVGLLNCFVQSVTAHPTSCIGLEEIELLSAGGASAEH

SEQ ID NO: 805557 - protein, 875 aa, Homo sapiens
AGGGSGGALRRRCAQAALPEMPRGSRARGSKRKRSWNTECPSFPGERPLQVRRAGLRTAGAAASLSEAWLRCGEGFQNTSGNPSLTAEEKTITEKHLELCPRPKQETTTSKSTSGLTDITWSSSGSDLSDEDKTLSQLQRDELQFIDWEIDSDRAEASDCDEFEDDEGAVEISDCASCASNQSLTSDEKLSELPKPSSIEILEYSSDSEKEDDLENVLLIDSESPHKYHVQFASDARQIMERLIDPRTKSTETILHTPQKPTAKFPRTPENSAKKKLLRGGLAERLNGLQNRERSAISLWRHQCISYQKTLSGRKSGVLTVKILELHEECAMQVAMCEQLLGSPATSSSQSVAPRPGAGLKVLFTKETAGYLRGRPQDTVRIFPPWQKLIIPSGSCPVILNTYFCEKVVAKEDSEKTCEVYCPDIPLPRRSISLAQMFVIKGLTNNSPEIQVVCSGVATTGTAWTHGHKEAKQRIPTSTPLRDSLLDVVESQGAASWPGAGVRVVVQRVYSLPSRDSTRGQQGASSGHTDPAGTRACLLVQDACGMFGEVHLEFTMSKARQLEGKSCSLVGMKVLQKVTRGRTAGIFSLIDTLWPPAIPLKTPGRDQPCEEIKTHLPPPALCYILTAHPNLGQIDIIDEDPIYKLYQPPVTRCLRDILQMNDLGTRCSFYATVIYQKPQLKSLLLLEQREIWLLVTDVTLQTKEERDPRLPKTLLVYVAPLCVLGSEVLEALAGAAPHSLFFKDALRDQGVLCVSTALMQGRLIRAHRIPLVASGCLLVAWTLPAPSRSPSQTWPMYQPPAFTDPVAATWAEPAPWRCCAHSRIACWWHPILLQTPQTNQKLEYYKCVYLDQPAPFSRDQTKILPQLSFLIFIES

SEQ ID NO: 805558 - protein, 390 aa, Homo sapiens
MFGEVHLEFTMSKARQLEGKSCSLVGMKVLQKVTRGRTAGIFSLIDTLWPPAIPLKTPGRDQPCEEIKTHLPPPALCYILTAHPNLGQIDIIDEDPIYKLYQPPVTRCLRDILQMNDLGTRCSFYATVIYQKPQLKSLLLLEQREIWLLVTDVTLQTKEERDPRLPKTLLVYVAPLCVLGSEVLEALAGAAPHSLFFKDALRDQGRIVCAERTVLLLQKPLLSVVSGASSCELPGPVMLDSLDSATPVNSICSVQGTVVGVDESTAFSWPVCDMCGNGRLEQRPEDRGAFSCGDCSRVVTSPVLKRHLQVFLDCRSRPQCRVKVKLLQRSISSLLRFAAGEDGSYEVKSVLGKEVGLLNCFVQSVTAHPTSCIGLEEIELLSAGGASAEH

SEQ ID NO: 805559 - protein, 276 aa, Homo sapiens [sequence omitted]

SEQ ID NO: 805560 - protein, 276 aa, Homo sapiens [sequence omitted]

SEQ ID NO: 805561 - protein, 935 aa, Homo sapiens; identical to SEQ ID NO: 805547

SEQ ID NO: 805562 - protein, 832 aa, Homo sapiens
AGGGSGGALRRRCAQAALPEMPRGSRARGSKRKRSWNTECPSFPGERPLQVRRAGLRTAGAAASLSEAWLRCGEGFQNTSGNPSLTAEEKTITEKHLELCPRPKQETTTSKSTSGLTDITWSSSGSDLSDEDKTLSQLQRDELQFIDWEIDSDRAEASDCDEFEDDEGAVEISDCASCASNQSLTSDEKLSELPKPSSIEILEYSSDSEKEDDLENVLLIDSESPHKYHVQFASDARQIMERLIDPRTKSTETILHTPQKPTAKFPRTPENSAKKKLLRGGLAERLNGLQNRERSAISLWRHQCISYQKTLSGRKSGVLTVKILELHEECAMQVAMCEQLLGSPATSSSQSVAPRPGAGLKVLFTKETAGYLRGRPQDTVRIFPPWQKLIIPSGSCPVILNTYFCEKVVAKEDSEKTCEVYCPDIPLPRRSISLAQMFVIKGLTNNSPEIQVVCSGVATTGTAWTHGHKEAKQRIPTSTPLRDSLLDVVESQGAASWPGAGVRVVVQRVYSLPSRDSTRGQQGASSGHTDPAGTRACLLVQDACGMFGEVHLEFTMSKARQLEGKSCSLVGMKVLQKVTRGRTAGIFSLIDTLWPPAIPLKTPGRDQPCEEIKTHLPPPALCYILTAHPNLGQIDIIDEDPIYKLYQPPVTRCLRDILQMNDLGTRCSFYATVIYQKPQLKSLLLLEQREIWLLVTDVTLQTKEERDPRLPKTLLVYVAPLCVLGSEVLEALAGAAPHSLFFKDALRDQGRIVCAERTVLLLQKPLLSVVSGASSCELPGPVMLDSLDSATPVNSICSVQGTVVGVDESTAFSWPVCDMCGNGRLEQRPEDR

SEQ ID NO: 805563 - protein, 232 aa, Homo sapiens
MKRWIEQDMDIIKEFNRSTERPDEEMDRRKRSWNTECPSFPGERPLQVRRAGLRTAGAAASLSEAWLRCGEGFQNTSGNPSLTAEEKTITEKHLELCPRPKQETTTSKSTSGLTDITWSSSGSDLSDEDKTLSQLQRDELQFIDWEIDSDRAEASDCDEFEDDEGAVEISDCASCASNQSLTSDEKLSELPKVRMKYFKTFIHFITFANHSCHFFFCFFFSCPSSRTTTFDS

SEQ ID NO: 805564 - protein, 192 aa, Homo sapiens
PPTTTKFAAASTPRGSRARGSKRKRSWNTECPSFPGERPLQVRRAGLRTAGAAASLSEAWLRCGEGFQNTSGNPSLTAEEKTITEKHLELCPRPKQETTTSKSTSGLTDITWSSSGSDLSDEDKTLSQLQRDELQFIDWEIDSDRAEASDCDEFEDDEGAVEISDCASCASNQSLTSDEKLSELPKVENLVY

SEQ ID NO: 805565 - protein, 875 aa, Homo sapiens; identical to SEQ ID NO: 805557

SEQ ID NO: 805566 - protein, 835 aa, Homo sapiens
AGGGSGGALRRRCAQAALPEMPRGSRARGSKRKRSWNTECPSFPGERPLQVRRAGLRTAGAAASLSEAWLRCGEGFQNTSGNPSLTAEEKTITEKHLELCPRPKQETTTSKSTSGLTDITWSSSGSDLSDEDKTLSQLQRDELQFIDWEIDSDRAEASDCDEFEDDEGAVEISDCASCASNQSLTSDEKLSELPKPSSIEILEYSSDSEKEDDLENVLLIDSESPHKYHVQFASDARQIMERLIDPRTKSTETILHTPQKPTAKFPRTPENSAKKKLLRGGLAERLNGLQNRERSAISLWRHQCISYQKTLSGRKSGVLTVKILELHEECAMQVAMCEQLLGSPATSSSQSVAPRPGAGLKVLFTKETAGYLRGRPQDTVRIFPPWQKLIIPSGSCPVILNTYFCEKVVAKEDSEKTCEVYCPDIPLPRRSISLAQMFVIKGLTNNSPEIQVVCSGVATTGTAWTHGHKEAKQRIPTSTPLRDSLLDVVESQGAASWPGAGVRVVVQRVYSLPSRDSTRGQQGASSGHTDPAGTRACLLVQDACGMFGEVHLEFTMSKARQLEGKSCSLVGMKVLQKVTRGRTAGIFSLIDTLWPPAIPLKTPGRDQPCEEIKTHLPPPALCYILTAHPNLGQIDIIDEDPIYKLYQPPVTRCLRDILQMNDLGTRCSFYATVIYQKPQLKSLLLLEQREIWLLVTDVTLQTKEERDPRLPKTLLVYVAPLCVLGSEVLEALAGAAPHSLFFKDALRDQGRIVCAERTVLLLQKPLLSVVSGASSCELPGPVMLDSLDSATPVNSICSVQGTVVGVDESTAFSWPVCDMCGNGRLEQRPEDRATK

SEQ ID NO: 805567 - protein, 975 aa, Homo sapiens
MNSQMKRWIEQDMDIIKEFKEAHERPDEEMDRRKRSWNTECPSFPGERPLQVRRAGLRTAGAAASLSEAWLRCGEGFQNTSGNPSLTAEEKTITEKHLELCPRPKQETTTSKSTSGLTDITWSSSGSDLSDEDKTLSQLQRDELQFIDWEIDSDRAEASDCDEFEDDEGAVEISDCASCASNQSLTSDEKLSELPKVLAIMIEGAINIHLEVSVWRYTFNSFEYDTKQSNYWIVLPSSIEILEYSSDSEKEDDLENVLLIDSESPHKYHVQFASDARQIMERLIDPRTKSTETILHTPQKPTAKFPRTPENSAKKKLLRGGLAERLNGLQNRERSAISLWRHQCISYQKTLSGRKSGVLTVKILELHEECAMQVAMCEQLLGSPATSSSQSVAPRPGAGLKVLFTKETAGYLRGRPQDTVRIFPPWQKLIIPSGSCPVILNTYFCEKVVAKEDSEKTCEVYCPDIPLPRRSISLAQMFVIKGLTNNSPEIQVVCSGVATTGTAWTHGHKEAKQRIPTSTPLRDSLLDVVESQGAASWPGAGVRVVVQRVYSLPSRDSTRGQQGASSGHTDPAGTRACLLVQDACGMFGEVHLEFTMSKARQLEGKSCSLVGMKVLQKVTRGRTAGIFSLIDTLWPPAIPLKTPGRDQPCEEIKTHLPPPALCYILTAHPNLGQIDIIDEDPIYKLYQPPVTRCLRDILQMNDLGTRCSFYATVIYQKPQLKSLLLLEQREIWLLVTDVTLQTKEERDPRLPKTLLVYVAPLCVLGSEVLEALAGAAPHSLFFKDALRDQGRIVCAERTVLLLQKPLLSVVSGASSCELPGPVMLDSLDSATPVNSICSVQGTVVGVDESTAFSWPVCDMCGNGRLEQRPEDRGAFSCGDCSRVVTSPVLKRHLQVFLDCRSRPQCRVKVKLLQRSISSLLRFAAGEDGSYEVKSVLGKEVGLLNCFVQSVTAHPTSCIGLEEIELLSAGGASAEH

SEQ ID NO: 805568 - protein, 696 aa, Homo sapiens
MERLIDPRTKSTETILHTPQKPTAKFPRTPENSAKKKLLRGGLAERLNGLQNRERSAISLWRHQCISYQKTLSGRKSGVLTVKILELHEECAMQVAMCEQLLGSPATSSSQSVAPRPGAGLKVLFTKETAGYLRGRPQDTVRIFPPWQKLIIPSGSCPVILNTYFCEKVVAKEDSEKTCEVYCPDIPLPRRSISLAQMFVIKGLTNNSPEIQVVCSGVATTGTAWTHGHKEAKQRIPTSTPLRDSLLDVVESQGAASWPGAGVRVVVQRVYSLPSRDSTRGQQGASSGHTDPAGTRACLLVQDACGMFGEVHLEFTMSKARQLEGKSCSLVGMKVLQKVTRGRTAGIFSLIDTLWPPAIPLKTPGRDQPCEEIKTHLPPPALCYILTAHPNLGQIDIIDEDPIYKLYQPPVTRCLRDILQMNDLGTRCSFYATVIYQKPQLKSLLLLEQREIWLLVTDVTLQTKEERDPRLPKTLLVYVAPLCVLGSEVLEALAGAAPHSLFFKDALRDQGRIVCAERTVLLLQKPLLSVVSGASSCELPGPVMLDSLDSATPVNSICSVQGTVVGVDESTAFSWPVCDMCGNGRLEQRPEDRGAFSCGDCSRVVTSPVLKRHLQVFLDCRSRPQCRVKVKLLQRSISSLLRFAAGEDGSYEVKSVLGKEVGLLNCFVQSVTAHPTSCIGLEEIELLSAGGASAEH

SEQ ID NO: 805569 - protein, 851 aa, Homo sapiens
AGGGSGGALRRRCAQAALPEMPRGSRARGSKRKRSWNTECPSFPGERPLQVRRAGLRTAGAAASLSEAWLRCGEGFQNTSGNPSLTAEEKTITEKHLELCPRPKQETTTSKSTSGLTDITWSSSGSDLSDEDKTLSQLQRDELQFIDWEIDSDRAEASDCDEFEDDEGAVEISDCASCASNQSLTSDEKLSELPKRWTSRKTKWTAESREICYFFVETSMYFLPKDTFSRKSGVLTVKILELHEECAMQVAMCEQLLGSPATSSSQSVAPRPGAGLKVLFTKETAGYLRGRPQDTVRIFPPWQKLIIPSGSCPVILNTYFCEKVVAKEDSEKTCEVYCPDIPLPRRSISLAQMFVIKGLTNNSPEIQVVCSGVATTGTAWTHGHKEAKQRIPTSTPLRDSLLDVVESQGAASWPGAGVRVVVQRVYSLPSRDSTRGQQGASSGHTDPAGTRACLLVQDACGMFGEVHLEFTMSKARQLEGKSCSLVGMKVLQKVTRGRTAGIFSLIDTLWPPAIPLKTPGRDQPCEEIKTHLPPPALCYILTAHPNLGQIDIIDEDPIYKLYQPPVTRCLRDILQMNDLGTRCSFYATVIYQKPQLKSLLLLEQREIWLLVTDVTLQTKEERDPRLPKTLLVYVAPLCVLGSEVLEALAGAAPHSLFFKDALRDQGRIVCAERTVLLLQKPLLSVVSGASSCELPGPVMLDSLDSATPVNSICSVQGTVVGVDESTAFSWPVCDMCGNGRLEQRPEDRGAFSCGDCSRVVTSPVLKRHLQVFLDCRSRPQCRVKVKLLQRSISSLLRFAAGEDGSYEVKSVLGKEVGLLNCFVQSVTAHPTSCIGLEEIELLSAGGASAEH

SEQ ID NO: 805570 - protein, 903 aa, Homo sapiens
AGGGSGGALRRRCAQAALPEMPRGSRARGSKRKRSWNTECPSFPGERPLQVRRAGLRTAGAAASLSEAWLRCGEGFQNTSGNPSLTAEEKTITEKHLELCPRPKQETTTSKSTSGLTDITWSSSGSDLSDEDKTLSQLQRDELQFIDWEIDSDRAEASDCDEFEDDEGAVEISDCASCASNQSLTSDEKLSELPKPSSIEILEYSSDSEKEDDLENVLLIDSESPHKYHVQFASDARQIMERLIDPRTKSTETILHTPQKPTAKFPRTPENSAKKKLLRGGLAERLNGLQNRERSAISLWRHQCISYQKTLSGRKSGVLTVKILELHEECAMQVAMCEQLLGSPATSSSQSVAPRPGAGLKVLFTKETAGYLRGRPQDTVRIFPPWQKLIIPSGSCPVILNTYFCEKVVAKEDSEKTCEVYCPDIPLPRRSISLAQMFVIKGLTNNSPEIQVVCSGVATTGTAWTHGHKEAKQRIPTSTPLRDSLLDVVESQGAASWPGAGVRVVVQRVYSLPSRDSTRGQQGASSGHTDPAGTRACLLVQDACGMFGEVHLEFTMSKARQLEGKSCSLVGMKVLQKVTRGRTAGIFSLIDTLWPPAIPLKTPGRDQPCEEIKTHLPPPALCYILTAHPNLGQIDIIDEDPIYKLYQPPVTRCLRDILQMNDLGTRCSFYATVIYQKPQLKSLLLLEQREIWLLVTDVTLQTKEERDPRLPKTLLVYVAPLCVLGSEVLEALAGAAPHSLFFKDALRDQGRIVCAERTVLLLQKPLLSVVSGASSCELPGPVMLDSLDSATPVNSICSVQGTVVGVDESTAFSWPVCDMCGNGRLEQRPEDRGAFSCGDCSRVVTSPVLKRHLQVFLDCRSRPQCRVKVKVGARPEHARTPSSLQHSEAVAAQHFLPAEVCRR

SEQ ID NO: 805571 - protein, 875 aa, Homo sapiens; identical to SEQ ID NO: 805557

SEQ ID NO: 805572 - protein, 409 aa, Homo sapiens
MGKGHSVSRACLLVQDACGMFGEVHLEFTMSKARQLEGKSCSLVGMKVLQKVTRGRTAGIFSLIDTLWPPAIPLKTPGRDQPCEEIKTHLPPPALCYILTAHPNLGQIDIIDEDPIYKLYQPPVTRCLRDILQMNDLGTRCSFYATVIYQKPQLKSLLLLEQREIWLLVTDVTLQTKEERDPRLPKTLLVYVAPLCVLGSEVLEALAGAAPHSLFFKDALRDQGRIVCAERTVLLLQKPLLSVVSGASSCELPGPVMLDSLDSATPVNSICSVQGTVVGVDESTAFSWPVCDMCGNGRLEQRPEDRGAFSCGDCSRVVTSPVLKRHLQVFLDCRSRPQCRVKVKLLQRSISSLLRFAAGEDGSYEVKSVLGKEVGLLNCFVQSVTAHPTSCIGLEEIELLSAGGASAEH

SEQ ID NO: 805573 - protein, 469 aa, Homo sapiens
MTVRDFTQVFDSYAQFEESMIAAKMETASELGREEEDDVDLELRLAPEDDVHHLQRGASSGHTAPAGTRACLLVQDACGMFGEVHLEFTMSKARQLEGKSCSLVGMKVLQKVTRGRTAGIFSLIDTLWPPAIPLKTPGRDQPCEEIKTHLPPPALCYILTAHPNLGQIDIIDEDPIYKLYQPPVTRCLRDILQMNDLGTRCSFYATVIYQKPQLKSLLLLEQREIWLLVTDVTLQTKEERDPRLPKTLLVYVAPLCVLGSEVLEALAGAAPHSLFFKDALRDQGRIVCAERTVLLLQKPLLSVVSGASSCELPGPVMLDSLDSATPVNSICSVQGTVVGVDESTAFSWPVCDMCGNGRLEQRPEDRGAFSCGDCSRVVTSPVLKRHLQVFLDCRSRPQCRVKVKLLQRSISSLLRFAAGEDGSYEVKSVLGKEVGLLNCFVQSVTAHPTSCIGLEEIELLSAGGASAEH

SEQ ID NO: 805574 - protein, 342 aa, Homo sapiens
SYEVRASVLQAAGLNCEEIKTHLPPPALCYILTAHPNLGQIDIIDEDPIYKLYQPPVTRCLRDILQMNDLGTRCSFYATVIYQKPQLKSLLLLEQREIWLLVTDVTLQTKEERDPRLPKTLLVYVAPLCVLGSEVLEALAGAAPHSLFFKDALRDQGRIVCAERTVLLLQKPLLSVVSGASSCELPGPVMLDSLDSATPVNSICSVQGTVVGVDESTAFSWPVCDMCGNGRLEQRPEDRGAFSCGDCSRVVTSPVLKRHLQVFLDCRSRPQCRVKVKLLQRSISSLLRFAAGEDGSYEVKSVLGKEVGLLNCFVQSVTAHPTSCIGLEEIELLSAGGASAEH

SEQ ID NO: 805575 - protein, 934 aa, Homo sapiens
AGGGSGGALRRRCAQAALPEMPRGSRARGSKRKRSWNTECPSFPGERPLQVRRAGLRTAGAAASLSEAWLRCGEGFQNTSGNPSLTAEEKTITEKHLELCPRPKQETTTSKSTSGLTDITWSSSGSDLSDEDKTLSQLQRDELQFIDWEIDSDRAEASDCDEFEDDEGAVEISDCASCASNQSLTSDEKLSELPKPSSIEILEYSSDSEKEDDLENVLLIDSESPHKYHVQFASDARQIMERLIDPRTKSTETILHTPQKPTAKFPRTPENSAKKKLLRGGLAERLNGLQNRERSAISLWRHQCISYQKTLSGRKSGVLTVKILELHEECAMQVAMCEQLLGSPATSSSQSVAPRPGAGLKVLFTKETAGYLRGRPQDTVRIFPPWQKLIIPSGSCPVILNTYFCEKVVAKEDSEKTCEVYCPDIPLPRRSISLAQMFVIKGLTNNSPEIQVVCSGVATTGTAWTHGHKEAKQRIPTSTPLRDSLLDVVESQGAASWPGAGVRVVVQRVYSLPSRDSTRGQQGASSGHTDPAGTRACLLVQDACGMFGEVHLEFTMSKARQLEGKSCSLVGMKVLQKVTRGRTAGIFSLIDTLWPPAIPLKTPGRDQPCEEIKTHLPPPALCYILTAHPNLGQIDIIDEDPIYKLYQPPVTRCLRDILQMNDLGTRCSFYATVIYQKPQLKSLLLLEQREIWLLVTDVTLQTKEERDPRLPKTLLVYVAPLCVLGSEVLEALAGAAPHSLFFKDALRDQGRIVCAERTVLLLQKPLLSVVSGASSCELPGPVMLDSLDSATPVNSICSVQGTVVGVDESTAFSWPVCDMCGNGRLEQRPEDRGAFSCGDCSRVVTSPVLKRHLQVFLDCRSRPQCRVKVKLLQRSISSLLRFAAGEDGVSAGGPAQGAAHSVACMSNSSPEEAPTPKCVLLQPIPLGSGVDTRE

SEQ ID NO: 805576 - protein, 597 aa, Homo sapiens
AGGGSGGALRRRCAQAALPEMPRGSRARGSKRKRSWNTECPSFPGERPLQVRRAGLRTAGAAASLSEAWLRCGEGFQNTSGNPSLTAEEKTITEKHLELCPRPKQETTTSKSTSGLTDITWSSSGSDLSDEDKTLSQLQRDELQFIDWEIDSDRAEASDCDEFEDDEGAVEISDCASCASNQSLTSDEKLSELPKPSSIEILEYSSDSEKEDDLENVLLIDSESPHKYHVQFASDARQIMERLIDPRTKSTETILHTPQKPTAKFPRTPENSAKKKLLRGGLAERLNGLQNRERSAISLWRHQCISYQKTLSGRKSGVLTVKILELHEECAMQVAMCEQLLGSPATSSSQSVAPRPGAGLKVLFTKETAGYLRGRPQDTVRIFPPWQKLIIPSGSCPVILNTYFCEKVVAKEDSEKTCEVYCPDIPLPRRSISLAQMFVIKGLTNNSPEIQVVCSGVATTGTAWTHGHKEAKQRIPTSTPLRDSLLDVVESQGAASWPGAGVRVVVQRVYSLPSRDSTRGQQGASSGHTDPAGTRACLLVQDACGMFGEVHLEFTMSKARQLEGKSCSLVGMKVLQKVTRGRQRGFSVDRATGSSRP

SEQ ID NO: 805577 - protein, 211 aa, Homo sapiens
DSDLGISYHFSINKSPITAVPRPRSRPQTHSQFLDQHHLPGTPSQLPPIPPPPPPLPPLTAPARPRLPAPPSHHRACVLTPFRRDQSRQRARGPSSAQFRAPPRAHEASTAVAQPAEERAASTAAAQARRAHSCLLTRAPPFSFGPSGRLGSLRFPTGISHFTKKVGFLLLANSTSRAQSYVRSTVYIKTVQDKNWPLHSALTAVFKAGAW

SEQ ID NO: 805578 - protein, 105 aa, Homo sapiens
MECLQGPSASIWAWGFPMSAQRLVMWQRGRAAPPRTSTLRSPHLACVWLSLPGSPLSLHGKHYGPELSKAHSHVFFSIFFSQKYSLYKDCPGQKLATPFSIDSSI

SEQ ID NO: 805579 - protein, 165 aa, Homo sapiens
DSDLGISYHFSINKSPITAVPRPRSRPQTHSQFLDQHHLPGTPSQLPPIPPPPPPLPPLTAPARPRLPAPPSHHRACVLTPFRRDQSRQRARGPSSAQFRAPPRAHEASTAVAQPAEERAASTAAAQARRAHSCLLTRAPPFSFGPSGRLGSLRFPDKNGRMKEL

SEQ ID NO: 805580 - protein, 179 aa, Homo sapiens
DSDLGISYHFSINKSPITAVPRPRSRPQTHSQFLDQHHLPGTPSQLPPIPPPPPPLPPLTAPARPRLPAPPSHHRACVLTPFRRDQSRQRARGPSSAQFRAPPRAHEASTAVAQPAEERAASTAAAQARRAHSCLLTRAPPFSFGPSGRLGSLRFPKYSLYKDCPGQKLATPFSIDSSI

SEQ ID NO: 805581 - protein, 165 aa, Homo sapiens; identical to SEQ ID NO: 805579

SEQ ID NO: 805582 - protein, 165 aa, Homo sapiens; identical to SEQ ID NO: 805579

SEQ ID NO: 805583 - protein, 221 aa, Homo sapiens
GGKRRLRRVSGVSPSPCGPFKGRGRVAGPPPPRGARSPLSASPGAGAGSGRGPAAVWERRVMYTITKGPSKLVAQRRTGPTQQQVEGRLGELLKCRQPAPPTSQPPRAQPFAQPPGPWPLSSPGPRLVFNRVNGRRAPSTSPSFEGTQETYTVAHEENVRFVSEAWQQVQQQLDGGPAGEGGPRPVQYVERTPNPRLQNFVPIDLDEWWAQQFLARITSCS

SEQ ID NO: 805584 - protein, 480 aa, Homo sapiens
REPSPLASPLVSGRWGVGEGYSHSPDSGTAHPGTQSSSHGTWGQPGRGQRPPFPSRSIRPWRETSWRWRCFCGARMWPRTTPRVGGLGQRDMVMDWVVAQVRIWAADGMQVAAWAPARPSGRGTEWGPTKGLGHSKTEAPTLQSLTSLRTQGCRCELSCRWLGDCKRGLGHRLLWVAALSGSGSAQAGQVWGKWAGPGLLLSSARQHRPGMGTNHVRLLPSCSPGPRLVFNRVNGRRAPSTSPSFEGTQETYTVAHEENVRFVSEGSERGQRVRHRLLGRKTMDPGWPHFKLTHSRCMAVLFLGTLPLCPVTSPVWELESRVTIRPWVGDGVPGTWLSPTALLPQPGSRCNSSWMVAQPVRAGQGLCSTWRGPPIPGCRVSPPTLSPQERPPSPSDPDPGPARFPPQGMREGTLVQKPLLPSACRTRSPGERLVVSSRGDLPAGLGGSITAQPSLPTDFVPIDLDEWWAQQFLARITSCS

SEQ ID NO: 805585 - protein, 135 aa, Homo sapiens
GGKRRLRRVSGVSPSPCGPFKGRGRVAGPPPPRGARSPLSASPGAGAGSGRGPAAVWERRVMYTITKGPSKLVAQRRTAWQQVQQQLDGGPAGEGGPRPVQYVERTPNPRLQNFVPIDLDEWWAQQFLARITSCS

SEQ ID NO: 805586 - protein, 191 aa, Homo sapiens
GGKRRLRRVSGVSPSPCGPFKGRGRVAGPPPPRGARSPLSASPGAGAGSGRGPAAVWERRVMYTITKGPSKLVAQRRTGPTQQQVEGRLGELLKCRQPAPPTSQPPRAQPFAQPPGPWPLSSPGPRLVFNRVNGRRAPSTSPSFEGTQETYTVAHEENVRFVSEAWQQVQQQLDGGPAGEGGPRPVQLCAH

SEQ ID NO: 805587 - protein, 221 aa, Homo sapiens; identical to SEQ ID NO: 805583

SEQ ID NO: 805588 - protein, 221 aa, Homo sapiens; identical to SEQ ID NO: 805583

SEQ ID NO: 805589 - protein, 123 aa, Homo sapiens
GGKRRLRRVSGVSPSPCGPFKGRGRVAGPPPPRGARSPLSASPGAGAGSGRGPAAVWERRVMYTITKGPSKLVAQRRTVPLSAEEEPRAALGHLSPGRQQAGRDRECLAEQAQPRTPGSHLRL

SEQ ID NO: 805590 - protein, 126 aa, Homo sapiens
GGKRRLRRVSGVSPSPCGPFKGRGRVAGPPPPRGARSPLSASPGAGAGSGRGPAAVWERRVMYTITKGPSKLVAQRRTGPTQQQVEGRLGELLKCRQPAPPTSQPPRAQPFAQPPGPWPLSSAPLS

SEQ ID NO: 805591 - protein, 242 aa, Homo sapiens
GGKRRLRRVSGVSPSPCGPFKGRGRVAGPPPPRGARSPLSASPGAGAGSGRGPAAVWERRVMYTITKGPSKLVAQRRTGPTQQQVEGRLGELLKCRQPAPPTSQPPRAQPFAQPPGPWPLSSPGPRLVFNRVNGRRAPSTSPSFEGTQETYTVAHEENVRFVSEAWQQVQQQLDGGPAGEGGPRPVQYVERTPNPRLQSPAHPLRLAGCRPHLKCQHLDFCTFFSLGPAVPTKLPWPRAEPV

SEQ ID NO: 805592 - protein, 221 aa, Homo sapiens; identical to SEQ ID NO: 805583

SEQ ID NO: 805593 - protein, 136 aa, Homo sapiens
GGKRRLRRVSGVSPSPCGPFKGRGRVAGPPPPRGARSPLSASPGAGAGSGRGPAAVWERRVMYTITKGPSKLVAQRRTGPTQQQVEGRLGELLKCRQPAPPTSQPPRAQPFAQPPGPWPLSSLAAGATAAGWWPSR

SEQ ID NO: 805594 - protein, 161 aa, Homo sapiens
GGKRRLRRVSGVSPSPCGPFKGRGRVAGPPPPRGARSPLSASPGAGAGSGRGPAAVWERRVMYTITKGPSKLVAQRRTGAHGPGNGNGDGAGRGGGDRPPVPAGPTQQQVEGRLGELLKCRQPAPPTSQPPRAQPFAQPPGPWPLSSLAAGATAAGWWPSR

SEQ ID NO: 805595 - protein, 136 aa, Homo sapiens; identical to SEQ ID NO: 805593

SEQ ID NO: 805596 - protein, 126 aa, Homo sapiens; identical to SEQ ID NO: 805590

SEQ ID NO: 805597 - protein, 151 aa, Homo sapiens
GGKRRLRRVSGVSPSPCGPFKGRGRVAGPPPPRGARSPLSASPGAGAGSGRGPAAVWERRVMYTITKGPSKLVAQRRTGAHGPGNGNGDGAGRGGGDRPPVPAGPTQQQVEGRLGELLKCRQPAPPTSQPPRAQPFAQPPGPWPLSSAPLS

SEQ ID NO: 805598 - protein, 167 aa, Homo sapiens
MAGGPPPRPHPSRGPRRPTQWPTRRMSALCPKPGSRCNSSWMVAQPVRAGQGLCSTWRGPPIPGCRVSPPTLSPQERPPSPSDPDPGPARFPPQGMREGTLVQKPLLPSACRTRSPGERLVVSSRGDLPAGLGGSITAQPSLPTDFVPIDLDEWWAQQFLARITSCS

SEQ ID NO: 805599 - protein, 380 aa, Homo sapiens
MRPDVSSPPSSSSTATTGPPPKLCLVCSDEASGCHYGVLTCGSCKVFFKRAVEGQHNYLCAGRNDCIIDKIRRKNCPACRYRKCLQAGMNLEARKTKKKIKGIQQATTGVSQETSENPGNKTIVPATLPQLTPTLVSLLEVIEPEVLYAGYDSSVPDSTWRIMTTLNMLGGRQVIAAVKWAKAIPGFRNLHLDDQMTLLQYSWMFLMAFALGWRSYRQSSANLLCFAPDLIINEQRMTLPCMYDQCKHMLYVSSELHRLQVSYEEYLCMKTLLLLSSVPKDGLKSQELFDEIRMTYIKELGKAIVKREGNSSQNWQRFYQLTKLLDSMHEVVENLLNYCFQTFLDKTMSIEFPEMLAEIITNQIPKYSNGNIKKLLFHQK

SEQ ID NO: 805600 - protein, 132 aa, Homo sapiens
RVCQIPPSCPARLPSPRTLSVSKERVSDTLKERSWNSQELFDEIRMTYIKELGKAIVKREGNSSQNWQRFYQLTKLLDSMHEVVENLLNYCFQTFLDKTMSIEFPEMLAEIITNQIPKYSNGNIKKLLFHQK

SEQ ID NO: 805601 - protein, 411 aa, Homo sapiens
CQGSGDDNLTSLGTLNFPGRTVFSNGYSSPSMRPDVSSPPSSSSTATTGPPPKLCLVCSDEASGCHYGVLTCGSCKVFFKRAVEGQHNYLCAGRNDCIIDKIRRKNCPACRYRKCLQAGMNLEARKTKKKIKGIQQATTGVSQETSENPGNKTIVPATLPQLTPTLVSLLEVIEPEVLYAGYDSSVPDSTWRIMTTLNMLGGRQVIAAVKWAKAIPGFRNLHLDDQMTLLQYSWMFLMAFALGWRSYRQSSANLLCFAPDLIINEQRMTLPCMYDQCKHMLYVSSELHRLQVSYEEYLCMKTLLLLSSVPKDGLKSQELFDEIRMTYIKELGKAIVKREGNSSQNWQRFYQLTKLLDSMHEVVENLLNYCFQTFLDKTMSIEFPEMLAEIITNQIPKYSNGNIKKLLFHQK

SEQ ID NO: 805602 - protein, 411 aa, Homo sapiens; identical to SEQ ID NO: 805601

SEQ ID NO: 805603 - protein, 394 aa, Homo sapiens
CQGSGDDNLTSLGTLNFPGRTVFSNGYSSPSMRPDVSSPPSSSSTATTGPPPKLCLVCSDEASGCHYGVLTCGSCKVFFKRAVEGQHNYLCAGRNDCIIDKIRRKNCPACRYRKCLQAGMNLEARKTKKKIKGIQQATTGVSQETSENPGNCWEVIEPEVLYAGYDSSVPDSTWRIMTTLNMLGGRQVIAAVKWAKAIPGFRNLHLDDQMTLLQYSWMFLMAFALGWRSYRQSSANLLCFAPDLIINEQRMTLPCMYDQCKHMLYVSSELHRLQVSYEEYLCMKTLLLLSSVPKDGLKSQELFDEIRMTYIKELGKAIVKREGNSSQNWQRFYQLTKLLDSMHEVVENLLNYCFQTFLDKTMSIEFPEMLAEIITNQIPKYSNGNIKKLLFHQK

SEQ ID NO: 805604 - protein, 117 aa, Homo sapiens
CQGSGDDNLTSLGTLNFPGRTVFSNGYSSPSMRPDVSSPPSSSSTATTGPPPKLCLVCSDEASGCHYGVLTCGSCKVFFKRAVEGSVCFEEFIFPLLGFHFSGWILKFPLYAKPMKG

SEQ ID NO: 805605 - protein, 67 aa, Homo sapiens
CMVPELSLQDSSGSERTGHRGKARMSHTPTPCRELGHRPAGPGSDGKQKLIMTRNCFPTESTWRWQC

SEQ ID NO: 805606 - protein, 110 aa, Homo sapiens
LAPRRQTVGSLLGLPQTLRSNLKLFTVDVLYCPEAIVSLVGVLRRLAACQEHKRAPEVYVAFTVRNPETCQLFTTELGWAGIRWEAEAHHDQKLFPYGEHLEMAMLNLTL

SEQ ID NO: 805607 - protein, 198 aa, Homo sapiens
RRAHCAPSPGMWAAGRAERPAGLAGVQGQTGWVSVLKPPALRLHCEASCVCVKHPPSVKYARCFLSELIKKPSGGSVTISESTAIISHGTTGLVTWDATLSLQNGPSRTQQPSLTDVLYCPEAIVSLVGVLRRLAACQEHKRAPEVYVAFTVRNPETCQLFTTELGWAGIRWEAEAHHDQKLFPYGEHLEMAMLNLTL

SEQ ID NO: 805608 - protein, 102 aa, Homo sapiens
AAAERILDGGPQFTPQARRKWWKAQLWVILGAAPVTRYQEEGLLTFRLSVARSYSNTRMAGLLAPLTTPEHPKAVGVVVPEELPCYDAMMLPDHLQMRKLSE

SEQ ID NO: 805609 - protein, 222 aa, Homo sapiens
MECPVMETGSLFTSGIKRHLKDKRISKTTKLNVSLASKIKTKILNNSSIFKISLKHNNRALAQALSREKENSRRITTEKMLLQKEVEKLNFENTFLRLKLNNLNKKLIDIEALMNNNLITAIEMSSLSEFHQSSFLLSASKKKRISKQCKLMRLPFARVPLTSNDDEDEDKEKMQCDNHIKSKTLPDIPSSGSTTQPLSTQDNRKCFFQQSPRFGRFTIPLG

SEQ ID NO: 805610 - protein, 196 aa, Homo sapiens
MECPVMETGSLFTSGIKRHLKDKRISKTTKLNVSLASKIKTKILNNSSIFKISLKHNNRALAQALSREKENSRRITTEKMLLQKEVEKLNFENTFLRLKLNNLNKKLIDIEALMNNNLITAIEMSSLSEFHQSSFLLSASKKKRISKQCKLMRLPFASRTWWLMPVIPALWEAEAGGSRGQEIETILANMVKPRLY

SEQ ID NO: 805611 - protein, 658 aa, Homo sapiens
MGGHLSPWPTYTSGQTILQNRKPCSDDYRKRVGSCQQHPFRTAKPQYLEELENYLRKELLLLDLGTDSTQELRLQPYREIFEFFIEDFKTYKPLLSSIKNAYEGMLAHQREKIRALEPLKAKLVTVNEDCNERILAMRAEEKYEISLLKKEKMNLLKLIDKKNEEKISLQSEVTKLRKNLAEEYLHYLSERDACKILIADLNELRYQREDMSLAQSPGIWGEDPVKLTLALKMTRQDLTRTQMELNNMKANFGDVVPRRDFEMQEKTNKDLQEQLDTLRASYEEVRKEHEILMQLHMSTLKERDQFFSELQEIQRTSTPRPDWTKCKDVVAGGPERWQMLAEGKNSDQLVDVLLEEIGSGLLREKDFFPGLGYGEAIPAFLRFDGLVENKKPSKKDVVNLLKDAWKERLAEEQKETFPDFFFNFLEHRFGPSDAMAWAYTIFENIKIFHSNEVMSQFYAVLMGKRSENVYVTQKETVAQLLKEMTNADSQNEGLLTMEQFNTVLKSTFPLKTEEQIQELMEAGGWHPSSSNADLLNYRSLFMEDEEGQSEPFVQKLWEQYMDEKDEYLQQLKQELGIELHEEVTLPKLRGGLMTIDPSLDKQTVNTYMSQAFQLPESEMPEEGDEKEEAVVEILQTALERLQVIDIRRVGPREPEPAS

SEQ ID NO: 805612 - protein, 764 aa, Homo sapiens
MACQQSRYHSFSSASRLQPRPSGVTIDESFLTEDKSTQNRKLLQKRRTLTGQFSMGGHLSPWPTYTSGQTILQNRKPCSDDYRKRVGSCQQHPFRTAKPQYLEELENYLRKELLLLDLGTDSTQELRLQPYREIFEFFIEDFKTYKPLLSSIKNAYEGMLAHQREKIRALEPLKAKLVTVNEDCNERILAMRAEEKYEISLLKKEKMNLLKLIDKKNEEKISLQSEVTKLRKNLAEEYLHYLSERDACKILIADLNELRYQREDMSLAQSPGIWGEDPVKLTLALKMTRQDLTRTQMELNNMKANFGDVVPRRDFEMQEKTNKDLQEQVLAGRQGQEGEDGVSQVGGQGQCPCPQLDTLRASYEEVRKEHEILMQLHMSTLKERDQFFSELQEIQRTSTPRPDWTKCKGEGSRQGPRSCLHVGPDSSSLSPHADVVAGGPERWQMLAEGKNSDQLVDVLLEEIGSGLLREKDFFPGLGYGEAIPAFLRFDGLVENKKPSKKDVVNLLKDAWKERLAEEQKETFPDFFFNFLEHRFGPSDAMAWAYTIFENIKIFHSNEVMSQFYAVLMGKRSENVYVTQKETVAQLLKEMTNADSQNEGLLTMEQFNTVLKSTFPLKTEEQIQELMEAGGWHPSSSNADLLNYRSLFMEDEEGQSEPFVQKLWEQYMDEKDEYLQQLKQELGIELHEEVTLPKLRGGLMTIDPSLDKQTVNTYMSQAFQLPESEMPEEGDEKEEAVVEILQTALERLQVIDIRRVGPREPEPAS

SEQ ID NO: 805613 - protein, 653 aa, Homo sapiens
MACQQSRYHSFSSASRLQPRPSGVTIDESFLTEDKSTQNRKLLQKRRTLTGQFSMGGHLSPWPTYTSGQTILQNRKPCSDDYRKRVGSCQQHPFRTAKPQYLEELENYLRKELLLLDLGTDSTQELRLQPYREIFEFFIEDFKTYKPLLSSIKNAYEGMLAHQREKIRALEPLKAKLVTVNEDCNERILAMRAEEKYEISLLKKEKMNLLKLIDKKNEEKISLQSEVTKLRKNLAEEYLHYLSERDACKILIADLNELRYQREDMSLAQSPGIWGEDPVKLTLALKMTRQDLTRTQMELNNMKANFGDVVPRRDFEMQEKTNKDLQEQVLAGRQGQEGEDGVSQVGGQGQCPCPQLDTLRASYEEVRKEHEILMQLHMSTLKERDQFFSELQEIQRTSTPRPDWTKCKGEGSRQGPRSCLHVGPDSSSLSPHADVVAGGPERWQMLAEGKNSDQLVDVLLEEIGSGLLREKDFFPGLGYGEAIPAFLRFDGLVENKKPSKKDVVNLLKDAWKERLAEEQKETFPDFFFNFLKPLGLPVHHAPSTAQPSTEEGTWESGARRGGGQGLSLSFLWGSHEEVTLPKLRGGLMTIDPSLDKQTVNTYMSQAFQLPESEMPEEGDEKEEAVVEILQTALERLQVIDIRRVGPREPEPAS

SEQ ID NO: 805614 - protein, 574 aa, Homo sapiens
MRAEEKYEISLLKKEKMNLLKLIDKKNEEKISLQSEVTKLRKNLAEEYLHYLSERDACKILIADLNELRYQREDMSLAQSPGIWGEDPVKLTLALKMTRQDLTRTQMELNNMKANFGDVVPRRDFEMQEKTNKDLQEQVLAGRQGQEGEDGVSQVGGQGQCPCPQLDTLRASYEEVRKEHEILMQLHMSTLKERDQFFSELQEIQRTSTPRPDWTKCKGEGSRQGPRSCLHVGPDSSSLSPHADVVAGGPERWQMLAEGKNSDQLVDVLLEEIGSGLLREKDFFPGLGYGEAIPAFLRFDGLVENKKPSKKDVVNLLKDAWKERLAEEQKETFPDFFFNFLEHRFGPSDAMAWAYTIFENIKIFHSNEVMSQFYAVLMGKRSENVYVTQKETVAQLLKEMTNADSQNEGLLTMEQFNTVLKSTFPLKTEEQIQELMEAGGWHPSSSNADLLNYRSLFMEDEEGQSEPFVQKLWEQYMDEKDEYLQQLKQELGIELHEEVTLPKLRGGLMTIDPSLDKQTVNTYMSQAFQLPESEMPEEGDEKEEAVVEILQTALERLQVIDIRRVGPREPEPAS

SEQ ID NO: 805615 - protein, 117 aa, Homo sapiens
MEDEEGQSEPFVQKLWEQYMDEKDEYLQQLKQELGIELHEEVTLPKLRGGLMTIDPSLDKQTVNTYMSQAFQLPESEMPEEGDEKEEAVVEILQTALERLQVIDIRRVGPREPEPAS

SEQ ID NO: 805616 - protein, 686 aa, Homo sapiens
MACQQSRYHSFSSASRLQPRPSGVTIDESFLTEDKSTQNRKLLQKRRTLTGQFSMGGHLSPWPTYTSGQTILQNRKPCSDDYRKRVGSCQQHPFRTAKPQYLEELENYLRKELLLLDLGTDSTQELRLQPYREIFEFFIEDFKTYKPLLSSIKNAYEGMLAHQREKIRALEPLKAKLVTVNEDCNERILAMRAEEKYEISLLKKEKMNLLKLIDKKNEEKISLQSEVTKLRKNLAEEYLHYLSERDACKILIADLNELRYQREDMSLAQSPGIWGEDPVKLTLALKMTRQDLTRTQMELNNMKANFGDVVPRRDFEMQEKTNKDLQEQVLAGRQGQEGEDGVSQVGGQGQCPCPQLDTLRASYEEVRKEHEILMQLHMSTLKERDQFFSELQEIQRTSTPRPDWTKCKGEGSRQGPRSCLHVGPDSSSLSPHADVVAGGPERWQMLAEGKNSDQLVDVLLEEIGSGLLREKDFFPGLGYGEAIPAFLRFDGLVENKKPSKKDVVNLLKDAWKERLAEEQKETFPDFFFNFLKPLGLPVHHAPSTAQPSTEEGTWESGARRGGGQGLSLSFLWGSHEEVTLPKLRGGLMTIDPSLDKQTVNTYMSQAFQLPESEMPEEGDEKEEAVVEILQTALERLQRGELSPKASRGKPNLTWRSQGSISQIPQKGTHVYSSAGWRSAGQARPLH

SEQ ID NO: 805617 - protein, 76 aa, Homo sapiens
MGPPRTQPTPWGDQLHTGVQGQPLTTQPPSCQVTKLRKNLAEEYLHYLSERDACKILIADLNELRYQREDMSLAQS

SEQ ID NO: 805618 - protein, 670 aa, Homo sapiens
MACQQSRYHSFSSASRLQPRPSGVTIDESFLTEDKSTQNRKLLQKRRTLELPAAPLSHCQAPVLGGTGKLPTQGAPPAGPGHRFHPGTKAAAHQREKIRALEPLKAKLVTVNEDCNERILAMRAEEKYEISLLKKEKMNLLKLIDKKNEEKISLQSEVTKLRKNLAEEYLHYLSERDACKILIADLNELRYQREDMSLAQSPGIWGEDPVKLTLALKMTRQDLTRTQMELNNMKANFGDVVPRRDFEMQEKTNKDLQEQVLAGRQGQEGEDGVSQVGGQGQCPCPQLDTLRASYEEVRKEHEILMQLHMSTLKERDQFFSELQEIQRTSTPRPDWTKCKDVVAGGPERWQMLAEGKNSDQLVDVLLEEIGSGLLREKDFFPGLGYGEAIPAFLRFDGLVENKKPSKKDVVNLLKDAWKERLAEEQKETFPDFFFNFLEHRFGPSDAMAWAYTIFENIKIFHSNEVMSQFYAVLMGKRSENVYVTQKETVAQLLKEMTNADSQNEGLLTMEQFNTVLKSTFPLKTEEQIQELMEAGGWHPSSSNADLLNYRSLFMEDEEGQSEPFVQKLWEQYMDEKDEYLQQLKQELGIELHEEVTLPKLRGGLMTIDPSLDKQTVNTYMSQAFQLPESEMPEEGDEKEEAVVEILQTALERLQVIDIRRVGPREPEPAS

SEQ ID NO: 805619 - protein, 101 aa, Homo sapiens
REGGELGNSAPTTDPGPVRLGHGVDLLQLGPLGGLMTIDPSLDKQTVNTYMSQAFQLPESEMPEEGDEKEEAVVEILQTALERLQVIDIRRVGPREPEPAS

SEQ ID NO: 805620 - protein, 587 aa, Homo sapiens
MACQQSRYHSFSSASRLQPRPSGVTIDESFLTEDKSTQNRKLLQKRRTLVTKLRKNLAEEYLHYLSERDACKILIADLNELRYQREDMSLAQSPGIWGEDPVKLTLALKMTRQDLTRTQMELNNMKANFGDVVPRRDFEMQEKTNKDLQEQVLAGRQGQEGEDGVSQVGGQGQCPCPQLDTLRASYEEVRKEHEILMQLHMSTLKERDQFFSELQEIQRTSTPRPDWTKCKGEGSRQGPRSCLHVGPDSSSLSPHADVVAGGPERWQMLAEGKNSDQLVDVLLEEIGSGLLREKDFFPGLGYGEAIPAFLRFDGLVENKKPSKKDVVNLLKDAWKERLAEEQKETFPDFFFNFLEHRFGPSDAMAWAYTIFENIKIFHSNEVMSQFYAVLMGKRSENVYVTQKETVAQLLKEMTNADSQNEGLLTMEQFNTVLKSTFPLKTEEQIQELMEAGGWHPSSSNADLLNYRSLFMEDEEGQSEPFVQKLWEQYMDEKDEYLQQLKQELGIELHEEVTLPKLRGGLMTIDPSLDKQTVNTYMSQAFQLPESEMPEEGDEKEEAVVEILQTALERLQVIDIRRVGPREPEPAS

SEQ ID NO: 805621 - protein, 676 aa, Homo sapiens
MATGCTLPQLPRPRVLIARLPVGHGLPAVAVPQLLVRVEITATAFRSDHRRILSHRRQEHPESQASSETKDAAHQREKIRALEPLKAKLVTVNEDCNERILAMRAEEKYEISLLKKEKMNLLKLIDKKNEEKISLQSEVTKLRKNLAEEYLHYLSERDACKILIADLNELRYQREDMSLAQSPGIWGEDPVKLTLALKMTRQDLTRTQMELNNMKANFGDVVPRRDFEMQEKTNKDLQEQVLAGRQGQEGEDGVSQVGGQGQCPCPQLDTLRASYEEVRKEHEILMQLHMSTLKERDQFFSELQEIQRTSTPRPDWTKCKGEGSRQGPRSCLHVGPDSSSLSPHADVVAGGPERWQMLAEGKNSDQLVDVLLEEIGSGLLREKDFFPGLGYGEAIPAFLRFDGLVENKKPSKKDVVNLLKDAWKERLAEEQKETFPDFFFNFLEHRFGPSDAMAWAYTIFENIKIFHSNEVMSQFYAVLMGKRSENVYVTQKETVAQLLKEMTNADSQNEGLLTMEQFNTVLKSTFPLKTEEQIQELMEAGGWHPSSSNADLLNYRSLFMEDEEGQSEPFVQKLWEQYMDEKDEYLQQLKQELGIELHEEVTLPKLRGGLMTIDPSLDKQTVNTYMSQAFQLPESEMPEEGDEKEEAVVEILQTALERLQVIDIRRVGPREPEPAS

SEQ ID NO: 805622 - protein, 797 aa, Homo sapiens
MACQQSRYHSFSSASRLQPRPSGVTIDESFLTEDKSTQNRKLLQKRRTLTGQFSMGGHLSPWPTYTSGQTILQNRKPCSDDYRKRVGSCQQHPFRTAKPQYLEELENYLRKELLLLDLGTDSTQELRLQPYREIFEFFIEDFKTYKPLLSSIKNAYEGMLAHQREKIRALEPLKAKLVTVNEDCNERILAMRAEEKYEISLLKKEKMNLLKLIDKKNEEKISLQSEVTKLRKNLAEEYLHYLSERDACKILIADLNELRYQREDMSLAQSPGIWGEDPVKLTLALKMTRQDLTRTQMELNNMKANFGDVVPRRDFEMQEKTNKDLQEQVLAGRQGQEGEDGVSQVGGQGQCPCPQLDTLRASYEEVRKEHEILMQLHMSTLKERDQFFSELQEIQRTSTPRPDWTKCKGEGSRQGPRSCLHVGPDSSSLSPHADVVAGGPERWQMLAEGKNSDQLVDVLLEEIGSGLLREKDFFPGLGYGEAIPAFLRFDGLVENKKPSKKDVVNLLKDAWKERLAEEQKETFPDFFFNFLEHRFGPSDAMAWAYTIFENIKIFHSNEVMSQFYAVLMGKRSENVYVTQKETVAQLLKEMTNADSQNEGLLTMEQFNTVLKSTFPLKTEEQIQELMEAGGWHPSSSNADLLNYRSLFMEDEEGQSEPFVQKLWEQYMDEKDEYLQQLKQELGIELHEEVTLPKLRGGLMTIDPSLDKQTVNTYMSQAFQLPESEMPEEGDEKEEAVVEILQTALERLQRGELSPKASRGKPNLTWRSQGSISQIPQKGTHVYSSAGWRSAGQARPLH

SEQ ID NO: 805623 - protein, 162 aa, Homo sapiens
MAVLAALLRSGARSRSPLLRRLVQEIRYVERSYVSKPTLKEVVIVSATRTPIGSFLGSLSLLPATKLGSIAIQGAIEKAGIPKEEVKEAYMGNVLQGGEGQAPTRQAVLGAGLPISTPCTTINKVCASGMKAIMMASQSLMCGHQIKQETGSLAKICCHVRR

SEQ ID NO: 805624 - protein, 427 aa, Homo sapiens
MAVLAALLRSGARSRSPLLRRLVQEIRYVERSYVSKPTLKEVVIVSATRTPIGSFLGSLSLLPATKLGSIAIQGAIEKAGIPKEEVKEAYMGNVLQGGEGQAPTRQAVLGAGLPISTPCTTINKVCASGMKAIMMASQSLMCGHQDVMVAGGMESMSNVPYVMNRGSTPYGGVKLEDLIVKDGLTDVYNKIHMGSCAENTAKKLNIARNEQDAYAINSYTRSKAAWEAGKFGNEVIPVTVTVKGQPDVVVKEDEEYKRVDFSKVPKLKTVFQKENGTVTAANASTLNDGAAALVLMTADAAKRLNVTPLARIVAFADAAVEPIDFPIAPVYAASMVLKDVGLKKEDIAMWEVNEAFSLVVLANIKMLEIDPQKVNINGGAVSLGHPIGMSGARIVGHLTHALKQGEYGLASICNGGGGASAMLIQKL

SEQ ID NO: 805625 - protein, 337 aa, Homo sapiens
MGNVLQGGEGQAPTRQAVLGAGLPISTPCTTINKVCASGMKAIMMASQSLMCGHQDVMVAGGMESMSNVPYVMNRGSTPYGGVKLEDLIVKDGLTDVYNKIHMGSCAENTAKKLNIARNEQDAYAINSYTRSKAAWEAGKFGNEVIPVTVTVKGQPDVVVKEDEEYKRVDFSKVPKLKTVFQKENGTVTAANASTLNDGAAALVLMTADAAKRLNVTPLARIVAFADAAVEPIDFPIAPVYAASMVLKDVGLKKEDIAMWEVNEAFSLVVLANIKMLEIDPQKVNINGGAVSLGHPIGMSGARIVGHLTHALKQGEYGLASICNGGGGASAMLIQKL

SEQ ID NO: 805626 - protein, 398 aa, Homo sapiens
CSRSDSRGPQAEVVIVSATRTPIGSFLGSLSLLPATKLGSIAIQGAIEKAGIPKEEVKEAYMGNVLQGGEGQAPTRQAVLGAGLPISTPCTTINKVCASGMKAIMMASQSLMCGHQDVMVAGGMESMSNVPYVMNRGSTPYGGVKLEDLIVKDGLTDVYNKIHMGSCAENTAKKLNIARNEQDAYAINSYTRSKAAWEAGKFGNEVIPVTVTVKGQPDVVVKEDEEYKRVDFSKVPKLKTVFQKENGTVTAANASTLNDGAAALVLMTADAAKRLNVTPLARIVAFADAAVEPIDFPIAPVYAASMVLKDVGLKKEDIAMWEVNEAFSLVVLANIKMLEIDPQKVNINGGAVSLGHPIGMSGARIVGHLTHALKQGEYGLASICNGGGGASAMLIQKL

SEQ ID NO: 805627 - protein, 403 aa, Homo sapiens
MAVLAALLRSGARSRSPLLRRLVQEIRYVERSYVSKPTLKEVVIVSATRTPIGSFLGSLSLLPATKLGSIAIQGAIEKAGIPKEEVKEAYMGNVLQGGEGQAPTRQAVLGAGLPISTPCTTINKVCASGMKAIMMASQSLMCGHQDVMVAGGMESMSNVPYVMNRGSTPYGGVKLEDLIVKDGLTDVYNKIHMGSCAENTAKKLNIARNEQDAYAINSYTRSKAAWEAGKFGNEVIPVTVTVKGQPDVVVKEDEEYKRVDFSKVPKLKTVFQKENGTVTAANASTLNDGAAALVLMTADAAKRLNVTPLARIVAFADAAVEPIDFPIAPVYAASMVLKDVGLKKEDIAMWEVNEAFSLVVLANIKMLEIDPQKVNINGGAVSLGHPIGMSGARILQLLCHFSS

SEQ ID NO: 805628 - protein, 113 aa, Homo sapiens
SRDGFWSKNRLSAPITPRDSPIFTARFYFQGLGVIILMSVTGGGNQILFVCLWNYPEVKGVNDVEEKEGITVPSLKRQLEMGSRVKWREPGKIPLNWTRSLKEEKWLSKQGTN

SEQ ID NO: 805629 - protein, 427 aa, Homo sapiens; identical to SEQ ID NO: 805624

SEQ ID NO: 805630 - protein, 427 aa, Homo sapiens; identical to SEQ ID NO: 805624

SEQ ID NO: 805631 - protein, 427 aa, Homo sapiens; identical to SEQ ID NO: 805624

SEQ ID NO: 805632 - protein, 132 aa, Homo sapiens
MTADAAKRLNVTPLARIVAFADAAVEPIDFPIAPVYAASMVLKDVGLKKEDIAMWEVNEAFSLVVLANIKMLEIDPQKVNINGGAVSLGHPIGMSGARIVGHLTHALKQGEYGLASICNGGGGASAMLIQKL

SEQ ID NO: 805633 - protein, 339 aa, Homo sapiens
MAVLAALLRSGARSRSPLLRRLVQEIRYVERSYVSKPTLKEVVIVSATRTPIGSFLGSLSLLPATKLGSIAIQGAIEKAGIPKEEVKEAYMGNVLQGGEGQAPTRQAVLGAGLPISTPCTTINKVCASGMKAIMMASQSLMCGHQDVMVAGGMESMSNVPYVMNRGSTPYGGVKLEDLIVKDGLTDVYNKIHMGSCAENTAKKLNIARNEQDAYAINSYTRSKAAWEAGKFGNEVIPVTVTVKGQPDVVVKEDEEYKRVDFSKVPKLKTVFQKENGTVTAANASTLNDGAAALVLMTADAAKRLNVTPLARIVAFADAAVEPIDFPIAPVYAASMVRTK

SEQ ID NO: 805634 - protein, 95 aa, Homo sapiens
TAVCGDLRIPCCNWDAKKGEYVFPAKKKLQEYRVLITTLITAGRFVLKNTQCIPEGLESYYAEQDSSAREKFYTVISHYNLAKQSITRSVSSRIC

SEQ ID NO: 805635 - protein, 1044 aa, Homo sapiens
MRRGGGDRTKKPKGKLRLPAAAATFSFISTDPPAWAAAAAAMPSKFSCRQLREAGQCFESFLVVRGLDMETDRERLRTIYNRDFKISFGTPAPGFSSMLYGMKIANLAYVTKTRVRFFRLDRWADVRFPEKRRMKLGSDISKHHKSLLAKIFYDRAEYLHGKHGVDVEVQGPHEARDGQLLIRLDLNRKEVLTLRLRNGGTQSVTLTHLFPLCRTPQFAFYNEDQELPCPLGPGECYELHVHCKTSFVGYFPATVLWELLGPGESGSEGAGTFYIARFLAAVAHSPLAAQLKPMTPFKRTRITGNPVVTNRIEEGERPDRAKGYDLELSMALGTYYPPPRLRQLLPMLLQGTSIFTAPKEIAEIKAQLETALKWRNYEVKLRLLLHLEELQMEHDIRHYDLESVPMTWDPVDQNPRLLTLEVPGVTESRPSVLRGDHLFALLSSETHQEDPITYKGFVHKVELDRVKLSFSMSLLSRFVDGLTFKVNFTFNRQPLRVQHRALELTGRWLLWPMLFPVAPRDVPLLPSDVKLKLYDRSLESNPEQLQAMRHIVTGTTRPAPYIIFGPPGTGKTVTLVEAIKQVVKHLPKAHILACAPSNSGADLLCQRLRVHLPSSIYRLLAPSRDIRMVPEDIKPCCNWDAKKGEYVFPAKKKLQEYRVLITTLITAGRLVSAQFPIDHFTHIFIDEAGHCMEPESLVAIAGLMEVKETGDPGGQLVLAGDPRQLGPVLRSPLTQKHGLGYSLLERLLTYNSLYKKGPDGYDPQFITKLLRNYRSHPTILDIPNQLYYEGELQACADVVDRERFCRWAGLPRQGFPIIFHGVMGKDEREGNSPSFFNPEEAATVTSYLKLLLAPSSKKGKARLSPRSVGVISPYRKQVEKIRYCITKLDRELRGLDDIKDLKVGSVEEFQGQERSVILISTVRSSQSFVQLDLDFNLGFLKNPKRFNVAVTRAKALLIIVGNPLLLGHDPDWKVFLEFCKENGGYTGCPFPAKLDLQQGQNLLQGLSKLSPSTSGPHSHDYLPQEREGEGGLSLQVEPEWRNEL

SEQ ID NO: 805636 - protein, 1003 aa, Homo sapiens
MPSKFSCRQLREAGQCFESFLVVRGLDMETDRERLRTIYNRDFKISFGTPAPGFSSMLYGMKIANLAYVTKTRVRFFRLDRWADVRFPEKRRMKLGSDISKHHKSLLAKIFYDRAEYLHGKHGVDVEVQGPHEARDGQLLIRLDLNRKEVLTLRLRNGGTQSVTLTHLFPLCRTPQFAFYNEDQELPCPLGPGECYELHVHCKTSFVGYFPATVLWELLGPGESGSEGAGTFYIARFLAAVAHSPLAAQLKPMTPFKRTRITGNPVVTNRIEEGERPDRAKGYDLELSMALGTYYPPPRLRQLLPMLLQGTSIFTAPKEIAEIKAQLETALKWRNYEVKLRLLLHLEELQMEHDIRHYDLESVPMTWDPVDQNPRLLTLEVPGVTESRPSVLRGDHLFALLSSETHQEDPITYKGFVHKVELDRVKLSFSMSLLSRFVDGLTFKVNFTFNRQPLRVQHRALELTGRWLLWPMLFPVAPRDVPLLPSDVKLKLYDRSLESNPEQLQAMRHIVTGTTRPAPYIIFGPPGTGKTVTLVEAIKQVVKHLPKAHILACAPSNSGADLLCQRLRVHLPSSIYRLLAPSRDIRMVPEDIKPCCNWDAKKGEYVFPAKKKLQEYRVLITTLITAGRLVSAQFPIDHFTHIFIDEAGHCMEPESLVAIAGLMEVKETGDPGGQLVLAGDPRQLGPVLRSPLTQKHGLGYSLLERLLTYNSLYKKGPDGYDPQFITKLLRNYRSHPTILDIPNQLYYEGELQACADVVDRERFCRWAGLPRQGFPIIFHGVMGKDEREGNSPSFFNPEEAATVTSYLKLLLAPSSKKGKARLSPRSVGVISPYRKQVEKIRYCITKLDRELRGLDDIKDLKVGSVEEFQGQERSVILISTVRSSQSFVQLDLDFNLGFLKNPKRFNVAVTRAKALLIIVGNPLLLGHDPDWKVFLEFCKENGGYTGCPFPAKLDLQQGQNLLQGLSKLSPSTSGPHSHDYLPQEREGEGGLSLQVEPEWRNEL

SEQ ID NO: 805637 - protein, 1063 aa, Homo sapiens
MSFSVFPQSFQSAACDWAFPLRNEQSRTHCLKQLYFALGSPIAFPENIKHSSDPQPESLCLWAPSCSTAGLVCPAQSDPPMPFPTRRPASLSPAFPHFPVSSASGSFGTPAPGFSSMLYGMKIANLAYVTKTRVRFFRLDRWADVRFPEKRRMKLGSDISKHHKSLLAKIFYDRAEYLHGKHGVDVEVQGPHEARDGQLLIRLDLNRKEVLTLRLRNGGTQSVTLTHLFPLCRTPQFAFYNEDQELPCPLGPGECYELHVHCKTSFVGYFPATVLWELLGPGESGSEGAGTFYIARFLAAVAHSPLAAQLKPMTPFKRTRITGNPVVTNRIEEGERPDRAKGYDLELSMALGTYYPPPRLRQLLPMLLQGTSIFTAPKEIAEIKAQLETALKWRNYEVKLRLLLHLEELQMEHDIRHYDLESVPMTWDPVDQNPRLLTLEVPGVTESRPSVLRGDHLFALLSSETHQEDPITYKGFVHKVELDRVKLSFSMSLLSRFVDGLTFKVNFTFNRQPLRVQHRALELTGRWLLWPMLFPVAPRDVPLLPSDVKLKLYDRSLESNPEQLQAMRHIVTGTTRPAPYIIFGPPGTGKTVTLVEAIKQVVKHLPKAHILACAPSNSGADLLCQRLRVHLPSSIYRLLAPSRDIRMVPEDIKPCCNWDAKKGEYVFPAKKKLQEYRVLITTLITAGRLVSAQFPIDHFTHIFIDEAGHCMEPESLVAIAGLMEVKETGDPGGQLVLAGDPRQLGPVLRSPLTQKHGLGYSLLERLLTYNSLYKKGPDGYDPQFITKLLRNYRSHPTILDIPNQLYYEGELQACADVVDRERFCRWAGLPRQGFPIIFHGVMGKDEREGNSPSFFNPEEAATVTSYLKLLLAPSSKKGKARLSPRSVGVISPYRKQVEKIRYCITKLDRELRGLDDIKDLKVGSVEEFQGQERSVILISTVRSSQSFVQLDLDFNLGFLKNPKRFNVAVTRAKALLIIVGNPLLLGHDPDWKVFLEFCKENGGYTGCPFPAKLDLQQGQNLLQGLSKLSPSTSGPHSHDYLPQEREGEGGLSLQVEPEWRNEL

SEQ ID NO: 805638 - protein, 941 aa, Homo sapiens
MRRGGGDRTKKPKGKLRLPAAAATFSFISTDPPAWAAAAAAMPSKFSCRQLREAGQCFESFLVVRGLDMETDRERLRTIYNRDFKISFGTPAPGFSSMLYGMKIANLAYVTKTRVRFFRLDRWADVRFPEKRRMKLGSDISKHHKSLLAKIFYDRAEYLHGKHGVDVEVQGPHEARDGQLLIRLDLNRKEVLTLRLRNGGTQSVTLTHLFPLCRTPQFAFYNEDQELPCPLGPGECYELHVHCKTSFVGYFPATVLWELLGPGESGSEGAGTFYIARFLAAVAHSPLAAQLKPMTPFKRTRITGNPVVTNRIEEGERPDRAKGYDLELSMALGTYYPPPRLRQLLPMLLQGTSIFTAPKEIAEIKAQLETALKWRNYEVKLRLLLHLEELQMEHDIRHYDLESVPMTWDPVDQNPRLLTLEVPGVTESRPSVLRGDHLFALLSSETHQEDPITYKGFVHKVELDRVKLSFSMSLLSRFVDGLTFKVNFTFNRQPLRVQHRALELTGRWLLWPMLFPVAPRDVPLLPSDVKLKLYDRSLESNPEQLQAMRHIVTGTTRPAPYIIFGPPGTGKTVTLVEAIKQVVKHLPKAHILACAPSNSGADLLCQRLRVHLPSSIYRLLAPSRDIRMVPEDIKPCCNWDAKKGEYVFPAKKKLQEYRVLITTLITAGRLVSAQFPIDHFTHIFIDEAGHCMEPESLVAIAGLMEVKETGDPGGQLVLAGDPRQLGPVLRSPLTQKHGLGYSLLERLLTYNSLYKKGPDGYDPQFITKLLRNYRSHPTILDIPNQLYYEGELQACADVVDRERFCRWAGLPRQGFPIIFHGVMGKDEREGNSPSFFNPEEAATVTSYLKLLLAPSSKKGKARLSPRSVGVISPYRKQVRSSVTSKGGAPPPDGTSLISRPLGRGSRSLGLCWLRISEEHQGQLPPPFVPQLPGLLPGSLLH

SEQ ID NO: 805639 - protein, 888 aa, Homo sapiens
MRRGGGDRTKKPKGKLRLPAAAATFSFISTDPPAWAAAAAAMPSKFSCRQLREAGQCFESFLVVRGLDMETDRERLRTIYNRDFKISFGTPAPGFSSMLYGMKIANLAYVTKTRVRFFRLDRWADVRFPEKRRMKLGSDISKHHKSLLAKIFYDRAEYLHGKHGVDVEVQGPHEARDGQLLIRLDLNRKEVLTLRLRNGGTQSVTLTHLFPLCRTPQFAFYNEDQELPCPLGPGECYELHVHCKTSFVGYFPATVLWELLGPGESGSEGAGTFYIARFLAAVAHSPLAAQLKPMTPFKRTRITGNPVVTNRIEEGERPDRAKGYDLELSMALGTYYPPPRLRQLLPMLLQGTSIFTAPKEIAEIKAQLETALKWRNYEVKLRLLLHLEELQMEHDIRHYDLESVPMTWDPVDQNPRLLTLEVPGVTESRPSVLRGDHLFALLSSETHQEDPITYKGFVHKVELDRVKLSFSMSLLSRFVDGLTFKVNFTFNRQPLRVQHRALELTGRWLLWPMLFPVAPRDVPLLPSDVKLKLYDRSLESNPEQLQAMRHIVTGTTRPAPYIIFGPPGTGKTVTLVEAIKQVVKHLPKAHILACAPSNSGADLLCQRLRVHLPSSIYRLLAPSRDIRMVPEDIKPCCNWDAKKGEYVFPAKKKLQEYRVLITTLITAGRLVSAQFPIDHFTHIFIDEAGHCMEPESLVAIAGLMEVKETGDPGGQLVLAGDPRQLGPVLRSPLTQKHGLGYSLLERLLTYNSLYKKGPDGYDPQFITKLLRNYRSHPTILDIPNQLYYEGELQACADVVDRERFCRWAGLPRQGFPIIFHGVMGKDEREGNSPSFFNPEEAATVTSYLKLLLAPSSKKGKARLSPRSVGVISPYRKQLPGLLPGSLLH

SEQ ID NO: 805640 - protein, 888 aa, Homo sapiens; identical to SEQ ID NO: 805639

SEQ ID NO: 805641 - protein, 888 aa, Homo sapiens; identical to SEQ ID NO: 805639

SEQ ID NO: 805642 - protein, 977 aa, Homo sapiens
MRRGGGDRTKKPKGKLRLPAAAATFSFISTDPPAWAAAAAAMPSKFSCRQLREAGQCFESFLVVRGLDMETDRERLRTIYNRDFKISFGTPAPGFSSMLYGMKIANLAYVTKTRVRFFRLDRWADVRFPEKRRMKLGSDISKHHKSLLAKIFYDRAEYLHGKHGVDVEVQGPHEARDGQLLIRLDLNRKEVLTLRLRNGGTQSVTLTHLFPLCRTPQFAFYNEDQELPCPLGPGECYELHVHCKTSFVGYFPATVLWELLGPGESGSEGAGTFYIARFLAAVAHSPLAAQLKPMTPFKRTRITGNPVVTNRIEEGERPDRAKGYDLELSMALGTYYPPPRLRQLLPMLLQGTSIFTAPKEIAEIKAQLETALKWRNYEVKLRLLLHLEELQMEHDIRHYDLESVPMTWDPVDQNPRLLTLEVPGVTESRPSVLRGDHLFALLSSETHQEDPITYKGFVHKVELDRVKLSFSMSLLSRFVDGLTFKVNFTFNRQPLRVQHRALELTGRWLLWPMLFPVAPRDVPLLPSDVKLKLYDRSLESNPEQLQAMRHIVTGTTRPAPYIIFGPPGTGKTVTLVEAIKQVVKHLPKAHILACAPSNSGADLLCQRLRVHLPSSIYRLLAPSRDIRMVPEDIKPCCNWDAKKGEYVFPAKKKLQEYRVLITTLITAGRLVSAQFPIDHFTHIFIDEAGHCMEPESLVAIAGLMEVKETGDPGGQLVLAGDPRQLGPVLRSPLTQKHGLGYSLLERLLTYNSLYKKGPDGYDPQFITKLLRNYRSHPTILDIPNQLYYEGELQACADVVDRERFCRWAGLPRQGFPIIFHGVMGKDEREGNSPSFFNPEEAATVTSYLKLLLAPSSKKGKARLSPRSVGVISPYRKQVEKIRYCITKLDRELRGLDDIKDLKVTCCSTVTPCLPCAPTCPLPETSSSFHSSPRPRPTPAALNRARALPEPLTPGDSNLRVWDGIRKPACLTNTSCHS

SEQ ID NO: 805643 - protein, 888 aa, Homo sapiens; identical to SEQ ID NO: 805639

SEQ ID NO: 805644 - protein, 818 aa, Homo sapiens
MWSPLGPGECYELHVHCKTSFVGYFPATVLWELLGPGESGSEGAGTFYIARFLAAVAHSPLAAQLKPMTPFKRTRITGNPVVTNRIEEGERPDRAKGYDLELSMALGTYYPPPRLRQLLPMLLQGTSIFTAPKEIAEIKAQLETALKWRNYEVKLRLLLHLEELQMEHDIRHYDLESVPMTWDPVDQNPRLLTLEVPGVTESRPSVLRGDHLFALLSSETHQEDPITYKGFVHKVELDRVKLSFSMSLLSRFVDGLTFKVNFTFNRQPLRVQHRALELTGRWLLWPMLFPVAPRDVPLLPSDVKLKLYDRSLESNPEQLQAMRHIVTGTTRPAPYIIFGPPGTGKTVTLVEAIKQVVKHLPKAHILACAPSNSGADLLCQRLRVHLPSSIYRLLAPSRDIRMVPEDIKPCCNWDAKKGEYVFPAKKKLQEYRVLITTLITAGRLVSAQFPIDHFTHIFIDEAGHCMEPESLVAIAGLMEVKETGDPGGQLVLAGDPRQLGPVLRSPLTQKHGLGYSLLERLLTYNSLYKKGPDGYDPQFITKLLRNYRSHPTILDIPNQLYYEGELQACADVVDRERFCRWAGLPRQGFPIIFHGVMGKDEREGNSPSFFNPEEAATVTSYLKLLLAPSSKKGKARLSPRSVGVISPYRKQVEKIRYCITKLDRELRGLDDIKDLKVGSVEEFQGQERSVILISTVRSSQSFVQLDLDFNLGFLKNPKRFNVAVTRAKALLIIVGNPLLLGHDPDWKVFLEFCKENGGYTGCPFPAKLDLQQGQNLLQGLSKLSPSTSGPHSHDYLPQEREGEGGLSLQVEPEWRNEL

SEQ ID NO: 805645 - protein, 860 aa, Homo sapiens
SSVPFGLPSGGSGFTGARRKAVFFLPPWGRCHSSQPGPTKDFEFPGSASCECYELHVHCKTSFVGYFPATVLWELLGPGESGSEGAGTFYIARFLAAVAHSPLAAQLKPMTPFKRTRITGNPVVTNRIEEGERPDRAKGYDLELSMALGTYYPPPRLRQLLPMLLQGTSIFTAPKEIAEIKAQLETALKWRNYEVKLRLLLHLEELQMEHDIRHYDLESVPMTWDPVDQNPRLLTLEVPGVTESRPSVLRGDHLFALLSSETHQEDPITYKGFVHKVELDRVKLSFSMSLLSRFVDGLTFKVNFTFNRQPLRVQHRALELTGRWLLWPMLFPVAPRDVPLLPSDVKLKLYDRSLESNPEQLQAMRHIVTGTTRPAPYIIFGPPGTGKTVTLVEAIKQVVKHLPKAHILACAPSNSGADLLCQRLRVHLPSSIYRLLAPSRDIRMVPEDIKPCCNWDAKKGEYVFPAKKKLQEYRVLITTLITAGRLVSAQFPIDHFTHIFIDEAGHCMEPESLVAIAGLMEVKETGDPGGQLVLAGDPRQLGPVLRSPLTQKHGLGYSLLERLLTYNSLYKKGPDGYDPQFITKLLRNYRSHPTILDIPNQLYYEGELQACADVVDRERFCRWAGLPRQGFPIIFHGVMGKDEREGNSPSFFNPEEAATVTSYLKLLLAPSSKKGKARLSPRSVGVISPYRKQVEKIRYCITKLDRELRGLDDIKDLKVGSVEEFQGQERSVILISTVRSSQSFVQLDLDFNLGFLKNPKRFNVAVTRAKALLIIVGNPLLLGHDPDWKVFLEFCKENGGYTGCPFPAKLDLQQGQNLLQGLSKLSPSTSGPHSHDYLPQEREGEGGLSLQVEPEWRNEL

SEQ ID NO: 805646 - protein, 870 aa, Homo sapiens
MRRGGGDRTKKPKGKLRLPAAAATFSFISTDPPAWAAAAAAMPSKFSCRQLREAGQCFESFLVVRGLDMETDRERLRTIYNRDFKISFGTPAPGFSSMLYGMKIANLAYVTKTRVRFFRLDRWADVRFPEKRRMKLGSDISKHHKSLLAKIFYDRAEYLHGKHGVDVEVQGPHEARDGQLLIRLDLNRKEVLTLRLRNGGTQSVTLTHLFPLCRTPQFAFYNEDQELPCPLGPGECYELHVHCKTSFVGYFPATVLWELLGPGESGSEGAGTFYIARFLAAVAHSPLAAQLKPMTPFKRTRITGNPVVTNRIEEGERPDRAKGYDLELSMALGTYYPPPRLRQLLPMLLQGTSIFTAPKEIAEIKAQLETALKWRNYEVKLRLLLHLEELQMEHDIRHYDLESVPMTWDPVDQNPRLLTLEVPGVTESRPSVLRGDHLFALLSSETHQEDPITYKGFVHKVELDRVKLSFSMSLLSRFVDGLTFKVNFTFNRQPLRVQHRALELTGRWLLWPMLFPVAPRDVPLLPSDVKLKLYDRSLESNPEQLQAMRHIVTGTTRPAPYIIFGPPGTGKTVTLVEAIKQVVKHLPKAHILACAPSNSGADLLCQRLRVHLPSSIYRLLAPSRDIRMVPEDIKPCCNWDAKKGEYVFPAKKKLQEYRVLITTLITAGRLVSAQFPIDHFTHIFIDEAGHCMEPESLVAIAGLMEVKETGDPGGQLVLAGDPRQLGPVLRSPLTQKHGLGYSLLERLLTYNSLYKKGPDGYDPQFITKLLRNYRSHPTILDIPNQLYYEGELQACADVVDRERFCRWAGLPRQGFPIIFHGVMGKDEREGNSPSFFNPEEAPSCIRLMAREKGTCPLLPGGENPLLHHQT

SEQ ID NO: 805647 - protein, 573 aa, Homo sapiens
MSLLSRFVDGLTFKVNFTFNRQPLRVQHRALELTGRWLLWPMLFPVAPRDVPLLPSDVKLKLYDRSLESNPEQLQAMRHIVTGTTRPAPYIIFGPPGTGKTVTLVEAIKQVVKHLPKAHILACAPSNSGADLLCQRLRVHLPSSIYRLLAPSRDIRMVPEDIKPCCNWDAKKGEYVFPAKKKLQEYRVLITTLITAGRLVSAQFPIDHFTHIFIDEAGHCMEPESLVAIAGLMEVKETGDPGGQLVLAGDPRQLGPVLRSPLTQKHGLGYSLLERLLTYNSLYKKGPDGYDPQFITKLLRNYRSHPTILDIPNQLYYEGELQACADVVDRERFCRWAGLPRQGFPIIFHGVMGKDEREGNSPSFFNPEEAATVTSYLKLLLAPSSKKGKARLSPRSVGVISPYRKQVEKIRYCITKLDRELRGLDDIKDLKVGSVEEFQGQERSVILISTVRSSQSFVQLDLDFNLGFLKNPKRFNVAVTRAKALLIIVGNPLLLGHDPDWKVFLEFCKENGGYTGCPFPAKLDLQQGQNLLQGLSKLSPSTSGPHSHDYLPQEREGEGGLSLQVEPEWRNEL

SEQ ID NO: 805648 - protein, 974 aa, Homo sapiens
MRRGGGDRTKKPKGKLRLPAAAATFSFISTDPPAWAAAAAAMPSKFSCRQLREAGQCFESFLVVRGLDMETDRERLRTIYNRDFKISFGTPAPGFSSMLYGMKIANLAYVTKTRVRFFRLDRWADVRFPEKRRMKLGSDISKHHKSLLAKIFYDRAEYLHGKHGVDVEVQGPHEARDGQLLIRLDLNRKEVLTLRLRNGGTQSVTLTHLFPLCRTPQFAFYNEDQELPCPLGPGECYELHVHCKTSFVGYFPATVLWELLGPGESGSEGAGTFYIARFLAAVAHSPLAAQLKPMTPFKRTRITGNPVVTNRIEEGERPDRAKGYDLELSMALGTYYPPPRLRQLLPMLLQGTSIFTAPKEIAEIKAQLETALKWRNYEVKLRLLLHLEELQMEHDIRHYDLESVPMTWDPVDQNPRLLTLEVPGVTESRPSVLRGDHLFALLSSETHQEDPITYKGFVHKVELDRVKLSFSMSLLSRFVDGLTFKVNFTFNRQPLRVQHRALELTGRWLLWPMLFPVAPRDVPLLPSDVKLKLYDRSLESNPEQLQAMRHIVTGTTRPAPYIIFGPPGTGKTVTLVEAIKQVVKHLPKAHILACAPSNSGADLLCQRLRVHLPSSIYRLLAPSRDIRMVPEDIKPCCNWDAKKGEYVFPAKKKLQEYRVLITTLITAGRLVSAQFPIDHFTHIFIDEAGHCMEPESLVAIAGLMEVKETGDPGGQLVLAGDPRQLGPVLRSPLTQKHGLGYSLLERLLTYNSLYKKGPDGYDPQFITKLLRNYRSHPTILDIPNQLYYEGELQACADVVDRERFCRWAGLPRQGFPIIFHGVMGKDEREGNSPSFFNPEEAATVTSYLKLLLAPSSKKGKARLSPRSVGVISPYRKQVEKIRYCITKLDRELRGLDDIKDLKVGSVEEFQGQERSVILISTVRSSQSFVQLDLDFNLGFLKNPKRFNVAVTRAKALLIIVGNPLLLGHDPDWKV

SEQ ID NO: 805649 - protein, 888 aa, Homo sapiens; identical to SEQ ID NO: 805639

SEQ ID NO: 805650 - protein, 1034 aa, Homo sapiens
MRRGGGDRTKKPKGKLRLPAAAATFSFISTDPPAWAAAAAAMPSKFSCRQLREAGQCFESFLVVRGLDMETDRERLRTIYNRDFKISFGTPAPGFSSMLYGMKIANLAYVTKTRVRFFRLDRWADVRFPEKRRMKLGSDISKHHKSLLAKIFYDRAEYLHGKHGVDVEVQGPHEARDGQLLIRLDLNRKEVLTLRLRNGGTQSVTLTHLFPLCRTPQFAFYNEDQELPCPLGPGECYELHVHCKTSFVGYFPATVLWELLGPGESGSEGAGTFYIARFLAAVAHSPLAAQLKPMTPFKRTRITGNPVVTNRIEEGERPDRAKGYDLELSMALGTYYPPPRLRQLLPMLLQGTSIFTAPKEIAEIKAQLETALKWRNYEVKLRLLLHLEELQMEHDIRHYDLESVPMTWDPVDQNPRLLTLEVPGVTESRPSVLRGDHLFALLSSETHQEDPITYKGFVHKVELDRVKLSFSMSLLSRFVDGLTFKVNFTFNRQPLRVQHRALELTGRWLLWPMLFPVAPRDVPLLPSDVKLKLYDRSLESNPEQLQAMRHIVTGTTRPAPYIIFGPPGTGKTVTLVEAIKQVVKHLPKAHILACAPSNSGADLLCQRLRVHLPSSIYRLLAPSRDIRMVPEDIKPCCNWDAKKGEYVFPAKKKLQEYRVLITTLITAGRLVSAQFPIDHFTHIFIDEAGHCMEPESLVAIAGLMEVKETGDPGGQLVLAGDPRQLGPVLRSPLTQKHGLGYSLLERLLTYNSLYKKGPDGYDPQFITKLLRNYRSHPTILDIPNQLYYEGELQACADVVDRERFCRWAGLPRQGFPIIFHGVMGKDEREGNSPSFFNPEEAATVTSYLKLLLAPSSKKGKARLSPRSVGVISPYRKQVEKIRYCITKLDRELRGLDDIKDLKVGSVEEFQGQERSVILISTVRSSQSFVQLDLDFNLGFLKNPKRFNVAVTRAKALLIIVGNPLLLGHDPDWKVFLEFCKENGGYTGCPFPAKLDLQQGQNLLQGPHSHDYLPQEREGEGGLSLQVEPEWRNEL

SEQ ID NO: 805651 - protein, 888 aa, Homo sapiens; identical to SEQ ID NO: 805639

SEQ ID NO: 805652 - protein, 280 aa, Homo sapiens
SVLLSREPAGSHPTILDIPNQLYYEGELQACADVVDRERFCRWAGLPRQGFPIIFHGVMGKDEREGNSPSFFNPEEAATVTSYLKLLLAPSSKKGKARLSPRSVGVISPYRKQVEKIRYCITKLDRELRGLDDIKDLKVGSVEEFQGQERSVILISTVRSSQSFVQLDLDFNLGFLKNPKRFNVAVTRAKALLIIVGNPLLLGHDPDWKVFLEFCKENGGYTGCPFPAKLDLQQGQNLLQGLSKLSPSTSGPHSHDYLPQEREGEGGLSLQVEPEWRNEL

SEQ ID NO: 805653 - protein, 604 aa, Homo sapiens
MRRGGGDRTKKPKGKLRLPAAAATFSFISTDPPAWAAAAAAMPSKFSCRQLREAGQCFESFLVVRGLDMETDRERLRTIYNRDFKISFGTPAPGFSSMLYGMKIANLAYVTKTRVRFFRLDRWADVRFPEKRRMKLGSDISKHHKSLLAKIFYDRAEYLHGKHGVDVEVQGPHEARDGQLLIRLDLNRKEVLTLRLRNGGTQSVTLTHLFPLCRTPQFAFYNEDQELPCPLGPGECYELHVHCKTSFVGYFPATVLWELLGPGESGSEGAGTFYIARFLAAVAHSPLAAQLKPMTPFKRTRITGNPVVTNRIEEGERPDRAKGYDLELSMALGTYYPPPRLRQLLPMLLQGTSIFTAPKEIAEIKAQLETALKWRNYEVKLRLLLHLEELQMEHDIRHYDLESVPMTWDPVDQNPRLLTLEVPGVTESRPSVLRGDHLFALLSSETHQEDPITYKGFVHKVELDRVKLSFSMSLLSRFVDGLTFKVNFTFNRQPLRVQHRALELTGRWLLWPMLFPVAPRDVPLLPSDVKLKLYDRSLESNPEQLQAMRHIVTGTTRPALTACLTLNQNPAELPLQGTGRLGEGVYNPSHSTPSPAGENDTSSC

SEQ ID NO: 805654 - protein, 455 aa, Homo sapiens
MRRGGGDRTKKPKGKLRLPAAAATFSFISTDPPAWAAAAAAMPSKFSCRQLREAGQCFESFLVVRGLDMETDRERLRTIYNRDFKISFGTPAPGFSSMLYGMKIANLAYVTKTRVRFFRLDRWADVRFPEKRRMKLGSDISKHHKSLLAKIFYDRAEYLHGKHGVDVEVQGPHEARDGQLLIRLDLNRKEVLTLRLRNGGTQSVTLTHLFPLCRTPQFAFYNEDQELPCPLGPGECYELHVHCKTSFVGYFPATVLWELLGPGESGSEGAGTFYIARFLAAVAHSPLAAQLKPMTPFKRTRITGNPVVTNRIEEGERPDRAKGYDLELSMALGTYYPPPRLRQLLPMLLQGTSIFTAPKEIAEIKAQLETALKWRNYEVKLRLLLHLEELQMEHDIRHYDLESVPMTWDPVDQNPRLLTLEVRAQIECEEGGLKPAKLEAVGRTIPDSRAEQEES

SEQ ID NO: 805655 - protein, 182 aa, Homo sapiens
MRRGGGDRTKKPKGKLRLPAAAATFSFISTDPPAWAAAAAAMPSKFSCRQLREAGQCFESFLVVRGLDMETDRERLRTIYNRDFKISFGTPAPGFSSMLYGMKIANLAYVTKTRVRFFRLDRWADVRFPEKRRMKLGSDISKHHKSLLAKIFYDRAEYLHGKHGVDVAIPWPPFQPPNGQLP

SEQ ID NO: 805656 - protein, 77 aa, Homo sapiens
DTRRPPVWECNLTITTPEGLKASQSRAGQTDGRTTDMRMCPRLCAEDRDALRQLQPSRPGPGECTLDHGSKLFFRRL

SEQ ID NO: 805657 - protein, 1267 aa, Homo sapiens
MPDSNSSLLAIGLHDLGARTEHGFSFEKSLAIVDEELEGTLAQGELNEMRTRLYLNLGLTFESLQQTALCNDYFRKSIFLAEQNHLYEDLFRARYNLGTIHWRAGQHSQAMRCLEGARECAHTMRKRFMESECCVVIAQVLQDLGDFLAAKRALKKAYRLGSQKPVQRAAICQNLQHVLAVVRLQQQLEEAEGRDPQGAMVICEQLGDLFSKAGDFPRAAEAYQKQLRFAELLDRPGAERAIIHVSLATTLGDMKDHHGAVRHYEEELRLRSGNVLEEAKTWLNIALSREEAGDAYELLAPCFQKALSCAQQAQRPQLQRQVLQHLHTVQLRLQPQEAPETETRLRELSVAEDEDEEEEAEEAAATAESEALEAGEVELSESEDDTDGLTPQLEEDEELQGHLGRRKGSKWNRRNDMGETLLHRACIEGQLRRVQDLVRQGHPLNPRDYCGWTPLHEACNYGHLEIVRFLLDHGAAVDDPGGQGCEGITPLHDALNCGHFEVAELLLERGASVTLRTRKGLSPLETLQQWVKLYRRDLDLETRQKARAMEMLLQAAASGQDPHSSQAFHTPSSLLFDPETSPPLSPCPEPPSNSTRLPEASQAHVRVSPGQAAPAMARPRRSRHGPASSSSSSEGEDSAGPARPSQKRPRCSATAQRVAAWTPGPASNREAATASTSRAAYQAAIRGVGSAQSRLGPGPPRGHSKALAPQAALIPEEECLAGDWLELDMPLTRSRRPRPRGTGDNRRPSSTSGSDSEESRPRARAKQVRLTCMQSCSAPVNAGPSSLASEPPGSPSTPRVSEPSGDSSAAGQPLGPAPPPPIRVRVQVQDHLFLIPVPHSSDTHSVAWLAEQAAQRYYQTCGLLPRLTLRKEGALLAPQDLIPDVLQSNDEVLAEVTSWDLPPLTDRYRRACQSLGQGEHQQVLQAVELQGLGLSFSACSLALDQAQLTPLLRALKLHTALRELRLAGNRLGDKCVAELVAALGTMPSLALLDLSSNHLGPEGLRQLAMGLPGQATLQSLEELDLSMNPLGDGCGQSLASLLHACPLLSTLRLQACGFGPSFFLSHQTALGSAFQDAEHLKTLSLSYNALGAPALARTLQSLPAGTLLHLELSSVAAGKGDSDLMEPVFRYLAKEGCALAHLTLSANHLGDKAVRDLCRCLSLCPSLISLDLSANPEISCASLEELLSTLQKRPQGLSFLGLSGCAVQGPLGLGLWDKIAAQLRELQLCSRRLCAEDRDALRQLQPSRPGPGECTLDHGSKLFFRRL

SEQ ID NO: 805658 - protein, 775 aa, Homo sapiens
MPSTVATSRWLSCCLNGGRPSPSALERGLSPLETLQQWVKLYRRDLDLETRQKARAMEMLLQAAASGQDPHSSQAFHTPSSLLFDPETSPPLSPCPEPPSNSTRLPEASQAHVRVSPGQAAPAMARPRRSRHGPASSSSSSEGEDSAGPARPSQKRPRCSATAQRVAAWTPGPASNREAATASTSRAAYQAAIRGVGSAQSRLGPGPPRGHSKALAPQAALIPEEECLAGDWLELDMPLTRSRRPRPRGTGDNRRPSSTSGSDSEESRPRARAKQVRLTCMQSCSAPVNAGPSSLASEPPGSPSTPRVSEPSGDSSAAGQPLGPAPPPPIRVRVQVQDHLFLIPVPHSSDTHSVAWLAEQAAQRYYQTCGLLPRLTLRKEGALLAPQDLIPDVLQSNDEVLAEVTSWDLPPLTDRYRRACQSLGQGEHQQVLQAVELQGLGLSFSACSLALDQAQLTPLLRALKLHTALRELRLAGNRLGDKCVAELVAALGTMPSLALLDLSSNHLGPEGLRQLAMGLPGQATLQSLEELDLSMNPLGDGCGQSLASLLHACPLLSTLRLQACGFGPSFFLSHQTALGSAFQDAEHLKTLSLSYNALGAPALARTLQSLPAGTLLHLELSSVAAGKGDSDLMEPVFRYLAKEGCALAHLTLSANHLGDKAVRDLCRCLSLCPSLISLDLSANPEISCASLEELLSTLQKRPQGLSFLGLSGCAVQGPLGLGLWDKIAAQLRELQLCSRRLCAEDRDALRQLQPSRPGPGECTLDHGSKLFFRRL

SEQ ID NO: 805659 - protein, 624 aa, Homo sapiens
HEGELRQLSKAKAKAQRAGQRREEAALCHQLGELLAGHGRYAEALEQHWQELQLRERADDPLGCAVAHRKIGERLAEMEDYPAALQHQHQYLELAHSLRNHTELQRAWATIGRTHLDIYDHCQSRDALLQAQAAFEKSLAIVDEELEGTLAQGELNEMRTRLYLNLGLTFESLQQTALCNDYFRKSIFLAEQNHLYEDLFRARYNLGTIHWRAGQHSQAMRCLEGARECAHTMRKRFMESECCVVIAQVLQDLGDFLAAKRALKKAYRLGSQKPVQRAAICQNLQHVLAVVRLQQQLEEAEGRDPQGAMVICEQLGDLFSKAGDFPRAAEAYQKQLRFAELLDRPGAERAIIHVSLATTLGDMKDHHGAVRHYEEELRLRSGNVLEEAKTWLNIALSREEAGDAYELLAPCFQKALSCAQQAQRPQLQRQVLQHLHTVQLRLQPQEAPETETRLRELSVAEDEDEEEEAEEAAATAESEALEAGEVELSESEDDTDGLTPQLEEDEELQGHLGRRKGSKWNRRNDMGETLLHRASVCRSHPLPLLVPPSDSRSDHGSMHRGTKKRHKTEGKPHDEIPREPATNKNKKRKTSKDEETKEEVRSKSNQDRDEEQTGSKSEKGKPHR

SEQ ID NO: 805660 - protein, 1376 aa, Homo sapiens
HEGELRQLSKAKAKAQRAGQRREEAALCHQLGELLAGHGRYAEALEQHWQELQLRERADDPLGCAVAHRKIGERLAEMEDYPAALQHQHQYLELAHSLRNHTELQRAWATIGRTHLDIYDHCQSRDALLQAQAAFEKSLAIVDEELEGTLAQGELNEMRTRLYLNLGLTFESLQQTALCNDYFRKSIFLAEQNHLYEDLFRARYNLGTIHWRAGQHSQAMRCLEGARECAHTMRKRFMESECCVVIAQVLQDLGDFLAAKRALKKAYRLGSQKPVQRAAICQNLQHVLAVVRLQQQLEEAEGRDPQGAMVICEQLGDLFSKAGDFPRAAEAYQKQLRFAELLDRPGAERAIIHVSLATTLGDMKDHHGAVRHYEEELRLRSGNVLEEAKTWLNIALSREEAGDAYELLAPCFQKALSCAQQAQRPQLQRQVLQHLHTVQLRLQPQEAPETETRLRELSVAEDEDEEEEAEEAAATAESEALEAGEVELSESEDDTDGLTPQLEEDEELQGHLGRRKGSKWNRRNDMGETLLHRACIEGQLRRVQDLVRQGHPLNPRDYCGWTPLHEACNYGHLEIVRFLLDHGAAVDDPGGQGCEGITPLHDALNCGHFEVAELLLERGASVTLRTRKGLSPLETLQQWVKLYRRDLDLETRQKARAMEMLLQAAASGQDPHSSQAFHTPSSLLFDPETSPPLSPCPEPPSNSTRLPEASQAHVRVSPGQAAPAMARPRRSRHGPASSSSSSEGEDSAGPARPSQKRPRCSATAQRVAAWTPGPASNREAATASTSRAAYQAAIRGVGSAQSRLGPGPPRGHSKALAPQAALIPEEECLAGDWLELDMPLTRSRRPRPRGTGDNRRPSSTSGSDSEESRPRARAKQVRLTCMQSCSAPVNAGPSSLASEPPGSPSTPRVSEPSGDSSAAGQPLGPAPPPPIRVRVQVQDHLFLIPVPHSSDTHSVAWLAEQAAQRYYQTCGLLPRLTLRKEGALLAPQDLIPDVLQSNDEVLAEVTSWDLPPLTDRYRRACQSLGQGEHQQVLQAVELQGLGLSFSACSLALDQAQLTPLLRALKLHTALRELRLAGNRLGDKCVAELVAALGTMPSLALLDLSSNHLGPEGLRQLAMGLPGQATLQSLEELDLSMNPLGDGCGQSLASLLHACPLLSTLRLQACGFGPSFFLSHQTALGSAFQDAEHLKTLSLSYNALGAPALARTLQSLPAGTLLHLELSSVAAGKGDSDLMEPVFRYLAKEGCALAHLTLSANHLGDKAVRDLCRCLSLCPSLISLDLSANPEISCASLEELLSTLQKRPQGLSFLGLSGCAVQGPLGLGLWDKIAAQLRELQLCSRRLCAEDRDALRQLQPSRPGPGECTLDHGSKLFFRRL

SEQ ID NO: 805661 - protein, 633 aa, Homo sapiens
MPDSNSSLLAIGLHDLGARTEHGFSFEKSLAIVDEELEGTLAQGELNEMRTRLYLNLGLTFESLQQTALCNDYFRKSIFLAEQNHLYEDLFRARYNLGTIHWRAGQHSQAMRCLEGARECAHTMRKRFMESECCVVIAQVLQDLGDFLAAKRALKKAYRLGSQKPVQRAAICQNLQHVLAVVRLQQQLEEAEGRDPQGAMVICEQLGDLFSKAGDFPRAAEAYQKQLRFAELLDRPGAERAIIHVSLATTLGDMKDHHGAVRHYEEELRLRSGNVLEEAKTWLNIALSREEAGDAYELLAPCFQKALSCAQQAQRPQLQRQVLQHLHTVQLRLQPQEAPETETRLRELSVAEDEDEEEEAEEAAATAESEALEAGEVELSESEDDTDGLTPQLEEDEELQGHLGRRKGSKWNRRNDMGETLLHRACIEGQLRRVQDLVRQGHPLNPRDYCGWTPLHEACNYGHLEIVRFLLDHGAAVDDPGGQGCEGITPLHDALNCGHFEVAELLLERGASVTLRTRKGLSPLETLQQWVKLYRRDLDLETRQKARAMEMLLQAAASGQDPHSSQAFHTPSSLLFDPETSPPLSPCPEPPSNSTRLPEASQAHVRVSPGQAAPAMARPRRSRHGPASSSPLS

SEQ ID NO: 805662 - protein, 115 aa, Homo sapiens
MPSTVATSRWLSCCLNGGRPSPSALERLHERRRPFPALPRLGRPRASARAAFPHFCSSPIPGSTVHSQLAGSALLSRASPPRASCACPPGPLLLPSPSEFILLPGPLGQKQGCRS

SEQ ID NO: 805663 - protein, 102 aa, Homo sapiens
MASTLGELDPDVPYLHERRRPFPALPRLGRPRASARAAFPHFCSSPIPGSTVHSQLAGSALLSRASPPRASCACPPGPLLLPSPSEFILLPGPLGQKQGCRS

SEQ ID NO: 805664 - protein, 440 aa, Homo sapiens
MGLGVSAEQPAGGAEGFHLHGVQENSPAQQAGLEPYFDFIITIGHSRLNKENDTLKALLKANVEKPVKLEVFNMKTMRVREVEVVPSNMWGGQGLLGASVRFCSFRRASEQVWHVLDVEPSSPAALAGLRPYTDYVVGSDQILQESEDFFTLIESHEGKPLKLMVYNSKSDSCREVTVTPNAAWGGEGSLGCGIGYGYLHRIPTQPPSYHKKPPGTPPPSALPLGAPPPDALPPGPTPEDSPSLETGSRQSDYMEALLQAPGSSMEDPLPGPGSPSHSAPDPDGLPHFMETPLQPPPPVQRVMDPGFLDVSGISLLDNSNASVWPSLPSSTELTTTAVSTSGPEDICSSSSSHERGGEATWSGSEFEVSFLDSPGAQAQADHLPQLTLPDSLTSAASPEDGLSAELLEAQAEEEPASTEGLDTGTEAEGLDSQAQISTTE

SEQ ID NO: 805665 - protein, 521 aa, Homo sapiens
MGLGVSAEQPAGGAEGFHLHGVQENSPAQQAGLEPYFDFIITIGHSRLNKENDTLKALLKANVEKPVKLEVFNMKTMRVREVEVVPSNMWGGQGLLGASVRFCSFRRASEQVWHVLDVEPSSPAALAGLRPYTDYVVGSDQILQESEDFFTLIESHEGKPLKLMVYNSKSDSCREVTVTPNAAWGGEGRYFVGLEGCRARWVGPDHWAWTSEFYGGDGGGLALGPGILRLTGISEVPFSAPLLLVVGGDSKGREGRGTSPWIEVFLAFGSLGCGIGYGYLHRIPTQPPSYHKKPPGTPPPSALPLGAPPPDALPPGPTPEDSPSLETGSRQSDYMEALLQAPGSSMEDPLPGPGSPSHSAPDPDGLPHFMETPLQPPPPVQRVMDPGFLDVSGISLLDNSNASVWPSLPSSTELTTTAVSTSGPEDICSSSSSHERGGEATWSGSEFEVSFLDSPGAQAQADHLPQLTLPDSLTSAASPEDGLSAELLEAQAEEEPASTEGLDTGTEAEGLDSQAQISTTE

SEQ ID NO: 805666 - protein, 215 aa, Homo sapiens
MGLGVSAEQPAGGAEGFHLHGVQENSPAQQAGLEPYFDFIITIGHSRLNKENDTLKALLKANVEKPVKLEVFNMKTMRVREVEVVPSNMWGGQGLLGASVRFCSFRRASEQVWHVLDVEPSSPAALAGLRPYTDYVVGSDQILQESEDFFTLIESHEGKPLKLMVYNSKSDSCRESGMWHWLWVSTPDPNSAPQLPQEATWHPTTFCSTTWCPTT

SEQ ID NO: 805667 - protein, 160 aa, Homo sapiens
MGLGVSAEQPAGGAEGFHLHGVQENSPAQQAGLEPYFDFIITIGHSRLVEFPNLPLLCLLMCVCVSSSVPQGAPVYPSLPFFLKGVPALSPLLPGLYSEPDWGPAQCSASELCGVDRGHMASWRWQQGPRPASWGMRDMRALAKGQLRVGQHWNAVDLGG

SEQ ID NO: 805668 - protein, 143 aa, Homo sapiens
DSRGLPLSPTPEDSPSLETGSRQSDYMEDYMEALLQAPGSSMEDPLPGPGSPSHSAPDPDGLPHFMETPLQPPPPVQRVMDPGFLDVSGISLLDNSNASVWPSLPSSTELTTTAVSTSGPEDICSSSSSHERGVWRAGGGWRA

SEQ ID NO: 805669 - protein, 322 aa, Homo sapiens
MGLGVSAEQPAGGAEGFHLHGVQENSPAQQAGLEPYFDFIITIGHSRLNKENDTLKALLKANVEKPVKLEVFNMKTMRVREVEVVPSNMWGGQGLLGASVRFCSFRRASEQVWHVLDVEPSSPAALAGLRPYTDYVVGSDQILQESEDFFTLIESHEGKPLKLMVYNSKSDSCREVTVTPNAAWGGEGSLGCGIGYGYLHRIPTQPPSYHKKPPGTPPPSALPLGAPPPDALPPGPTPEDSPSLETGSRQSDYMEALLQAPGSSMEDPLPGPGSPSHSAPDPDGLPHFMETPLQPPPPVQRVMDPGFLDVSGISLLDNTDSS

SEQ ID NO: 805670 - protein, 535 aa, Homo sapiens
GRGLGTSSAAPRVRSYCSRSRMRYSLVPARAGNWSPPSSGRKNVTYYPCRGLHIRATYAQHLTPRSACGPALLCLGSGEVEVKPSPEDTSRGAWGLTRGVTQHARGAPFGARTCQFVQENSPAQQAGLEPYFDFIITIGHSRLNKENDTLKALLKANVEKPVKLEVFNMKTMRVREVEVVPSNMWGGQGLLGASVRFCSFRRASEQVWHVLDVEPSSPAALAGLRPYTDYVVGSDQILQESEDFFTLIESHEGKPLKLMVYNSKSDSCREVTVTPNAAWGGEGSLGCGIGYGYLHRIPTQPPSYHKKPPGTPPPSALPLGAPPPDALPPGPTPEDSPSLETGSRQSDYMEALLQAPGSSMEDPLPGPGSPSHSAPDPDGLPHFMETPLQPPPPVQRVMDPGFLDVSGISLLDNSNASVWPSLPSSTELTTTAVSTSGPEDICSSSSSHERGGEATWSGSEFEVSFLDSPGAQAQADHLPQLTLPDSLTSAASPEDGLSAELLEAQAEEEPASTEGLDTGTEAEGLDSQAQISTTE

SEQ ID NO: 805671 - protein, 367 aa, Homo sapiens [sequence omitted]

SEQ ID NO: 805672 - protein, 302 aa, Homo sapiens
MGLGVSAEQPAGGAEGFHLHGVQENSPAQQAGLEPYFDFIITIGHSRLNKENDTLKALLKANVEKPVKLEVFNMKTMRVREVEVVPSNMWGGQGLLGASVRFCSFRRASEQVWHVLDVEPSSPAALAGLRPYTDYVVGSDQILQESEDFFTLIESHEGKPLKLMVYNSKSDSCREPPATTRSHLAPHHLLLYHLVPHHLMLYHLDPPPRTLLPWRQVPGRVTTWRPCCRHLAPPWRIPFLGLGVPATVLQTLMDFPISWRLLFSPHLQCSELWTQASWTCREFLSWTTAMPVCGPACPLPQN

SEQ ID NO: 805673 - protein, 440 aa, Homo sapiens; identical to SEQ ID NO: 805664

SEQ ID NO: 805674 - protein, 440 aa, Homo sapiens; identical to SEQ ID NO: 805664

SEQ ID NO: 805675 - protein, 440 aa, Homo sapiens; identical to SEQ ID NO: 805664

SEQ ID NO: 805676 - protein, 440 aa, Homo sapiens; identical to SEQ ID NO: 805664

SEQ ID NO: 805677 - protein, 440 aa, Homo sapiens; identical to SEQ ID NO: 805664

SEQ ID NO: 805678 - protein, 440 aa, Homo sapiens; identical to SEQ ID NO: 805664

SEQ ID NO: 805679 - protein, 440 aa, Homo sapiens; identical to SEQ ID NO: 805664

SEQ ID NO: 805680 - protein, 431 aa, Homo sapiens
MGLGVSAEQPAGGAEGFHLHGVQENSPAQQAGLEPYFDFIITIGHSRLNKENDTLKALLKANVEKPVKLEVFNMKTMRVREVEVVPSNMWGGQGLLGASVRFCSFRRASEQVWHVLDVEPSSPAALAGLRPYTDYVVGSDQILQESEDFFTLIESHEGKPLKLMVYNSKSDSCREVTVTPNAAWGGEGSLGCGIGYGYLHRIPTQPPSYHKKPPGTPPPSALPLGAPPPDALPPGPTPEDSPSLETGSRQSDYMEALLQAPGSSMEDPLPGPGSPSHSAPDPDGLPHFMETPLQPPPPVQRVMDPGFLDVSGISLLDNSNASVWPSLPSSTELTTTAVSTSGPEDICSSSSSHERGGEATWSGSEFEVSFLDSPGAQAQADHLPQLTLPDSLTSAASPEDGLSAELLEAQAEEEPASTEGSPVSSLLECRK

SEQ ID NO: 805681 - protein, 252 aa, Homo sapiens
MAENTEGDLNSNLLHAPYHTGDPQLDTAIGQWLRWDKNPKTKEQIENLLRNGMNKELRDRLCCRMTFGTAGLRSAMGAGFCYINDLTVIQSTQGMYKYLERCFSDFKQRGFVVGYDTRGQVTSSCSSQRLAKLTAAVLLAKDVPVYLFSRYVPTPFVPYAVQKLKAVAGVMITASHNRKEDNGYKVYWETGAQITSPHDKEILKCIEECVEPWNGSWNDNLVDTSPLKRDPLQDICRRYMEDLKKICFYRGS

SEQ ID NO: 805682 - protein, 132 aa, Homo sapiens
MAENTEGDLNSNLLHAPYHTGDPQLDTAIGQWLRWDKVGTWSARQTPSPPPHSLLFPVPTQRPAGCRGDGSGHRAGGSGAGRCHPPMRGVAPSDCQSRAATSASLPSAVLSIVTSLPLLYPLSFQVLSSLFL

SEQ ID NO: 805683 - protein, 150 aa, Homo sapiens
ALRCALPERGSRTPSTRSAVLVDRVAGLGTELTLTPSSRRAHGSHPLSSERQAAPTRAFCSADPLPRPPSFVPSLPSPQAQGQAVRQPRLLRAALARGAPRGRTPSPRPGPAPALQPYALTRFPASLSLPDLVFTSVGSSLVICLVPTPL

SEQ ID NO: 805684 - protein, 150 aa, Homo sapiens; identical to SEQ ID NO: 805683

SEQ ID NO: 805685 - protein, 411 aa, Homo sapiens
MRIAMPTTSHPTCFNASVCSPGGESLQSSGEGMKLRQFTQVPLTNAFVNPVIGLLHVCAHKLEGIGSGQEWKEFILLGLKIQNLWFWFTWLHFRLVPHSAVSDGNGARLRQSPSSFSHKEGPDKHHGPVSQLVTQRFHVCAIRLHLGILHQHVFSGNTMVVHFEVAIVYLIITKFGADVTNGNSWQRLMGPDFTNRYDKGMKSIAFPLSDELGKNYCMIGSLSKPTRPPFNGGHSRTVENELLGFRVIRGCGFQASKVSSMTHLCLGISANDLQVPGGHEEALLLLRSCLVKQGGQEHAQVKIQRLRPPSVHKIFKPHNFIRVSDAKLPHLLHHDGTFPDSHLITLAASEEVQVLMLEVWVVQDHVLDLSAAPGFLGAAVQDVCKQLRVEAGGIPLPAQVRVHGDDQLAAK

SEQ ID NO: 805686 - protein, 333 aa, Homo sapiens
MEAGGATGSAGLGCKLPSAFCFPGSSVAMDMFQKVEKIGEGTYGVVYKAKNRETGQLVALKKIRLDLEMEGVPSTAIREISLLKELKHPNIVRLLDVVHNERKLYLVFEFLSQDLKKYMDSTPGSELPLHLIKSYLFQLLQGVSFCHSHRVIHRDLKPQNLLINELGAIKLADFGLARAFGVPLRTYTHEVVTLWYRAPEILLGSKFYTTAVDIWSIGCIFAEMVTRKALFPGDSEIDQLFRIFRMLGTPSEDTWPGVTQLPDYKGSFPKWTRKGLEEIVPNLEPEGRDLLMQLLQYDPSQRITAKTALAHPYFSSPEPSPAARQYVLQRFRH

SEQ ID NO: 805687 - protein, 141 aa, Homo sapiens
PVYQESSKSLSTIWLQEPMMLPKPGTYYLPWEVSAGQVPDGSTLRTFGRLCLYDMIQSRVTLMAQHGSDQHQVLVCTKLVEPFHAQVGSLYIVLGELQHQQDRGSVVKARVLTCVEGMNLPLLEQAIREQRLYKQERGGSQ

SEQ ID NO: 805688 - protein, 122 aa, Homo sapiens
MLPKPGTYYLPWEVSAGQVPDGSTLRTFGRLCLYDMIQSRVTLMAQHGSDQHQVLVCTKLVEPFHAQVGSLYIVLGELQHQQDRGSVVKARVLTCVEGMNLPLLEQAIREQRLYKQERGGSQ

SEQ ID NO: 805689 - protein, 411 aa, Homo sapiens; identical to SEQ ID NO: 805685

SEQ ID NO: 805690 - protein, 455 aa, Homo sapiens
MRLLAWLIFLANWGGARAEPGKFWHIADLHLDPDYKVSKDPFQVCPSAGSQPVPDAGPWGDYLCDSPWALINSSIYAMKEIEPEPDFILWTGDDTPHVPDEKLGEAAVLEIVERLTKLIREVFPDTKVYAALGNHDFHPKNQFPAGSNNIYNQIAELWKPWLSNESIALFKKGAFYCEKLPGPSGAGRIVVLNTNLYYTSNALTADMADPGQQFQWLEDVLTDASKAGDMVYIVGHVPPGFFEKTQNKAWFREGFNEKYLKVVRKHHRVIAGQFFGHHHTDSFRMLYDDAGVPISAMFITPGVTPWKTTLPGVVNGANNPAIRVFEYDRATLSLKDMVTYFMNLSQANAQGTPRWELEYQLTEAYGVPDASAHSMHTVLDRIAGDQSTLQRYYVYNSVSYSAGVCDEACSMQHVCAMRQVDIDAYTTCLYASGTTPVPQLPLLLMALLGLCTLVL

SEQ ID NO: 805691 - protein, 455 aa, Homo sapiens; identical to SEQ ID NO: 805690

SEQ ID NO: 805692 - protein, 373 aa, Homo sapiens
MRLLAWLIFLANWGGARAEPGKFWHIADLHLDPDYKVSKDPFQVCPSAGSQPVPDAGPWGDYLCDSPWALINSSIYAMKEIEPEPDFILWTGDDTPHVPDEKLGEAAVLEIVERLTKLIREVFPDTKVYAALGNHDFHPKNQFPAGSNNIYNQIAELWKPWLSNESIALFKKGAFYCEKLPGPSGAGRIVVLNTNLYYTSNALTADMADPGQQFQWLEDVLTDASKAGDMVYIVGHVPPGFFEKTQNKAWFREGFNEKYLKVVRKHHRVIAGQFFGHHHTDSFRMLYDDAGVPISAMFITPGVTPWKTTLPGVVNGANNPAIRVFEYDRATLSLKVRSPAEARGGGWEGLKCITTFPHSQLIHLPLTTEPQEG

SEQ ID NO: 805693 - protein, 485 aa, Homo sapiens
MRLLAWLIFLANWGGARAEPEEAQGPCAQEKGKGPPPTSILASLAPGLEAGKFWHIADLHLDPDYKVSKDPFQVCPSAGSQPVPDAGPWGDYLCDSPWALINSSIYAMKEIEPEPDFILWTGDDTPHVPDEKLGEAAVLEIVERLTKLIREVFPDTKVYAALGNHDFHPKNQFPAGSNNIYNQIAELWKPWLSNESIALFKKGAFYCEKLPGPSGAGRIVVLNTNLYYTSNALTADMADPGQQFQWLEDVLTDASKAGDMVYIVGHVPPGFFEKTQNKAWFREGFNEKYLKVVRKHHRVIAGQFFGHHHTDSFRMLYDDAGVPISAMFITPGVTPWKTTLPGVVNGANNPAIRVFEYDRATLSLKDMVTYFMNLSQANAQGTPRWELEYQLTEAYGVPDASAHSMHTVLDRIAGDQSTLQRYYVYNSVSYSAGVCDEACSMQHVCAMRQVDIDAYTTCLYASGTTPVPQLPLLLMALLGLCTLVL

SEQ ID NO: 805694 - protein, 473 aa, Homo sapiens
MDNKQANKEEAQGPCAQEKGKGPPPTSILASLAPGLEAGKFWHIADLHLDPDYKVSKDPFQVCPSAGSQPVPDAGPWGDYLCDSPWALINSSIYAMKEIEPEPDFILWTGDDTPHVPDEKLGEAAVLEIVERLTKLIREVFPDTKVYAALGNHDFHPKNQFPAGSNNIYNQIAELWKPWLSNESIALFKKGAFYCEKLPGPSGAGRIVVLNTNLYYTSNALTADMADPGQQFQWLEDVLTDASKAGDMVYIVGHVPPGFFEKTQNKAWFREGFNEKYLKVVRKHHRVIAGQFFGHHHTDSFRMLYDDAGVPISAMFITPGVTPWKTTLPGVVNGANNPAIRVFEYDRATLSLKDMVTYFMNLSQANAQGTPRWELEYQLTEAYGVPDASAHSMHTVLDRIAGDQSTLQRYYVYNSVSYSAGVCDEACSMQHVCAMRQVDIDAYTTCLYASGTTPVPQLPLLLMALLGLCTLVL

SEQ ID NO: 805695 - protein, 98 aa, Homo sapiens
CLNHLGAFRMLYDDAGVPISAMFITPGVTPWKTTLPGVVNGANNPAIRVFEYDRATLSLKVRSPAEARGGGWEGLKCITTFPHSQLIHLPLTTEPQEG

SEQ ID NO: 805696 - protein, 741 aa, Homo sapiens
MLARLVSNSDLKCSACLSLPKCWDYRCEPLRPATSCSFFFFFPQDRVSLCCPGWSEVVCSRLTATPPPEFKRFSCLSLPNELRLQAHATQSANFYIFSRDGISPRWPGWSQTPDLRCPPSLASHNVRITGVSHRAQPHLSLLIMLNVFLNAVIIHQHQLIMVHRCLSLHELLSSDTKCGSGWFLGCLIKEEFKKGIVSRGVSKAKRINKERSGTSTSEKLLLSPHPPPHSRTERARSPARTVTMPERPSSRVYSPERVVASRTGARLVMGDTYPDLSLYPSSDLLPVPFHHWPRPSGIPGDAACRSQASQNRGGQSGSENRNDHFHAYTVPGPQKQILFCFNLNNLVIENHKKAKPLFSLILKIVFSFCEERVIREGICSLWDLLNAVVLSAEELRTSDVHSPLPLFLTGSNGHEFVFLLKGHEDLRQDERVMQLFGLVNTLLANDPTSLRKNLRYSETLKWQQFEKSSGFFLHLSRVVMYYILTKNYKIREPGMVTHACESQKLQRLRQGDGLSPGVQGCSELVIVPLPSSLGNESKTVSLEEKGWAWWLAPIILIFCNAKVGGSLEAQEFKTSLNNIERPHHYLFKKIKKVTGHGGPCLESQHFGRPRQVDHLRSGVRDQPGQHGETLCLLKIQKLAGRGGGHLYSRLLRRLRHENCLNLGGGGCSEPRLHHCTPGWATRVKLHLKNEITKVRKKKLSGQAWWLTCNPDTLEGYSRRIAGDQEFKTILDKKVRPCLYKK

SEQ ID NO: 805697 - protein, 151 aa, Homo sapiens
MSSFSTTTVSFLLLLAFQLLGQTRANPMYNAVSNADLMDFKNLLDHLEEKMPLEDEVVPPQVLSEPNEEAGAALSPLPEVPPWTGEVSPAQRDGGALGRGPWDSSDRSALLKSKLRALLTAPRSLRRSSCFGGRMDRIGAQSGLGCNSFRY

SEQ ID NO: 805698 - protein, 112 aa, Homo sapiens
MANLLDHLEEKMPLEDEVVPPQVLSEPNEEAGAALSPLPEVPPWTGEVSPAQRDGGALGRGPWDSSDRSALLKSKLRALLTAPRSLRRSSCFGGRMDRIGAQSGLGCNSFRY

SEQ ID NO: 805699 - protein, 234 aa, Homo sapiens
MTPVRMQHSLAGQTYAVPLIQPDLRREEAVQQMADALQYLQKVSGDIFSRGRAEPEPGAGHWREGLLGPGQDEKIKGSKKAIKVFSSAKYPAPERLQEYGSIFTGAQDPGLQRRPRHRIQSKHRPLDERALQEKLTFLLCVSTKPEPEDDAEEGLGGLPSNISSVSSLLLFNTTENLEKKYVFLGPPGWCCNKDPVMLGGRDRGEAGLMPPCPSGRERRLEQQVPENYFYVAGP

SEQ ID NO: 805700 - protein, 96 aa, Homo sapiens
KGGMRDVKAQATEDLVGAGQTFSVPFKSLHVVTFPQLRVNHEWPALTVDENGGILHGHAVGWEALVLPGSHVSIIHQHPQGIQGWGDWNGSLVKKK

SEQ ID NO: 805701 - protein, 426 aa, Homo sapiens
MEGHKAEEEVLDVLRLNVGGCIYTARRESLCRFKDSMLASMFSGRFPLKTDESGACVIDRDGRLFKYLLDYLHGEVQIPTDEQTRIALQEEADYFGIPYPYSLSDHLANEMETYSLRSNIELKKALTDFCDSYGLVCNKPTVWVLHYLNTSGASCESRIIGVYATKTDGTDAIEKQLGGRIHSKGIFKREAGNNVQYIWSYYSVAELKKMMDAFDAWEGKGVSYWRVPHELIECWTLEERPLLGSLRHMAPIRKRRLITFNEADESVNYKTGPKPVRFLGPSTSTQIKVKNSASVTVSPASAIQTSAGATANRFQSGSRRKAAQRSAPSRATALVGTGAPGHPQASPGAASAENGGTHLPPAKVLLSDKKPTPQRVIKLKRTPLCATAPCLPSPTATRQANSLKPLPGEAARALGVRTENGKNKGN

SEQ ID NO: 805702 - protein, 426 aa, Homo sapiens; identical to SEQ ID NO: 805701

SEQ ID NO: 805703 - protein, 217 aa, Homo sapiens
MMDAFDAWEGKGVSYWRVPHELIECWTLEERPLLGSLRHMAPIRKRRLITFNEADESVNYKTGPKPVRFLGPSTSTQIKVKNSASVTVSPASAIQTSAGATANRFQSGSRRKAAQRSAPSRATALVGTGAPGHPQASPGAASAENGGTHLPPAKVLLSDKKPTPQRVIKLKRTPLCATAPCLPSPTATRQANSLKPLPGEAARALGVRTENGKNKGN

SEQ ID NO: 805704 - protein, 419 aa, Homo sapiens
MEGHKAEEEVLDVLRLNVGGCIYTARRESLCRFKDSMLASMFSGRFPLKTDESGACVIDRDGRLFKYLLDYLHGEVQIPTDEQTRIALQEEADYFGIPYPYSLSDHLANEMETYSFKALTDFCDSYGLVCNKPTVWVLHYLNTSGASCESRIIGVYATKTDGTDAIEKQLGGRIHSKGIFKREAGNNVQYIWSYYSVAELKKMMDAFDAWEGKGVSYWRVPHELIECWTLEERPLLGSLRHMAPIRKRRLITFNEADESVNYKTGPKPVRFLGPSTSTQIKVKNSASVTVSPASAIQTSAGATANRFQSGSRRKAAQRSAPSRATALVGTGAPGHPQASPGAASAENGGTHLPPAKVLLSDKKPTPQRVIKLKRTPLCATAPCLPSPTATRQANSLKPLPGEAARALGVRTENGKNKGN

SEQ ID NO: 805705 - protein, 204 aa, Homo sapiens
MGLGAVPGRQAAFREGLEQAVRYAKALGCPRIHLMAGRVPQGADRIAVKAEMEAVFLENLRHAAGVLAQEDLVGLLEPINTRITDPQYFLDTPQQAAAILQKVGRPNLQLQMDIFHWQIMDGNLTGNIREFLPIVGHVQVAQVPGRGEPSSPGELNFPYLFQLLEDEGYKGFVGCEYQPRGDTVEGLSWLRSYWDRRGHPEAGQ

SEQ ID NO: 805706 - protein, 148 aa, Homo sapiens
MLKMGHAAGVLAQEDLVGLLEPINTRITDPQYFLDTPQQAAAILQKVGRPNLQLQMDIFHWQIMDGNLTGNIREFLPIVGHVQVAQVPGRGEPSSPGELNFPYLFQLLEDEGYKGFVGCEYQPRGDTVEGLSWLRSYWDRRGHPEAGQ

SEQ ID NO: 805707 - protein, 116 aa, Homo sapiens
MAPLRFSANLSWLFPELPGLPARVRAAGSSGFEAVEVAWPYAETPEALARAAREAGLRLVLINTPPGDQEKGEMGLGAVPGRQAAFREGLEQAVRYAKALGCPRYPAPPHPHPCDP

SEQ ID NO: 805708 - protein, 116 aa, Homo sapiens; identical to SEQ ID NO: 805707

SEQ ID NO: 805709 - protein, 116 aa, Homo sapiens; identical to SEQ ID NO: 805707

SEQ ID NO: 805710 - protein, 116 aa, Homo sapiens; identical to SEQ ID NO: 805707

SEQ ID NO: 805711 - protein, 116 aa, Homo sapiens; identical to SEQ ID NO: 805707

SEQ ID NO: 805712 - protein, 116 aa, Homo sapiens; identical to SEQ ID NO: 805707

SEQ ID NO: 805713 - protein, 180 aa, Homo sapiens
MDWRPGETDEGWHSQGILEEVQREPREARPPVHLPHRIHLMAGRVPQGADRIAVKAEMEAVFLENLRHAAGVLAQEDLVGLLEPINTRITDPQYFLDTPQQAAAILQKVGRPNLQLQMDIFHWQIMDGNLTGNIREFLPIVGHVQVAQVPGRGEPSSPGELNFPYLFQLLEDEGYKGFVG

SEQ ID NO: 805714 - protein, 112 aa, Homo sapiens [sequence omitted]

SEQ ID NO: 805715 - protein, 112 aa, Homo sapiens [sequence omitted]

SEQ ID NO: 805716 - protein, 112 aa, Homo sapiens [sequence omitted]

SEQ ID NO: 805717 - protein, 237 aa, Homo sapiens
MAPLRFSANLSWLFPELPGLPARVRAAGSSGFEAVEVAWPYAETPEALARAAREAGLRLVLINTPPGDQEKGEMGLGAVPGRQAAFREGLEQAVRYAKALGCPRIHLMAGRVPQGADRIAVKAEMEAVFLENLRHAAGVLAQEDLVGLLEPINTRITDPQYFLDTPQQAAAILQKDIFHWQIMDGNLTGNIREFLPIVGHVQVAQVPGRGEPSSPGELNFPYLFQLLEDEGYKGFVG

SEQ ID NO: 805718 - protein, 110 aa, Homo sapiens
MPRTPPGPASPGMAPLRFSANLSWLFPELPGLPARVRAAGSSGFEAVEVAWPYAETPEALARAAREAGLRLVLINTPPGDQEKGEMGLGAVPGRQAAFREGLEQAVFILG

SEQ ID NO: 805719 - protein, 82 aa, Homo sapiens
SEDPPSSPIIATGPSGSQLSLASRPALRPWSSASNLRHAAGVLAQVRKVETHTYLHVSVGVRRRGCTVGTAREAASLGQRNR

SEQ ID NO: 805720 - protein, 174 aa, Homo sapiens
MGLGAVPGRQAAFREGLEQAVRYAKALGCPRIHLMAGRVPQGADRIAVKAEMEAVFLENLRHAAGVLAQEDLVGLLEPINTRITDPQYFLDTPQQAAAILQKVGRPNLQLQMDIFHWQIMDGNLTGNIREFLPIVGHVQVAQVPGRGEPSSPGELNFPYLFQLLEDEGYKGFVG

SEQ ID NO: 805721 - protein, 45 aa, Homo sapiens
MGSCTDTFWKVPPYLNLNVEDWRLREVGHALYVDHLLHLRAPSPL

SEQ ID NO: 805722 - protein, 277 aa, Homo sapiens [sequence omitted]

SEQ ID NO: 805723 - protein, 116 aa, Homo sapiens; identical to SEQ ID NO: 805707

SEQ ID NO: 805724 - protein, 116 aa, Homo sapiens; identical to SEQ ID NO: 805707

SEQ ID NO: 805725 - protein, 116 aa, Homo sapiens; identical to SEQ ID NO: 805707

SEQ ID NO: 805726 - protein, 180 aa, Homo sapiens; identical to SEQ ID NO: 805713

SEQ ID NO: 805727 - protein, 247 aa, Homo sapiens
MAPLRFSANLSWLFPELPGLPARVRAAGSSGFEAVEVAWPYAETPEALARAAREAGLRLVLINTPPGDQEKGEMGLGAVPGRQAAFREGLEQAVRYAKALGCPRIHLMAGRVPQGADRIAVKAEMEAVFLENLRHAAGVLAQEDLVGLLEPINTRITDPQYFLDTPQQAAAILQKVGRPNLQLQMDIFHWQIMDGNLTGNIREFLPIVGHVQVAQVPGRGEPSSPGELNFPYLFQLLEDEGYKGFVG

SEQ ID NO: 805728 - protein, 112 aa, Homo sapiens [sequence omitted]

SEQ ID NO: 805729 - protein, 164 aa, Homo sapiens
MAPLRFSANLSWLFPELPGLPARVRAAGSSGFEAVEVAWPYAETPEALARAAREAGLRLVLINTPPGDQEKGEMGLGAVPGRQAAFREGLEQAVGSHLTEGRKTQPPITNGHIPLADHGWEPDRKHPGVPAHCWACAGGTGPRPRGAQQPRRAEFPLSVSTAGR

SEQ ID NO: 805730 - protein, 280 aa, Homo sapiens
ARTHPAGSQACALRFSANLSWLFPELPGLPARVRAAGSSGFEAVEVAWPYAETPEALARAAREAGLRLVLINTPPGDQEKGEMGLGAVPGRQAAFREGLEQAVSGHCLMGRKLSVPCKGAVARGGLVYLAAFLRLDMIHLMAGRVPQGADRIAVKAEMEAVFLENLRHAAGVLAQEDLVGLLEPINTRITDPQYFLDTPQQAAAILQKVGRPNLQLQMDIFHWQIMDGNLTGNIREFLPIVGHVQVAQVPGRGEPSSPGELNFPYLFQLLEDEGYKGFVG

SEQ ID NO: 805731 - protein, 190 aa, Homo sapiens
MSCTVYAKTQQAKFLTWQFDGEYRGDDYTATLTLGNPDLIGESVIMVAHFLQSLTHRLVLGGELVYHRRPGEEGAILTLAGKYSAVHWVATLNVGSGGAHASYYHRANEQVQVGVEFEANTRLQDTTFSFGYHLTLPQANMVFRGLVDSNWCVGAVLEKKMPPLPVTLALGAFLNHWRNRFHCGFSITVG

SEQ ID NO: 805732 - protein, 308 aa, Homo sapiens
MGNTLGLAPMGTLPRRSPRREEPLPNPGSFDELHRLCKDVFPAQMEGVKLVVNKVLSSHFQVAHTIHMSALGLPGYHLHAAYAGDWQLSPTEVFPTVVGDMDSSGSLNAQVLLLLAERLRAKAVFQTQQAKFLTWQFDGEYRGDDYTATLTLGNPDLIGESVIMVAHFLQSLTHRLVLGGELVYHRRPGEEGAILTLAGKYSAVHWVATLNVGSGGAHASYYHRANEQVQVGVEFEANTRLQDTTFSFGYHLTLPQANMVFRGLVDSNWCVGAVLEKKMPPLPVTLALGAFLNHWRNRFHCGFSITVG

SEQ ID NO: 805733 - protein, 274 aa, Homo sapiens
MGNTLGLAPMGTLPRRSPRREEPLPNPGSFDELHRLCKDVFPAQMEGVKLVVNKVLSSHFQVAHTIHMSALGLPGYHLHAAYAGDWQLSPTETQQAKFLTWQFDGEYRGDDYTATLTLGNPDLIGESVIMVAHFLQSLTHRLVLGGELVYHRRPGEEGAILTLAGKYSAVHWVATLNVGSGGAHASYYHRANEQVQVGVEFEANTRLQDTTFSFGYHLTLPQANMVFRGLVDSNWCVGAVLEKKMPPLPVTLALGAFLNHWRNRFHCGFSITVG

SEQ ID NO: 805734 - protein, 308 aa, Homo sapiens; identical to SEQ ID NO: 805732

SEQ ID NO: 805735 - protein, 308 aa, Homo sapiens; identical to SEQ ID NO: 805732

SEQ ID NO: 805736 - protein, 308 aa, Homo sapiens; identical to SEQ ID NO: 805732

SEQ ID NO: 805737 - protein, 230 aa, Homo sapiens
MGNTLGLAPMGTLPRRSPRREEPLPNPGSFDELHRLCKDVFPAQMEGVKLVVNKVLSSHFQVAHTIHMSALGLPGYHLHAAYAGDWQLSPTEVFPTVVGDMDSSGSLNAQVLLLLAERLRAKAVFQTQQAKFLTWQFDGEYRGDDYTATLTLGNPDLIGESVIMVAHFLQSLTHRLVLGGELVYHRRPGEEGAILTLAGKYSGMGRSEVVVVVGGNTKTCPIGHGLRTCT

SEQ ID NO: 805738 - protein, 308 aa, Homo sapiens; identical to SEQ ID NO: 805732

SEQ ID NO: 805739 - protein, 274 aa, Homo sapiens [sequence omitted]

SEQ ID NO: 805740 - protein, 243 aa, Homo sapiens
MGNTLGLAPMGTLPRRSPRREEPLPNPGSFDELHRLCKDVFPAQMEGVKLVVNKVLSSHFQTQQAKFLTWQFDGEYRGDDYTATLTLGNPDLIGESVIMVAHFLQSLTHRLVLGGELVYHRRPGEEGAILTLAGKYSAVHWVATLNVGSGGAHASYYHRANEQVQVGVEFEANTRLQDTTFSFGYHLTLPQANMVFRGLVDSNWCVGAVLEKKMPPLPVTLALGAFLNHWRNRFHCGFSITVG

SEQ ID NO: 805741 - protein, 308 aa, Homo sapiens; identical to SEQ ID NO: 805732

SEQ ID NO: 805742 - protein, 352 aa, Homo sapiens
MSLYCGIACRRKFFWCYRLLSTYVTKTRYLFELKEDDDACKKAQQTGAFYLFHSLAPLLQTSAHQYLAPRHSLLELERLLGKFGQDAQRIEDSVLIGCSEQQEAWFALDLGLDSSFSISASLHKPEMETELKGSFIELRKALFQLNARDASLLSTAQALLRWHDAHQFCSRSGQPTKKNVAGSKRVCPSNNIIYYPQMAPVAITLVSDGTRCLLARQSSFPKGMYSALAGFCDIGESVEETIRREVAEEVGLEVESLQYYASQHWPFPSGSLMIACHATVKPGQTEIQVNLRELETAAWFSHDEVATALKRKGPYTQQQNGTFPFWLPPKLAISHQLIKEWVEKQTCSSLPA

SEQ ID NO: 805743 - protein, 226 aa, Homo sapiens
METELKGSFIELRKALFQLNARDASLLSTAQALLRWHDAHQFCSRSGQPTKKNVAGSKRVCPSNNIIYYPQMAPVAITLVSDGTRCLLARQSSFPKGMYSALAGFCDIGESVEETIRREVAEEVGLEVESLQYYASQHWPFPSGSLMIACHATVKPGQTEIQVNLRELETAAWFSHDEVATALKRKGPYTQQQNGTFPFWLPPKLAISHQLIKEWVEKQTCSSLPA

SEQ ID NO: 805744 - protein, 235 aa, Homo sapiens
MSLYCGIACRRKFFWCYRLLSTYVTKTRYLFELKEDDDACKKAQQTGAFYLFHSLAPLLQTSAHQYLAPRHSLLELERLLGKFGQDAQRIEDSVLIGCSEQQEAWFALDLGLDSSFSISASLHKPEMETELKGSFIELRKALFQLNARDASLLSTAQALLRWHDAHQFCSRSGQPTKKNVAGSKRVCPSNNIIYYPQVKVWKRPSAEKLQKRWDWRWKACSTMHPSIGPSLVAHS

SEQ ID NO: 805745 - protein, 328 aa, Homo sapiens
MSLYCGIACRRKFFWCYRLLSTYVTKTRYLFELKEDDDACKKAQQTGAFYLFHSLAPLLQTSAHQYLAPRHSLLELERLLGKFGQDAQRIEDSVLIGCSEQQEAWFALDLGLDSSFSISASLHKPEMETELKGSFIELRKALFQLNARDASLLSTAQALLRWHDAHQFCSRSGQPTKKNVAGSKRVCPSNNIIYYPQMAPVAITLVSDGTRCLLARQSSFPKGMYSALAGFCDIGESVEETIRREVAEEVGLEVESLQYYASQHWPFPSGSLMIACHATVKPGQTEVSSHLPLYCDISFASSNLLISKYLLSTCLVQHHLDYINMCKI

SEQ ID NO: 805746 - protein, 287 aa, Homo sapiens
VRLRPTRTARRTRKVPRKEFRDLTMSLYCGIACRRKFFWCYRLLSTYVTKTRYLFELKEDDDACKKAQQTGAFYLFHSLAPLLQTSAHQYLAPRHSLLELERLLGKFGQDAQRIEDSVLIGCSEQQEAWFALDLGLDSSFSISASLHKPEMETELKGSFIELRKALFQLNARDASLLSTAQALLRWHDAHQFCSRSGQPTKKNVAGSKRVCPSNNIIYYPQIQVNLRELETAAWFSHDEVATALKRKGPYTQQQNGTFPFWLPPKLAISHQLIKEWVEKQTCSSLPA

SEQ ID NO: 805747 - protein, 405 aa, Homo sapiens
GKESSLGGSLGPGVAHCVPSPSLPHQPVPPWGSLPRGGGPPPVPLPGGLHRTLLRRGNPDNDIRPWCFVLNRDRLSWEYCDLAQCQTPTQAAPPTPVSPRLHVPLMPAQPAPPKPQPTTRTPPQSQTPGALPAKREQPPSLTRNGPLSCGQRLRKSLSSMTRVVGGLVALRGAHPYIAALYWGHSFCAGSLIAPCWVLTAAHCLQDRPAPEDLTVVLGQERRNHSCEPCQTLAVRSYRLHEAFSPVSYQHDLALLRLQEDADGSCALLSPYVQPVCLPSGAARPSETTLCQVAGWGHQFEGAEEYASFLQEAQVPFLSLERCSAPDVHGSSILPGMLCAGFLEGGTDACQGDSGGPLVCEDQAAERRLTLQGIISWGSGCGDRNKPGVYTDVAYYLAWIREHTVS

SEQ ID NO: 805748 - protein, 300 aa, Homo sapiens
MPAQPAPPKPQPTTRTPPQSQTPGALPAKREQPPSLTRNGPLSCGQRLRKSLSSMTRVVGGLVALRGAHPYIAALYWGHSFCAGSLIAPCWVLTAAHCLQDRPAPEDLTVVLGQERRNHSCEPCQTLAVRSYRLHEAFSPVSYQHDLALLRLQEDADGSCALLSPYVQPVCLPSGAARPSETTLCQVAGWGHQFEGAEEYASFLQEAQVPFLSLERCSAPDVHGSSILPGMLCAGFLEGGTDACQGDSGGPLVCEDQAAERRLTLQGIISWGSGCGDRNKPGVYTDVAYYLAWIREHTVS

SEQ ID NO: 805749 - protein, 730 aa, Homo sapiens
MRALLLLGFLLVSLESTLSIPPWEAPKEHKYKAEEHTVVLTVTGEPCHFPFQYHRQLYHKCTHKGRPGPQPWCATTPNFDQDQRWGYCLEPKKVKDHCSKHSPCQKGGTCVNMPSGPHCLCPQHLTGNHCQKEKCFEPQLLRFFHKNEIWYRTEQAAVARCQCKGPDAHCQRLASQACRTNPCLHGGRCLEVEGHRLCHCPVGYTGPFCDVDTKASCYDGRGLSYRGLARTTLSGAPCQPWASEATYRNVTAEQARNWGLGGHAFCRNPDNDIRPWCFVLNRDRLSWEYCDLAQCQTPTQAAPPTPVSPRLHVPLMPAQPAPPKPQPTTRTPPQSQTPGGEEVGGGRRSREGAGRARFRPAGRGLSVLSPCSSTALPAKREQPPSLTRNGPLSCGQRLRKSLSSMTRVVGGLVALRGAHPYIAALYWGHSFCAGSLIAPCWVLTAAHCLQDRRVPARPEPPQGRGSSVSQRSFHAAPEPVPYLLPPHPSFHAPPELPGRKLEHGIGVREQGASPERLWPGLRALPLPYPPRRPAPEDLTVVLGQERRNHSCEPCQTLAVRSYRLHEAFSPVSYQHDLALLRLQEDADGSCALLSPYVQPVCLPSGAARPSETTLCQVAGWGHQFEGAEEYASFLQEAQVPFLSLERCSAPDVHGSSILPGMLCAGFLEGGTDACQGDSGGPLVCEDQAAERRLTLQGIISWGSGCGDRNKPGVYTDVAYYLAWIREHTVS

SEQ ID NO: 805750 - protein, 547 aa, Homo sapiens
MRALLLLGFLLVSLESTLSIPPWEAPKEHKYKAEEHTVVLTVTGEPCHFPFQYHRQLYHKCTHKGRPGPQPWCATTPNFDQDQRWGYCLEPKKVKDHCSKHSPCQKGGTCVNMPSGPHCLCPQHLTGNHCQKEKCFEPQLLRFFHKNEIWYRTEQAAVARCQCKGPDAHCQRLASQACRTNPCLHGGRCLEVEGHRLCHCPVGYTGPFCDVDTKASCYDGRGLSYRGLARTTLSGAPCQPWASEATYRNVTAEQARNWGLGGHAFCRNPDNDIRPWCFVLNRDRLSWEYCDLAQCQTPTQAAPPTPVSPRLHVPLMPAQPAPPKPQPTTRTPPQSQTPGGEEVGGGRRSREGAGRARFRPAGRGLSVLSPCSSTALPAKREQPPSLTRNGPLSCGQRLRKSLSSMTRVVGGLVALRGAHPYIAALYWGHSFCAGSLIAPCWVLTAAHCLQDRRVPARPEPPQGPRLLRLPAQLPRCTRTRALPSPAPPFFPRPSGAPGEEAGTRDWGSGAGGFPRTLVARSESAASPLPSPQARTRGSDGGARPGTP

SEQ ID NO: 805751 - protein, 380 aa, Homo sapiens
MPAQPAPPKPQPTTRTPPQSQTPGALPAKREQPPSLTRNGPLSCGQRLRKSLSSMTRVVGGLVALRGAHPYIAALYWGHSFCAGSLIAPCWVLTAAHCLQDRRVPARPEPPQGPRLLRLPAQLPRCTRTRALPSPAPPFFPRPSGAPGEEAGTRDWGSGAGGFPRTLVARSESAASPLPPRRPAPEDLTVVLGQERRNHSCEPCQTLAVRSYRLHEAFSPVSYQHDLALLRLQEDADGSCALLSPYVQPVCLPSGAARPSETTLCQVAGWGHQFEGAEEYASFLQEAQVPFLSLERCSAPDVHGSSILPGMLCAGFLEGGTDACQGDSGGPLVCEDQAAERRLTLQGIISWGSGCGDRNKPGVYTDVAYYLAWIREHTVS

SEQ ID NO: 805752 - protein, 547 aa, Homo sapiens; identical to SEQ ID NO: 805750

SEQ ID NO: 805753 - protein, 750 aa, Homo sapiens
MRALLLLGFLLVSLESTLSIPPWEAPKEHKYKAEEHTVVLTVTGEPCHFPFQYHRQLYHKCTHKGRPGPQPWCATTPNFDQDQRWGYCLEPKKVKDHCSKHSPCQKGGTCVNMPSGPHCLCPQHLTGNHCQKEKCFEPQLLRFFHKNEIWYRTEQAAVARCQCKGPDAHCQRLASQACRTNPCLHGGRCLEVEGHRLCHCPVGYTGPFCDVDTKASCYDGRGLSYRGLARTTLSGAPCQPWASEATYRNVTAEQARNWGLGGHAFCRNPDNDIRPWCFVLNRDRLSWEYCDLAQCQTPTQAAPPTPVSPRLHVPLMPAQPAPPKPQPTTRTPPQSQTPGALPAKREQPPSLTRNGPLSCGQRLRKSLSSMTRVVGGLVALRGAHPYIAALYWGHSFCAGSLIAPCWVLTAAHCLQDRRVPARPEPPQGPRLLRLPAQLPRCTRTRALPSPAPPFFPRPSGAPGEEAGTRDWGSGAGGFPRTLVARSESAASPLPPRRPAPEDLTVVLGQERRNHSCEPCQTLAVRSYRLHEAFSPVSYQHDLALLRLQEDADGSCALLSPYVQPVCLPSGAARPSETTLCQVAGWGHQFEASLPMKLINGTSSPSGLLRERKGMSGFTSAWSSFVHRPGGKRCQMGCEEGSSVFAGAEEYASFLQEAQVPFLSLERCSAPDVHGSSILPGMLCAGFLEGGTDACQGDSGGPLVCEDQAAERRLTLQGIISWGSGCGDRNKPGVYTDVAYYLAWIREHTVS

SEQ ID NO: 805754 - protein, 615 aa, Homo sapiens
MRALLLLGFLLVSLESTLSIPPWEAPKEHKYKAEEHTVVLTVTGEPCHFPFQYHRQLYHKCTHKGRPGPQPWCATTPNFDQDQRWGYCLEPKKVKDHCSKHSPCQKGGTCVNMPSGPHCLCPQHLTGNHCQKEKCFEPQLLRFFHKNEIWYRTEQAAVARCQCKGPDAHCQRLASQACRTNPCLHGGRCLEVEGHRLCHCPVGYTGPFCDVDTKASCYDGRGLSYRGLARTTLSGAPCQPWASEATYRNVTAEQARNWGLGGHAFCRNPDNDIRPWCFVLNRDRLSWEYCDLAQCQTPTQAAPPTPVSPRLHVPLMPAQPAPPKPQPTTRTPPQSQTPGALPAKREQPPSLTRNGPLSCGQRLRKSLSSMTRVVGGLVALRGAHPYIAALYWGHSFCAGSLIAPCWVLTAAHCLQDRPAPEDLTVVLGQERRNHSCEPCQTLAVRSYRLHEAFSPVSYQHDLALLRLQEDADGSCALLSPYVQPVCLPSGAARPSETTLCQVAGWGHQFEGAEEYASFLQEAQVPFLSLERCSAPDVHGSSILPGMLCAGFLEGGTDACQGDSGGPLVCEDQAAERRLTLQGIISWGSGCGDRNKPGVYTDVAYYLAWIREHTVS

SEQ ID NO: 805755 - protein, 137 aa, Homo sapiens
MSGFTSAWSSFVHRPGGKRCQMGCEEGSSVFAGAEEYASFLQEAQVPFLSLERCSAPDVHGSSILPGMLCAGFLEGGTDACQGDSGGPLVCEDQAAERRLTLQGIISWGSGCGDRNKPGVYTDVAYYLAWIREHTVS

SEQ ID NO: 805756 - protein, 615 aa, Homo sapiens; identical to SEQ ID NO: 805754

SEQ ID NO: 805757 - protein, 615 aa, Homo sapiens; identical to SEQ ID NO: 805754

SEQ ID NO: 805758 - protein, 695 aa, Homo sapiens
MRALLLLGFLLVSLESTLSIPPWEAPKEHKYKAEEHTVVLTVTGEPCHFPFQYHRQLYHKCTHKGRPGPQPWCATTPNFDQDQRWGYCLEPKKVKDHCSKHSPCQKGGTCVNMPSGPHCLCPQHLTGNHCQKEKCFEPQLLRFFHKNEIWYRTEQAAVARCQCKGPDAHCQRLASQACRTNPCLHGGRCLEVEGHRLCHCPVGYTGPFCDVDTKASCYDGRGLSYRGLARTTLSGAPCQPWASEATYRNVTAEQARNWGLGGHAFCRNPDNDIRPWCFVLNRDRLSWEYCDLAQCQTPTQAAPPTPVSPRLHVPLMPAQPAPPKPQPTTRTPPQSQTPGALPAKREQPPSLTRNGPLSCGQRLRKSLSSMTRVVGGLVALRGAHPYIAALYWGHSFCAGSLIAPCWVLTAAHCLQDRRVPARPEPPQGPRLLRLPAQLPRCTRTRALPSPAPPFFPRPSGAPGEEAGTRDWGSGAGGFPRTLVARSESAASPLPPRRPAPEDLTVVLGQERRNHSCEPCQTLAVRSYRLHEAFSPVSYQHDLALLRLQEDADGSCALLSPYVQPVCLPSGAARPSETTLCQVAGWGHQFEGAEEYASFLQEAQVPFLSLERCSAPDVHGSSILPGMLCAGFLEGGTDACQGDSGGPLVCEDQAAERRLTLQGIISWGSGCGDRNKPGVYTDVAYYLAWIREHTVS

SEQ ID NO: 805759 - protein, 758 aa, Homo sapiens
MRALLLLGFLLVSLESTLSIPPWEAPKEHKYKAEEHTVVLTVTGEPCHFPFQYHRQLYHKCTHKGRPGPQPWCATTPNFDQDQRWGYCLEPKKVKDHCSKHSPCQKGGTCVNMPSGPHCLCPQHLTGNHCQKEKCFEPQLLRFFHKNEIWYRTEQAAVARCQCKGPDAHCQRLASQACRTNPCLHGGRCLEVEGHRLCHCPVGYTGPFCDVDTKASCYDGRGLSYRGLARTTLSGAPCQPWASEATYRNVTAEQARNWGLGGHAFCRNPDNDIRPWCFVLNRDRLSWEYCDLAQCQTPTQAAPPTPVSPRLHVPLMPAQPAPPKPQPTTRTPPQSQTPGGEEVGGGRRSREGAGRARFRPAGRGLSVLSPCSSTALPAKREQPPSLTRNGPLSCGQRLRKSLSSMTRVVGGLVALRGAHPYIAALYWGHSFCAGSLIAPCWVLTAAHCLQDRRVPARPEPPQGRGSSVSQRSFHAAPEPVPYLLPPHPSFHAPPELPGRKLEHGIGVREQGASPERLWPGLRALPLPYPPRRPAPEDLTVVLGQERRNHSCEPCQTLAVRSYRLHEAFSPVSYQHDLGAVGAPRGDGKRAWGPGVPASRSSPPGLALLRLQEDADGSCALLSPYVQPVCLPSGAARPSETTLCQVAGWGHQFEGAEEYASFLQEAQVPFLSLERCSAPDVHGSSILPGMLCAGFLEGGTDACQGDSGGPLVCEDQAAERRLTLQGIISWGSGCGDRNKPGVYTDVAYYLAWIREHTVS

SEQ ID NO: 805760 - protein, 547 aa, Homo sapiens; identical to SEQ ID NO: 805750

SEQ ID NO: 805761 - protein, 326 aa, Homo sapiens
MTRVVGGLVALRGAHPYIAALYWGHSFCAGSLIAPCWVLTAAHCLQDRRVPARPEPPQGPRLLRLPAQLPRCTRTRALPSPAPPFFPRPSGAPGEEAGTRDWGSGAGGFPRTLVARSESAASPLPPRRPAPEDLTVVLGQERRNHSCEPCQTLAVRSYRLHEAFSPVSYQHDLALLRLQEDADGSCALLSPYVQPVCLPSGAARPSETTLCQVAGWGHQFEGAEEYASFLQEAQVPFLSLERCSAPDVHGSSILPGMLCAGFLEGGTDACQGDSGGPLVCEDQAAERRLTLQGIISWGSGCGDRNKPGVYTDVAYYLAWIREHTVS

SEQ ID NO: 805762 - protein, 547 aa, Homo sapiens; identical to SEQ ID NO: 805750

SEQ ID NO: 805763 - protein, 137 aa, Homo sapiens; identical to SEQ ID NO: 805755

SEQ ID NO: 805764 - protein, 125 aa, Homo sapiens [sequence omitted]

SEQ ID NO: 805765 - protein, 365 aa, Homo sapiens
MTWAEVASPQRGCGAGPAPREFPKARKPSRAPLAMETVISSDSSPAVENEHPQETPESNNSVYTSFMKSHRCYDLIPTSSKLVVFDTSLQVKKAFFALVTNGVRAAPLWDSKKQSFVGMLTITDFINILHRYYKSALVQIYELEEHKIETWREVYLQDSFKPLVCISPNASLFDAVSSLIRNKIHRLPVIDPESGNTLYILTHKRILKFLKLFITEFPKPEFMSKSLEELQIGTYANIAMVRTTTPVYVALGIFVQHRVSALPVVDEKGRVVDIYSKFDVINLAAEKTYNNLDVSVTKALQHRSHYFEGVLKCYLHETLETIINRLVEAEVHRLVVVDENDVVKGIVSLSDILQALVLTGGEKKP

SEQ ID NO: 805766 - protein, 340 aa, Homo sapiens
MMRARAPLAMETVISSDSSPAVENEHPQETPESNNSVYTSFMKSHRCYDLIPTSSKLVVFDTSLQVKKAFFALVTNGVRAAPLWDSKKQSFVGMLTITDFINILHRYYKSALVQIYELEEHKIETWREVYLQDSFKPLVCISPNASLFDAVSSLIRNKIHRLPVIDPESGNTLYILTHKRILKFLKLFITEFPKPEFMSKSLEELQIGTYANIAMVRTTTPVYVALGIFVQHRVSALPVVDEKGRVVDIYSKFDVINLAAEKTYNNLDVSVTKALQHRSHYFEGVLKCYLHETLETIINRLVEAEVHRLVVVDENDVVKGIVSLSDILQALVLTGGEKKP

SEQ ID NO: 805767 - protein, 365 aa, Homo sapiens; identical to SEQ ID NO: 805765

SEQ ID NO: 805768 - protein, 299 aa, Homo sapiens
MKSHRCYDLIPTSSKLVVFDTSLQVKKAFFALVTNGVRAAPLWDSKKQSFVGMLTITDFINILHRYYKSALVQIYELEEHKIETWREVYLQDSFKPLVCISPNASLFDAVSSLIRNKIHRLPVIDPESGNTLYILTHKRILKFLKLFITEFPKPEFMSKSLEELQIGTYANIAMVRTTTPVYVALGIFVQHRVSALPVVDEKGRVVDIYSKFDVINLAAEKTYNNLDVSVTKALQHRSHYFEGVLKCYLHETLETIINRLVEAEVHRLVVVDENDVVKGIVSLSDILQALVLTGGEKKP

SEQ ID NO: 805769 - protein, 299 aa, Homo sapiens; identical to SEQ ID NO: 805768

SEQ ID NO: 805770 - protein, 336 aa, Homo sapiens
RDRVAMETVISSDSSPAVENEHPQETPESNNSVYTSFMKSHRCYDLIPTSSKLVVFDTSLQVKKAFFALVTNGVRAAPLWDSKKQSFVGMLTITDFINILHRYYKSALVQIYELEEHKIETWREVYLQDSFKPLVCISPNASLFDAVSSLIRNKIHRLPVIDPESGNTLYILTHKRILKFLKLFITEFPKPEFMSKSLEELQIGTYANIAMVRTTTPVYVALGIFVQHRVSALPVVDEKGRVVDIYSKFDVINLAAEKTYNNLDVSVTKALQHRSHYFEGVLKCYLHETLETIINRLVEAEVHRLVVVDENDVVKGIVSLSDILQALVLTGGEKKP

SEQ ID NO: 805771 - protein, 381 aa, Homo sapiens
MTWAEVASPQRGCGAGPAPREFPKARKPSRAPLAMETVISSDSSPAVENEHPQETPESNNSVYTSFMKSHRCYDLIPTSSKLVVFDTSLQSCPCGFAFMIITVLAQVKKAFFALVTNGVRAAPLWDSKKQSFVGMLTITDFINILHRYYKSALVQIYELEEHKIETWREVYLQDSFKPLVCISPNASLFDAVSSLIRNKIHRLPVIDPESGNTLYILTHKRILKFLKLFITEFPKPEFMSKSLEELQIGTYANIAMVRTTTPVYVALGIFVQHRVSALPVVDEKGRVVDIYSKFDVINLAAEKTYNNLDVSVTKALQHRSHYFEGVLKCYLHETLETIINRLVEAEVHRLVVVDENDVVKGIVSLSDILQALVLTGGEKKP

SEQ ID NO: 805772 - protein, 328 aa, Homo sapiens
MTWAEVASPQRDVGRGLPQESFLKRGNQAGRLLQWRRSFLQIAPQLWKMSILKVKKAFFALVTNGVRAAPLWDSKKQSFVGMLTITDFINILHRYYKSALVQIYELEEHKIETWREVYLQDSFKPLVCISPNASLFDAVSSLIRNKIHRLPVIDPESGNTLYILTHKRILKFLKLFITEFPKPEFMSKSLEELQIGTYANIAMVRTTTPVYVALGIFVQHRVSALPVVDEKGRVVDIYSKFDVINLAAEKTYNNLDVSVTKALQHRSHYFEGVLKCYLHETLETIINRLVEAEVHRLVVVDENDVVKGIVSLSDILQALVLTGGEKKP

SEQ ID NO: 805773 - protein, 247 aa, Homo sapiens
MLTITDFINILHRYYKSALVQIYELEEHKIETWREVYLQDSFKPLVCISPNASLFDAVSSLIRNKIHRLPVIDPESGNTLYILTHKRILKFLKLFITEFPKPEFMSKSLEELQIGTYANIAMVRTTTPVYVALGIFVQHRVSALPVVDEKGRVVDIYSKFDVINLAAEKTYNNLDVSVTKALQHRSHYFEGVLKCYLHETLETIINRLVEAEVHRLVVVDENDVVKGIVSLSDILQALVLTGGEKKP

SEQ ID NO: 805774 - protein, 365 aa, Homo sapiens; identical to SEQ ID NO: 805765

SEQ ID NO: 805775 - protein, 299 aa, Homo sapiens; identical to SEQ ID NO: 805768

SEQ ID NO: 805776 - protein, 247 aa, Homo sapiens; identical to SEQ ID NO: 805773

SEQ ID NO: 805777 - protein, 333 aa, Homo sapiens
MRIRGRVDTAATTEGGAPLAMETVISSDSSPAVVMKSHRCYDLIPTSSKLVVFDTSLQVKKAFFALVTNGVRAAPLWDSKKQSFVGMLTITDFINILHRYYKSALVQIYELEEHKIETWREVYLQDSFKPLVCISPNASLFDAVSSLIRNKIHRLPVIDPESGNTLYILTHKRILKFLKLFITEFPKPEFMSKSLEELQIGTYANIAMVRTTTPVYVALGIFVQHRVSALPVVDEKGRVVDIYSKFDVINLAAEKTYNNLDVSVTKALQHRSHYFEGVLKCYLHETLETIINRLVEAEVHRLVVVDENDVVKGIVSLSDILQALVLTGGEKKP

SEQ ID NO: 805778 - protein, 270 aa, Homo sapiens
LVIQRIPAARLFYGIVRSKRFVGMLTITDFINILHRYYKSALVQIYELEEHKIETWREVYLQDSFKPLVCISPNASLFDAVSSLIRNKIHRLPVIDPESGNTLYILTHKRILKFLKLFITEFPKPEFMSKSLEELQIGTYANIAMVRTTTPVYVALGIFVQHRVSALPVVDEKGRVVDIYSKFDVINLAAEKTYNNLDVSVTKALQHRSHYFEGVLKCYLHETLETIINRLVEAEVHRLVVVDENDVVKGIVSLSDILQALVLTGGEKKP

SEQ ID NO: 805779 - protein, 106 aa, Homo sapiens
PPLSVVDEKGQMVDIYSKFDVINLAAEKTYNNLDVSVTKALQHRSHYFEGVLKCYLHETLETIINRLVEAEVHRLVVVDENDVVKGIVSLSDILQALVLTGGEKKP

SEQ ID NO: 805780 - protein, 365 aa, Homo sapiens; identical to SEQ ID NO: 805765

SEQ ID NO: 805781 - protein, 365 aa, Homo sapiens; identical to SEQ ID NO: 805765

SEQ ID NO: 805782 - protein, 331 aa, Homo sapiens
METVISSDSSPAVENEHPQETPESNNSVYTSFMKSHRCYDLIPTSSKLVVFDTSLQVKKAFFALVTNGVRAAPLWDSKKQSFVGMLTITDFINILHRYYKSALVQIYELEEHKIETWREVYLQDSFKPLVCISPNASLFDAVSSLIRNKIHRLPVIDPESGNTLYILTHKRILKFLKLFITEFPKPEFMSKSLEELQIGTYANIAMVRTTTPVYVALGIFVQHRVSALPVVDEKGRVVDIYSKFDVINLAAEKTYNNLDVSVTKALQHRSHYFEGVLKCYLHETLETIINRLVEAEVHRLVVVDENDVVKGIVSLSDILQALVLTGGEKKP

SEQ ID NO: 805783 - protein, 249 aa, Homo sapiens
ELCLGRGLACIRKEGAGCGKMAAQPLRHRSRCATPPRGDFCGGTERAIDQASFTTSMEWDTQVVKGSSPLGPAGLGAEEPAAGPQLPSWLQPERCAVFQCAQCHAVLADSVHLAWDLSRSLGAVVFSRVTNNVVLEAPFLVGIEGSLKGSTYNLLFCGSCGIPVGFHLYSTHAALAALRGHFCLSSDKMVCYLLKTKAIVNASEMDIQNVPLSEKIAELKEKIVLTHNRLKSLMKILSEVTPDQSKPEN

SEQ ID NO: 805784 - protein, 69 aa, Homo sapiens
SCAWGGAWRVFERKAPAAGRWRLSRCGIAHVVQRRPGGTFVVALRGRLTKLLLRPVAVPRGRGLLQSYK

SEQ ID NO: 805785 - protein, 249 aa, Homo sapiens; identical to SEQ ID NO: 805783

SEQ ID NO: 805786 - protein, 208 aa, Homo sapiens
ELCLGRGLACIRKEGAGCGKMAAQPLRHRSRCATPPRGDFCGGTERAIDQASFTTSMEWDTQVVKGSSPLGPAGLGAEEPAAGPQLPSWLQPERCAVFQCAQCHAVLADSVHLAWDLSRSLGAVVFSRVTNNVVLEAPFLVGIEGSLKGSYLLKTKAIVNASEMDIQNVPLSEKIAELKEKIVLTHNRLKSLMKILSEVTPDQSKPEN

SEQ ID NO: 805787 - protein, 199 aa, Homo sapiens
MEDAAAPGRTEGVLERQGAPPAAGQGGALVELTPTPGGLALVSPYHTHRAGDPLDLVALAEQVQKADEFIRANATNKLTVIAEQIQHLQEQARKVLEDAHRDANLHHVACNIVKKPGNIYYLYKRESGQQYFSIISPKEWGTSCPHDFLGAYKLQHDLSWTPYEDIEKQDAKISMMDTLLSQSVALPPCTEPNFQGLTH

SEQ ID NO: 805788 - protein, 146 aa, Homo sapiens
SYSHSPGSGEDKALSWRTPPRRGGPRGSLKGKERRQLQAREVLEDAHRDANLHHVACNIVKKPGNIYYLYKRESGQQYFSIISPKEWGTSCPHDFLGAYKLQHDLSWTPYEDIEKQDAKISMMDTLLSQSVALPPCTEPNFQGLTH

SEQ ID NO: 805789 - protein, 199 aa, Homo sapiens; identical to SEQ ID NO: 805787

SEQ ID NO: 805790 - protein, 175 aa, Homo sapiens
SYSHSPGSGEDKALSWRTPPRRGGPRGSLKGKERRQLQAREADEFIRANATNKLTVIAEQIQHLQEQARKVLEDAHRDANLHHVACNIVKKPGNIYYLYKRESGQQYFSIISPKEWGTSCPHDFLGAYKLQHDLSWTPYEDIEKQDAKISMMDTLLSQSVALPPCTEPNFQGLTH

SEQ ID NO: 805791 - protein, 972 aa, Homo sapiens
MEYIFPNTGVLWSWLINILCNRRIVWFTSSQLPRGPPASSGGHSFHTLRERSESRLFVESYAAAWQPPGTSGGASCCSSLSAQVMSSEFLAELHWEDGFAIPVANEENKLLEDQLSKLKDERASLQDELREYEERINSMTSHFKNVKQELSITQSLCKARERETESEEHFKAIAQRELGRVKDEIQRLENEMASILEKKSDKENGIFKATQKLDGLKCQMNWDQQALEAWLEESAHKDSDALTLQKYAQQDDNKIRALTLQLERLTLECNQKRKILDNELTETISAQLELDKAAQDFRKIHNERQELIKQWENTIEQMQKRDGDIDNCALELARIKQETREKENLVKEKIKFLESEIGNNTEFEKRISVADRKLLKCRTAYQDHETSRIQLKGELDSLKATVNRTSSDLEALRKNISKIKKDIHEETARLQKTKNHNEIIQTKLKEITEKTMSVEEKATNLEDMLKEEEKDVKEVDVQLNLIKGVLFKKAQELQTETMKEKAVLSEIEGTRSSLKHLNHQLQKLDFETLKQQEIMYSQDFHIQQVERRMSRLKGEINSEEKQALEAKIVELRKSLEEKKSTCGLLETQIKKLHNDLYFIKKAHSKNSDEKQSLMTKINELNLFIDRSEKELDKAKGFKQDLMIEDNLLKLEVKRTREMLHSKAEEVLSLEKRKQQLYTAMEERTEEIKVHKTMLASQIRYVDQERENISTEFRERLSKIEKLKNRYEILTVVMLPPEGEEEKTQAYYVIKVMKYELKIQLEEQKRAVDEKYRYKQRQIRELQEDIQSMENTLDVIEHLANNVKEKLSEKQAYSFQLSKETEEQKPKLERVTKQCAKLTKEIRLLKDTKDETMEEQDIKLREMKQFHKVIDEMLVDIIEENTEIRIILQTYFQQSGLELPTASTKGSRQSSRSPSHTSLSARSSRSTSTSTSQSSIKVLELKFPASSSLVGSPSRPSSASSSSSNVKSKKSSK

SEQ ID NO: 805792 - protein, 981 aa, Homo sapiens
RAPPAIAAALCRCLGLTRVLLTRCTRRRIFALYLLYPFAVMSSEFLAELHWEDGFAIPVANEENKLLEDQLSKLKDERASLQDELREYEERINSMTSHFKNVKQELSITQSLCKARERETESEEHFKAIAQRELGRVKDEIQRLENEMASILEKKSDKENGIFKATQKLDGLKCQMNWDQQALEAWLEESAHKDSDALTLQKYAQQDDNKIRALTLQLERLTLECNQKRKILDNELTETISAQLELDKAAQDFRKIHNERQELIKQWENTIEQMQKRDGDIDNCALELARIKQETREKENLVKEKIKFLESEIGNNTEFEKRISVADRKLLKCRTAYQDHETSRIQLKGELDSLKATVNRTSSDLEALRKNISKIKKDIHEETARLQKTKNHNEIIQTKLKEITEKTMSVEEKATNLEDMLKEEEKDVKEVDVQLNLIKGVLFKKAQELQTETMKEKAVLSEIEGTRSSLKHLNHQLQKLDFETLKQQEIMYSQDFHIQQVERRMSRLKGEINSEEKQALEAKIVELRKSLEEKKSTCGLLETQIKKLHNDLYFIKKAHSKNSDEKQSLMTKINELNLFIDRSEKELDKAKGFKQDLMIEDNLLKLEVKRTREMLHSKAEEVLSLEKRKQQLYTAMEERTEEIKVHKTMLASQIRYVDQERENISTEFRERLSKIEKLKNRYEILTVVMLPPEGEEEKTQAYYVIKAAQEKEELQREGDCLDAKINKAEKEIYALENTLQVLNSCNNNYKQSFKKVTPSSDEYELKIQLEEQKRAVDEKYRYKQRQIRELQEDIQSMENTLDVIEHLANNVKEKLSEKQAYSFQLSKETEEQKPKLERVTKQCAKLTKEIRLLKDTKDETMEEQDIKLREMKQFHKVIDEMLVDIIEENTEIRIILQTYFQQSGLELPTASTKGSRQSSRSPSHTSLSARSSRSTSTSTSQSSIKVLELKFPASSSLVGSPSRPSSASSSSSNVKSKKSSK

SEQ ID NO: 805793 - protein, 91 aa, Homo sapiens
MQENLAPWGELATDNIILTVPTTNLQALKDPEPVLRLWDEMMQAVARLAAEPFPFRRPERIVADVQISAGGCSQGILPERADTQGLTDRLS

SEQ ID NO: 805794 - protein, 191 aa, Homo sapiens
ENGNLEKSCLAKLRVDGAAFLQIPAEGVPAYISLHRLLRKMLRGSGLPAVSQENPVASDSYEAAVLSLATGLAHSGTDCSQLAQGLGTWTCSSSLYPSKHPITVEINGINPGNNDCWVSTGLYLLEGQNAEVSLSEAAASAGLRVRSEHPHLPPLKTVELCHSHPLSSSSSWQCCQEYRDGLFCPFYRFYR

SEQ ID NO: 805795 - protein, 140 aa, Homo sapiens
MDRTERSVSCLWGGLLYVIVPKGSQLGPVPVTIRGAVPAPYYKLGKTSLEEWKRQMQENLAPWGELATDNIILTVPTTNLQALKDPEPVLRLWDEMMQAVARLAAEPFPFRRPERIVADVQISAGGCSQGILPERADTRD

SEQ ID NO: 805796 - protein, 140 aa, Homo sapiens; identical to SEQ ID NO: 805795

SEQ ID NO: 805797 - protein, 311 aa, Homo sapiens
ENGNLEKSCLAKLRVDGAAFLQIPAEGVPAYISLHRLLRKMLRGSGLPAVSQENPVASDSYEAAVLSLATGLAHSGTDCSQLAQGLGTWTCSSSLYPSKHPITVEINGINPGNNDCWVSTGLYLLEGQNAEVSLSEAAASAGLRVQIGCHTDDLTKARKLSRAPVVTHQCWMDRTERSVSCLWGGLLYVIVPKGSQLGPVPVTIRGAVPAPYYKLGKTSLEEWKRQMQENLAPWGELATDNIILTVPTTNLQALKDPEPVLRLWDEMMQAVARLAAEPFPFRRPERIVADVQISAGGCSQGILPERADTRD

SEQ ID NO: 805798 - protein, 111 aa, Homo sapiens
LQIPAEGVPAYISLHRLLRKMLRGSGLPAVSQENPVASDSYEAAVLSLATGLAHSGTDCSQLAQGLGTWTCSSSLYPSKHPITVEINGINPGMKTGESAQNIKDVGESGIG

SEQ ID NO: 805799 - protein, 120 aa, Homo sapiens
RPRPLGSIAAQEGLEQLLRLSTPRATLPGARSRPQAHGHVGPQESQSSVGAGFPIRVLRRERGPLLREPHRARPPAASVSLATGTRPGLTPLLPSYWARTPGPAPSRLISTYRGGDRMAT

SEQ ID NO: 805800 - protein, 67 aa, Homo sapiens
RVVWWRAGHMGWNDEVRPQRRPPSSAAPSSCLLGLTPSSGHKDSAPPTPAALAPALEGAHFDLSEIV

SEQ ID NO: 805801 - protein, 105 aa, Homo sapiens
AAAGTGRAARRGPSPPSERSAPPSPPTFNGAGARLRPPAVGSSVQSRVESPVPALVDLCSRKGGCRGSAPGQDRCLSGPSVCILGDVGADLVVSWFMTPKRAGGG

SEQ ID NO: 805802 - protein, 101 aa, Homo sapiens
RAAARVGATRGPSRVRRRRGAPGRPGQLMVVAETSQGSWSAPTSPSTSCPPPNTTTTLAPLPHDRLDPPACQPVSVLHHWHMDCVCHGCDEPPCMPCGELV

SEQ ID NO: 805803 - protein, 271 aa, Homo sapiens
MTAWILLPVSLSAFSITGIWTVYAMAVMNHHVCPVENWSYNESCPPDPAEQGGPKTCCTLDDVPLISKCGSYPPESCLFSLIGNMGAFMVALICLLRYGQLLEQSRHSWVNTTALITGCTNAAGLLVVGNFQVDHARSLHYVGAGVAFPAGLLFVCLHCALSYQGATAPLDLAVAYLRSVLAVIAFITLVLSGVFFVHESSQLQHGAALCEWVCVIDILIFYGTFSYEFGAVSSDTLVAALQPTPGRACKSSGSSSTSTHLNCAPESIAMI

SEQ ID NO: 805804 - protein, 271 aa, Homo sapiens; identical to SEQ ID NO: 805803

SEQ ID NO: 805805 - protein, 187 aa, Homo sapiens
MGAFMVALICLLRYGQLLEQSRHSWVNTTALITGCTNAAGLLVVGNFQVDHARSLHYVGAGVAFPAGLLFVCLHCALSYQGATAPLDLAVAYLRSVLAVIAFITLVLSGVFFVHESSQLQHGAALCEWVCVIDILIFYGTFSYEFGAVSSDTLVAALQPTPGRACKSSGSSSTSTHLNCAPESIAMI

SEQ ID NO: 805806 - protein, 271 aa, Homo sapiens; identical to SEQ ID NO: 805803

SEQ ID NO: 805807 - protein, 187 aa, Homo sapiens; identical to SEQ ID NO: 805805

SEQ ID NO: 805808 - protein, 187 aa, Homo sapiens; identical to SEQ ID NO: 805805

SEQ ID NO: 805809 - protein, 224 aa, Homo sapiens
MRDPGSSHKSVACLLRSRCSKCGSYPPESCLFSLIGNMGAFMVALICLLRYGQLLEQSRHSWVNTTALITGCTNAAGLLVVGNFQVDHARSLHYVGAGVAFPAGLLFVCLHCALSYQGATAPLDLAVAYLRSVLAVIAFITLVLSGVFFVHESSQLQHGAALCEWVCVIDILIFYGTFSYEFGAVSSDTLVAALQPTPGRACKSSGSSSTSTHLNCAPESIAMI

SEQ ID NO: 805810 - protein, 187 aa, Homo sapiens; identical to SEQ ID NO: 805805

SEQ ID NO: 805811 - protein, 218 aa, Homo sapiens
MYALWRTGPTTSPALLTLLSKGVPRPAAPWTMSPSSVALICLLRYGQLLEQSRHSWVNTTALITGCTNAAGLLVVGNFQVDHARSLHYVGAGVAFPAGLLFVCLHCALSYQGATAPLDLAVAYLRSVLAVIAFITLVLSGVFFVHESSQLQHGAALCEWVCVIDILIFYGTFSYEFGAVSSDTLVAALQPTPGRACKSSGSSSTSTHLNCAPESIAMI

SEQ ID NO: 805812 - protein, 187 aa, Homo sapiens
MSPSSVALICLLRYGQLLEQSRHSWVNTTALITGCTNAAGLLVVGNFQVDHARSLHYVGAGVAFPAGLLFVCLHCALSYQGATAPLDLAVAYLRSVLAVIAFITLVLSGVFFVHESSQLQHGAALCEWVCVIDILIFYGTFSYEFGAVSSDTLVAALQPTPGRACKSSGSSSTSTHLNCAPESIAMI

SEQ ID NO: 805813 - protein, 210 aa, Homo sapiens
MTAWILLPVSLSAFSITGIWTVYAMAVMNHHVCPVENWSYNESCPPDPAEQGGPKTCCTLDDVPLISKCGSYPPESCLFSLIGNMGAFMVALICLLRYGQLLEQSRHSWVNTTALITGCTNAAGLLVVGNFQVESSLSMRVLSCNMGQPCVSGCVSSISSFSMAPSATSLGQSPQTHWWLHCSLPLAGPASPPGAAAPPPTSTVPPRASL

SEQ ID NO: 805814 - protein, 186 aa, Homo sapiens
RAAARVGATRGPSRVRRRRGAPGRPGQLMVVAETSQGPTTSPALLTLLSKGVPRPAAPWTMSPSSVALICLLRYGQLLEQSRHSWVNTTALITGCTNAAGLLVVGNFQVESSLSMRVLSCNMGQPCVSGCVSSISSFSMAPSATSLGQSPQTHWWLHCSLPLAGPASPPGAAAPPPTSTVPPRASL

SEQ ID NO: 805815 - protein, 271 aa, Homo sapiens; identical to SEQ ID NO: 805803

SEQ ID NO: 805816 - protein, 96 aa, Homo sapiens
CCQVSVCPTEHFLSLVCGVFFVHESSQLQHGAALCEWVCVIDILIFYGTFSYEFGAVSSDTLVAALQPTPGRACKSSGSSSTSTHLNCAPESIAMI

SEQ ID NO: 805817 - protein, 538 aa, Homo sapiens
MTRECPSPAPGPGAPLSGSVLAEAAVVFAVVLSIHATVWDRYSWCAVALAVQAFYVQYKWDRLLQQGSAVFQFRMSANSGLLPASMVMPLLGLVMKERCQTAGNPFFERFGIVVAATGMAVALFSSVLALGITRPVPTNTCVILGLAGGVIIYIMKHSLSVGEVIEVLEVLLIFVYLNMILLYLLPRCFTPGEALLVLGGISFVLNQLIKRSLTLVESQGDPVDFFLLVVVVGMVLMGIFFSTLFVFMDSGTWASSIFFHLMTCVLSLGVVLPWLHRLIRRNPLLWLLQFLFQTDTRIYLLAYWSLLATLACLVVLYQNAKRSSSESKKHQAPTIARKYFHLIVVATYIPGIIFDRPLLYVAATVCLAVFIFLEYVRYFRIKPLGHTLRSFLSLFLDERDSGPLILTHIYLLLGMSLPIWLIPRPCTQKGSLGGARALVPYAGVLAVGVGDTVASIFGSTMGEIRWPGTKKTFEGTMTSIFAQIISVALILIFDSGVDLNYSYAWILGSISTVSLLEAYTTQIDNLLLPLYLLILLMA

SEQ ID NO: 805818 - protein, 538 aa, Homo sapiens; identical to SEQ ID NO: 805817

SEQ ID NO: 805819 - protein, 538 aa, Homo sapiens; identical to SEQ ID NO: 805817

SEQ ID NO: 805820 - protein, 335 aa, Homo sapiens
MTRECPSPAPGPGAPLSGSVLAEAAVVFAVVLSIHATVWDRYSWCAVALAVQAFYVQYKWDRLLQQGSAVFQFRMSANSGLLPASMVMPLLGLVMKERCQTAGNPFFERFGIVVAATGMAVALFSSVLALGITRPVPTNTCVILGLAGGVIIYIMKHSLSVGEVIEVLEVLLIFVYLNMILLYLLPRCFTPGEALLVLGGISFVLNQLIKRSLTLVESQGDPVDFFLLVVVVGMVLMGIFFSTLFVFMDSGTWASSIFFHLMTCVLSLGVVLPWLHRLIRRNPLLWLLQFLFQTDTRIYLLAYWSLLATLACLVVLYQNAKRSSSESHSGSSRSQ

SEQ ID NO: 805821 - protein, 86 aa, Homo sapiens
GTRGRLAQTQRVAGVGAHWEPTERGGGSGAEFPTTRMAVTGAGSGARLSLPRGSSDSTRVAARPWQRPSSRGWELHRVPPRPGEDA

SEQ ID NO: 805822 - protein, 86 aa, Homo sapiens; identical to SEQ ID NO: 805821

SEQ ID NO: 805823 - protein, 231 aa, Homo sapiens
FVLRLAGDLPQRGLVHAAHSDGEQLDAAGPGPRRHVLHAVLGPPVCHHDDHLRHAGRCDTGLPEAHGTVQERRLRPGEAGGLPGRTARRHPGEEDPAGRRGDPFPLTERRGWGAFHLLRLPRAGSSEMPGGMRCPIAKLGSLSYEMATSRGIMGIKVSAGKAHNSEREPPNSSILAGWRARTLLMSGDLERPPSASPKALVIANWMARPVMVPVDSGWIRRTACSSAALET

SEQ ID NO: 805824 - protein, 108 aa, Homo sapiens
TLIGRFLSFRSLSRGDLSLELLSLSHDAKSWSLNLSFEDLLLDRSLLLSLELCRLLWWLRLRLRLLERDLWRWRFSRDLDRVLLLRSRDMERDRCLRCSLDLDLPDKI

SEQ ID NO: 805825 - protein, 86 aa, Homo sapiens
TPLPGDSGDALPGDCGRPRQEGAWQPKAMAGHPKEKVIPDEVHQNQILRELYLKELRTQKLYTQYHVNPLRKSESSYSHQEAHVLA

SEQ ID NO: 805826 - protein, 86 aa, Homo sapiens; identical to SEQ ID NO: 805825

SEQ ID NO: 805827 - protein, 94 aa, Homo sapiens
ARLRGRRTLRARCGISSRGAPFKPVGKAQYSGGSDPIFQFIQSPGSPCLGMITWRNLQMINPERHDRRLNHFRVCSDITLYKAKTWGLGDDHHK

SEQ ID NO: 805828 - protein, 86 aa, Homo sapiens; identical to SEQ ID NO: 805825

SEQ ID NO: 805829 - protein, 86 aa, Homo sapiens; identical to SEQ ID NO: 805825

SEQ ID NO: 805830 - protein, 107 aa, Homo sapiens [sequence omitted]

SEQ ID NO: 805831 - protein, 107 aa, Homo sapiens [sequence omitted]

SEQ ID NO: 805832 - protein, 133 aa, Homo sapiens
MPHPGPWQRTWKRTAEDLLQCMEMGAKLYRAFSTSRLKEFQGTEVKLLRHGRLRAGADILVVEPGGDKEQPGWGAADGQGAQWAPATPPCNSSPVPGATVLPPPPQPRCLRQATPDAAFTGNGLTSPVTLAGG

SEQ ID NO: 805833 - protein, 621 aa, Homo sapiens
RAAVPSPPRPRPPPPSRAPGRRRRRRRRRRLEQPGRRRRREWQRRRGRGGDERPRPRAQGGTAGVGGGPDAGPRGAMGQVLPVFAHCKEAPSTASSTPDSTEGGNDDSDFRELHTAREFSEEDEEETTSQDWGTPRELTFSYIAFDGVVGSGGRRDSTARRPRPQGRSVSEPRDQHPQPSLGDSLESIPSLSQSPEPGRRGDPDTAPPSERPLEDLRLRLDHLGWVARGTGSGEDSSTSSSTPLEDEEPQEPNRLETGEAGEELDLRLRLAQPSSPEVLTPQLSPGSGTPQAGTPSPSRSRDSNSGPEEPLLEEEEKQWGPLEREPVRGQCLDSTDQLEFTVEPRLLGTAMEWLKTSLLLAVYKTVPILELSPPLWTAIGWVQRGPTPPTPVLRVLLKWAKSPRSSGVPSLSLGADMGSKVADLLYWKDTRTSGVVFTGLMVSLLCLLHFSIVSVAAHLALLLLCGTISLRVYRKVLQAVHRGDGANPFQAYLDVDLTLTREQTERLSHQITSRVVSAATQLRHFFLVEDLVDSLKLALLFYILTFVGAIFNGLTLLILGVIGLFTIPLLYRQHQAQIDQYVGLVTNQLSHIKAKIRAKIPGTGALASAAAAVSGSKAKAE

SEQ ID NO: 805834 - protein, 564 aa, Homo sapiens
RAAVPSPPRPRPPPPSRAPGRRRRRRRRRRLEQPGRRRRREWQRRRGRGGDERPRPRAQGGTAGVGGGPDAGPRGAMGQVLPVFAHCKEAPSTASSTPDSTEGGNDDSDFRELHTAREFSEEDEEETTSQDWGTPRELTFSYIAFDGVVGSGGRRDSTARRPRPQGRSVSEPRDQHPQPSLGDSLESIPSLSQSPEPGRRGDPDTAPPSERPLEDLRLRLDHLGWVARGTGSGEDSSTSSSTPLEDEEPQEPNRLETGEAGEELDLRLRLAQPSSPEVLTPQLSPGSGTPQAGTPSPSRSRDSNSGPEEPLLEEEEKQWGPLEREPVRGQCLDSTDQLEFTVEPRLLGKQRVCRCCIGPQKAKVADLLYWKDTRTSGVVFTGLMVSLLCLLHFSIVSVAAHLALLLLCGTISLRVYRKVLQAVHRGDGANPFQAYLDVDLTLTREQTERLSHQITSRVVSAATQLRHFFLVEDLVDSLKLALLFYILTFVGAIFNGLTLLILGVIGLFTIPLLYRQHQAQIDQYVGLVTNQLSHIKAKIRAKIPGTGALASAAAAVSGSKAKAE

SEQ ID NO: 805835 - protein, 548 aa, Homo sapiens
RAAVPSPPRPRPPPPSRAPGRRRRRRRRRRLEQPGRRRRREWQRRRGRGGDERPRPRAQGGTAGVGGGPDAGPRGAMGQVLPVFAHCKEAPSTASSTPDSTEGGNDDSDFRELHTAREFSEEDEEETTSQDWGTPRELTFSYIAFDGVVGSGGRRDSTARRPRPQGRSVSEPRDQHPQPSLGDSLESIPSLSQSPEPGRRGDPDTAPPSERPLEDLRLRLDHLGWVARGTGSGEDSSTSSSTPLEDEEPQEPNRLETGEAGEELDLRLRLAQPSSPEVLTPQLSPGSGTPQAGTPSPSRSRDSNSGPEEPLLEEEEKQWGPLEREPVRGQCLDSTDQLEFTVEPRLLVADLLYWKDTRTSGVVFTGLMVSLLCLLHFSIVSVAAHLALLLLCGTISLRVYRKVLQAVHRGDGANPFQAYLDVDLTLTREQTERLSHQITSRVVSAATQLRHFFLVEDLVDSLKLALLFYILTFVGAIFNGLTLLILGVIGLFTIPLLYRQHQAQIDQYVGLVTNQLSHIKAKIRAKIPGTGALASAAAAVSGSKAKAE

SEQ ID NO: 805836 - protein, 574 aa, Homo sapiens
RALQCLPHLGPARPRRAEHQGGGGGGGGGGGWSSPGGGGGENGSGVVGAAEMSARDPGPRAAQPEWAGVPMQARGGPWGRSCRSSPTAIPGLGHFCDSDSLKLLRVFDSFPLAEEAPSTASSTPDSTEGGNDDSDFRELHTAREFSEEDEEETTSQDWGTPRELTFSYIAFDGVVGSGGRRDSTARRPRPQGRSVSEPRDQHPQPSLGDSLESIPSLSQSPEPGRRGDPDTAPPSERPLEDLRLRLDHLGWVARGTGSGEDSSTSSSTPLEDEEPQEPNRLETGEAGEELDLRLRLAQPSSPEVLTPQLSPGSGTPQAGTPSPSRSRDSNSGPEEPLLEEEEKQWGPLEREPVRGQCLDSTDQLEFTVEPRLLVADLLYWKDTRTSGVVFTGLMVSLLCLLHFSIVSVAAHLALLLLCGTISLRVYRKVLQAVHRGDGANPFQAYLDVDLTLTREQTERLSHQITSRVVSAATQLRHFFLVEDLVDSLKLALLFYILTFVGAIFNGLTLLILGVIGLFTIPLLYRQHQAQIDQYVGLVTNQLSHIKAKIRAKIPGTGALASAAAAVSGSKAKAE

SEQ ID NO: 805837 - protein, 491 aa, Homo sapiens
HRRQRKLSPPPRSGGDGGSLTRRTWTKQGGEEAPSTASSTPDSTEGGNDDSDFRELHTAREFSEEDEEETTSQDWGTPRELTFSYIAFDGVVGSGGRRDSTARRPRPQGRSVSEPRDQHPQPSLGDSLESIPSLSQSPEPGRRGDPDTAPPSERPLEDLRLRLDHLGWVARGTGSGEDSSTSSSTPLEDEEPQEPNRLETGEAGEELDLRLRLAQPSSPEVLTPQLSPGSGTPQAGTPSPSRSRDSNSGPEEPLLEEEEKQWGPLEREPVRGQCLDSTDQLEFTVEPRLLVADLLYWKDTRTSGVVFTGLMVSLLCLLHFSIVSVAAHLALLLLCGTISLRVYRKVLQAVHRGDGANPFQAYLDVDLTLTREQTERLSHQITSRVVSAATQLRHFFLVEDLVDSLKLALLFYILTFVGAIFNGLTLLILGVIGLFTIPLLYRQHQAQIDQYVGLVTNQLSHIKAKIRAKIPGTGALASAAAAVSGSKAKAE

SEQ ID NO: 805838 - protein, 548 aa, Homo sapiens; identical to SEQ ID NO: 805835

SEQ ID NO: 805839 - protein, 564 aa, Homo sapiens; identical to SEQ ID NO: 805834

SEQ ID NO: 805840 - protein, 661 aa, Homo sapiens
RAAVPSPPRPRPPPPSRAPGRRRRRRRRRRLEQPGRRRRREWQRRRGRGGDERPRPRAQGGTAGVGGGPDAGPRGAMGQVLPVFAHCKEAPSTASSTPDSTEGGNDDSDFRELHTAREFSEEDEEETTSQDWGTPRELTFSYIAFDGVVGSGGRRDSTARRPRPQGRSVSEPRDQHPQPSLGDSLESIPSLSQSPEPGRRGDPDTAPPSERPLEDLRLRLDHLGWVARGTGSGEDSSTSSSTPLEDEEPQEPNRLETGEAGEELDLRLRLAQPSSPEVLTPQLSPGSGTPQAGTPSPSRSRDSNSGPEEPLLEEEEKQWGPLEREPVRGQCLDSTDQLEFTVEPRLLGTAMEWLKTSLLLAVYKTVPILELSPPLWTAIGWVQRGPTPPTPVLRVLLKWAKSPRSSGVPSLSLGADMGSKVADLLYWKDTRTSGVVFTGLMVSLLCLLHFSIVSVAAHLALLLLCGTISLRVYRKVLQAVHRGDGANPFQAYLDVDLTLTREQTERLSHQITSRVVSAATQLRHFFLVEDLVDSLKLALLFYILTFVGAIFNGLTLLILGELEKAVRGKWGLGVWWGTGLQMELFISWEHPDAPISVPTGVIGLFTIPLLYRQHQAQIDQYVGLVTNQLSHIKAKIRAKIPGTGALASAAAAVSGSKAKAE

SEQ ID NO: 805841 - protein, 537 aa, Homo sapiens
RAAVPSPPRPRPPPPSRAPGRRRRRRRRRRLEQPGRRRRREWQRRRGRGGDERPRPRAQGGTAGVGGGPDAGPRGAMGQVLPVFAHCKEAPSTASSTPDSTEGGNDDSDFRELHTAREFSEEDEEETTSQDWGTPRELTFSYIAFDGVVGSGGRRDSTARRPRPQGRSVSEPRDQHPQPSLGDSLESIPSLSQSPEPGRRGDPDTAPPSERPLEDLRLRLDHLGWVARGTGSGEDSSTSSSTPLEDEEPQEPNRLETGEAGEELDLRLRLAQPSSPEVLTPQLSPGSGTPQAGTPSPSRSRDSNSGPEEPLLEEEEKQWGPLEREPVRGQCLDSTDQLEFTVEPRLLGTAMEWLKTSLLLAVYKTVPILELSPPLWTAIGWVQRGPTPPTPVLRVLLKWAKSPRSSGVPSLSLGADMGSKVADLLYWKDTRTSGVVFTGLMVSLLCLLHFSIVSVAAHLALLLLCGTISLRVYRKVLQAVHRGDGANPFQAYLDVDLTLTREQTERLSHQITSRVVSAATQLRHFFLVEDLVDSLKE

SEQ ID NO: 805842 - protein, 439 aa, Homo sapiens
RAAVPSPPRPRPPPPSRAPGRRRRRRRRRRLEQPGRRRRREWQRRRGRGGDERPRPRAQGGTAGVGGGPDAGPRGAMGQVLPVFAHCKEAPSTASSTPDSTEGGNDDSDFRELHTAREFSEEDEEETTSQDWGTPRELTFSYIAFDGVVGSGGRRDSTARRPRPQGRSVSEPRDQHPQPSLGDSLESIPSLSQSPEPGRRGDPDTAPPSERPLEDLRLRLDHLGWVARGTGSGEDSSTSSSTPLEDEEPQEPNRLETGEAGEELDLRLRLAQPSSPEVLTPQLSPGSGTPQAGTPSPSRSRDSNSGPEEPLLEEEEKQWGPLEREPVRGQCLDSTDQLEFTVEPRLLGTAMEWLKTSLLLAVYKTVPILELSPPLWTAIGWVQRGPTPPTPVLRVLLKWAKSPRSSGVPSLSLGADMGSKGSDRPICGVGDQSVEPHQS

SEQ ID NO: 805843 - protein, 621 aa, Homo sapiens; identical to SEQ ID NO: 805833

SEQ ID NO: 805844 - protein, 565 aa, Homo sapiens
RAAVPSPPRPRPPPPSRAPGRRRRRRRRRRLEQPGRRRRREWQRRRGRGGDERPRPRAQGGTAGVGGGPDAGPRGAMGQVLPVFAHCKEAPSTASSTPDSTEGGNDDSDFRELHTAREFSEEDEEETTSQDWGTPRELTFSYIAFDGVVGSGGRRDSTARRPRPQGRSVSEPRDQHPQPSLGDSLESIPSLSQSPEPGRRGDPDTAPPSERPLEDLRLRLDHLGWVARGTGSGEDSSTSSSTPLEDEEPQEPNRLETGEAGEELDLRLRLAQPSSPEVLTPQLSPGSGTPQAGTPSPSRSRDSNSGPEEPLLEEEEKQWGPLEREPVRGQCLDSTDQLEFTVEPRLLGTAMEWLKTSLLLAVYKTVPILELSPPLWTAIGWVQRGPTPPTPVLRVLLKWAKSPRSSGVPSLSLGADMGSKVADLLYWKDTRTSGVVFTGLMVSLLCLLHFSIVSVAAHLALLLLCGTISLRVYRKVLQAVHRGDGANPFQAYLDVDLTLTREQTERLSHQITSRVVSAATQLRHFFLVEDLVDSLKLALLFYILTFVGAIFNGLTLLILGELGRP

SEQ ID NO: 805845 - protein, 539 aa, Homo sapiens
RAAVPSPPRPRPPPPSRAPGRRRRRRRRRRLEQPGRRRRREWQRRRGRGGDERPRPRAQGGTAGVGGGPDAGPRGAMGQVLPVFAHCKEAPSTASSTPDSTEGGNDDSDFRELHTAREFSEEDEEETTSQDWGTPRELTFSYIAFDGVVGSGGRRDSTARRPRPQGRSVSEPRDQHPQPSLGDSLESIPSLSQSPEPGRRGDPDTAPPSERPLEDLRLRLDHLGWVARGTGSGEDSSTSSSTPLEDEEPQEPNRLETGEAGEELDLRLRLAQPSSPEVLTPQLSPGSGTPQAGTPSPSRSRDSNSGPEEPLLEEEEKQWGPLEREPVRGQCLDSTDQLEFTVEPRLLVADLLYWKDTRTSGVVFTGLMVSLLCLLHFSIVSVAAHLALLLLCGTISLRVYRKVLQAVHRGDGANPFQAYLDVDLTLTREQTERLSHQITSRVVSAATQLRHFFLVEDLVDSLKVAWSSQPLLGSPIHLCMARGWEGDCWVNSQHEREFPVGSADPDLHPQLALLFYILTFVGAIFNGLTLLILGELGRP

SEQ ID NO: 805846 - protein, 443 aa, Homo sapiens
SHGLAGKRPWWVCGGRGSLPGLSPPARSARPPRLQKLGLRVRRGRKPEATAQSSLSAVMWGRLLLWPLVLGFSLSGGTQTPSVYDESGSTGGGDDSTPSILPAPRGYPGQVCANDSDTLELPDSSRALLLGWVPTRLVPALYGLVLVVGLPANGLALWVLATQAPRLPSTMLLMNLATADLLLALALPPRIAYHLRGQRWPFGEAACRLATAALYGHMYGSVLLLAAVSLDRYLALVHPLRARALRGRRLALGLCMAAWLMAAALALPLTLQRQTFRLARSDRVLCHDALPLDAQASHWQPAFTCLALLGCFLPLLAMLLCYGATLHTLAASGRRYGHALRLTAVVLASAVAFFVPSNLLLLLHYSDPSPSAWGNLYGAYVPSLALSTLNSCVDPFIYYYVSAEFRDKVRAGLFQRSPGDTVASKASAEGGSRGMGTHSSLLQ

SEQ ID NO: 805847 - protein, 443 aa, Homo sapiens; identical to SEQ ID NO: 805846

SEQ ID NO: 805848 - protein, 318 aa, Homo sapiens
AHGLAGKRPWWVCGGRGSLPGLSPPARSARPPRLQKLGLRVRRGRKPEATAQSSLSAVMWGRLLLWPLVLGFSLSGGTQTPSVYDESGSTGGGDDSTPSILPAPRGYPGQVCANDSDTLELPDSSRALLLGWVPTRLVPALYGLVLVVGLPANGLALWVLATQAPRLPSTMLLMNLATADLLLALALPPRIAYHLRGQRWPFGEAACRLATAALYGHMYGSVLLLAAVSLDRYLALLAMLLCYGATLHTLAASGRRYGHALRLTAVVLASAVAFFKHSQQPPAARRQAWDGLSLTASRGNQPCHHLDPGLLACRTVRP

SEQ ID NO: 805849 - protein, 291 aa, Homo sapiens
MALAARLLPQFLHSRSLPCGAVRLRTPAVAEVRLPSATLCYFCRCRLGLGAALFPRSARALAASALPAQGSRWPVLSSPGLPAAFASFPACPQRSYSTEEKPQQHQKTKMIVLGFSNPINWVRTRIKAFLIWAYFDKEFSITEFSEGAKQAFAHVSKLLSQCKFDLLEELVAKEVLHALKEKVTSLPDNHKNALAANIDEIVFTSTGDISIYYDEKGRKFVNILMCFWYLTSANIPSETLRGASVFQVKLGNQNVETKQLLSASYEFQREFTQGVKPDWTIARIEHSKLLE

SEQ ID NO: 805850 - protein, 130 aa, Homo sapiens
VVNRRGTCIDRKGNSQLADQNIKMPWSDTHNIKVATKACKRAPTSPLTIYDEKAQRRKFVNILMCFWYLTSANIPSETLRGASVFQVKLGNQNVETKQLLSASYEFQREFTQGVKPDWTIARIEHSKLLE

SEQ ID NO: 805851 - protein, 291 aa, Homo sapiens; identical to SEQ ID NO: 805849

SEQ ID NO: 805852 - protein, 225 aa, Homo sapiens
MALAARLLPQFLHSRSLPCGAVRLRTPAVAEVRLPSATLCYFCRCRLGLGAALFPRSARALAASALPAQGSRWPVLSSPGLPAAFASFPACPQRSYSTEEKPQQHQKTKMIVLGFSNPINWVRTRIKAFLIWAYFDKEFSITEFSEGAKQAFAHVSKLLSQCKFDLLEELVAKEVLHALKEKVTSLPDNHKNALAANIDEIVFTSTGDISIYYDEKGFRGSSHKE

SEQ ID NO: 805853 - protein, 365 aa, Homo sapiens
MPDVELNLKSPKVKGDLDIAGPNLEGDFKGPKVDIKAPEVNLNAPDVDVHGPDWNLKMPKMKMPKFSVSGLKAEGPDVAVDLPKGDINIEGPSMNIEGPDLNVEGPEGGLKGPKFKMPDMNIKAPKISMPDIDLNLKGPKVKGDVDISLPKLEGDLKGPEVDIKGPKVDINAPDVDVHGPDWHLKMPKVKMPKFSMPGFKGEGPEVDVTLPKADIDISGPNVDVDVPDVNIEGPDAKLKGPKFKMPEMNIKAPKISMPDFDLNLKGPKMKGDVVVSLPKVEGDLKGPEVDIKGPKVDIDTPDINIEGSEGKFKGPKFKIPEMHLKAPKISMPDIDLNLKGPKVKGDVDVSLPKMEGDLKGPEVDI

SEQ ID NO: 805854 - protein, 1884 aa, Homo sapiens
SGALLWPLLPLLLLLLSARDGVRAAQPQAPGYLIAAPSVFRAGVEEVISVTIFNSPREVTVQAQLVAQGEPVVQSQGAILDKGTIKLKVPTGLRGQALLKVWGRGWQAEEGPLFHNQTSVTVDGRGASVFIQTDKPVYRPQHRVLISIFTVSPNLRPVNEKVDQLQQDPRGSRMIEWRHLKPFCCGITNMSFPLSDQPVLGEWFIFVEMQGHAYNKSFEVQKYVLPKFELLIDPPRYIQDLDACETGTVRARYTFGKPVAGALTINMTVNGVGYYSHEVGRPVLRTTKILGSRDFDICVRDMIPADVPEHFRGRVSIWAMVTSVDGSQQVAFDDSTPVQRQLVDIRYSKDTRKQFKPGLAYVGKVELSYPDGSPAEGVTVQIKAELTPKDNIYTSEVVSQRGLVGFEIPSIPTSAQHVWLETKVMALNGKPVGAQYLPSYLSLGSWYSPSQCYLQLQPPSHPLQVGEEAYFSVKSTCPCNFTLYYEVAARGNIVLSGQQPAHTTQQRSKRAAPALEKPIRLTHLSETEPPPAPEAEVDVCVTSLHLAVTPSMVPLGRLLVFYVRENGEGVADSLQFAVETFFENQVSVTYSANETQPGEVVDLRIRAARGSCVCVAAVDKSVYLLRSGFRLTPAQVFQELEDYDVSDSFGVSREDGPFWWAGLTAQRRRRSSVFPWPWGITKDSGFAFTETGLVVMTDRVSLNHRQDGGLYTDEAVPAFQPHTGSLVAVAPSRHPPRTEKRKRTFFPETWIWHCLNISDPSGEGTLSVKVPDSITSWVGEAVALSTSQGLGIAEPSLLKTFKPFFVDFMLPALIIRGEQVKIPLSVYNYMGTCAEVYMKLSVPKGIQFVGHPGKRHVTKKMCVAPGEAEPIWVVLSFSDLGLNNITAKALAYGDTNCCRDGRSSKHPEENHADRRVPIGVDHVRRSVMVEAEGVPRAYTYSAFFCPSERVHISTPNKYEFQYVQRPLRLTRFDVAVRAHNDARVALSSGPQDTAGMIEIVLGGHQNTRSWISTSKMGEPVASAHTAKILSWDEFRTFWISWRGGLIQVGHGPEPSNESVIVAWTLPRPPEVQFIGFSTGWGSMGEFRIWRKMEVDESYSEAFTLGVPHGAIPGSERATASIIGDVMGPTLNHLNNLLRLPFGCGEQNMIHFAPNVFVLKYLQKTQQLSPEVERETTDYLVQGYQRQLTYKRQDGSYSAFGERDASGSMWLTAFVLKSFAQARSFIFVDPRELAAAKSWIIQQQQADGSFLAVGRVLNKDIQGGIHGTVPLTAYVVVALLETGTASEEERGSTDKARHFLESAAPLAMDPYSCALTTYALTLLRSPAAPEALRKLRSLAIMRDGVTHWSLSNSWDVDKGTFLSFSDRVSQSVVSAEVEMTAYALLTYTLLGDVAAALPVVKWLSQQRNALGGFSSTQDTCVALQALAEYAILSYAGGINLTVSLASTNLDYQETFELHRTNQKVLQTAAIPSLPTGLFVSAKGDGCCLMQIDVTYNVPDPVAKPAFQLLVSLQEPEAQGRPPPMPASAAEGSRGDWPPADDDDPAADQHHQEYKVMLEVCTRWLHAGSSNMAVLEVPLLSGFRADIESLEQLLLDKHMGMKRYEVAGRRVLFYFDEIPSRCLTCVRFRALRECVVGRTSALPVSVYDYYEPAFEATRFYNVSTHSPLARELCAGPACNEVERAPARGPGWFPGESGPAVAPEEGAAIARCGCDHDCGAQGNPVCGSDGVVYASACRLREAACRQAAPLEPAPPSCCALEQRLPASSSSTYGDDLASVAPGPLQQDVKLNGAGLEVEDSDPEPEGEAEDRVTAGPRPPVSSGNLESSTQSASPFHRWGQTPAPQRHSGRVVGAHRPGLLSPVFVYSPAFQSGGEEGLWMSNTCTLR

SEQ ID NO: 805855 - protein, 81 aa, Homo sapiens
SEAALAGGFPTPGTLQATGPVAPSSARGPVPTCCRGCCKIKPHLQGHSRASASCEQREPGKQHPERQPVPQMGPDSGPSET

SEQ ID NO: 805856 - protein, 112 aa, Homo sapiens
GRGRGCCCRAAQTGRPVSFLSYNRFLKVCFCFCWFPGESGPAVAPEEGAAIARCGCDHDCGAQGNPVCGSDGVVYASACRLREAACRQAAPLEPAPPSCCALAGREAEWSRP

SEQ ID NO: 805857 - protein, 1613 aa, Homo sapiens
LKREEKKDFLPRNMDFGIVSTSGTLRFLFCCGITNMSFPLSDQPVLGEWFIFVEMQGHAYNKSFEVQKYVLPKFELLIDPPRYIQDLDACETGTVRARYTFGKPVAGALTINMTVNGVGYYSHEVGRPVLRTTKILGSRDFDICVRDMIPADVPEHFRGRVSIWAMVTSVDGSQQVAFDDSTPVQRQLVDIRYSKDTRKQFKPGLAYVGKVELSYPDGSPAEGVTVQIKAELTPKDNIYTSEVVSQRGLVGFEIPSIPTSAQHVWLETKVMALNGKPVGAQYLPSYLSLGSWYSPSQCYLQLQPPSHPLQVGEEAYFSVKSTCPCNFTLYYEVAARGNIVLSGQQPAHTTQQRSKRAAPALEKPIRLTHLSETEPPPAPEAEVDVCVTSLHLAVTPSMVPLGRLLVFYVRENGEGVADSLQFAVETFFENQVSVTYSANETQPGEVVDLRIRAARGSCVCVAAVDKSVYLLRSGFRLTPAQVFQELEDYDVSDSFGVSREDGPFWWAGLTAQRRRRSSVFPWPWGITKDSGFAFTETGLVVMTDRVSLNHRQDGGLYTDEAVPAFQPHTGSLVAVAPSRHPPRTEKRKRTFFPETWIWHCLNISDPSGEGTLSVKVPDSITSWVGEAVALSTSQGLGIAEPSLLKTFKPFFVDFMLPALIIRGEQVKIPLSVYNYMGTCAEVYMKLSVPKGIQFVGHPGKRHVTKKMCVAPGEAEPIWVVLSFSDLGLNNITAKALAYGDTNCCRDGRSSKHPEENHADRRVPIGVDHVRRSVMVEAEGVPRAYTYSAFFCPSERVHISTPNKYEFQYVQRPLRLTRFDVAVRAHNDARVALSSGPQDTAGMIEIVLGGHQNTRSWISTSKMGEPVASAHTAKILSWDEFRTFWISWRGGLIQVGHGPEPSNESVIVAWTLPRPPEVQFIGFSTGWGSMGEFRIWRKMEVDESYSEAFTLGVPHGAIPGSERATASIIGDVMGPTLNHLNNLLRLPFGCGEQNMIHFAPNVFVLKYLQKTQQLSPEVERETTDYLVQGYQRQLTYKRQDGSYSAFGERDASGSMWLTAFVLKSFAQARSFIFVDPRELAAAKSWIIQQQQADGSFLAVGRVLNKDIQGGIHGTVPLTAYVVVALLETGTASEEERGSTDKARHFLESAAPLAMDPYSCALTTYALTLLRSPAAPEALRKLRSLAIMRDGVTHWSLSNSWDVDKGTFLSFSDRVSQSVVSAEVEMTAYALLTYTLLGDVAAALPVVKWLSQQRNALGGFSSTQDTCVALQALAEYAILSYAGGINLTVSLASTNLDYQETFELHRTNQKVLQTAAIPSLPTGLFVSAKGDGCCLMQIDVTYNVPDPVAKPAFQLLVSLQEPEAQGRPPPMPASAAEGSRGDWPPADDDDPAADQHHQEYKVMLEVCTRWLHAGSSNMAVLEVPLLSGFRADIESLEQLLLDKHMGMKRYEVAGRRVLFYFDEIPSRCLTCVRFRALRECVVGRTSALPVSVYDYYEPAFEATRFYNVSTHSPLARELCAGPACNEVERAPARGPGWFPGESGPAVAPEEGAAIARCGCDHDCGAQGNPVCGSDGVVYASACRLREAACRQAAPLEPAPPSCCALAGREAEWSRP

SEQ ID NO: 805858 - protein, 1072 aa, Homo sapiens
MTDRVSLNHRQDGGLYTDEAVPAFQPHTGSLVAVAPSRHPPRTEKRKRTFFPETWIWHCLNISDPSGEGTLSVKVPDSITSWVGEAVALSTSQGLGIAEPSLLKTFKPFFVDFMLPALIIRGEQVKIPLSVYNYMGTCAEVYMKLSVPKGIQFVGHPGKRHVTKKMCVAPGEAEPIWVVLSFSDLGLNNITAKALAYGDTNCCRDGRSSKHPEENHADRRVPIGVDHVRRSVMVEAEGVPRAYTYSAFFCPSERVHISTPNKYEFQYVQRPLRLTRFDVAVRAHNDARVALSSGPQDTAGMIEIVLGGHQNTRSWISTSKMGEPVASAHTAKILSWDEFRTFWISWRGGLIQVGHGPEPSNESVIVAWTLPRPPEVQFIGFSTGWGSMGEFRIWRKMEVDESYSEAFTLGVPHGAIPGSERATASIIGDVMGPTLNHLNNLLRLPFGCGEQNMIHFAPNVFVLKYLQKTQQLSPEVERETTDYLVQGYQRQLTYKRQDGSYSAFGERDASGSMWLTAFVLKSFAQARSFIFVDPRELAAAKSWIIQQQQADGSFLAVGRVLNKDIQGGIHGTVPLTAYVVVALLETGTASEEERGSTDKARHFLESAAPLAMDPYSCALTTYALTLLRSPAAPEALRKLRSLAIMRDGVTHWSLSNSWDVDKGTFLSFSDRVSQSVVSAEVEMTAYALLTYTLLGDVAAALPVVKWLSQQRNALGGFSSTQDTCVALQALAEYAILSYAGGINLTVSLASTNLDYQETFELHRTNQKVLQTAAIPSLPTGLFVSAKGDGCCLMQIDVTYNVPDPVAKPAFQLLVSLQEPEAQGRPPPMPASAAEGSRGDWPPADDDDPAADQHHQEYKVMLEVCTRWLHAGSSNMAVLEVPLLSGFRADIESLEQLLLDKHMGMKRYEVAGRRVLFYFDEIPSRCLTCVRFRALRECVVGRTSALPVSVYDYYEPAFEATRFYNVSTHSPLARELCAGPACNEVERAPARGPGWFPGESGPAVAPEEGAAIARCGCDHDCGAQGNPVCGSDGVVYASACRLREAACRQAAPLEPAPPSCCALAGREAEWSRP

SEQ ID NO: 805859 - protein, 1660 aa, Homo sapiens
LKREEKKDFLPRNMDFGIVSTSGTLRFLFCCGITNMSFPLSDQPVLGEWFIFVEMQGHAYNKSFEVQKYVLPKFELLIDPPRYIQDLDACETGTVRARYTFGKPVAGALTINMTVNGVGYYSHEVGRPVLRTTKILGSRDFDICVRDMIPADVPEHFRGRVSIWAMVTSVDGSQQVAFDDSTPVQRQLVDIRYSKDTRKQFKPGLAYVGKVELSYPDGSPAEGVTVQIKAELTPKDNIYTSEVVSQRGLVGFEIPSIPTSAQHVWLETKVMALNGKPVGAQYLPSYLSLGSWYSPSQCYLQLQPPSHPLQVGEEAYFSVKSTCPCNFTLYYEVAARGNIVLSGQQPAHTTQQRSKRAAPALEKPIRLTHLSETEPPPAPEAEVDVCVTSLHLAVTPSMVPLGRLLVFYVRENGEGVADSLQFAVETFFENQVSVTYSANETQPGEVVDLRIRAARGSCVCVAAVDKSVYLLRSGFRLTPAQVFQELEDYDVSDSFGVSREDGPFWWAGLTAQRRRRSSVFPWPWGITKDSGFAFTETGLVVMTDRVSLNHRQDGGLYTDEAVPAFQPHTGSLVAVAPSRHPPRTEKRKRTFFPETWIWHCLNISDPSGEGTLSVKVPDSITSWVGEAVALSTSQGLGIAEPSLLKTFKPFFVDFMLPALIIRGEQVKIPLSVYNYMGTCAEVYMKLSVPKGIQFVGHPGKRHVTKKMCVAPGEAEPIWVVLSFSDLGLNNITAKALAYGDTNCCRDGRSSKHPEENHADRRVPIGVDHVRRSVMVEAEGVPRAYTYSAFFCPSERVHISTPNKYEFQYVQRPLRLTRFDVAVRAHNDARVALSSGPQDTAGMIEIVLGGHQNTRSWISTSKMGEPVASAHTAKILSWDEFRTFWISWRGGLIQVGHGPEPSNESVIVAWTLPRPPEVQFIGFSTGWGSMGEFRIWRKMEVDESYSEAFTLGVPHGAIPGSERATASIIGDVMGPTLNHLNNLLRLPFGCGEQNMIHFAPNVFVLKYLQKTQQLSPEVERETTDYLVQGYQRQLTYKRQDGSYSAFGERDASGSMWLTAFVLKSFAQARSFIFVDPRELAAAKSWIIQQQQADGSFLAVGRVLNKDIQGGIHGTVPLTAYVVVALLETGTASEEERGSTDKARHFLESAAPLAMDPYSCALTTYALTLLRSPAAPEALRKLRSLAIMRDGVTHWSLSNSWDVDKGTFLSFSDRVSQSVVSAEVEMTAYALLTYTLLGDVAAALPVVKWLSQQRNALGGFSSTQDTCVALQALAEYAILSYAGGINLTVSLASTNLDYQETFELHRTNQKVLQTAAIPSLPTGLFVSAKGDGCCLMQIDVTYNVPDPVAKPAFQLLVSLQEPEAQGRPPPMPASAAEGSRGDWPPADDDDPAADQHHQEYKVMLEVCTRWLHAGSSNMAVLEVPLLSGFRADIESLEQLLLDKHMGMKRYEVAGRRVLFYFDEIPSRCLTCVRFRALRECVVGRTSALPVSVYDYYEPAFEATRFYNVSTHSPLARELCAGPACNEVERAPARGPGWFPGESGPAVAPEEGAAIARCGCDHDCGAQGNPVCGSDGVVYASACRLREAACRQAAPLEPAPPSCCALEQRLPASSSSTYGDDLASVAPGPLQQDVKLNGAGLEVEDSDPEPEGEAEDSQSGFSS

SEQ ID NO: 805860 - protein, 4355 aa, Homo sapiens
MSLRPAAGAWERCAGSAEAEQLLQAFLGRDAAEGPRPLLVVRPGPRGLAIRPGLEVGPESGLAGAKALFFLRTGPEPPGPDSFRGAVVCGDLPAAPLEHLAALFSEVVLPVLANEKNRLNWPHMICEDVRRHAHSLQCDLSVILEQVKGKTLLPLPAGSEKMEFADSKSETVLDSIDKSVIYAIESAVIKWSYQVQVVLKRESSQPLLQGENPTPKVELEFWKSRYEDLKYIYNQLRTITVRGMAKLLDKLQSSYFPAFKAMYRDVVAALAEAQDIHVHLIPLQRHLEALENAEFPEVKPQLRPLLHVVCLIWATCKSYRSPGRLTVLLQEICNLLIQQASNYLSPEDLLRSEVEESQRKLQVVSDTLSFFKQEFQDRRENLHTYFKENQEVKEWDFQSSLVFVRLDGFLGRLHVVEGLLKTALDFHKLGKVEFSGVRGNALSQQVQQMHEEFQEMYRLLSGSSSDCLYLQSTDFENDVSEFNQKVEDLDRRLGTIFIQAFDDAPGLEHAFKLLDIAGNLLERPLVARDTSDKYLVLIQMFNKDLDAVRMIYSQHVQEEAELGFSPVHKNMPTVAGGLRWAQELRQRIQGPFSNFGRITHPCMESAEGKRMQQKYEDMLSLLEKYETRLYEDWCRTVSEKSQYNLSQPLLKRDPETKEITINFNPQLISVLKEMSYLEPREMKHMPETAAAMFSSRDFYRQLVANLELMANWYNKVMKTLLEVEFPLVEEELQNIDLRLRAAEETLNWKTEGICDYVTEITSSIHDLEQRIQKTKDNVEEIQNIMKTWVTPIFKTKDGKRESLLSLDDRHDRMEKYYNLIKESGLKIHALVQENLGLFSADPTSNIWKTYVNSIDNLLLNGFFLAIECSLKYLLENTECKAGLTPIFEAQLSLAIPELVFYPSLESGVKGGFCDIVEGLITSIFRIPSLVPRLSPQNGSPHYQVDLDGIPDLANMRRTLMERVQRMMGLCCGYQSTFSQYSYLYVEDRKEVLGQFLLYGHILTPEEIEDHVEDGIPENPPLLSQFKVQIDSYETLYEEVCRLEPIKVFDGWMKIDIRPFKASLLNIIKRWSLLFKQHLVDHVTHSLANLDAFIKKSESGLLKKVEKGDFQGLVEIMGHLMAVKERQSNTDEMFEPLKQTIELLKTYEQELPETVFKQLEELPEKWNNIKKVAITVKQQVAPLQANEVTLLRQRCTAFDAEQQQFWEQFHKEAPFRFDSIHPHQMLDARHIEIQQMESTMASISESASLFEVNVPDYKQLRQCRKEVCQLKELWDTIGMVTSSIHAWETTPWRNINVEAMELECKQFARHIRNLDKEVRAWDAFTGLESTVWNTLSSLRAVAELQNPAIRERHWRQLMQATGVSFTMDQDTTLAHLLQLQLHHYEDEVRGIVDKAAKEMGMEKTLKELQTTWAGMEFQYEPHPRTNVPLLCSDEDLIEVLEDNQVQLQNLVMSKYVAFFLEEVSGWQKKLSTVDAVISIWFEVQRTWTHLESIFTGSEDIRAQLPQDSKRFEGIDIDFKELAYDAQKIPNVVQTTNKPGLYEKLEDIQGRLCLCEKALAEYLDTKRLAFPRFYFLSSSDLLDILSNGTAPQQVQRHLSKLFDNMAKMRFQLDASGEPTKTSLGMYSKEEEYVAFSEPCDCSGQVEIWLNHVLGHMKATVRHEMTEGVTAYEEKPREQWLFDHPAQVALTCTQIWWTTEVGMAFARLEEGYESAMKDYYKKQVAQLKTLITMLIGQLSKGDRQKIMTICTIDVHARDVVAKMIAQKVDNAQAFLWLSQLRHRWDDEVKHCFANICDAQFLYSYEYLGNTPRLVITPLTDRCYITLTQSLHLTMSGAPAGPAGTGKTETTKDLGRALGILVYVFNCSEQMDYKSCGNIYKGLAQTGAWGCFDEFNRISVEVLSVVAVQVKSIQDAIRDKKQWFSFLGEEISLNPSVGIFITMNPGYAGRTELPENLKSLFRPCAMVVPDFELICEIMLVAEGFIEAQSLARKFITLYQLCKELLSKQDHYDWGLRAIKSVLVVAGSLKRGDPDRPEDQVLMRSLRDFNIPKIVTDDMPIFMGLIGDLFPALDVPRRRDPNFEALVRKAIVDLKLQAEDNFVLKVVQLEELLAVRHSVFVVGGAGTGKSQVLRSLHKTYQIMKRRPVWTDLNPKAVTNDELFGIINPATGEWKDGLFSSIMRELANITHDGPKWILLDGDIDPMWIESLNTVMDDNKVLTLASNERIPLNPTMKLLFEISHLRTATPATVSRAGILYINPADLGWNPPVSSWIEKREIQTERANLTILFDKYLPTCLDTLRTRFKKIIPIPEQSMVQMVCHLLECLLTTEDIPADCPKEIYEHYFVFAAIWAFGGAMVQDQLVDYRAEFSKWWLTEFKTVKFPSQGTIFDYYIDPETKKFEPWSKLVPQFEFDPEMPLQACLVHTSETIRVCYFMERLMARQRPVMLVGTAGTGKSVLVGAKLASLDPEAYLVKNVPFNYYTTSAMLQAVLEKPLEKKAGRNYGPPGNKKLIYFIDDMNMPEVDAYGTVQPHTIIRQHLDYGHWYDRSKLSLKEITNVQYVSCMNPTAGSFTINPRLQRHFSVFVLSFPGADALSSIYSIILTQHLKLGNFPASLQKSIPPLIDLALAFHQKIATTFLPTGIKFHYIFNLRDFANIFQGILFSSVECVKSTWDLIRLYLHESNRVYRDKMVEEKDFDLFDKIQTEVLKKTFDDIEDPVEQTQSPNLYCHFANGIGEPKYMPVQSWELLTQTLVEALENHNEVNTVMDLVLFEDAMRHVCHINRILESPRGNALLVGVGGSGKQSLTRLAAFISSMDVFQITLRKGYQIQDFKMDLASLCLKAGVKNLNTVFLMTDAQVADERFLVLINDLLASGEIPDLYSDDEVENIISNVRNEVKSQGLVDNRENCWKFFIDRIRRQLKVTLCFSPVGNKLRVRSRKFPAIVNCTAIHWFHEWPQQALESVSLRFLQNTEGIEPTVKQSISKFMAFVHTSVNQTSQSYLSNEQRYNYTTPKSFLEFIRLYQSLLHRHRKELKCKTERLENGLLKLHSTSAQVDDLKAKLAAQEVELKQKNEDADKLIQVVGVETDKVSREKAMADEEEQKVAVIMLEVKQKQKDCEEDLAKAEPALTAAQAALNTLNKTNLTELKSFGSPPLAVSNVSAAVMVLMAPRGRVPKDRSWKAAKVTMAKVDGFLDSLINFNKENIHENCLKAIRPYLQDPEFNPEFVATKSYAAAGLCSWVINIVRFYEVFCDVEPKRQALNKATADLTAAQEKLAAIKAKIAHLNENLAKLTARFEKATADKLKCQQEAEVTAVTISLANRLVGGLASENVRWADAVQNFKQQERTLCGDILLITAFISYLGFFTKKYRQSLLDRTWRPYLSQLKTPIPVTPALDPLRMLMDDADVAAWQNEGLPADRMSVENATILINCERWPLMVDPQLQGIKWIKNKYGEDLRVTQIGQKGYLQIIEQALEAGAVVLIENLEESIDPVLGPLLGREVIKKGRFIKIGDKECEYNPKFRLILHTKLANPHYQPELQAQATLINFTVTRDGLEDQLLAAVVSMERPDLEQLKSDLTKQQNGFKITLKTLEDSLLSRLSSASGNFLGETVLVENLEITKQTAAEVEKKVQEAKVTEVKINEAREHYRPAAARASLLYFIMNDLSKIHPMYQFSLKAFSIVFQKAVERAAPDESLRERVANLIDSITFSVYQYTIRGLFECDKLTYLAQLTFQILLMNREVNAVELDFLLRSPVQTGTASPVEFLSHQAWGAVKVLSSMEEFSNLDRDIEGSAKSWKKFVESECPEKEKLPQEWKNKTALQRLCMLRAMRPDRMTYALRDFVEEKLGSKYVVGRALDFATSFEESGPATPMFFILSPGVDPLKDVESQGRKLGYTFNNQNFHNVSLGQGQEVVAEAALDLAAKKGHWVILQNIHLVAKWLSTLEKKLEEHSENSHPEFRVFMSAEPAPSPEGHIIPQGILENSIKITNEPPTGMHANLHKALDNFTQDTLEMCSRETEFKSILFALCYFHAVVAERRKFGPQGWNRSYPFNTGDLTISVNVLYNFLEANAKVPYDDLRYLFGEIMYGGHITDDWDRRLCRTYLGEFIRPEMLEGELSLAPGFPLPGNMDYNGYHQYIDAELPPESPYLYGLHPNAEIGFLTQTSEKLFRTVLELQPRDSQARDGAGATREEKVKALLEEILERVTDEFNIPELMAKVEERTPYIVVAFQECGRMNILTREIQRSLRELELGLKGELTMTSHMENLQNALYFDMVPESWARRAYPSTAGLAAWFPDLLNRIKELEAWTGDFTMPSTVWLTGFFNPQSFLTAIMQSTARKNEWPLDQMALQCDMTKKNREEF

SEQ ID NO: 805861 - protein, 4355 aa, Homo sapiens; identical to SEQ ID NO: 805860

SEQ ID NO: 805862 - protein, 798 aa, Homo sapiens
MNDLSKIHPMYQFSLKAFSIVFQKAVERAAPDESLRERVANLIDSITFSVYQYTIRGLFECDKLTYLAQLTFQILLMNREVNAVELDFLLRSPVQTGTASPVEFLSHQAWGAVKVLSSMEEFSNLDRDIEGSAKSWKKFVESECPEKEKLPQEWKNKTALQRLCMLRAMRPDRMTYALRDFVEEKLGSKYVVGRALDFATSFEESGPATPMFFILSPGVDPLKDVESQGRKLGYTFNNQNFHNVSLGQGQEVVAEAALDLAAKKGHWVILQNIHLVAKWLSTLEKKLEEHSENSHPEFRVFMSAEPAPSPEGHIIPQGILENSIKITNEPPTGMHANLHKALDNFTQDTLEMCSRETEFKSILFALCYFHAVVAERRKFGPQGWNRSYPFNTGDLTISVNVLYNFLEANAKVPYDDLRYLFGEIMYGGHITDDWDRRLCRTYLGEFIRPEMLEGELSLAPGFPLPGNMDYNGYHQYIDAELPPESPYLYGLHPNAEIGFLTQTSEKLFRTVLELQPRDSQARDGAGATREEKVKALLEEILERVTDEFNIPELMAKVEERTPYIVVAFQECGRMNILTREIQRSLRELELGLKGELTMTSHMENLQNALYFDMVPESWARRAYPSTAGLAAWFPDLLNRIKELEAWTGDFTMPSTVWLTGFFNPQSFLTAIMQSTARKNEWPLDQMALQCDMTKKNREEFRSPPREGAYIHGLFMEGACWDTQAGIITEAKLKDLTPPMPVMFIKAIPADKQDCRSVYSCPVYKTSQRGPTYVWTFNLKTKENPSKWVLAGVALLLQI

SEQ ID NO: 805863 - protein, 4365 aa, Homo sapiens
MSLRPAAGAWERCAGSAEAEQLLQAFLGRDAAEGPRPLLVVRPGPRGLAIRPGLEVGPESGLAGAKALFFLRTGPEPPGPDSFRGAVVCGDLPAAPLEHLAALFSEVVLPVLANEKNRLNWPHMICEDVRRHAHSLQCDLSVILEQVKGKTLLPLPAGSEKMEFADSKSETVLDSIDKSVIYAIESAVIKWSYQVQVVLKRESSQPLLQGENPTPKVELEFWKSRYEDLKYIYNQLRTITVRGMAKLLDKLQSSYFPAFKAMYRDVVAALAEAQDIHVHLIPLQRHLEALENAEFPEVKPQLRPLLHVVCLIWATCKSYRSPGRLTVLLQEICNLLIQQASNYLSPEDLLRSEVEESQRKLQVVSDTLSFFKQEFQDRRENLHTYFKENQEVKEWDFQSSLVFVRLDGFLGRLHVVEGLLKTALDFHKLGKVEFSGVRGNALSQQVQQMHEEFQEMYRLLSGSSSDCLYLQSTDFENDVSEFNQKVEDLDRRLGTIFIQAFDDAPGLEHAFKLLDIAGNLLERPLVARDTSDKYLVLIQMFNKDLDAVRMIYSQHVQEEAELGFSPVHKNMPTVAGGLRWAQELRQRIQGPFSNFGRITHPCMESAEGKRMQQKYEDMLSLLEKYETRLYEDWCRTVSEKSQYNLSQPLLKRDPETKEITINFNPQLISVLKEMSYLEPREMKHMPETAAAMFSSRDFYRQLVANLELMANWYNKVMKTLLEVEFPLVEEELQNIDLRLRAAEETLNWKTEGICDYVTEITSSIHDLEQRIQKTKDNVEEIQNIMKTWVTPIFKTKDGKRESLLSLDDRHDRMEKYYNLIKESGLKIHALVQENLGLFSADPTSNIWKTYVNSIDNLLLNGFFLAIECSLKYLLENTECKAGLTPIFEAQLSLAIPELVFYPSLESGVKGGFCDIVEGLITSIFRIPSLVPRLSPQNGSPHYQVDLDGIPDLANMRRTLMERVQRMMGLCCGYQSTFSQYSYLYVEDRKEVLGQFLLYGHILTPEEIEDHVEDGIPENPPLLSQFKVQIDSYETLYEEVCRLEPIKVFDGWMKIDIRPFKASLLNIIKRWSLLFKQHLVDHVTHSLANLDAFIKKSESGLLKKVEKGDFQGLVEIMGHLMAVKERQSNTDEMFEPLKQTIELLKTYEQELPETVFKQLEELPEKWNNIKKVAITVKQQVAPLQANEVTLLRQRCTAFDAEQQQFWEQFHKEAPFRFDSIHPHQMLDARHIEIQQMESTMASISESASLFEVNVPDYKQLRQCRKEVCQLKELWDTIGMVTSSIHAWETTPWRNINVEAMELECKQFARHIRNLDKEVRAWDAFTGLESTVWNTLSSLRAVAELQNPAIRERHWRQLMQATGVSFTMDQDTTLAHLLQLQLHHYEDEVRGIVDKAAKEMGMEKTLKELQTTWAGMEFQYEPHPRTNVPLLCSDEDLIEVLEDNQVQLQNLVMSKYVAFFLEEVSGWQKKLSTVDAVISIWFEVQRTWTHLESIFTGSEDIRAQLPQDSKRFEGIDIDFKELAYDAQKIPNVVQTTNKPGLYEKLEDIQGRLCLCEKALAEYLDTKRLAFPRFYFLSSSDLLDILSNGTAPQQVQRHLSKLFDNMAKMRFQLDASGEPTKTSLGMYSKEEEYVAFSEPCDCSGQVEIWLNHVLGHMKATVRHEMTEGVTAYEEKPREQWLFDHPAQVALTCTQIWWTTEVGMAFARLEEGYESAMKDYYKKQVAQLKTLITMLIGQLSKGDRQKIMTICTIDVHARDVVAKMIAQKVDNAQAFLWLSQLRHRWDDEVKHCFANICDAQFLYSYEYLGNTPRLVITPLTDRCYITLTQSLHLTMSGAPAGPAGTGKTETTKDLGRALGILVYVFNCSEQMDYKSCGNIYKGLAQTGAWGCFDEFNRISVEVLSVVAVQVKSIQDAIRDKKQWFSFLGEEISLNPSVGIFITMNPGYAGRTELPENLKSLFRPCAMVVPDFELICEIMLVAEGFIEAQSLARKFITLYQLCKELLSKQDHYDWGLRAIKSVLVVAGSLKRGDPDRPEDQVLMRSLRDFNIPKIVTDDMPIFMGLIGDLFPALDVPRRRDPNFEALVRKAIVDLKLQAEDNFVLKVVQLEELLAVRHSVFVVGGAGTGKSQVLRSLHKTYQIMKRRPVWTDLNPKAVTNDELFGIINPATGEWKDGLFSSIMRELANITHDGPKWILLDGDIDPMWIESLNTVMDDNKVLTLASNERIPLNPTMKLLFEISHLRTATPATVSRAGILYINPADLGWNPPVSSWIEKREIQTERANLTILFDKYLPTCLDTLRTRFKKIIPIPEQSMVQMVCHLLECLLTTEDIPADCPKEIYEHYFVFAAIWAFGGAMVQDQLVDYRAEFSKWWLTEFKTVKFPSQGTIFDYYIDPETKKFEPWSKLVPQFEFDPEMPLQACLVHTSETIRVCYFMERLMARQRPVMLVGTAGTGKSVLVGAKLASLDPEAYLVKNVPFNYYTTSAMLQAVLEKPLEKKAGRNYGPPGNKKLIYFIDDMNMPEVDAYGTVQPHTIIRQHLDYGHWYDRSKLSLKEITNVQYVSCMNPTAGSFTINPRLQRHFSVFVLSFPGADALSSIYSIILTQHLKLGNFPASLQKSIPPLIDLALAFHQKIATTFLPTGIKFHYIFNLRDFANIFQGILFSSVECVKSTWDLIRLYLHESNRVYRDKMVEEKDFDLFDKIQTEVLKKTFDDIEDPVEQTQSPNLYCHFANGIGEPKYMPVQSWELLTQTLVEALENHNEVNTVMDLVLFEDAMRHVCHINRILESPRGNALLVGVGGSGKQSLTRLAAFISSMDVFQITLRKGYQIQDFKMDLASLCLKAGVKNLNTVFLMTDAQVADERFLVLINDLLASGEIPDLYSDDEVENIISNVRNEVKSQGLVDNRENCWKFFIDRIRRQLKVTLCFSPVGNKLRVRSRKFPAIVNCTAIHWFHEWPQQALESVSLRFLQNTEGIEPTVKQSISKFMAFVHTSVNQTSQSYLSNEQRYNYTTPKSFLEFIRLYQSLLHRHRKELKCKTERLENGLLKLHSTSAQVDDLKAKLAAQEVELKQKNEDADKLIQVVGVETDKVSREKAMADEEEQKVAVIMLEVKQKQKDCEEDLAKAEPALTAAQAALNTLNKTNLTELKSFGSPPLAVSNVSAAVMVLMAPRGRVPKDRSWKAAKVTMAKVDGFLDSLINFNKENIHENCLKAIRPYLQDPEFNPEFVATKSYAAAGLCSWVINIVRFYEVFCDVEPKRQALNKATADLTAAQEKLAAIKAKIAHLNENLAKLTARFEKATADKLKCQQEAEVTAVTISLANRLVGGLASENVRWADAVQNFKQQERTLCGDILLITAFISYLGFFTKKYRQSLLDRTWRPYLSQLKTPIPVTPALDPLRMLMDDADVAAWQNEGLPADRMSVENATILINCERWPLMVDPQLQGIKWIKNKYGEDLRVTQIGQKGYLQIIEQALEAGAVVLIENLEESIDPVLGPLLGREVIKKGRFIKIGDKECEYNPKFRLILHTKLANPHYQPELQAQATLINFTVTRDGLEDQLLAAVVSMERPDLEQLKSDLTKQQNGFKITLKTLEDSLLSRLSSASGNFLGETVLVENLEITKQTAAEVEKKVQEAKVTEVKINEAREHYRPAAARASLLYFIMNDLSKIHPMYQFSLKAFSIVFQKAVERAAPDESLRERVANLIDSITFSVYQYTIRGLFECDKLTYLAQLTFQILLMNREVNAVELDFLLRSPVQTGTASPVEFLSHQAWGAVKVLSSMEEFSNLDRDIEGSAKSWKKFVESECPEKEKLPQEWKNKTALQRLCMLRAMRPDRMTYALRDFVEEKLGSKYVVGRALDFATSFEESGPATPMFFILSPGVDPLKDVESQGRKLGYTFNNQNFHNVSLGQGQEVVAEAALDLAAKKGHWVILQDTLEMCSRETEFKSILFALCYFHAVVAERRKFGPQGWNRSYPFNTGDLTISVNVLYNFLEANAKVPYDDLRYLFGEIMYGGHITDDWDRRLCRTYLGEFIRPEMLEGELSLAPGFPLPGNMDYNGYHQYIDAELPPESPYLYGLHPNAEIGFLTQTSEKLFRTVLELQPRDSQARDGAGATREEKVKALLEEILERVTDEFNIPELMAKVEERTPYIVVAFQECGRMNILTREIQRSLRELELGLKGELTMTSHMENLQNALYFDMVPESWARRAYPSTAGLAAWFPDLLNRIKELEAWTGDFTMPSTVWLTGFFNPQSFLTAIMQSTARKNEWPLDQMALQCDMTKKNREEFRSPPREGAYIHGLFMEGACWDTQAGIITEAKLKDLTPPMPVMFIKAIPADKQDCRSVYSCPVYKTSQRGPTYVWTFNLKTKENPSK

SEQ ID NO: 805864 - protein, 1486 aa, Homo sapiens
LEYSSTFTMVERGHPEFLGKKPRSGSLVPSDSAALYLCIRSCHLFCSTELGPQVMPNRPVTSPVPTVPPVTTPDKSRASPMQVDDLKAKLAAQEVELKQKNEDADKLIQVVGVETDKVSREKAMADEEEQKVAVIMLEVKQKQKDCEEDLAKAEPALTAAQAALNTLNKTNLTELKSFGSPPLAVSNVSAAVMVLMAPRGRVPKDRSWKAAKVTMAKVDGFLDSLINFNKENIHENCLKAIRPYLQDPEFNPEFVATKSYAAAGLCSWVINIVRFYEVFCDVEPKRQALNKATADLTAAQEKLAAIKAKIAHLNENLAKLTARFEKATADKLKCQQEAEVTAVTISLANRLVGGLASENVRWADAVQNFKQQERTLCGDILLITAFISYLGFFTKKYRQSLLDRTWRPYLSQLKTPIPVTPALDPLRMLMDDADVAAWQNEGLPADRMSVENATILINCERWPLMVDPQLQGIKWIKNKYGEDLRVTQIGQKGYLQIIEQALEAGAVVLIENLEESIDPVLGPLLGREVIKKGRFIKIGDKECEYNPKFRLILHTKLANPHYQPELQAQATLINFTVTRDGLEDQLLAAVVSMERPDLEQLKSDLTKQQNGFKITLKTLEDSLLSRLSSASGNFLGETVLVENLEITKQTAAEVEKKVQEAKVTEVKINEAREHYRPAAARASLLYFIMNDLSKIHPMYQFSLKAFSIVFQKAVERAAPDESLRERVANLIDSITFSVYQYTIRGLFECDKLTYLAQLTFQILLMNREVNAVELDFLLRSPVQTGTASPVEFLSHQAWGAVKVLSSMEEFSNLDRDIEGSAKSWKKFVESECPEKEKLPQEWKNKTALQRLCMLRAMRPDRMTYALRDFVEEKLGSKYVVGRALDFATSFEESGPATPMFFILSPGVDPLKDVESQGRKLGYTFNNQNFHNVSLGQGQEVVAEAALDLAAKKGHWVILQNIHLVAKWLSTLEKKLEEHSENSHPEFRVFMSAEPAPSPEGHIIPQGILENSIKITNEPPTGMHANLHKALDNFTQDTLEMCSRETEFKSILFALCYFHAVVAERRKFGPQGWNRSYPFNTGDLTISVNVLYNFLEANAKVPYDDLRYLFGEIMYGGHITDDWDRRLCRTYLGEFIRPEMLEGELSLAPGFPLPGNMDYNGYHQYIDAELPPESPYLYGLHPNAEIGFLTQTSEKLFRTVLELQPRDSQARDGAGATREEKVKALLEEILERVTDEFNIPELMAKVEERTPYIVVAFQECGRMNILTREIQRSLRELELGLKGELTMTSHMENLQNALYFDMVPESWARRAYPSTAGLAAWFPDLLNRIKELEAWTGDFTMPSTVWLTGFFNPQSFLTAIMQSTARKNEWPLDQMALQCDMTKKNREEFRSPPREGAYIHGLFMEGACWDTQAGIITEAKLKDLTPPMPVMFIKAIPADKQDCRSVYSCPVYKTSQRGPTYVWTFNLKTKENPSKWVLAGVALLLQI

SEQ ID NO: 805865 - protein, 3633 aa, Homo sapiens
MRLAEERAALAAENADGEPGADRRLRLLGTYVAMSLRPAAGAWERCAGSAEAEQLLQAFLGRDAAEGPRPLLVVRPGPRGLAIRPGLEVGPESGLAGAKALFFLRTGPEPPGPDSFRGAVVCGDLPAAPLEHLAALFSEVVLPVLANEKNRLNWPHMICEDVRRHAHSLQCDLSVILEQVKGKTLLPLPAGSEKMEFADSKSETVLDSIDKSVIYAIESAVIKWSYQVQVVLKRESSQPLLQGENPTPKVELEFWKSRYEDLKYIYNQLRTITVRGMAKLLDKLQSSYFPAFKAMYRDVVAALAEAQDIHVHLIPLQRHLEALENAEFPEVKPQLRPLLHVVCLIWATCKSYRSPGRLTVLLQEICNLLIQQASNYLSPEDLLRSEVEESQRKLQVVSDTLSFFKQEFQDRRENLHTYFKENQEVKEWDFQSSLVFVRLDGFLGRLHVVEGLLKTALDFHKLGKVEFSGVRGNALSQQVQQMHEEFQEMYRLLSGSSSDCLYLQSTDFENDVSEFNQKVEDLDRRLGTIFIQAFDDAPGLEHAFKLLDIAGNLLERPLVARDTSDKYLVLIQMFNKDLDAVRMIYSQHVQEEAELGFSPVHKNMPTVAGGLRWAQELRQRIQGPFSNFGRITHPCMESAEGKRMQQKYEDMLSLLEKYETRLYEDWCRTVSEKSQYNLSQPLLKRDPETKEITINFNPQLISVLKEMSYLEPREMKHMPETAAAMFSSRDFYRQLVANLELMANWYNKVMKTLLEVEFPLVEEELQNIDLRLRAAEETLNWKTEGICDYVTEITSSIHDLEQRIQKTKDNVEEIQNIMKTWVTPIFKTKDGKRESLLSLDDRHDRMEKYYNLIKESGLKIHALVQENLGLFSADPTSNIWKTYVNSIDNLLLNGFFLAIECSLKYLLENTECKAGLTPIFEAQLSLAIPELVFYPSLESGVKGGFCDIVEGLITSIFRIPSLVPRLSPQNGSPHYQVDLDGIPDLANMRRTLMERVQRMMGLCCGYQSTFSQYSYLYVEDRKEVLGQFLLYGHILTPEEIEDHVEDGIPENPPLLSQFKVQIDSYETLYEEVCRLEPIKVFDGWMKIDIRPFKASLLNIIKRWSLLFKQHLVDHVTHSLANLDAFIKKSESGLLKKVEKGDFQGLVEIMGHLMAVKERQSNTDEMFEPLKQTIELLKTYEQELPETVFKQLEELPEKWNNIKKVAITVKQQVAPLQANEVTLLRQRCTAFDAEQQQFWEQFHKEAPFRFDSIHPHQMLDARHIEIQQMESTMASISESASLFEVNVPDYKQLRQCRKEVCQLKELWDTIGMVTSSIHAWETTPWRNINVEAMELECKQFARHIRNLDKEVRAWDAFTGLESTVWNTLSSLRAVAELQNPAIRERHWRQLMQATGVSFTMDQDTTLAHLLQLQLHHYEDEVRGIVDKAAKEMGMEKTLKELQTTWAGMEFQYEPHPRTNVPLLCSDEDLIEVLEDNQVQLQNLVMSKYVAFFLEEVSGWQKKLSTVDAVISIWFEVQRTWTHLESIFTGSEDIRAQLPQDSKRFEGIDIDFKELAYDAQKIPNVVQTTNKPGLYEKLEDIQGRLCLCEKALAEYLDTKRLAFPRFYFLSSSDLLDILSNGTAPQQVQRHLSKLFDNMAKMRFQLDASGEPTKTSLGMYSKEEEYVAFSEPCDCSGQVEIWLNHVLGHMKATVRHEMTEGVTAYEEKPREQWLFDHPAQVALTCTQIWWTTEVGMAFARLEEGYESAMKDYYKKQVAQLKTLITMLIGQLSKGDRQKIMTICTIDVHARDVVAKMIAQKVDNAQAFLWLSQLRHRWDDEVKHCFANICDAQFLYSYEYLGNTPRLVITPLTDRCYITLTQSLHLTMSGAPAGPAGTGKTETTKDLGRALGILVYVFNCSEQMDYKSCGNIYKGLAQTGAWGCFDEFNRISVEVLSVVAVQVKSIQDAIRDKKQWFSFLGEEISLNPSVGIFITMNPGYAGRTELPENLKSLFRPCAMVVPDFELICEIMLVAEGFIEAQSLARKFITLYQLCKELLSKQDHYDWGLRAIKSVLVVAGSLKRGDPDRPEDQVLMRSLRDFNIPKIVTDDMPIFMGLIGDLFPALDVPRRRDPNFEALVRKAIVDLKLQAEDNFVLKVVQLEELLAVRHSVFVVGGAGTGKSQVLRSLHKTYQIMKRRPVWTDLNPKAVTNDELFGIINPATGEWKDGLFSSIMRELANITHDGPKWILLDGDIDPMWIESLNTVMDDNKVLTLASNERIPLNPTMKLLFEISHLRTATPATVSRAGILYINPADLGWNPPVSSWIEKREIQTERANLTILFDKYLPTCLDTLRTRFKKIIPIPEQSMVQMVCHLLECLLTTEDIPADCPKEIYEHYFVFAAIWAFGGAMVQDQLVDYRAEFSKWWLTEFKTVKFPSQGTIFDYYIDPETKKFEPWSKLVPQFEFDPEMPLQACLVHTSETIRVCYFMERLMARQRPVMLVGTAGTGKSVLVGAKLASLDPEAYLVKNVPFNYYTTSAMLQAVLEKPLEKKAGRNYGPPGNKKLIYFIDDMNMPEVDAYGTVQPHTIIRQHLDYGHWYDRSKLSLKEITNVQYVSCMNPTAGSFTINPRLQRHFSVFVLSFPGADALSSIYSIILTQHLKLGNFPASLQKSIPPLIDLALAFHQKIATTFLPTGIKFHYIFNLRDFANIFQGILFSSVECVKSTWDLIRLYLHESNRVYRDKMVEEKDFDLFDKIQTEVLKKTFDDIEDPVEQTQSPNLYCHFANGIGEPKYMPVQSWELLTQTLVEALENHNEVNTVMDLVLFEDAMRHVCHINRILESPRGNALLVGVGGSGKQSLTRLAAFISSMDVFQITLRKGYQIQDFKMDLASLCLKAGVKNLNTVFLMTDAQVADERFLVLINDLLASGEIPDLYSDDEVENIISNVRNEVKSQGLVDNRENCWKFFIDRIRRQLKVTLCFSPVGNKLRVRSRKFPAIVNCTAIHWFHEWPQQALESVSLRFLQNTEGIEPTVKQSISKFMAFVHTSVNQTSQSYLSNEQRYNYTTPKSFLEFIRLYQSLLHRHRKELKCKTERLENGLLKLHSTSAQVDDLKAKLAAQEVELKQKNEDADKLIQVVGVETDKVSREKAMADEEEQKVAVIMLEVKQKQKDCEEDLAKAEPALTAAQAALNTLNKTNLTELKSFGSPPLAVSNVSAAVMVLMAPRGRVPKDRSWKAAKVTMAKVDGFLDSLINFNKENIHENCLKAIRPYLQDPEFNPEFVATKSYAAAGLCSWVINIVRFYEVFCDVEPKRQALNKATADLTAAQEKLAAIKAKIAHLNENLAKLTARFEKATADKLKCQQEAEVTAVTISLANRLVGGLASENVRWADAVQNFKQQERTLCGDILLITAFISYLGFFTKKYRQSLLDRTWRPYLSQLKTPIPVTPALDPLRMLMDDADVAAWQNEGLPADRMSVENATILINCERWPLMVDPQLQGIKWIKNKYGEDLRVTQIGQKGYLQIIEQALEAGAVVLIENLEESIDPVLGPLLGREVIKKGRFIKIGDKECEYNPKFRLILHTKLANPHYQPELQAQATLINFTVTRDGLEDQLLAAVVSMERPDLEQLKVRTEGRKCSATRACSVLHSGRGCRGGLFFLD

SEQ ID NO: 805866 - protein, 332 aa, Homo sapiens
MRLAEERAALAAENADGEPGADRRLRLLGTYVAMSLRPAAGAWERCAGSAEAEQLLQAFLGRDAAEGPRPLLVVRPGPRGLAIRPGLEVGPESGLAGAKALFFLRTGPEPPGPDSFRGAVVCGDLPAAPLEHLAALFSEVVLPVLANEKNRLNWPHMICEDVRRHAHSLQCDLSVILEQVKGKTLLPLPAGSEKMEFADSKSETVLDSIDKSVIYAIESAVIKWSYQVQVVLKRESSQPLLQGENPTPKVELEFWKSRYEDLKYIYNQLRTITVRGMAKLLDKLQSSYFPAFKAMYRDVVADGTAISWPFEHQTRSTLIKIAKPAKSMIRSR

SEQ ID NO: 805867 - protein, 188 aa, Homo sapiens
MVERGHPEFLGKKPRSGSLVPSDSAALYLCIRSCHLFCSTELGPQVMPNRPVTSPVPTVPPVTTPDKSRASPMQVDDLKAKLAAQEVELKQKNEDADKLIQVVGVETDKVSREKAMADEEEQKVAVIMLEVKQKQKDCEEDLAKAEPALTAAQAALNTLNKVGGLSAIPAHPSGAGRRRDHLGIPKRC

SEQ ID NO: 805868 - protein, 736 aa, Homo sapiens
TSASCAAASGCFRIWYLGRAPRGSLSSLHRICLSPVHRILRGVPSKKNGLCCCCVWVPSPDASAARVMWTLVGRGWGCARALAPRATGAALLVAPGPRSAPTLGAAPESWATDRLYSSAEFKEKPDMSRFPVENIRNFSIVAHVDHGKSTLADRLLELTGTIDKTKNNKQVLDKLQVERERGITVKAQTASLFYNCEGKQYLLNLIDTPGHVDFSYEVSRSLSACQGVLLVVDANEGIQAQTVANFFLAFEAQLSVIPVINKIDLKNADPERVENQIEKVFDIPSDECIKISAKLGTNVESVLQAIIERIPPPKVHRKNPLRALVFDSTFDQYRGVIANVALFDGVVSKGDKIVSAHTQKTYEVNEVGVLNPNEQPTHKLYAGQVGYLIAGMKDVTEAQIGDTLCLHKQPVEPLPGFKSAKPMVFAGMYPLDQSEYNNLKSAIEKLTLNDSSVTVHRDSSLALGAGWRLGFLGLLHMEVFNQRLEQEYNASVILTTPTVPYKAVLSSSKLIKEHREKEITIINPAQFPDKSKVTEYLEPVVLGTIITPDEYTGKIMMLCEARRAVQKNMIFIDQNRVMLKYLFPLNEIVVDFYDSLKSLSSGYASFDYEDAGYQTAELVKMDILLNGNTVEELVTVVHKDKAHSIGKAICERLKDSLPRQLFEIAIQAAIGSKIIARETVKAYRKNVLAKCYGGDITRKMKLLKRQAEGKKKLRKIGNVEVPKDAFIKVLKTQSSK

SEQ ID NO: 805869 - protein, 736 aa, Homo sapiens; identical to SEQ ID NO: 805868

SEQ ID NO: 805870 - protein, 736 aa, Homo sapiens; identical to SEQ ID NO: 805868

SEQ ID NO: 805871 - protein, 736 aa, Homo sapiens; identical to SEQ ID NO: 805868

SEQ ID NO: 805872 - protein, 736 aa, Homo sapiens; identical to SEQ ID NO: 805868

SEQ ID NO: 805873 - protein, 669 aa, Homo sapiens
DVGKLRRRFGLLPDLVLGQSSPGFIVFASQDLFESCPPDPTGGTFEKKRAMLLLREKPDMSRFPVENIRNFSIVAHVDHGKSTLADRLLELTGTIDKTKNNKQVLDKLQVERERGITVKAQTASLFYNCEGKQYLLNLIDTPGHVDFSYEVSRSLSACQGVLLVVDANEGIQAQTVANFFLAFEAQLSVIPVINKIDLKNADPERVENQIEKVFDIPSDECIKISAKLGTNVESVLQAIIERIPPPKVHRKNPLRALVFDSTFDQYRGVIANVALFDGVVSKGDKIVSAHTQKTYEVNEVGVLNPNEQPTHKLYAGQVGYLIAGMKDVTEAQIGDTLCLHKQPVEPLPGFKSAKPMVFAGMYPLDQSEYNNLKSAIEKLTLNDSSVTVHRDSSLALGAGWRLGFLGLLHMEVFNQRLEQEYNASVILTTPTVPYKAVLSSSKLIKEHREKEITIINPAQFPDKSKVTEYLEPVVLGTIITPDEYTGKIMMLCEARRAVQKNMIFIDQNRVMLKYLFPLNEIVVDFYDSLKSLSSGYASFDYEDAGYQTAELVKMDILLNGNTVEELVTVVHKDKAHSIGKAICERLKDSLPRQLFEIAIQAAIGSKIIARETVKAYRKNVLAKCYGGDITRKMKLLKRQAEGKKKLRKIGNVEVPKDAFIKVLKTQSSK

SEQ ID NO: 805874 - protein, 650 aa, Homo sapiens
DVGKLRRRFGLLPDLVLGQSSPGFIVFASQDLFESCPPDPTGGTFEKKRAMLLLREKPDMSRFPVENIRNFSIVAHVDHGKSTLADRLLELTGERGITVKAQTASLFYNCEGKQYLLNLIDTPGHVDFSYEVSRSLSACQGVLLVVDANEGIQAQTVANFFLAFEAQLSVIPVINKIDLKNADPERVENQIEKVFDIPSDECIKISAKLGTNVESVLQAIIERIPPPKVHRKNPLRALVFDSTFDQYRGVIANVALFDGVVSKGDKIVSAHTQKTYEVNEVGVLNPNEQPTHKLYAGQVGYLIAGMKDVTEAQIGDTLCLHKQPVEPLPGFKSAKPMVFAGMYPLDQSEYNNLKSAIEKLTLNDSSVTVHRDSSLALGAGWRLGFLGLLHMEVFNQRLEQEYNASVILTTPTVPYKAVLSSSKLIKEHREKEITIINPAQFPDKSKVTEYLEPVVLGTIITPDEYTGKIMMLCEARRAVQKNMIFIDQNRVMLKYLFPLNEIVVDFYDSLKSLSSGYASFDYEDAGYQTAELVKMDILLNGNTVEELVTVVHKDKAHSIGKAICERLKDSLPRQLFEIAIQAAIGSKIIARETVKAYRKNVLAKCYGGDITRKMKLLKRQAEGKKKLRKIGNVEVPKDAFIKVLKTQSSK

SEQ ID NO: 805875 - protein, 717 aa, Homo sapiens
TSASCAAASGCFRIWYLGRAPRGSLSSLHRICLSPVHRILRGVPSKKNGLCCCCVWVPSPDASAARVMWTLVGRGWGCARALAPRATGAALLVAPGPRSAPTLGAAPESWATDRLYSSAEFKEKPDMSRFPVENIRNFSIVAHVDHGKSTLADRLLELTGERGITVKAQTASLFYNCEGKQYLLNLIDTPGHVDFSYEVSRSLSACQGVLLVVDANEGIQAQTVANFFLAFEAQLSVIPVINKIDLKNADPERVENQIEKVFDIPSDECIKISAKLGTNVESVLQAIIERIPPPKVHRKNPLRALVFDSTFDQYRGVIANVALFDGVVSKGDKIVSAHTQKTYEVNEVGVLNPNEQPTHKLYAGQVGYLIAGMKDVTEAQIGDTLCLHKQPVEPLPGFKSAKPMVFAGMYPLDQSEYNNLKSAIEKLTLNDSSVTVHRDSSLALGAGWRLGFLGLLHMEVFNQRLEQEYNASVILTTPTVPYKAVLSSSKLIKEHREKEITIINPAQFPDKSKVTEYLEPVVLGTIITPDEYTGKIMMLCEARRAVQKNMIFIDQNRVMLKYLFPLNEIVVDFYDSLKSLSSGYASFDYEDAGYQTAELVKMDILLNGNTVEELVTVVHKDKAHSIGKAICERLKDSLPRQLFEIAIQAAIGSKIIARETVKAYRKNVLAKCYGGDITRKMKLLKRQAEGKKKLRKIGNVEVPKDAFIKVLKTQSSK

SEQ ID NO: 805876 - protein, 536 aa, Homo sapiens
FLLLLLIVYPSHCACSARMLCPCVESGSDRGEIHRRHTLISNIYVYCRFRRGAYRYIPVINKIDLKNADPERVENQIEKVFDIPSDECIKISAKLGTNVESVLQAIIERIPPPKVHRKNPLRALVFDSTFDQYRGVIANVALFDGVVSKGDKIVSAHTQKTYEVNEVGVLNPNEQPTHKLYAGQVGYLIAGMKDVTEAQIGDTLCLHKQPVEPLPGFKSAKPMVFAGMYPLDQSEYNNLKSAIEKLTLNDSSVTVHRDSSLALGAGWRLGFLGLLHMEVFNQRLEQEYNASVILTTPTVPYKAVLSSSKLIKEHREKEITIINPAQFPDKSKVTEYLEPVVLGTIITPDEYTGKIMMLCEARRAVQKNMIFIDQNRVMLKYLFPLNEIVVDFYDSLKSLSSGYASFDYEDAGYQTAELVKMDILLNGNTVEELVTVVHKDKAHSIGKAICERLKDSLPRQLFEIAIQAAIGSKIIARETVKAYRKNVLAKCYGGDITRKMKLLKRQAEGKKKLRKIGNVEVPKDAFIKVLKTQSSK

SEQ ID NO: 805877 - protein, 387 aa, Homo sapiens
TSASCAAASGCFRIWYLGRAPRGSLSSLHRICLSPVHRILRGVPSKKNGLCCCCVWVPSPDASAARVMWTLVGRGWGCARALAPRATGAALLVAPGPRSAPTLGAAPESWATDRLYSSAEFKEKPDMSRFPVENIRNFSIVAHVDHGKSTLADRLLELTGTIDKTKNNKQVLDKLQVERERGITVKAQTASLFYNCEGKQYLLNLIDTPGHVDFSYEVSRSLSACQGVLLVVDANEGIQAQTVANFFLAFEAQLSVIPVINKIDLKNADPERVENQIEKVFDIPSDECIKISAKLGTNVESVLQAIIERIPPPKVHRKNPLRALVFDSTFDQYRGVIANVALFDGVVSKGDKIVSAHTQKTYEVNEVGVLNPNEQPTHKLNVSSRPI

SEQ ID NO: 805878 - protein, 387 aa, Homo sapiens; identical to SEQ ID NO: 805877

SEQ ID NO: 805879 - protein, 387 aa, Homo sapiens; identical to SEQ ID NO: 805877

SEQ ID NO: 805880 - protein, 387 aa, Homo sapiens; identical to SEQ ID NO: 805877

SEQ ID NO: 805881 - protein, 380 aa, Homo sapiens
TSASCAAASGCFRIWYLGRAPRGSLSSLHRICLSPVHRILRGVPSKKNGLCCCCVWVPSPDASAARVMWTLVGRGWGCARALAPRATGAALLVAPGPRSAPTLGAAPESWATDRLYSSAEFKEKPDMSRFPVENIRNFSIVAHVDHGKSTLADRLLELTGTIDKTKNNKQVLDKLQVERERGITVKAQTASLFYNCEGKQYLLNLIDTPGHVDFSYEVSRSLSACQGVLLVVDANEGIQAQTVANFFLAFEAQLSVIPVINKIDLKNADPERVENQIEKVFDIPSDECIKISAKLGTNVESVLQAIIERIPPPKVHRKNPLRALVFDSTFDQYRGVIANVALFDGVVSKGDKIVSAHTQKTYEVNEVGVLNPNEQPTHKL

SEQ ID NO: 805882 - protein, 129 aa, Homo sapiens
MSLAVWRHVGGVRALTGQPLGGPAYPSMNVANSSPLLCLLQGEGGLGTSAHKEKTAPVRVPPELPSPGPRLTSRLILTAHEAFVAFIFQQLKQIGEIQLSGAAGLPSAWDLCHLHMPWGQMWTNVGSRL

SEQ ID NO: 805883 - protein, 170 aa, Homo sapiens
RRAEFQGGWLSTSQLSMLFTEECDKVRDLMHVHSFSYDFHLRLVHQHVLGAHLVLRHGYHLTTFLRHFLAHHPDGPHFGRNHIYQGTLELPTPLIAAHQLYNYVASAKRAHVQHVSPGEELSAGLSEAPRKKPVRPQKRCRFSLSLLLKGCSTVTDKQRHIKVILVSKSL

SEQ ID NO: 805884 - protein, 2198 aa, Homo sapiens
AANHCALLQEHAQRCYVRGLFRSLQQAQSVTSQDLLTAVDACEELLQEIDITPFLLALCGHTWGLPHAPPSPGPLSPGPFSSSMEEGAEPRERAILASESSIETEDLSEPEFQSTRVPGIPDPGPEISLTDVCQLRGEAHGALHSVIQVGSLGEGRRGVRVLPVQRDRILSWAGGMHVSCSRVGSSILLRGDWHSNLLLNPKQEKFLEISRLHFRTVPSNPHYFFYCPPSSRREDEGPRDTVDRKISDLEFSEAELMGEEGDTSACCVVTESDPELEVEYRESRESDLGPAGLDSASLSDVDTVNPDEDSFSILGGDSPTGPESFLHDLPPLFLHLTCSVRLRGQHSSVPVCSLPTCLGQFSSLKGPPVEGRVPLRDLSVTLDVFMLTLPLEVELPTASDPQHHRSTSESSASFPRSPGQPSSLRSDDGLGPPLPPPEEERHPGLSNLATPHRLAIETTMNEIRWLLEDEMVGALRRGGIPQSPALHRAAAHIHSSPGRSTCLRQTLPLSFVFGPERSLTQFKEEFRRLHLPGHVLLEDPDSGFFFVAAGQQPGGSHGEPSSAAWAWHSHEDRAEGIEGETLTASPQAPGSPEDSEGVPLISLPRVPQGGSQPGPSRGLSLMSSQGSVDSDHLGYDGGSSGSDSEGPNDTLGEKAPFTLRTPPGPAPPQPSLSGLPGPCLPDFWLIVRVLQDRVEVYAHARSLIREDGGPGTECRHLQQLLVRRVGEICREVNQRLLLQDLHDSHVCNSLLVAESEEDLWRSETPFHSRQRAPLPSDDYAADESCAPRGYLAATMQFVPGHFSCDVVWGTVIRVHSRLKMGPSMGVSRAIQALRSVLNAFSVVNRKNMFVYQERATKAVYYLRLLETSCSDRPWKGDALPPSLALSRSQEPIYSEEASGPRSPLDMVSSRSSDAARPVGQVDRHIQLLVHGVGQAGPEITDELVRVLCRRLDEATLDVITVMLVRNCKLTPADVEFIQPPGSLPSEVLHLALPTSCRPWLPALAWYLRQNLLIFLHSPKYTDSNSRNHFQHPLPPQGGLPDLDIYLYNKPGGQGTGGKGVACITLAFVDEGGAPLSLALWPPSSPGPPDPLREEEFEQLTQVIRCPVVVDSSSAQNGAPRLRLDVWEKGNISIVQLEEKLRGAARQALADAIIELQLLPASLCTEDTPTGSLRNGSLETKSSAGRASTFPPAPVPGEPVTPPSKAGRRSFWDMLSKTECGDLGSPKTTDDIVLDRPEDTRGRRRHKTESVRTPGGAERAPGSDSGAQRQKRRTTQLEEGEVGTLHPVFARVAQRWMEFMVQIGCASVSRSSAHMVSRFLLPSILSEFTALVTSMAGDTSVRIFEQHLGSEPEIFGPCSPGQLGPSPRPAAERHLLLLGRNFLQWRRPTQQAAKAMQRFEPGGDGSSGRNAPRQRLLLLEVVDKKLQLLTYNWAPDLGAALGRALVRLVQWQNARAHLIFCLLSQKLGLFHHYGQLDFPVRDEKEPNPFLLPTMEVETLIRSASPPLSREQGRLSGSSRGGGPLPLDTFPFDEALRDITAARPSSVLGPVPRPPDPVTYHGQQFLEIKMAERRELERQMKMENLFVTWQQRSTPATMPISAGELETLKQSSRLVHYCATAMLFDPAAWLHGPPETSGPPDGQRRHRPESGSGSREAPTSCESLDVSPPGAREEPWLKELSLAFLQQYVQYLQSIGFVLVPLRPPSPARSTSRPRAMAILGTEGRGSFSCPKTKTDGSPKSTSSPVTTYHLQRALPGGIILMELAFQGCYFCVKQFALECSRIPMGQAVNSQLSMLFTEECDKVRDLMHVHSFSYDFHLRLVHQHVLGAHLVLRHGYHLTTFLRHFLAHHPDGPHFGRNHIYQGTLELPTPLIAAHQLYNYVADHASSYHMKPLRMARPGGPEHNEYALVSAWHSSGSYLDSEGLRHQDDFDVSLLVCHCAAPFEEQGEAERHVLRLQFFVVLTSQRELFPRLTADMRRFRKPPRLPPEPEAPGSSAGSPGEASGLILAPGPAPLFPPLAAEVGMARARLAQLVRLAGGHCRRDTLWKRLFLLEPPGPDRLRLGGRLALAELEELLEAVHAKSIGDIDPQLDCFLSMTVSWYQSLIKVLLSRFPQSCRHFQSPDLGTQYLVVLNQKFTDCFVLVFLDSHLGKTSLTVVFREPFPVQPQDSESPPAQLVSTYHHLESVINTACFTLWTRLL

SEQ ID NO: 805885 - protein, 2142 aa, Homo sapiens
AANHCALLQEHAQRCYVRGLFRSLQQAQSVTSQDLLTAVDACEELLQEIDITPFLLALCGHTWGLPHAPPSPGPLSPGPFSSSMEEGAEPRERAILASESSIETEDLSEPEFQSTRVPGIPDPGPEISLTDVCQLRGEAHGALHSVIQEKFLEISRLHFRTVPSNPHYFFYCPPSSRREDEGPRDTVDRKISDLEFSEAELMGEEGDTSACCVVTESDPELEVEYRESRESDLGPAGLDSASLSDVDTVNPDEDSFSILGGDSPTGPESFLHDLPPLFLHLTCSVRLRGQHSSVPVCSLPTCLGFSSLKGPPVEGRVPLRDLSVTLDVFMLTLPLEVELPTASDPQHHRSTSESSASFPRSPGQPSSLRSDDGLGPPLPPPEEERHPGLSNLATPHRLAIETTMNEIRWLLEDEMVGALRRGGIPQSPALHRAAAHIHSSPGRSTCLRQTLPLSFVFGPERSLTQFKEEFRRLHLPGHVLLEDPDSGFFFVAAGQQPGGSHGEPSSAAWAWHSHEDRAEGIEGETLTASPQAPGSPEDSEGVPLISLPRVPQGGSQPGPSRGLSLMSSQGSVDSDHLGYDGGSSGSDSEGPNDTLGEKAPFTLRTPPGPAPPQPSLSGLPGPCLPDFWLIVRVLQDRVEVYAHARSLIREDGGPGTECRHLQQLLVRRVGEICREVNQRLLLQDLHDSHVCNSLLVAESEEDLWRSETPFHSRQRAPLPSDDYAADESCAPRGYLAATMQFVPGHFSCDVVWGTVIRVHSRLKMGPSMGVSRAIQALRSVLNAFSVVNRKNMFVYQERATKAVYYLRLLETSCSDRPWKGDALPPSLALSRSQEPIYSEEASGPRSPLDMVSSRSSDAARPVGQVDRHIQLLVHGVGQAGPEITDELVRVLCRRLDEATLDVITVMLVRNCKLTPADVEFIQPPGSLPSEVLHLALPTSCRPWLPALAWYLRQNLLIFLHSPKYTDSNSRNHFQHPLPPQGGLPDLDIYLYNKPGGQGTGGKGVACITLAFVDEGGAPLSLALWPPSSPGPPDPLREEEFEQLTQVIRCPVVVDSSSAQNGAPRLRLDVWEKGNISIVQLEEKLRGAARQALADAIIELQLLPASLCTEDTPTGSLRNGSLETKSSAGRASTFPPAPVPGEPVTPPSKAGRRSFWDMLSKTECGDLGSPKTTDDIVLDRPEDTRGRRRHKTESVRTPGGAERAPGSDSGAQRQKRRTTQLEEGEVGTLHPVFARVAQRWMEFMVQIGCASVSRSSAHMVSRFLLPSILSEFTALVTSMAGDTSVRIFEQHLGSEPEIFGPCSPGQLGPSPRPAAERHLLLLGRNFLQWRRPTQQAAKAMQRFEPGGDGSSGRNAPRQRLLLLEVVDKKLQLLTYNWAPDLGAALGRALVRLVQWQNARAHLIFCLLSQKLGLFHHYGQLDFPVRDEKEPNPFLLPTMEVETLIRSASPPLSREQGRLSGSSRGGGPLPLDTFPFDEALRDITAARPSSVLGPVPRPPDPVTYHGQQFLEIKMAERRELERQMKMENLFVTWQQRSTPATMPISAGELETLKQSSRLVHYCATAMLFDPAAWLHGPPETSGPPDGQRRHRPESGSGSREAPTSCESLDVSPPGAREEPWLKELSLAFLQQYVQYLQSIGFVLVPLRPPSPARSTSRPRAMAILGTEGRGSFSCPKTKTDGSPKSTSSPVTTYHLQRALPGGIILMELAFQGCYFCVKQFALECSRIPMGQAVNSQLSMLFTEECDKVRDLMHVHSFSYDFHLRLVHQHVLGAHLVLRHGYHLTTFLRHFLAHHPDGPHFGRNHIYQGTLELPTPLIAAHQLYNYVADHASSYHMKPLRMARPGGPEHNEYALVSAWHSSGSYLDSEGLRHQDDFDVSLLVCHCAAPFEEQGEAERHVLRLQFFVVLTSQRELFPRLTADMRRFRKPPRLPPEPEAPGSSAGSPGEASGLILAPGPAPLFPPLAAEVGMARARLAQLVRLAGGHCRRDTLWKRLFLLEPPGPDRLRLGGRLALAELEELLEAVHAKSIGDIDPQLDCFLSMTVSWYQSLIKVLLSRFPQSCRHFQSPDLGTQYLVVLNQKFTDCFVLVFLDSHLGKTSLTVVFREPFPVQPQDSESPPAQLVSTYHHLESVINTACFTLWTRLL

SEQ ID NO: 805886 - protein, 1739 aa, Homo sapiens
MNEIRWLLEDEMVGALRRGGIPQSPALHRAAAHIHSSPGRSTCLRQTLPLSFVFGPERSLTQFKEEFRRLHLPGHVLLEDPDSGFFFVAAGQQPGGSHGEPSSAAWAWHSHEDRAEGIEGETLTASPQAPGSPEDSEGVPLISLPRVPQGGSQPGPSRGLSLMSSQGSVDSDHLGYDGGSSGSDSEGPNDTLGEKAPFTLRTPPGPAPPQPSLSGLPGPCLPDFWLIVRVLQDRVEVYAHARSLIREDGGPGTECRHLQQLLVRRVGEICREVNQRLLLQDLHDSHVCNSLLVAESEEDLWRSETPFHSRQRAPLPSDDYAADESCAPRGYLAATMQFVPGHFSCDVVWGTVIRVHSRLKMGPSMGVSRAIQALRSVLNAFSVVNRKNMFVYQERATKAVYYLRLLETSCSDRPWKGDALPPSLALSRSQEPIYSEEASGPRSPLDMVSSRSSDAARPVGQVDRHIQLLVHGVGQAGPEITDELVRVLCRRLDEATLDVITVMLVRNCKLTPADVEFIQPPGSLPSEVLHLALPTSCRPWLPALAWYLRQNLLIFLHSPKYTDSNSRNHFQHPLPPQGGLPDLDIYLYNKPGGQGTGGKGVACITLAFVDEGGAPLSLALWPPSSPGPPDPLREEEFEQLTQVIRCPVVVDSSSAQNGAPRLRLDVWEKGNISIVQLEEKLRGAARQALADAIIELQLLPASLCTEDTPTGSLRNGSLETKSSAGRASTFPPAPVPGEPVTPPSKAGRRSFWDMLSKTECGDLGSPKTTDDIVLDRPEDTRGRRRHKTESVRTPGGAERAPGSDSGAQRQKRRTTQLEEGEVGTLHPVFARVAQRWMEFMVQIGCASVSRSSAHMVSRFLLPSILSEFTALVTSMAGDTSVRIFEQHLGSEPEIFGPCSPGQLGPSPRPAAERHLLLLGRNFLQWRRPTQQAAKAMQRFEPGGDGSSGRNAPRQRLLLLEVVDKKLQLLTYNWAPDLGAALGRALVRLVQWQNARAHLIFCLLSQKLGLFHHYGQLDFPVRDEKEPNPFLLPTMEVETLIRSASPPLSREQGRLSGSSRGGGPLPLDTFPFDEALRDITAARPSSVLGPVPRPPDPVTYHGQQFLEIKMAERRELERQMKMENLFVTWQQRSTPATMPISAGELETLKQSSRLVHYCATAMLFDPAAWLHGPPETSGPPDGQRRHRPESGSGSREAPTSCESLDVSPPGAREEPWLKELSLAFLQQYVQYLQSIGFVLVPLRPPSPARSTSRPRAMAILGTEGRGSFSCPKTKTDGSPKSTSSPVTTYHLQRALPGGIILMELAFQGCYFCVKQFALECSRIPMGQAVNSQLSMLFTEECDKVRDLMHVHSFSYDFHLRLVHQHVLGAHLVLRHGYHLTTFLRHFLAHHPDGPHFGRNHIYQGTLELPTPLIAAHQLYNYVADHASSYHMKPLRMARPGGPEHNEYALVSAWHSSGSYLDSEGLRHQDDFDVSLLVCHCAAPFEEQGEAERHVLRLQFFVVLTSQRELFPRLTADMRRFRKPPRLPPEPEAPGSSAGSPGEASGLILAPGPAPLFPPLAAEVGMARARLAQLVRLAGGHCRRDTLWKRLFLLEPPGPDRLRLGGRLALAELEELLEAVHAKSIGDIDPQLDCFLSMTVSWYQSLIKVLLSRFPQSCRHFQSPDLGTQYLVVLNQKFTDCFVLVFLDSHLGKTSLTVVFREPFPVQPQDSESPPAQLVSTYHHLESVINTACFTLWTRLL

SEQ ID NO: 805887 - protein, 1456 aa, Homo sapiens
  misc_feature (17)..(17): Xaa can be any naturally occurring amino acid
  misc_feature (25)..(25): Xaa can be any naturally occurring amino acid
IEHVIKEVYSKRPKPMXSSDSSDSXFFASTFFSSADYAADESCAPRGYLAATMQFVPGHFSCDVVWGTVIRVHSRLKMGPSMGVSRAIQALRSVLNAFSVVNRKNMFVYQERATKAVYYLRLLETSCSDRPWKGDALPPSLALSRSQEPIYSEEASGPRSPLDMVSSRSSDAARPVGQVDRHIQLLVHGVGQAGPEITDELVRVLCRRLDEATLDVITVMLVRNCKLTPADVEFIQPPGSLPSEVLHLALPTSCRPWLPALAWYLRQNLLIFLHSPKYTDSNSRNHFQHPLPPQGGLPDLDIYLYNKPGGQGTGGKGVACITLAFVDEGGAPLSLALWPPSSPGPPDPLREEEFEQLTQVIRCPVVVDSSSAQNGAPRLRLDVWEKGNISIVQLEEKLRGAARQALADAIIELQLLPASLCTEDTPTGSLRNGSLETKSSAGRASTFPPAPVPGEPVTPPSKAGRRSFWDMLSKTECGDLGSPKTTDDIVLDRPEDTRGRRRHKTESVRTPGGAERAPGSDSGAQRQKRRTTQLEEGEVGTLHPVFARVAQRWMEFMVQIGCASVSRSSAHMVSRFLLPSILSEFTALVTSMAGDTSVRIFEQHLGSEPEIFGPCSPGQLGPSPRPAAERHLLLLGRNFLQWRRPTQQAAKAMQRFEPGGDGSSGRNAPRQRLLLLEVVDKKLQLLTYNWAPDLGAALGRALVRLVQWQNARAHLIFCLLSQKLGLFHHYGQLDFPVRDEKEPNPFLLPTMEVETLIRSASPPLSREQGRLSGSSRGGGPLPLDTFPFDEALRDITAARPSSVLGPVPRPPDPVTYHGQQFLEIKMAERRELERQMKMENLFVTWQQRSTPATMPISAGELETLKQSSRLVHYCATAMLFDPAAWLHGPPETSGPPDGQRRHRPESGSGSREAPTSCESLDVSPPGAREEPWLKELSLAFLQQYVQYLQSIGFVLVPLRPPSPARSTSRPRAMAILGTEGRGSFSCPKTKTDGSPKSTSSPVTTYHLQRALPGGIILMELAFQGCYFCVKQFALECSRIPMGQAVNSQLSMLFTEECDKVRDLMHVHSFSYDFHLRLVHQHVLGAHLVLRHGYHLTTFLRHFLAHHPDGPHFGRNHIYQGTLELPTPLIAAHQLYNYVADHASSYHMKPLRMARPGGPEHNEYALVSAWHSSGSYLDSEGLRHQDDFDVSLLVCHCAAPFEEQGEAERHVLRLQFFVVLTSQRELFPRLTADMRRFRKPPRLPPEPEAPGSSAGSPGEASGLILAPGPAPLFPPLAAEVGMARARLAQLVRLAGGHCRRDTLWKRLFLLEPPGPDRLRLGGRLALAELEELLEAVHAKSIGDIDPQLDCFLSMTVSWYQSLIKVLLSRFPQSCRHFQSPDLGTQYLVVLNQKFTDCFVLVFLDSHLGKTSLTVVFREPFPVQPQDSESPPAQLVSTYHHLESVINTACFTLWTRLL

SEQ ID NO: 805888 - protein, 797 aa, Homo sapiens
GSEDPTCLMSLQRLCTKGVVRKKLQLLTYNWAPDLGAALGRALVRLVQWQNARAHLIFCLLSQKLGLFHHYGQLDFPVRDEKEPNPFLLPTMEVETLIRSASPPLSREQGRLSGSSRGGGPLPLDTFPFDEALRDITAARPSSVLGPVPRPPDPVTYHGQQFLEIKMAERRELERQMKMENLFVTWQQRSTPATMPISAGELETLKQSSRLVHYCATAMLFDPAAWLHGPPETSGPPDGQRRHRPESGSGSREAPTSCESLDVSPPGAREEPWLKELSLAFLQQYVQYLQSIGFVLVPLRPPSPARSTSRPRAMAILGTEGRGSFSCPKTKTDGSPKSTSSPVTTYHLQRALPGGIILMELAFQGCYFCVKQFALECSRIPMGQAVNSQLSMLFTEECDKVRDLMHVHSFSYDFHLRLVHQHVLGAHLVLRHGYHLTTFLRHFLAHHPDGPHFGRNHIYQGTLELPTPLIAAHQLYNYVADHASSYHMKPLRMARPGGPEHNEYALVSAWHSSGSYLDSEGLRHQDDFDVSLLVCHCAAPFEEQGEAERHVLRLQFFVVLTSQRELFPRLTADMRRFRKPPRLPPEPEAPGSSAGSPGEASGLILAPGPAPLFPPLAAEVGMARARLAQLVRLAGGHCRRDTLWKRLFLLEPPGPDRLRLGGRLALAELEELLEAVHAKSIGDIDPQLDCFLSMTVSWYQSLIKVLLSRFPQSCRHFQSPDLGTQYLVVLNQKFTDCFVLVFLDSHLGKTSLTVVFREPFPVQPQDSESPPAQLVSTYHHLESVINTACFTLWTRLL

SEQ ID NO: 805889 - protein, 117 aa, Homo sapiens
PRLCWVSGCGCLGRAVSWYQSLIKVLLSRFPQSCRHFQSPDLGTQYLVVLNQKFTDCFVLVFLDSHLGKTSLTVVFREPFPVQPQDSESPPAQLVSTYHHLESVINTACFTLWTRLL

SEQ ID NO: 805890 - protein, 2183 aa, Homo sapiens
AANHCALLQEHAQRCYVRGLFRSLQQAQSVTSQDLLTAVDACEELLQEIDITPFLLALCGHTWGLPHAPPSPGPLSPGPFSSSMEEGAEPRERAILASESSIETEDLSEPEFQSTRVPGIPDPGPEISLTDVCQLRGEAHGALHSVIQEKFLEISRLHFRTVPSNPHYFFYCPPSSRREDEGPRDTVDRKISDLEFSEAELMGEEGDTSACCVVTESDPELEVEYRESRESDLGPAGLDSASLSDVDTVNPDEDSFSILGGDSPTGPESFLHDLPPLFLHLTCSVRLRGQHSSVPVCSLPTCLGFSSLKGPPVEGRVPLRDLSVTLDVFMLTLPLEVELPTASDPQHHRSTSESSASFPRSPGQPSSLRSDDGLGPPLPPPEEERHPGLSNLATPHRLAIETTMNEIRWLLEDEMVGALRRGGIPQSPALHRAAAHIHSSPGRSTCLRQTLPLSFVFGPERSLTQFKEEFRRLHLPGHVLLEDPDSGFFFVAAGQQPGGSHGEPSSAAWAWHSHEDRAEGIEGETLTASPQAPGSPEDSEGVPLISLPRVPQGGSQPGPSRGLSLMSSQGSVDSDHLGYDGGSSGSDSEGPNDTLGEKAPFTLRTPPGPAPPQPSLSGLPGPCLPDFWLIVRVLQDRVEVYAHARSLIREDGGPGTECRHLQQLLVRRVGEICREVNQRLLLQDLHDSHVCNSLLVAESEEDLWRSETPFHSRQRAPLPSDDYAADESCAPRGYLAATMQFVPGHFSCDVVWGTVIRVHSRLKMGPSMGVSRAIQALRSVLNAFSVVNRKNMFVYQERATKAVYYLRLLETSCSDRPWKGDALPPSLALSRSQEPIYSEEASGPRSPLDMVSSRSSDAARPVGQVDRHIQLLVHGVGQAGPEITDELVRVLCRRLDEATLDVITVMLVRNCKLTPADVEFIQPPGSLPSEVLHLALPTSCRPWLPALAWYLRQNLLIFLHSPKYTDSNSRNHFQHPLPPQGGLPDLDIYLYNKPGGQGTGGKGVACITLAFVDEGGAPLSLALWPPSSPGPPDPLREEEFEQLTQVIRCPVVVDSSSAQNGAPRLRLDVWEKGNISIVQLEEKLRGAARQALADAIIELQLLPASLCTEDTPTGSLRNGSLETKSSAGRASTFPPAPVPGEPVTPPSKAGRRSFWDMLSKTECGDLGSPKTTDDIVLDRPEDTRGRRRHKTESVRTPGGAERAPGSDSGAQRQKRRTTQLEEGEVGTLHPVFARVAQRWMEFMVQIGCASVSRSSAHMVSRFLLPSILSEFTALVTSMAGDTSVRIFEQHLGSEPEIFGPCSPGQLGPSPRPAAERHLLLLGRNFLQWRRPTQQAAKAMQRFEPGGDGSSGRNAPRQRLLLLEVVDKKLQLLTYNWAPDLGAALGRALVRLVQWQNARAHLIFCLLSQKLGLFHHYGQLDFPVRDEKEPNPFLLPTMEVETLIRSASPPLSREQGRLSGSSRGGGPLPLDTFPFDEALRDITAARPSSVLGPVPRPPDPVTYHGQQFLEIKMAERRELERQMKMENLFVTWQQRSTPATMPISAGELETLKQSSRLVHYCATAMLFDPAAWLHGPPETSGPPDGQRRHRPESGSGSREAPTSCESLDVSPPGAREEPWLKELSLAFLQQYVQYLQSIGFVLVPLRPPSPARSTSRPRAMAILGTEGRGSFSCPKTKTDGSPKSTSSPVTTYHLQRALPGGIILMELAFQGCYFCVKQFALECSRIPMGQAVNSQLSMLFTEECDKVRDLMHVHSFSYDFHLRLVHQHVLGAHLVLRHGYHLTTFLRHFLAHHPDGPHFGRNHIYQGTLELPTPLIAAHQLYNYVADHASSYHMKPLRMARPGGPEHNEYALVSAWHSSGSYLDSEGLRHQDDFDVSLLVCHCAAPFEEQGEAERHVLRLQFFVVLTSQRELFPRLTADMRRFRKPPRLPPEPEAPGSSAGSPGEASGLILAPGPAPLFPPLAAEVGMARARLAQLVRLAGGHCRRDTLWKRLFLLEPPGPDRLRLGGRLALAELEELLEAVHAKSIGDIDPQLDCFLSMTVSWYQSLIKVLLSRFPQSCRHFQSPDLGTQYLVVLNQKFTDCFVLVFLDSHLGKTPLTTVSHLCPLSLRVFTSHLDITAGHSHRDDTWVPIPALPLKHLRPPSSPFALGPWVSHPLMRWVQKLSHLHSNPGTGFSMGGKQQRN

SEQ ID NO: 805891 - protein, 2198 aa, Homo sapiens; identical to SEQ ID NO: 805884

SEQ ID NO: 805892 - protein, 2198 aa, Homo sapiens; identical to SEQ ID NO: 805884

SEQ ID NO: 805893 - protein, 2156 aa, Homo sapiens
AANHCALLQEHAQRCYVRGLFRSLQQAQSVTSQDLLTAVDACEELLQEIDITPFLLALCGHTWGLPHAPPSPGPLSPGPFSSSMEEGAEPRERAILASESSIETEDLSEPEFQSTRVPGIPDPGPEISLTDVCQLRGEAHGALHSVIQVGSLGEGRRGVRVLPVQRDRILSWAGGMHVSCSRVGSSILLRGDWHSNLLLNPKQEKFLEISRLHFRTVPSNPHYFFYCPPSSRREDEGPRDTVDRKISDLEFSEAELMGEEGDTSACCVVTESDPELEVEYRESRESDLGPAGLDSASLSDVDTVNPDEDSFSILGGDSPTGPESFLHDLPPLFLHLTCSVRLRGQHSSVPVCSLPTCLGQFSSLKGPPVEGRVPLRDLSVTLDVFMLTLPLEVELPTASDPQHHRSTSESSASFPRSPGQPSSLRSDDGLGPPLPPPEEERHPGLSNLATPHRLAIETTMNEIRWLLEDEMVGALRRGGIPQSPALHRAAAHIHSSPGRSTCLRQTLPLSFVFGPERSLTQFKEEFRRLHLPGHVLLEDPDSGFFFVAAGQQPGGSHGEPSSAAWAWHSHEDRAEGIEGETLTASPQAPGSPEDSEGVPLISLPRVPQGGSQPGPSRGLSLMSSQGSVDSDHLGYDGGSSGSDSEGPNDTLGEKAPFTLRTPPGPAPPQPSLSGLPGPCLPDFWLIVRVLQDRVEVYAHARSLIREDGGPGTECRHLQQLLVRRVGEICREVNQRLLLQDLHDSHVCNSLLVAESEEDLWRSETPFHSRQRAPLPSDDYAADESCAPRGYLAATMQFVPGHFSCDVVWGTVIRVHSRLKMGPSMGVSRAIQALRSVLNAFSVVNRKNMFVYQERATKAVYYLRLLETSCSDRPWKGDALPPSLALSRSQEPIYSEEASGPRSPLDMVSSRSSDAARPVGQVDRHIQLLVHGVGQAGPEITDELVRVLCRRLDEATLDVITVMLVRNCKLTPADVEFIQPPGSLPSEVLHLALPTSCRPWLPALAWYLRQNLLIFLHSPKYTDSNSRNHFQHPLPPQGGLPDLDIYLYNKPGGQGTGGKGVACITLAFVDEGGAPLSLALWPPSSPGPPDPLREEEFEQLTQVIRCPVVVDSSSAQNGAPRLRLDVWEKGNISIVQLEEKLRGAARQALADAIIELQLLPASLCTEDTPTGSLRNGSLETKSSAGRASTFPPAPVPGEPVTPPSKAGRRSFWDMLSKTECGDLGSPKTTDDIVLDRPEDTRGRRRHKTESVRTPGGAERAPGSDSGAQRQKRRTTQLEEGEVGTLHPVFARVAQRWMEFMVQIGCASVSRSSAHMVSRFLLPSILSEFTALVTSMAGDTSVRIFEQHLGSEPEIFGPCSPGQLGPSPRPAAERHLLLLGRNFLQWRRPTQQAAKAMQRFEPGGDGSSGRNAPRQRLLLLEVVDKKLQLLTYNWAPDLGAALGRALVRLVQWQNARAHLIFCLLSQKLGLFHHYGQLDFPVRDEKEPNPFLLPTMEVETLIRSASPPLSREQGRLSGSSRGGGPLPLDTFPFDEALRDITAARPSSVLGPVPRPPDPVTYHGQQFLEIKMAERRELERQMKMENLFVTWQQRSTPATMPISAGELETLKQSSRLVHYCATAMLFDPAAWLHGPPETSGPPDGQRRHRPESGSGSREAPTSCESLDVSPPGAREEPWLKELSLAFLQQYVQYLQSIGFVLVPLRPPSPARSTSRPRAMAILGTEGRGSFSCPKTKTDGSPKSTSSPVTTYHLQRALPGGIILMELAFQGCYFCVKQFALECSRIPMGQAVNSQLSMLFTEECDKVRDLMHVHSFSYDFHLRLVHQHVLGAHLVLRHGYHLTTFLRHFLAHHPDGPHFGRNHIYQGTLELPTPLIAAHQLYNYVADHASSYHMKPLRMARPGGPEHNEYALVSAWHSSGSYLDSEGLRHQDDFDVSLLVCHCAAPFEEQGEAERHVLRLQFFVVLTSQRELFPRLTADMRRFRKPPRLPPEPEAPGSSAGSPGEASGLILAPGPAPLFPPLAAEVGMARARLAQLVRLAGGHCRRDTLWKRLFLLEPPGPDRLRLGGRLALAELEELLEAVHAKSIGDIDPQLDCFLSMTVSWYQSLIKVLLSRFPQSCRHFQSPDLGTQYLVGSEALPSSQQPWHWLLNGREAAEKLKC

SEQ ID NO: 805894 - protein, 2128 aa, Homo sapiens
AANHCALLQEHAQRCYVRGLFRSLQQAQSVTSQDLLTAVDACEELLQEIDITPFLLALCGHTWGLPHAPPSPGPLSPGPFSSSMEEGAEPRERAILASESSIETEDLSEPEFQSTRVPGIPDPGPEISLTDVCQLRGEAHGALHSVIQVGSLGEGRRGVRVLPVQRDRILSWAGGMHVSCSRVGSSILLRGDWHSNLLLNPKQEKFLEISRLHFRTVPSNPHYFFYCPPSSRREDEGPRDTVDRKISDLEFSEAELMGEEGDTSACCVVTESDPELEVEYRESRESDLGPAGLDSASLSDVDTVNPDEDSFSILGGDSPTGPESFLHDLPPLFLHLTCSVRLRGQHSSVPVCSLPTCLGQFSSLKGPPVEGRVPLRDLSVTLDVFMLTLPLEVELPTASDPQHHRSTSESSASFPRSPGQPSSLRSDDGLGPPLPPPEEERHPGLSNLATPHRLAIETTMNEIRWLLEDEMVGALRRGGIPQSPALHRAAAHIHSSPGRSTCLRQTLPLSFVFGPERSLTQFKEEFRRLHLPGHVLLEDPDSGFFFVAAGQQPGGSHGEPSSAAWAWHSHEDRAEGIEGETLTASPQAPGSPEDSEGVPLISLPRVPQGGSQPGPSRGLSLMSSQGSVDSDHLGYDGGSSGSDSEGPNDTLGEKAPFTLRTPPGPAPPQPSLSGLPGPCLPDFWLIVRVLQDRVEVYAHARSLIREDGGPGTECRHLQQLLVRRVGEICREVNQRLLLQDLHDSHVCNSLLVAESEEDLWRSETPFHSRQRAPLPSDDYAADESCAPRGYLAATMQFVPGHFSCDVVWGTVIRVHSRLKMGPSMGVSRAIQALRSVLNAFSVVNRKNMFVYQERATKAVYYLRLLETSCSDRPWKGDALPPSLALSRSQEPIYSEEASGPRSPLDMVSSRSSDAARPVGQVDRHIQLLVHGVGQAGPEITDELVRVLCRRLDEATLDVITVMLVRNCKLTPADVEFIQPPGSLPSEVLHLALPTSCRPWLPALAWYLRQNLLIFLHSPKYTDSNSRNHFQHPLPPQGGLPDLDIYLYNKPGGQGTGGKGVACITLAFVDEGGAPLSLALWPPSSPGPPDPLREEEFEQLTQVIRCPVVVDSSSAQNGAPRLRLDVWEKGNISIVQLEEKLRGAARQALADAIIELQLLPASLCTEDTPTGSLRNGSLETKSSAGRASTFPPAPVPGEPVTPPSKAGRRSFWDMLSKTECGDLGSPKTTDDIVLDRPEDTRGRRRHKTESVRTPGGAERAPGSDSGAQRQKRRTTQLEEGEVGTLHPVFARVAQRWMEFMVQIGCASVSRSSAHMVSRFLLPSILSEFTALVTSMAGDTSVRIFEQHLGSEPEIFGPCSPGQLGPSPRPAAERHLLLLGRNFLQWRRPTQQAAKAMQRFEPGGDGSSGRNAPRQRLLLLEVVDKKLQLLTYNWAPDLGAALGRALVRLVQWQNARAHLIFCLLSQKLGLFHHYGQLDFPVRDEKEPNPFLLPTMEVETLIRSASPPLSREQGRLSGSSRGGGPLPLDTFPFDEALRDITAARPSSVLGPVPRPPDPVTYHGQQFLEIKMAERRELERQMKMENLFVTWQQRSTPATMPISAGELETLKQSSRLVHYCATAMLFDPAAWLHGPPETSGPPDGQRRHRPESGSGSREAPTSCESLDVSPPGAREEPWLKELSLAFLQQYVQYLQSIGFVLVPLRPPSPARSTSRPRAMAILGTEGRGSFSCPKTKTDGSPKSTSSPVTTYHLQRALPGGIILMELAFQGCYFCVKQFALECSRIPMGQAVNSQLSMLFTEECDKVRDLMHVHSFSYDFHLRLVHQHVLGAHLVLRHGYHLTTFLRHFLAHHPDGPHFGRNHIYQGTLELPTPLIAAHQLYNYVADHASSYHMKPLRMARPGGPEHNEYALVSAWHSSGSYLDSEGLRHQDDFDVSLLVCHCAAPFEEQGEAERHVLRLQFFVVLTSQRELFPRLTADMRRFRKPPRLPPEPEAPGSSAGSPGEASGLILAPGPAPLFPPLAAEVGMARARLAQLVRLAGGHCRRDTLWKRLFLLEPPGPDRLRLGGRLALAELEELLEAVHAKSIGDIDPQLDCFLSMTVSWYQSLIKVLLSRFPQSCRHFQSPDLGTQYL

SEQ ID NO: 805895 - protein, 2144 aa, Homo sapiens
AANHCALLQEHAQRCYVRGLFRSLQQAQSVTSQDLLTAVDACEELLQEIDITPFLLALCGHTWGLPHAPPSPGPLSPGPFSSSMEEGAEPRERAILASESSIETEDLSEPEFQSTRVPGIPDPGPEISLTDVCQLRGEAHGALHSVIQVGSLGEGRRGVRVLPVQRDRILSWAGGMHVSCSRVGSSILLRGDWHSNLLLNPKQEKFLEISRLHFRTVPSNPHYFFYCPPSSRREDEGPRDTVDRKISDLEFSEAELMGEEGDTSACCVVTESDPELEVEYRESRESDLGPAGLDSASLSDVDTVNPDEDSFSILGGDSPTGPESFLHDLPPLFLHLTCSVRLRGQHSSVPVCSLPTCLGQFSSLKGPPVEGRVPLRDLSVTLDVFMLTLPLEVELPTASDPQHHRSTSESSASFPRSPGQPSSLRSDDGLGPPLPPPEEERHPGLSNLATPHRLAIETTMNEIRWLLEDEMVGALRRGGIPQSPALHRAAAHIHSSPGRSTCLRQTLPLSFVFGPERSLTQFKEEFRRLHLPGHVLLEDPDSGFFFVAAGQQPGGSHGEPSSAAWAWHSHEDRAEGIEGETLTASPQAPGSPEDSEGVPLISLPRVPQGGSQPGPSRGLSLMSSQGSVDSDHLGYDGGSSGSDSEGPNDTLGEKAPFTLRTPPGPAPPQPSLSGLPGPCLPDFWLIVRVLQDRVEVYAHARSLIREDGGPGTECRHLQQLLVRRVGEICREVNQRLLLQDLHDSHVCNSLLVAESEEDLWRSETPFHSRQRAPLPSDDYAADESCAPRGYLAATMQFVPGHFSCDVVWGTVIRVHSRLKMGPSMGVSRAIQALRSVLNAFSVVNRKNMFVYQERATKAVYYLRLLETSCSDRPWKGDALPPSLALSRSQEPIYSEEASGPRSPLDMVSSRSSDAARPVGQVDRHIQLLVHGVGQAGPEITDELVRVLCRRLDEATLDVITVMLVRNCKLTPADVEFIQPPGSLPSEVLHLALPTSCRPWLPALAWYLRQNLLIFLHSPKYTDSNSRNHFQHPLPPQGGLPDLDIYLYNKPGGQGTGGKGVACITLAFVDEGGAPLSLALWPPSSPGPPDPLREEEFEQLTQVIRCPVVVDSSSAQNGAPRLRLDVWEKGNISIVQLEEKLRGAARQALADAIIELQLLPASLCTEDTPTGSLRNGSLETKSSAGRASTFPPAPVPGEPVTPPSKAGRRSFWDMLSKTECGDLGSPKTTDDIVLDRPEDTRGRRRHKTESVRTPGGAERAPGSDSGAQRQKRRTTQLEEGEVGTLHPVFARVAQRWMEFMVQIGCASVSRSSAHMVSRFLLPSILSEFTALVTSMAGDTSVRIFEQHLGSEPEIFGPCSPGQLGPSPRPAAERHLLLLGRNFLQWRRPTQQAAKAMQRFEPGGDGSSGRNAPRQRLLLLEVVDKKLQLLTYNWAPDLGAALGRALVRLVQWQNARAHLIFCLLSQKLGLFHHYGQLDFPVRDEKEPNPFLLPTMEVETLIRSASPPLSREQGRLSGSSRGGGPLPLDTFPFDEALRDITAARPSSVLGPVPRPPDPVTYHGQQFLEIKMAERRELERQMKMENLFVTWQQRSTPATMPISAGELETLKQSSRLVHYCATAMLFDPAAWLHGPPETSGPPDGQRRHRPESGSGSREAPTSCESLDVSPPGAREEPWLKELSLAFLQQYVQYLQSIGFVLVPLRPPSPARSTSRPRAMAILGTEGRGSFSCPKTKTDGSPKSTSSPVTTYHLQRALPGGIILMELAFQGCYFCVKQFALECSRIPMGQAVNSQLSMLFTEECDKVRDLMHVHSFSYDFHLRLVHQHVLGAHLVLRHGYHLTTFLRHFLAHHPDGPHFGRNHIYQGTLELPTPLIAAHQLYNYVADHASSYHMKPLRMARPGGPEHNEYALVSAWHSSGSYLDSEGLRHQDDFDVSLLVCHCAAPFEEQGEAERHVLRLQFFVVLTSQRELFPRLTADMRRFRKPPRLPPEPEAPGSSAGSPGEASGLILAPGPAPLFPPLAAEVGMARARLAQLVRLAGGHCRRDTLWKRLFLLEPPGPDRLRLGGRLALAELEELLEAVHAKSIGDIDPQLDCFLSMTVSWYQSLIKVLLSRFPQSCRHFQSPDLGTQYLRALVTLLLQSPVIDTQ

SEQ ID NO: 805896 - protein, 1230 aa, Homo sapiens
AANHCALLQEHAQRCYVRGLFRSLQQAQSVTSQDLLTAVDACEELLQEIDITPFLLALCGHTWGLPHAPPSPGPLSPGPFSSSMEEGAEPRERAILASESSIETEDLSEPEFQSTRVPGIPDPGPEISLTDVCQLRGEAHGALHSVIQVGSLGEGRRGVRVLPVQRDRILSWAGGMHVSCSRVGSSILLRGDWHSNLLLNPKQEKFLEISRLHFRTVPSNPHYFFYCPPSSRREDEGPRDTVDRKISDLEFSEAELMGEEGDTSACCVVTESDPELEVEYRESRESDLGPAGLDSASLSDVDTVNPDEDSFSILGGDSPTGPESFLHDLPPLFLHLTCSVRLRGQHSSVPVCSLPTCLGQFSSLKGPPVEGRVPLRDLSVTLDVFMLTLPLEVELPTASDPQHHRSTSESSASFPRSPGQPSSLRSDDGLGPPLPPPEEERHPGLSNLATPHRLAIETTMNEIRWLLEDEMVGALRRGGIPQSPALHRAAAHIHSSPGRSTCLRQTLPLSFVFGPERSLTQFKEEFRRLHLPGHVLLEDPDSGFFFVAAGQQPGGSHGEPSSAAWAWHSHEDRAEGIEGETLTASPQAPGSPEDSEGVPLISLPRVPQGGSQPGPSRGLSLMSSQGSVDSDHLGYDGGSSGSDSEGPNDTLGEKAPFTLRTPPGPAPPQPSLSGLPGPCLPDFWLIVRVLQDRVEVYAHARSLIREDGGPGTECRHLQQLLVRRVGEICREVNQRLLLQDLHDSHVCNSLLVAESEEDLWRSETPFHSRQRAPLPSDDYAADESCAPRGYLAATMQFVPGHFSCDVVWGTVIRVHSRLKMGPSMGVSRAIQALRSVLNAFSVVNRKNMFVYQERATKAVYYLRLLETSCSDRPWKGDALPPSLALSRSQEPIYSEEASGPRSPLDMVSSRSSDAARPVGQVDRHIQLLVHGVGQAGPEITDELVRVLCRRLDEATLDVITVMLVRNCKLTPADVEFIQPPGSLPSEVLHLALPTSCRPWLPALAWYLRQNLLIFLHSPKYTDSNSRNHFQHPLPPQGGLPDLDIYLYNKPGGQGTGGKGVACITLAFVDEGGAPLSLALWPPSSPGPPDPLREEEFEQLTQVIRCPVVVDSSSAQNGAPRLRLDVWEKGNISIVQLEEKLRGAARQALADAIIELQLLPASLCTEDTPTGSLRNGSLETKSSAGRASTFPPAPVPGEPVTPPSKAGRRSFWDMLVMEEVVKWASTFLPAS

SEQ ID NO: 805897 - protein, 200 aa, Homo sapiens
TDMLLKVQNAIGELYLETGMTQEGFQYFQKAWSSMLHLSLSDLEDSRDLVKQKVRVLDNLAKSASEEYLKENHILEYATEISNLLDNNPRDQATMKYIEGVLMFVAGNTSLAKMKLRECLNIRKSLFGKKNMLVGEVMEFLVDLLFFPQRDSKKSQRKQVLKYYKQVIKIKENAETLAKSSLLRKQLSISLSDTLCKLAF

SEQ ID NO: 805898 - protein, 645 aa, Homo sapiens
MPRSRGGRAAPGPPPPPPPPGQAPRWSRWRVPGRLLLLLLPALCCLPGAARAAAAAAGAGNRAAVAVAVARADEAEAPFAGQNWLKSYGYLLPYDSRASALHSAKALQSAVSTMQQFYGIPVTGVLDQTTIEWMKKPRCGVPDHPHLSRRRRNKRYALTGQKWRQKHITYSIHNYTPKVGELDTRKAIRQAFDVWQKVTPLTFEEVPYHEIKSDRKEADIMIFFASGFHGDSSPFDGEGGFLAHAYFPGPGIGGDTHFDSDEPWTLGNANHDGNDLFLVAVHELGHALGLEHSSDPSAIMAPFYQYMETHNFKLPQDDLQGIQKIYGPPAEPLEPTRPLPTLPVRRIHSPSERKHERQPRPPRPPLGDRPSTPGTKPNICDGNFNTVALFRGEMFVFKDRWFWRLRNNRVQEGYPMQIEQFWKGLPARIDAAYERADGRFVFFKGDKYWVFKEVTVEPGYPHSLGELGSCLPREGIDTALRWEPVGKTYFFKGERYWRYSEERRATDPGYPKPITVWKGIPQAPQGAFISKEGYYTYFYKGRDYWKFDNQKLSVEPGYPRNILRDWMGCNQKEVERRKERRLPQDDVDIMVTINDVPGSVNAVAVVIPCILSLCILVLVYTIFQFKNKTGPQPVTYYKRPVQEWV

SEQ ID NO: 805899 - protein, 645 aa, Homo sapiens; identical to SEQ ID NO: 805898

SEQ ID NO: 805900 - protein, 645 aa, Homo sapiens; identical to SEQ ID NO: 805898

SEQ ID NO: 805901 - protein, 645 aa, Homo sapiens; identical to SEQ ID NO: 805898

SEQ ID NO: 805902 - protein, 645 aa, Homo sapiens; identical to SEQ ID NO: 805898

SEQ ID NO: 805903 - protein, 645 aa, Homo sapiens; identical to SEQ ID NO: 805898

SEQ ID NO: 805904 - protein, 645 aa, Homo sapiens; identical to SEQ ID NO: 805898

SEQ ID NO: 805905 - protein, 38 aa, Homo sapiens
MAEEPREEEMRNTPSPGYSSFTSSANNKILHQPLGYHS

SEQ ID NO: 805906 - protein, 113 aa, Homo sapiens
PPALFPSRLQPTLRGPCALQRTRQPAHHAQLHLLQELWPPWEAGSRYLPTNLNNFERDLCSATSHRISGELGVSSLTHPPRDWSSVMCAMVMHHREETRVRGSPASKMRLVYR

SEQ ID NO: 805907 - protein, 324 aa, Homo sapiens
MAPRPRGSRSADEGCLLPFLLFLFIFFKGCQFWKLFLASQTTVARWSRERPRPGAFCCLAEGRARGVRGPQAQRVRGRVRRRSSPPFGTQKHGGSPRAALQGPREPAAWVTSGSLQAGGGCCRQARAWVRAVGIPRGQGRREPEETREGARGRGWPGMELARPQWGTRQGTRRSPGSASLPAHGRSEELEPPPRTRSRGRRLLPVAPVRPPSRRRQQRPLSHAPGPVGAGASWDGLAAACGYALFPERQHTHVSAVAPDPPRAAVLSVHTHYPGPSGRPAGLPPSRPAASWPKSSRDTPPGLLRTGLHPPPRTRSAPRSLRVLG

SEQ ID NO: 805908 - protein, 324 aa, Homo sapiens; identical to SEQ ID NO: 805907

SEQ ID NO: 805909 - protein, 324 aa, Homo sapiens; identical to SEQ ID NO: 805907

SEQ ID NO: 805910 - protein, 279 aa, Homo sapiens
MAPRPRGSRSADEGCLLPFLLFLFIFFKGCQFWKLFLASQTTVARWSRERPRPGAFCCLAEGRARGVRGPQAQRVRGRVRRRSSPPFGTQKHGGSPRAALQGPREPAAWVTSGSLQAGGGCCRQARAWVRAVGIPRGQGRREPEETREGARGRGWPGMELARPQWGTRQGTRRSPGSASLPAHGRSEELEPPPRTRSRGRRLLPVAPVRPPSRRRQQRPLSHAPGPVGAGASWDGLAAACGYALFPERQHTHVSAVAPDPPRAAVLSVHTHYPDISPQT

SEQ ID NO: 805911 - protein, 102 aa, Homo sapiens
PPALFPSRLQPTLRGPCALQRTRQPAHHAQLHLLQELWPPWEAGSRYLPTNLNNFERDLCSATSHRISGELGVSSLTHPPRDAALLSTLLRITRMTVLWLQP

SEQ ID NO: 805912 - protein, 265 aa, Homo sapiens
RRLGGHRVPRGPRGRGRGAAGRRRAGPSGDTAGRAAGSPDSAVSWATGLLRRGPRGSRWREAAVGGKGRAGPGAAPQVAAPGGARGRRGSRGGACSRPRRARPSRASFWIPARSRRGNSPGGHRSSGAGRPGSEGGREQAGGEGGQQQREQGRPGRRGRWGRTRRVRPRSPGRGGRLRRPLWGGGGGIFRDRTRRSLPLCAPFPCCPSRCALSRKAAHACLCRGPRSSPRRRFERSHSLPRSVWETRRAPALPARSLLAKILPGH

SEQ ID NO: 805913 - protein, 30 aa, Homo sapiens
MIVGGVEHFEPVLIVVVSKQVLEAPQADDL

SEQ ID NO: 805914 - protein, 1655 aa, Homo sapiens
MEEGKELGTREVAVERGREEGRWHMGPMLRNTGGGCGAGLCLGGTCFGSVFAELTPPWVSRAARQITTDRMWESRASERGRGSLDKLAHTRQMFAQKNTVKSSCKYNRESASSHPWLLCLLAFLSCAKGVEEGLGGRFWGPGEEVCSAYPCRPLPSSPQENSLFFANVTLKVSPGLRYPQSWCERGTQLSPSLLALCCPPSPPAPSRKVVGSPGDGTSFPGQSPCPPTVPVLDPFQCLPSPLSHTPQISGNPCGPQALDWGSLAGAWGEPGPPKLRWVAAKRHVAEAGKAASRGVPTPRWASSHPEVKDDGLRPISILTGQDPSLRTADLLPKRAGPRSCCQAGPPSPPSATAYMDREPQSPTVTLGTNCQARVTMVTEAGWEGLGRHEPSLLLNPLSGGGLTVCALFDVGWGGQKEGSGHCHGNMGAPLARGPGLDEQPRGDGLRKPSFPGWAAEIGAEIPRWGRAGGDTGHGDRQEVPHDSSSLQPSRHHSAPLPFCGGQGSRRTREAGAGSLHLRRPGSWPARHTPHSSQATWKTLEVGWWNVALPRLLSRQQDPLPSPGCRHRGQKPPRILNHSCTLWGHCMWLSRKKKHLPDSQVPQPQGTTASERDVGWAQGGQGSTRELQGVPGQHWAGKLGDLRLSCCVTLGLSTPFSGPQFPPLSKVEGDIALMSNAKSAGDLTPSLGRDPLPALEGLQSLSTPAFLTPTPVSSPRPPRPHTLSWLPSSPRQPPGPAHPSRVPGQHSKDDWFRYQFVNFKENVSLFSCPLLSDVGLFTVGWWSGVCVRACVRVCMCVLSWALAPESAPRPGRLDPSPKRPPALWLRPHQGGRGGSQLLLGGDPLPVIKDVMQILVLGELDLLAQGVTGGHVHLLPVVLLVGRKRSQILCVLSDEYSGLEEYPEYVVSGGELRVGGVTLGAGQRLEEGHALAQAVGTLLVVQGGKAVPVLAAVVGRLHLQVVDAPAPAAAPAAARRHQREPVQRAVEGAALLDVLGVALSQPCGGRMVGHVQAKDLGALDGTTGRHAAGLAGHGRVGAQLALYVGGGSSPCREAKGSWAAPGPRGQWLRRRQQLQGGTGTEGQLGVPTAAAASQKRGRVQLESIDAVVNDLVDLVHLLGNGGDLCSRALAVLEVREVILGPSQTVPAGACAHLDIVAFGGYLGCVQPGLQPLGGGQLLPDHGGDGGHARYGQHGRLAQLLGGVHNGAGIHISPVAHLQDGLLDVDRLLLLLLHAPLAQAVVHGSQHDNHAKEAAQDGHDVVGGGGGAGRQVSGDGVPRGEGQAGVVEAAAVAQRGHAEGVLSVRPQFVQRHDLLLVLEGHDVGEVAVVVLHEDVHLAVGVWDDDHQGGRGERDVVQLDGWPCRRIRGGRGRRLHRKDLVGVEARVLVWLPLGVGGVGRGVAHGPGGQRAIPTLGLEYGDGVEAVVGPGHQQRVAGKLPRRLTLQAVVVLGDVVEDHQPGQEAEEVALTVEGVAGQLTHHQAGEAGKGGTVQAAEAVGGQVDADEARALGEGGGRHHLDEVVLDKEELQAAHASQHALRQVAELVVAQLQDLQARLAQEGTVLDVGDLVLGEVEVGEVPKAVERGVEHGFELVLVEPQVVHGAIDVLRDGLVGRLVLAADGQPHVALVALNEPAVGTHGTRPAHAQQRRRAQPQAQHG

SEQ ID NO: 805915 - protein, 130 aa, Homo sapiens [sequence omitted]

SEQ ID NO: 805916 - protein, 149 aa, Homo sapiens
MLAWRGTWLTRPPHRWTSSQSLATGGLLAGETNIAGWSAKRVPRYGPADKWHSLRHSCGADREELQSIINTEPQQLSCALQETVAAGANDSSWMVTLTKTSSGGHRSPPGHVFKPKEKSQDGSELITVIAIQMTALSMAQLASILANAT

SEQ ID NO: 805917 - protein, 542 aa, Homo sapiens
TAKEGGNTGKGCLLPAGDRTMEPGGARLRLQRTEGLGGERERQPCGDGNTETHRAPDLVQWTRHMEAVKAQLLEQAQGQLRELLDRAMREAIQSYPSQDKPLPPPPPGSLSRTQEPSLGKQKVFIIRKSLLDELMEVQHFRTIYHMFIAGLCVFIISTLAIDFIDEGRLLLEFDLLIFSFGQLPLALVTWVPMFLSTLLAPYQALRLWARGTWTQATGLGCALLAAHAVVLCALPVHVAVEHQLPPASRCVLVFEQVRFLMKSYSFLREAVPGTLRARRGEGIQAPSFSSYLYFLFCPTLIYRETYPRTPYVRWNYVAKNFAQALGCVLYACFILGRLCVPVFANMSREPFSTRALVLSILHATLPGIFMLLLIFFAFLHCWLNAFAEMLRFGDRMFYRDWWNSTSFSNYYRTWNVVVHDWLYSYVYQDGLRLLGARARGVAMLGVFLVSAVAHEYIFCFVLGFFYPVMLILFLVIGGMLNFMMHDQRTGPAWNVLMWTMLFLGQGIQVSLYCQEWYARRHCPLPQATFWGLVTPRSWSCHT

SEQ ID NO: 805918 - protein, 413 aa, Homo sapiens
HKGGETAFTYRFLFRAKLLCLSKSAWASGPGSALQARLTRLMSCSPVSEAVMSLQRAWRAGLGRPKPRKKGRSYSEGPLHPKACHLPRGKNPKSLASVAFFRSSAQLDMCVCVCLGKGQRGLPGRWVEVGGVLTLPQSSRRGHTPRTQAAPPLVKHPASPWGWPHSFIGATAADDNGSSGQCLPDDLPSSREGAAPVGRRCLPSQMETAGKWHLFPPGVEMLVSGTPCHFSGHPPAPSWEIQHPHECGAQGHQLFHLLSARPVAPALHPQLTQQGLECAAALLEPVARVGGWEEDSRWQATGWGVQPEAHSGEEGLPARDAAHFVLHTLLGCVHGIALPILDALQGFLHLRGNWGKHWDAGAQASQTGGSVYSHQPGGNKPAWEDRRSALAVPQERGASKAHCPLGQGVSRRS

SEQ ID NO: 805919 - protein, 157 aa, Homo sapiens [sequence omitted]

SEQ ID NO: 805920 - protein, 78 aa, Homo sapiens
RTQPHSCSLQNKAKGAGILMRAAGNNPGSWVHTDCGEQRGGVEAAAAAQSLPRRSQVHRACATLGARGGAGLPPNPIC

SEQ ID NO: 805921 - protein, 413 aa, Homo sapiens; identical to SEQ ID NO: 805918

SEQ ID NO: 805922 - protein, 949 aa, Homo sapiens
MILSLLFSLGGPLGWGLLGAWAQASSTSLSDLQSSRTPGVWKAEAEDTSKDPVGRNWCPYPMSKLVTLLALCKTEKFLIHSQQPCPQGAPDCQKVKVMYRMAHKPVYQVKQKVLTSLAWRCCPGYTGPNCEHHDSMAIPEPADPGDSHQEPQDGPVSFKPGHLAAVINEVEVQQEQQEHLLGDLQNDVHRVADSLPGLWKALPGNLTAAVMEANQTGHEFPDRSLEQVLLPHVDTFLQVHFSPIWRSFNQSLHSLTQAIRNLSLDVEANRQAISRVQDSAVARADFQELGAKFEAKVQENTQRVGQLRQDVEDRLHAQHFTLHRSISELQADVDTKLKRLHKAQEAPGTNGSLVLATPGAGARPEPDSLQARLGQLQRNLSELHMTTARREEELQYTLEDMRATLTRHVDEIKELYSESDETFDQISKVERQVEELQVNHTALRELRVILMEKSLIMEENKEEVERQLLELNLTLQHLQGGHADLIKYVKDCNCQKLYLDLDVIREGQRDATRALEETQVSLDERRQLDGSSLQALQNAVDAVSLAVDAHKAEGERARAATSRLRSQVQALDDEVGALKAAAAEARHEVRQLHSAFAALLEDALRHEAVLAALFGEEVLEEMSEQTPGPLPLSYEQIRVALQDAASGLQEQALGWDELAARVTALEQASEPPRPAEHLEPSHDAGREEAATTALAGLARELQSLSNDVKNVGRCCEAEAGAGAASLNASLDGLHNALFATQRSLEQHQRLFHSLFGNFQGLMEANVSLDLGKLQTMLSRKGKKQQKDLEAPRKRDKKEAEPLVDIRVTGPVPGALGAALWEAGSPVAFYASFSEGTAALQTVKFNTTYINIGSSYFPEHGYFRAPERGVYLFAVSVEFGPGPGTGQLVFGGHHRTPVCTTGQGSGSTATVFAMAELQKGERVWFELTQGSITKRSLSGTAFGGFLMFKT

SEQ ID NO: 805923 - protein, 166 aa, Homo sapiens
MILSLLFSLGGPLGWGLLGAWAQASSTSLSDLQSSRTPGVWKAEAEDTSKDPVGRNWCPYPMSKLVTLLALCKTEKFLIHSQQPCPQGAPDCQKVKVMYRMAHKPVYQVKQKVLTSLAWRCCPGYTGPNCEHHDSMAIPEPADPGDSHQEPQDGPVSFKPGPPLLQ

SEQ ID NO: 805924 - protein, 849 aa, Homo sapiens
MAHKPVYQVKQKVLTSLAWRCCPGYTGPNCEHHDSMAIPEPADPGDSHQEPQDGPVSFKPGHLAAVINEVEVQQEQQEHLLGDLQNDVHRVADSLPGLWKALPGNLTAAVMEANQTGHEFPDRSLEQVLLPHVDTFLQVHFSPIWRSFNQSLHSLTQAIRNLSLDVEANRQAISRVQDSAVARADFQELGAKFEAKVQENTQRVGQLRQDVEDRLHAQHFTLHRSISELQADVDTKLKRLHKAQEAPGTNGSLVLATPGAGARPEPDSLQARLGQLQRNLSELHMTTARREEELQYTLEDMRATLTRHVDEIKELYSESDETFDQISKVERQVEELQVNHTALRELRVILMEKSLIMEENKEEVERQLLELNLTLQHLQGGHADLIKYVKDCNCQKLYLDLDVIREGQRDATRALEETQVSLDERRQLDGSSLQALQNAVDAVSLAVDAHKAEGERARAATSRLRSQVQALDDEVGALKAAAAEARHEVRQLHSAFAALLEDALRHEAVLAALFGEEVLEEMSEQTPGPLPLSYEQIRVALQDAASGLQEQALGWDELAARVTALEQASEPPRPAEHLEPSHDAGREEAATTALAGLARELQSLSNDVKNVGRCCEAEAGAGAASLNASLDGLHNALFATQRSLEQHQRLFHSLFGNFQGLMEANVSLDLGKLQTMLSRKGKKQQKDLEAPRKRDKKEAEPLVDIRVTGPVPGALGAALWEAGSPVAFYASFSEGTAALQTVKFNTTYINIGSSYFPEHGYFRAPERGVYLFAVSVEFGPGPGTGQLVFGGHHRTPVCTTGQGSGSTATVFAMAELQKGERVWFELTQGSITKRSLSGTAFGGFLMFKT

SEQ ID NO: 805925 - protein, 888 aa, Homo sapiens
MSKLVTLLALCKTEKFLIHSQQPCPQGAPDCQKVKVMYRMAHKPVYQVKQKVLTSLAWRCCPGYTGPNCEHHDSMAIPEPADPGDSHQEPQDGPVSFKPGHLAAVINEVEVQQEQQEHLLGDLQNDVHRVADSLPGLWKALPGNLTAAVMEANQTGHEFPDRSLEQVLLPHVDTFLQVHFSPIWRSFNQSLHSLTQAIRNLSLDVEANRQAISRVQDSAVARADFQELGAKFEAKVQENTQRVGQLRQDVEDRLHAQHFTLHRSISELQADVDTKLKRLHKAQEAPGTNGSLVLATPGAGARPEPDSLQARLGQLQRNLSELHMTTARREEELQYTLEDMRATLTRHVDEIKELYSESDETFDQISKVERQVEELQVNHTALRELRVILMEKSLIMEENKEEVERQLLELNLTLQHLQGGHADLIKYVKDCNCQKLYLDLDVIREGQRDATRALEETQVSLDERRQLDGSSLQALQNAVDAVSLAVDAHKAEGERARAATSRLRSQVQALDDEVGALKAAAAEARHEVRQLHSAFAALLEDALRHEAVLAALFGEEVLEEMSEQTPGPLPLSYEQIRVALQDAASGLQEQALGWDELAARVTALEQASEPPRPAEHLEPSHDAGREEAATTALAGLARELQSLSNDVKNVGRCCEAEAGAGAASLNASLDGLHNALFATQRSLEQHQRLFHSLFGNFQGLMEANVSLDLGKLQTMLSRKGKKQQKDLEAPRKRDKKEAEPLVDIRVTGPVPGALGAALWEAGSPVAFYASFSEGTAALQTVKFNTTYINIGSSYFPEHGYFRAPERGVYLFAVSVEFGPGPGTGQLVFGGHHRTPVCTTGQGSGSTATVFAMAELQKGERVWFELTQGSITKRSLSGTAFGGFLMFKT

SEQ ID NO: 805926 - protein, 763 aa, Homo sapiens
ASKLLLRGHQQLTSLLSAFNSPSLNLVIFPGLEFPDRSLEQVLLPHVDTFLQVHFSPIWRSFNQSLHSLTQAIRNLSLDVEANRQAISRVQDSAVARADFQELGAKFEAKVQENTQRVGQLRQDVEDRLHAQHFTLHRSISELQADVDTKLKRLHKAQEAPGTNGSLVLATPGAGARPEPDSLQARLGQLQRNLSELHMTTARREEELQYTLEDMRATLTRHVDEIKELYSESDETFDQISKVERQVEELQVNHTALRELRVILMEKSLIMEENKEEVERQLLELNLTLQHLQGGHADLIKYVKDCNCQKLYLDLDVIREGQRDATRALEETQVSLDERRQLDGSSLQALQNAVDAVSLAVDAHKAEGERARAATSRLRSQVQALDDEVGALKAAAAEARHEVRQLHSAFAALLEDALRHEAVLAALFGEEVLEEMSEQTPGPLPLSYEQIRVALQDAASGLQEQALGWDELAARVTALEQASEPPRPAEHLEPSHDAGREEAATTALAGLARELQSLSNDVKNVGRCCEAEAGAGAASLNASLDGLHNALFATQRSLEQHQRLFHSLFGNFQGLMEANVSLDLGKLQTMLSRKGKKQQKDLEAPRKRDKKEAEPLVDIRVTGPVPGALGAALWEAGSPVAFYASFSEGTAALQTVKFNTTYINIGSSYFPEHGYFRAPERGVYLFAVSVEFGPGPGTGQLVFGGHHRTPVCTTGQGSGSTATVFAMAELQKGERVWFELTQGSITKRSLSGTAFGGFLMFKT

SEQ ID NO: 805927 - protein, 453 aa, Homo sapiens
MILSLLFSLGGPLGWGLLGAWAQASSTSLSDLQSSRTPGVWKAEAEDTSKDPVGRNWCPYPMSKLVTLLALCKTEKFLIHSQQPCPQGAPDCQKVKVMYRMAHKPVYQVKQKVLTSLAWRCCPGYTGPNCEHHDSMAIPEPADPGDSHQEPQDGPVSFKPGHLAAVINEVEVQQEQQEHLLGDLQNDVHRVADSLPGLWKALPGNLTAAVMEANQTGHEFPDRSLEQVLLPHVDTFLQVHFSPIWRSFNQSLHSLTQAIRNLSLDVEANRQAISRVQDSAVARADFQELGAKFEAKVQENTQRVGQLRQDVEDRLHAQHFTLHRSISELQADVDTKLKRLHKAQEAPGTNGSLVLATPGAGARPEPDSLQARLGQLQRNLSELHMTTARREEELQYTLEDMRATLTRHVDEIKELYSESDETFDQISKVERQVEELQVNHTALRELRVILMIL

SEQ ID NO: 805928 - protein, 246 aa, Homo sapiens
MASRGWVLNRHEAYMKPEMWGKCLDCINELMDILFANPNIFVGENILEESENLHNADQPLRVRGCILTLVERMDEEFTKIMQNTDPHSQEYVEHLKDEAQVCAIIERVQRYLEEKGTTEEVCRIYLLRILHTYYKFDYKAHQRQLTPPEGSSKSEQDQAENEGEDSAVLMERLCKYIYAKDRTDRIRTCAILCHIYHHALHSRWYQARDLMLMSHLQDNIQHADPPVQILYNRTMVQLGICAFRQG

SEQ ID NO: 805929 - protein, 157 aa, Homo sapiens
SLAHAQLVVELLADHASAGIALMGGHVGDLQEHGRHQVDTLQQLQVDVQVEGDLTAPLHLLLLLVALLQAAQQQALAQKLLGSATRLDVQQGVVCVLGQALAEGTDAQLHHGAVVKDSALALVPGPRPHAHEPLAGQHSACRPASADPLSRPILEST

SEQ ID NO: 805930 - protein, 308 aa, Homo sapiens
MFAKGTEITHAVVIKKLNEILQARGKKGTDRAAQIELLQLLVQIAAENNLGEGVIVKIKFNIIASLYDYNPNLATYMKPEMWGKCLDCINELMDILFANPNIFVGENILEESENLHNADQPLRVRGCILTLVERMDEEFTKIMQNTDPHSQEYVEHLKDEAQVCAIIERVQRYLEEKGTTEEVCRIYLLRILHTYYKFDYKAHQRQLTPPEGSSKSEQDQAENEGEDSAVLMERLCKYIYAKDRTDRIRTCAILCHIYHHALHSRWYQARDLMLMSHLQDNIQHADPPVQILYNRTMVQLGICAFRQG

SEQ ID NO: 805931 - protein, 430 aa, Homo sapiens
MFAKGTEITHAVVIKKLNEILQARGKKGTDRAAQIELLQLLVQIAAENNLGEGVIVKIKFNIIASLYDYNPNLATYMKPEMWGKCLDCINELMDILFANPNIFVGENILEESENLHNADQPLRVRGCILTLVERMDEEFTKIMQNTDPHSQEYVEHLKDEAQVCAIIERVQRYLEEKGTTEEVCRIYLLRILHTYYKFDYKAHQRQLTPPEGSSKSEQDQAENEGEDSAVLMERLCKYIYAKDRTDRIRTCAILCHIYHHALHSRWYQARDLMLMSHLQDNIQHADPPVQILYNRTMVQLGICAFRKADQGRTQRPAGHPVEWRARSFWARACCCAACRSATRSRRRWQRRRQVPFHLHINLELLECVYLVSAMLLEIPYMAAHESDARRRMISKQFHHQLRVGERQPWWFPLSHAGHVVAAPRLVVTGP

SEQ ID NO: 805932 - protein, 308 aa, Homo sapiens; identical to SEQ ID NO: 805930

SEQ ID NO: 805933 - protein, 307 aa, Homo sapiens
EDDEDWDTGSTSSDSDSEEEEGKQTALASRFLKKAPTTDEDKKAAEKKTGEGVIVKIKFNIIASLYDYNPNLATYMKPEMWGKCLDCINELMDILFANPNIFVGENILEESENLHNADQPLRVRGCILTLVERMDEEFTKIMQNTDPHSQEYVEHLKDEAQVCAIIERVQRYLEEKGTTEEVCRIYLLRILHTYYKFDYKAHQRQLTPPEGSSKSEQDQAENEGEDSAVLMERLCKYIYAKDRTDRIRTCAILCHIYHHALHSRWYQARDLMLMSHLQDNIQHADPPVQILYNRTMVQLGICAFRQG

SEQ ID NO: 805934 - protein, 246 aa, Homo sapiens; identical to SEQ ID NO: 805928

SEQ ID NO: 805935 - protein, 417 aa, Homo sapiens [sequence omitted]

SEQ ID NO: 805936 - protein, 1049 aa, Homo sapiens
MDWSFFRVVAVLFIFLVVVEVNSEFRIQVRDYNTKNGTIKWHSIRRQKREWIKFAAACREGEDNSKRNPIAKIHSDCAANQQVTYRISGVGIDQPPYGIFVINQKTGEINITSIVDREVTPFFIIYCRALNSMGQDLERPLELRVRVLDINDNPPVFSMATFAGQIEENSNANTLVMILNATDADEPNNLNSKIAFKIIRQEPSDSPMFIINRNTGEIRTMNNFLDREQYGQYALAVRGSDRDGGADGMSAECECNIKILDVNDNIPYMEQSSYTIEIQENTLNSNLLEIRVIDLDEEFSANWMAVIFFISGNEGNWFEIEMNERTNVGILKVVKPLDYEAMQSLQLSIGVRNKAEFHHSIMSQYKLKASAISVTVLNVIEGPVFRPGSKTYVVTGNMGSNDKVGDFVATDLDTGRPSTTVRYVMGNNPADLLAVDSRTGKLTLKNKVTKEQYNMLGGKYQGTILSIDDNLQRTCTGTININIQSFGNDDRTNTEPNTKITTNTGRQESTSSTNYDTSTTSTDSSQVYSSEPGNGAKDLLSDNVHFGPAGIGLLIMGFLVLGLVPFLMICCDCGGAPRSAAGFEPVPECSDGAIHSWAVEGPQPEPRDITTVIPQIPPDNANIIECIDNSGVYTNEYGGREMQDLGGGERMTGFELTEGVKTSGMPEICQEYSGTLRRNSMRECREGGLNMNFMESYFCQKAYAYADEDEGRPSNDCLLIYDIEGVGSPAGSVGCCSFIGEDLDDSFLDTLGPKFKKLADISLGKESYPDLDPSWPPQSTEPVCLPQETEPVVSGHPPISPHFGTTTVISESTYPSGPGVLHPKPILDPLGYGNVTVTESYTTSDTLKPSVHVHDNRPASNVVVTERVVGPISGADLHGMLEMPDLRDGSNVIVTERVIAPSSSLPTSLTIHHPRESSNVVVTERVIQPTSGMIGSLSMHPELANAHNVIVTERVVSGAGVTGISGTTGISGGIGSSGLVGTSMGAGSGALSGAGISGGGIGLSSLGGTASIGHMRSSSDHHFNQTIGSASPSTARSRITKYSTVQYSK

SEQ ID NO: 805937 - protein, 399 aa, Homo sapiens
MTGFELTEGVKTSGMPEICQEYSGTLRRNSMRECREGGLNMNFMESYFCQKAYAYADEDEGRPSNDCLLIYDIEGVGSPAGSVGCCSFIGEDLDDSFLDTLGPKFKKLADISLGKESYPDLDPSWPPQSTEPVCLPQETEPVVSGHPPISPHFGTTTVISESTYPSGPGVLHPKPILDPLGYGNVTVTESYTTSDTLKPSVHVHDNRPASNVVVTERVVGPISGADLHGMLEMPDLRDGSNVIVTERVIAPSSSLPTSLTIHHPRESSNVVVTERVIQPTSGMIGSLSMHPELANAHNVIVTERVVSGAGVTGISGTTGISGGIGSSGLVGTSMGAGSGALSGAGISGGGIGLSSLGGTASIGHMRSSSDHHFNQTIGSASPSTARSRITKYSTVQYSK

SEQ ID NO: 805938 - protein, 95 aa, Homo sapiens
CKMCLCSSFAFCHDCEASPAVWNSPVPQDLAYGLQLLTVLVVGGQQEAPVPAGPLPPAQDLRKIHLTPMWSWKERDLEDVLERILRNLRGPQTTL

SEQ ID NO: 805939 - protein, 85 aa, Homo sapiens
CKMCLCSSFAFCHDCEASPAVWNSPVPQDLAYGLQLLTVLVVGGQQEAPVPAGPLPPAQAPARWPSTHPSSTRGETPGASHNDNL

SEQ ID NO: 805940 - protein, 207 aa, Homo sapiens
MPGVLHLHVRALPRHREPAGLLAQRQIVPRGQSLVVCVSPFSPLWGSEPPALLLWVHQSPPRCPHADAHRPARGNTDMRTRRPTHRRTQSCTWRHVRTRRPTRRPTHRCTRTCTWRHRCVHMQAHTQVSVDLCEQMRADLHVETQTCRRTKRSLKADTQEGASHLWDSRDAVANTSVVPSSLLDKTEACSGHTWEAEPRDWAQEPFC

SEQ ID NO: 805941 - protein, 123 aa, Homo sapiens
QRVGDRKSLRGGRQSPAQPRAGIQAPPLRPSPGPAPMMKRASTGVLAVDIFDKFNFTGARVPWFDAIHEEFPRELESSISFPANFFKPPEEKEGPLVRPASRRTTPQTTRPGPGTEGEAPISR

SEQ ID NO: 805942 - protein, 161 aa, Homo sapiens
MKRASTGVLAVDIFDKFNFTGARVPWFDAIHEEFPRELESSISFPANFFKPPEEKVETGFHHIGQAGLDLLSLRIRPPPPPKVLGLQTKSSDDLLAGMARGVTVTNGVKGKESSCPSAAPSASAPAMTTVENKSKISTGTRRGCPFSPLLLDITQICKRKK

SEQ ID NO: 805943 - protein, 207 aa, Homo sapiens; identical to SEQ ID NO: 805940

SEQ ID NO: 805944 - protein, 207 aa, Homo sapiens; identical to SEQ ID NO: 805940

SEQ ID NO: 805945 - protein, 132 aa, Homo sapiens
RGAETRCRAGAGPERRRLDAGPGLGRRLAPAPKRLSVPDPLRLTPMMKRASTGVLAVDIFDKFNFTGARVPWFDAIHEEFPRELESSISFPANFFKPPEEKEGPLVRPASRRTTPQTTRPGPGTEGEAPISR

SEQ ID NO: 805946 - protein, 182 aa, Homo sapiens
FFSSILCLISIYLETSHSRPAFREQQGEGGKRGLPPGEARFPGVGTGEKQGRHEEGGGGRWRLRTGVGSAGSQDQAEDAAFPGVGLQRCPPGADEEPRARVQLAGEDLKQREAGGRVGKGFEKESFATGGVCTALLQKRPGRDQPQGDFKLKRKRLTDSHPDVSICSELRKRGRNFQHHVSV

SEQ ID NO: 805947 - protein, 409 aa, Homo sapiens
RGARPVKKSVAGRGHRWPQGKPSGHRAGRDPPSGGGGSSAGAHEGTMAQTPAFDKPKVELHVHLDGSIKPETILYYGRRRGIALPANTAEGLLNVIGMDKPLTLPDFLAKFDYYMPAIAGCREAIKRIAYEFVEMKAKEGVVYVEVRYSPHLLANSKVEPIPWNQAEGDLTPDEVVALVGQGLQEGERDFGVKARSILCCMRHQPNWSPKVVELCKKYQQQTVVAIDLAGDETIPGSSLLPGHVQAYQEAVKSGIHRTVHAGEVGSAEVVKEAVDILKTERLGHGYHTLEDQALYNRLRQENMHFEICPWSSYLTGAWKPDTEHAVIRLKNDQANYSLNTDDPLIFKSTLDTDYQMTKRDMGFTEEEFKRLNINAAKSSFLPEDEKRELLDLLYKAYGMPPSASAGQNL

SEQ ID NO: 805948 - protein, 309 aa, Homo sapiens
RGARPVKKSVAGRGHRWPQGKPSGHRAGRDPPSGGGGSSAGAHEGTMAQTPAFDKPKVELHVHLDGSIKPETILYYGRRRGIALPANTAEGLLNVIGMDKPLTLPDFLAKFDYYMPAIAGCREAIKRIAYEFVEMKAKEGVVYVEVRYSPHLLANSKVEPIPWNQAEGDLTPDEVVALVGQGLQEGERDFGVKARSILCCMRHQPNWSPKVVELCKKYQQQTVVAIDLAGDETIPGSSLLPGHVQAYQAVDILKTERLGHGYHTLEDQALYNRLRQENMHFEICPGQDTQWCLKARNRHINTHAHNYKA

SEQ ID NO: 805949 - protein, 409 aa, Homo sapiens; identical to SEQ ID NO: 805947

SEQ ID NO: 805950 - protein, 409 aa, Homo sapiens; identical to SEQ ID NO: 805947

SEQ ID NO: 805951 - protein, 434 aa, Homo sapiens
RGARPVKKSVAGRGHRWPQGKPSGHRAGRDPPSGGGGSSAGAHEGTMAQTPAFDKPKVELHVHLDGSIKPETILYYGRRRGIALPANTAEGLLNVIGMDKPLTLPDFLAKFDYYMPAIAGCREAIKRIAYEFVEMKAKEGVVYVEVRYSPHLLANSKVEPIPWNQAEGDLTPDEVVALVGQGLQEGERDFGVKARSILCCMRHQPNWSPKVVELCKKYQQQTVVAIDLAGDETIPGSSLLPGHVQAYQEAVKSGIHRTVHAGEVGSAEVVKEVGPGLAMGSLLTASSHTWLYSASLQAVDILKTERLGHGYHTLEDQALYNRLRQENMHFEICPWSSYLTGAWKPDTEHAVIRLKNDQANYSLNTDDPLIFKSTLDTDYQMTKRDMGFTEEEFKRLNINAAKSSFLPEDEKRELLDLLYKAYGMPPSASAGQNL

SEQ ID NO: 805952 - protein, 194 aa, Homo sapiens
MTWLSPFQEAVKSGIHRTVHAGEVGSAEVVKEVGPGLAMGSLLTASSHTWLYSASLQAVDILKTERLGHGYHTLEDQALYNRLRQENMHFEICPWSSYLTGAWKPDTEHAVIRLKNDQANYSLNTDDPLIFKSTLDTDYQMTKRDMGFTEEEFKRLNINAAKSSFLPEDEKRELLDLLYKAYGMPPSASAGQNL

SEQ ID NO: 805953 - protein, 261 aa, Homo sapiens
RGARPVKKSVAGRGHRWPQGKPSGHRAGRDPPSGGGGSSAGAHEGTMAQTPAFDKPKVELHVHLDGSIKPETILYYGRRRGIALPANTAEGLLNVIGMDKPLTLPDFLAKFDYYMPAIAGCREAIKRIAYEFVEMKAKEGVVYVEVRYSPHLLANSKVEPIPWNQAEGDLTPDEVVALVGQGLQEGERDFGVKARSILCCMRHQPNWSPKVVELCKKYQQQTVVAIDLAGDETIPGSSLLPGHVQAYQVGPVRRNGEAGPG

SEQ ID NO: 805954 - protein, 93 aa, Homo sapiens
NINAAKSSFLPEDEKRELLDLLYKAYGMPPSASAGRFLSGLLGSCPVLAPVWLSVGLLARCPSILGQRHECVMTPWFLGPGWEQRLIRSVCFL

SEQ ID NO: 805955 - protein, 123 aa, Homo sapiens
LQTGLTTSSSDSGLRGDPLSLLSTGHRQNLALLPGLECSGTVSGIGGFLVSLTSRMKPRTLARWGFHHVGPAGLELLTSSDLPVSASQMAGITGTRHRAWPWEHVYMDFVHFLKQTEGNLLDL

SEQ ID NO: 805956 - protein, 102 aa, Homo sapiens
PGPAPPRQGCIMATLACRVQFLDDTDPFNSTNFPEPSRPPLFTFREDLALGTQLAGVHRLLQAPHKLDDCTLQLSHNGAYLDLEATLAEQRDELEGFQDDAG

SEQ ID NO: 805957 - protein, 143 aa, Homo sapiens
GRGGGGKRGGGRGPGEEGRLPLFPPLTFNLGTRCPGMQPAPRSEAAVGVPCAEGTQKPRGSLPRPHPPPRGDAPYGLGHLHPRTAAGFPSGCDPGEFAISVPPPPPHTAPSRLPVILGCTQRRVCGPGFDGNATREAGSPLLK

SEQ ID NO: 805958 - protein, 113 aa, Homo sapiens
DGSSADPAVPHWLRVPSPPFPEGSRHRRVMREGSPRQRQVAARAGVREGFASFLEVSANPKTSPCGVSEMVAEREGMGLFLPRSWRTDDKVPRSRGHPLIACRGRPSCGHGVS

SEQ ID NO: 805959 - protein, 128 aa, Homo sapiens
GRGGGGKRGGGRGPGEEGRLPLFPPLTFNLGTRCPGMQPAPRSEAAVGVPCAEGTQKPRGSLPRPHPPPRGDAPYGLGHLHPRTAAGFPSGCDPGGGKERGREGGRSEGGRQAGGEEREIRLLGGLLI

SEQ ID NO: 805960 - protein, 111 aa, Homo sapiens
GRGGGGKRGGGRGPGEEGRLPLFPPLTFNLGTRCPGMQPAPRSEAAVGVPCAEGTQKPRGSLPRPHPPPRGDAPYGLGHLHPRTAAGFPSGCDPGGFDGNATREAGSPLLK

SEQ ID NO: 805961 - protein, 71 aa, Homo sapiens
ASLPSQRSARAPPGCCGGGFPGTFQESASRDRGPRYCFKEARSQYTGFREDRSLPSPYHHHHHTQHPQDSL

SEQ ID NO: 805962 - protein, 71 aa, Homo sapiens; identical to SEQ ID NO: 805961

SEQ ID NO: 805963 - protein, 71 aa, Homo sapiens; identical to SEQ ID NO: 805961

SEQ ID NO: 805964 - protein, 1122 aa, Homo sapiens
QGLQRGDPPGRMHWLPAGHDINGALEPSNIDTSILEEYISKEDASDLCFPDISAPASSASYSHGQPAMPGSSGVHHLSPPGGGPSPGRHGPLPPPGYGTPLNCNNNNGMGAAPKPFPGGTGPPIKAEPKAPYAPGTLPDSPPDSGSEAYSPQQVNEPHLLRTITPETLCHVGVPSRLEHPPPPPAHLPGPPPPPPPPPHYPVLQRDLYMKAEPPIPHYAAMGQGLVPTDLHHTQQSQMLHQLLQQHGAELPTHPSKKRKHSESPPSTLNAQMLNGMIKQEPGTVTALPLHPTRAPSPPWPPQGPLSPGPGSLPLSIARVQTPPWHPPGAPSPGLLQDSDSLSGSYLDPNYQSIKWQPHQQNKWATLYDANYKELPMLTYRVDADKGFNFSVGDDAFVCQKKNHFQVTVYIGMLGEPKYVKTPEGLKPLDCFYLKLHGVKLEALNQSINIEQSQSDRSKRPFNPVTVNLPPEQVTKVTVGRLHFSETTANNMRKKGKPNPDQRYFMLVVALQAHAQNQNYTLAAQISERIIVRASNPGQFESDSDVLWQRAQVPDTVFHHGRVGINTDRPDEALVVHGNVKVMGSLMHPSDLRAKEHVQEVDTTEQLKRISRMRLVHYRYKPEFAASAGIEATAPETGVIAQEVKEILPEAVKDTGDMVFANGKTIENFLVVNKERIFMENVGAVKELCKLTDNLETRIDELERWSHKLAKLRRLDSLKSTGSSGAFSHAGSQFSRAGSVPHKKRPPKVASKSSSVVPDQACISQRFLQGTIIALVVVMAFSVVSMSTLYVLSLRTEEDLVDTDGGSSQSFGTTQLRQSPLTTGLPGIQPSLLLVTTSLTSSAPGSAVRTLDMCSSHPCPVICCSSPTTNPTTGPSLGPSFNPGHVLSPSPSPSTNRSGPSQMALLPVTNIRAKSWGLSVNGIGHSKHHKSLEPLASPAVPFPGGQGKAKNSPSLGFHGRARRGALQSSVGPAEPTWAQGQSEPVPSLTSIQVLENSMSITSQYCAPGDACRPGNFTYHIPVSSGTPLHLSLTLQMNSSSPVSVVLCSLRSKEEPCEEGSLPQSLHTHQDTQGTSHRWPITILSFREFTYHFRVALLGQANCSSEALAQPATDYHFHFYRLCD

SEQ ID NO: 805965 - protein, 136 aa, Homo sapiens
VRTKWDDLRKAAGLIPDPYSVPGPSQMALLPVTNIRAKSWGLSVNGIGHSKHHKSLEPLASPAVPFPGGQGKAKNSPSLGFHGRARRGALQSSVGPAEPTWAQGQSGTCCTPDTTQPSLARLTGQGPPQPSHVTVW

SEQ ID NO: 805966 - protein, 1149 aa, Homo sapiens
QGLQRGDPPGRMHWLPAGHDINGALEPSNIDTSILEEYISKEDASDLCFPDISAPASSASYSHGQPAMPGSSGVHHLSPPGGGPSPGRHGPLPPPGYGTPLNCNNNNGMGAAPKPFPGGTGPPIKAEPKAPYAPGTLPDSPPDSGSEAYSPQQVNEPHLLRTITPETLCHVGVPSRLEHPPPPPAHLPGPPPPPPPPPHYPVLQRDLYMKAEPPIPHYAAMGQGLVPTDLHHTQQSQMLHQLLQQHGAELPTHPSKKRKHSESPPSTLNAQMLNGMIKQEPGTVTALPLHPTRAPSPPWPPQGPLSPGPGSLPLSIARVQTPPWHPPGAPSPGLLQDSDSLSGSYLDPNYQSIKWQPHQQNKWATLYDANYKELPMLTYRVDADKGFNFSVGDDAFVCQKKNHFQVTVYIGMLGEPKYVKTPEGLKPLDCFYLKLHGVKLEALNQSINIEQSQSDRSKRPFNPVTVNLPPEQVTKVTVGRLHFSETTANNMRKKGKPNPDQRYFMLVVALQAHAQNQNYTLAAQISERIIVRASNPGQFESDSDVLWQRAQVPDTVFHHGRVGINTDRPDEALVVHGNVKVMGSLMHPSDLRAKEHVQEVDTTEQLKRISRMRLVHYRYKPEFAASAGIEATAPETGVIAQEVKEILPEAVKDTGDMVFANGKTIENFLVVNKERIFMENVGAVKELCKLTDNLETRIDELERWSHKLAKLRRLDSLKSTGSSGAFSHAGSQFSRAGSVPHKKRPPKVASKSSSVVPDQACISQRFLQGTIIALVVVMAFSVVSMSTLYVLSLRTEEDLVDTDGSFAVSTSCLLALLRPQPPGGSEAFVPMRSSQSFGTTQLRQSPLTTGLPGIQPSLLLVTTSLTSSAPGSAVRTLDMCSSHPCPVICCSSPTTNPTTGPSLGPSFNPGHVLSPSPSPSTNRSGPSQMALLPVTNIRAKSWGLSVNGIGHSKHHKSLEPLASPAVPFPGGQGKAKNSPSLGFHGRARRGALQSSVGPAEPTWAQGQSEPVPSLTSIQVLENSMSITSQYCAPGDACRPGNFTYHIPVSSGTPLHLSLTLQMNSSSPVSVVLCSLRSKEEPCEEGSLPQSLHTHQDTQGTSHRWPITILSFREFTYHFRVALLGQANCSSEALAQPATDYHFHFYRLCD

SEQ ID NO: 805967 - protein, 271 aa, Homo sapiens
MCSSHPCPVICCSSPTTNPTTGPSLGPSFNPGHVLSPSPSPSTNRSGPSQMALLPVTNIRAKSWGLSVNGIGHSKHHKSLEPLASPAVPFPGGQGKAKNSPSLGFHGRARRGALQSSVGPAEPTWAQGQSEPVPSLTSIQVLENSMSITSQYCAPGDACRPGNFTYHIPVSSGTPLHLSLTLQMNSSSPVSVVLCSLRSKEEPCEEGSLPQSLHTHQDTQGTSHRWPITILSFREFTYHFRVALLGQANCSSEALAQPATDYHFHFYRLCD

SEQ ID NO: 805968 - protein, 1122 aa, Homo sapiens; identical to SEQ ID NO: 805964

SEQ ID NO: 805969 - protein, 1122 aa, Homo sapiens; identical to SEQ ID NO: 805964

SEQ ID NO: 805970 - protein, 1122 aa, Homo sapiens; identical to SEQ ID NO: 805964

SEQ ID NO: 805971 - protein, 306 aa, Homo sapiens
QGLQRGDPPGRMHWLPAGHDINGALEPSNIDTSILEEYISKEDASDLCFPDISAPASSASYSHGQPAMPGSSGVHHLSPPGGGPSPGRHGPLPPPGYGTPLNCNNNNGMGAAPKPFPGGTGPPIKAEPKAPYAPGTLPDSPPDSGSEAYSPQQVNEPHLLRTITPETLCHVGVPSRLEHPPPPPAHLPGPPPPPPPPPHYPVLQRDLYMKAEPPIPHYAAMGQGLVPTDLHHTQQSQMLHQLLQQHGAELPTDPRRHAVCRDRRHGGQPHKGMSAWWKDGIRPGTHPAHPTGVSQMPPAAHSGRTI

SEQ ID NO: 805972 - protein, 88 aa, Homo sapiens
PLSIARVQTPPWHPPGAPSPGTWLANSSRWGVGPKVQGPHGRSLPPGLLQDSDSLSGSYLDPNYQSIKWQPHQQNKWATLYDANYKEL

SEQ ID NO: 805973 - protein, 1583 aa, Homo sapiens
MKQEVEDSVTKMGDAHKELEQSHINYVKEIENLKNELMAVRSKYSEDKANLQKQLEEAMNTQLELSEQLKFQNNSEDNVKKLQEEIEKIRPGFEEQILYLQKQLDATTDEKKETVTQLQNIIEANSQHYQKNINSLQEELLQLKAIHQEEVKELMCQIEASAKEHEAEINKLNELKENLVKQCEASEKNIQKKYECELENLRKATSNANQDNQICSILLQENTFVEQVVNEKVKHLEDTLKELESQHSILKDEVTYMNNLKLKLEMDAQHIKDEFFHEREDLEFKINELLLAKEEQGCVIEKLKSELAGLNKQFCYTVEQHNREVQSLKEQHQKEISELNETFLSDSEKEKLTLMFEIQGLKEQCENLQQEKQEAILNYESLREIMEILQTELGESAGKISQEFESMKQQQASDVHELQQKLRTAFTEKDALLETVNRLQGENEKLLSQQELVPELENTIKNLQEKNGVYLLSLSQRDTMLKELEGKINSLTEEKDDFINKLKNSHEEMDNFHKKCEREERLILELGKKVEQTIQYNSELEQKVNELTGGLEETLKEKDQNDQKLEKLMVQMKVLSEDKEVLSAEVKSLYEENNKLSSEKKQLSRDLEVFLSQKEDVILKEHITQLEKKLQLMVEEQDNLNKLLENEQVQKLFVKTQLYGFLKEMGSEVSEDSEEKDVVNVLQAVGESLAKINEEKCNLAFQRDEKVLELEKEIKCLQEESVVQCEELKSLLRDYEQEKVLLRKELEEIQSEKEALQSDLLEMKNANEKTRLENQNLLIQVEEVSQTCSKSEIHNEKEKCFIKEHENLKPLLEQKELRDRRAELILLKDSLAKSPSVKNDPLSSVKELEEKIENLEKECKEKEEKINKIKLVAVKAKKELDSSRKETQTVKEELESLRSEKDQLSASMRDLIQGAESYKNLLLEYEKQSEQLDVEKERANNFEHRIEDLTRQLRNSTLQCETINSDNEDLLARIETLQSNAKLLEVQILEVQRAKAMVDKELEAEKLQKEQKIKEHATTVNELEELQVQLQKEKKQLQKTMQELELVKKDAQQTTLMNMEIADYERLMKELNQKLTNKNNKIEDLEQEIKIQKQKQETLQEEITSLQSSVQQYEEKNTKIKQLLVKTKKELADSKQAETDHLILQASLKGELEASQQQVEVYKIQLAEITSEKHKIHEHLKTSAEQHQRTLSAYQQRVTALQEECRAAKAEQATVTSEFESYKVRVHNVLKQQKNKSMSQAETEGAKQEREHLEMLIDQLKIKLQDSQNNLQINVSELQTLQSEHDTLLERHNKMLQETVSKEAELREKLCSIQSENMMMKSEHTQTVSQLTSQNEVLRNSFRDQVRHLQEEHRKTVETLQQQLSKMEAQLFQLKNEPTTRSPVSSQQSLKNLRERRNTDLPLLDMHTVTREEGEGMETTDTESVSSASTYTQSLEQLLNSPETKLEPPLWHAEFTKEELVQKLSSTTKSADHLNGLLRETEATNAILMEQIKLLKSEIRRLERNQEREKSAANLEYLKNVLLQFIFLKPGSERERLLPVINTMLQLSPEEKGKLAAVAQGEEENASRSSGWASYLHSWSGLR

SEQ ID NO: 805974 - protein, 90 aa, Homo sapiens
ARPLTCSRAYVRGWRKQKCSGGGGWLRAGGGLAEMEDLVQDGVASPATPGTGKSKNWRKKLKNSDQNLLLKELVILLRVLLCRPGWSAMT

SEQ ID NO: 805975 - protein, 47 aa, Homo sapiens
MKKFEEDLLLLEDQNSELSEERELLGDRLAEFSSQAAEEEESASRPH

SEQ ID NO: 805976 - protein, 1718 aa, Homo sapiens
ARPLTCSRAYVRGWRKQKCSGGGGWLRAGGGLAEMEDLVQDGVASPATPGTGKSKLETLPKEDLIKFAKKQMMLIQKAKSRCTELEKEIEELRSKPVTEGTGDIIKALTERLDALLLEKAETEQQCLSLKKENIKMKQEVEDSVTKMGDAHKELEQSHINYVKEIENLKNELMAVRSKYSEDKANLQKQLEEAMNTQLELSEQLKFQNNSEDNVKKLQEEIEKIRPGFEEQILYLQKQLDATTDEKKETVTQLQNIIEANSQHYQKNINSLQEELLQLKAIHQEEVKELMCQIEASAKEHEAEINKLNELKENLVKQCEASEKNIQKKYECELENLRKATSNANQDNQICSILLQENTFVEQVVNEKVKHLEDTLKELESQHSILKDEVTYMNNLKLKLEMDAQHIKDEFFHEREDLEFKINELLLAKEEQGCVIEKLKSELAGLNKQFCYTVEQHNREVQSLKEQHQKEISELNETFLSDSEKEKLTLMFEIQGLKEQCENLQQEKQEAILNYESLREIMEILQTELGESAGKISQEFESMKQQQASDVHELQQKLRTAFTEKDALLETVNRLQGENEKLLSQQELVPELENTIKNLQEKNGVYLLSLSQRDTMLKELEGKINSLTEEKDDFINKLKNSHEEMDNFHKKCEREERLILELGKKVEQTIQYNSELEQKVNELTGGLEETLKEKDQNDQKLEKLMVQMKVLSEDKEVLSAEVKSLYEENNKLSSEKKQLSRDLEVFLSQKEDVILKEHITQLEKKLQLMVEEQDNLNKLLENEQVQKLFVKTQLYGFLKEMGSEVSEDSEEKDVVNVLQAVGESLAKINEEKCNLAFQRDEKVLELEKEIKCLQEESVVQCEELKSLLRDYEQEKVLLRKELEEIQSEKEALQSDLLEMKNANEKTRLENQNLLIQVEEVSQTCSKSEIHNEKEKCFIKEHENLKPLLEQKELRDRRAELILLKDSLAKSPSVKNDPLSSVKELEEKIENLEKECKEKEEKINKIKLVAVKAKKELDSSRKETQTVKEELESLRSEKDQLSASMRDLIQGAESYKNLLLEYEKQSEQLDVEKERANNFEHRIEDLTRQLRNSTLQCETINSDNEDLLARIETLQSNAKLLEVQILEVQRAKAMVDKELEAEKLQKEQKIKEHATTVNELEELQVQLQKEKKQLQKTMQELELVKKDAQQTTLMNMEIADYERLMKELNQKLTNKNNKIEDLEQEIKIQKQKQETLQEEITSLQSSVQQYEEKNTKIKQLLVKTKKELADSKQAETDHLILQASLKGELEASQQQVEVYKIQLAEITSEKHKIHEHLKTSAEQHQRTLSAYQQRVTALQEECRAAKAEQATVTSEFESYKVRVHNVLKQQKNKSMSQAETEGAKQEREHLEMLIDQLKIKLQDSQNNLQINVSELQTLQSEHDTLLERHNKMLQETVSKEAELREKLCSIQSENMMMKSEHTQTVSQLTSQNEVLRNSFRDQVRHLQEEHRKTVETLQQQLSKMEAQLFQLKNEPTTRSPVSSQQSLKNLRERRNTDLPLLDMHTVTREEGEGMETTDTESVSSASTYTQSLEQLLNSPETKLEPPLWHAEFTKEELVQKLSSTTKSADHLNGLLRETEATNAILMEQIKLLKSEIRRLERNQEREKSAANLEYLKNVLLQFIFLKPGSERERLLPVINTMLQLSPEEKGKLAAVAQGEEENASRSSGWASYLHSWSGLR

SEQ ID NO: 805977 - protein, 1596 aa, Homo sapiens
IKMKQEVDAIMPSLLKGKKDSVTKMGDAHKELEQSHINYVKEIENLKNELMAVRSKYSEDKANLQKQLEEAMNTQLELSEQLKFQNNSEDNVKKLQEEIEKIRPGFEEQILYLQKQLDATTDEKKETVTQLQNIIEANSQHYQKNINSLQEELLQLKAIHQEEVKELMCQIEASAKEHEAEINKLNELKENLVKQCEASEKNIQKKYECELENLRKATSNANQDNQICSILLQENTFVEQVVNEKVKHLEDTLKELESQHSILKDEVTYMNNLKLKLEMDAQHIKDEFFHEREDLEFKINELLLAKEEQGCVIEKLKSELAGLNKQFCYTVEQHNREVQSLKEQHQKEISELNETFLSDSEKEKLTLMFEIQGLKEQCENLQQEKQEAILNYESLREIMEILQTELGESAGKISQEFESMKQQQASDVHELQQKLRTAFTEKDALLETVNRLQGENEKLLSQQELVPELENTIKNLQEKNGVYLLSLSQRDTMLKELEGKINSLTEEKDDFINKLKNSHEEMDNFHKKCEREERLILELGKKVEQTIQYNSELEQKVNELTGGLEETLKEKDQNDQKLEKLMVQMKVLSEDKEVLSAEVKSLYEENNKLSSEKKQLSRDLEVFLSQKEDVILKEHITQLEKKLQLMVEEQDNLNKLLENEQVQKLFVKTQLYGFLKEMGSEVSEDSEEKDVVNVLQAVGESLAKINEEKCNLAFQRDEKVLELEKEIKCLQEESVVQCEELKSLLRDYEQEKVLLRKELEEIQSEKEALQSDLLEMKNANEKTRLENQNLLIQVEEVSQTCSKSEIHNEKEKCFIKEHENLKPLLEQKELRDRRAELILLKDSLAKSPSVKNDPLSSVKELEEKIENLEKECKEKEEKINKIKLVAVKAKKELDSSRKETQTVKEELESLRSEKDQLSASMRDLIQGAESYKNLLLEYEKQSEQLDVEKERANNFEHRIEDLTRQLRNSTLQCETINSDNEDLLARIETLQSNAKLLEVQILEVQRAKAMVDKELEAEKLQKEQKIKEHATTVNELEELQVQLQKEKKQLQKTMQELELVKKDAQQTTLMNMEIADYERLMKELNQKLTNKNNKIEDLEQEIKIQKQKQETLQEEITSLQSSVQQYEEKNTKIKQLLVKTKKELADSKQAETDHLILQASLKGELEASQQQVEVYKIQLAEITSEKHKIHEHLKTSAEQHQRTLSAYQQRVTALQEECRAAKAEQATVTSEFESYKVRVHNVLKQQKNKSMSQAETEGAKQEREHLEMLIDQLKIKLQDSQNNLQINVSELQTLQSEHDTLLERHNKMLQETVSKEAELREKLCSIQSENMMMKSEHTQTVSQLTSQNEVLRNSFRDQVRHLQEEHRKTVETLQQQLSKMEAQLFQLKNEPTTRSPVSSQQSLKNLRERRNTDLPLLDMHTVTREEGEGMETTDTESVSSASTYTQSLEQLLNSPETKLEPPLWHAEFTKEELVQKLSSTTKSADHLNGLLRETEATNAILMEQIKLLKSEIRRLERNQEREKSAANLEYLKNVLLQFIFLKPGSERERLLPVINTMLQLSPEEKGKLAAVAQGEEENASRSSGWASYLHSWSGLR

SEQ ID NO: 805978 - protein, 1703 aa, Homo sapiens
ARPLTCSRAYVRGWRKQKCSGGGGWLRAGGGLAEMEDLVQDGVASPATPGTGKSKLETLPKEDLIKFAKKQMMLIQKAKSRCTELEKEIEELRSKPVTEGTGDIIKALTERLDALLLEKAETEQQCLSLKKENIKMKQEVEDSVTKMGDAHKELEQSHINYVKEIENLKNELMAVRSKYSEDKANLQKQLEEAMNTQLELSEQLKFQNNSEDNVKKLQEEIEKIRPGFEEQILYLQKQLDATTDEKKETVTQLQNIIEANSQHYQKNINSLQEELLQLKAIHQEEVKELMCQIEASAKEHEAEINKLNELKENLVKQCEASEKNIQKKYECELENLRKATSNANQDNQICSILLQENTFVEQVVNEKVKHLEDTLKELESQHSILKDEVTYMNNLKLKLEMDAQHIKDEFFHEREDLEFKINELLLAKEEQGCVIEKLKSELAGLNKQFCYTVEQHNREVQSLKEQHQKEISELNETFLSDSEKEKLTLMFEIQGLKEQCENLQQEKQEAILNYESLREIMEILQTELGESAGKISQEFESMKQQQASDVHELQQKLRTAFTEKDALLETVNRLQGENEKLLSQQELVPELENTIKNLQEKNGVYLLSLSQRDTMLKELEGKINSLTEEKDDFINKLKNSHEEMDNFHKKCEREERLILELGKKVEQTIQYNSELEQKVNELTGGLEETLKEKDQNDQKLEKLMVQMKVLSEDKEVLSAEVKSLYEENNKLSSEKKQLSRDLEVFLSQKEDVILKEHITQLEKKLQLMVEEQDNLNKLLENEQVQKLFVKTQLYGFLKEMGSEVSEDSEEKDVVNVLQAVGESLAKINEEKCNLAFQRDEKVLELEKEIKCLQEESVVQCEELKSLLRDYEQEKVLLRKELEEIQSEKEALQSDLLEMKNANEKTRLENQNLLIQVEEVSQTCSKSEIHNEKEKCFIKEHENLKPLLEQKELRDRRAELILLKDSLAKSPSVKNDPLSSVKELEEKIENLEKECKEKEEKINKIKLVAVKAKKELDSSRKETQTVKEELESLRSEKDQLSASMRDLIQGAESYKNLLLEYEKQSEQLDVEKERANNFEHRIEDLTRQLRNSTLQCETINSDNEDLLARIETLQSNAKLLEVQILEVQRAKAMVDKELEAEKLQKEQKIKEHATTVNELEELQVQLQKEKKQLQKTMQELELVKSERLMKELNQKLTNKNNKIEDLEQEIKIQKQKQETLQEEITSLQSSVQQYEEKNTKIKQLLVKTKKELADSKQAETDHLILQASLKGELEASQQQVEVYKIQLAEITSEKHKIHEHLKTSAEQHQRTLSAYQQRVTALQEECRAAKAEQATVTSEFESYKVRVHNVLKQQKNKSMSQAETEGAKQEREHLEMLIDQLKIKLQDSQNNLQINVSELQTLQSEHDTLLERHNKMLQETVSKEAELREKLCSIQSENMMMKSEHTQTVSQLTSQNEVLRNSFRDQVRHLQEEHRKTVETLQQQLSKMEAQLFQLKNEPTTRSPVSSQQSLKNLRERRNTDLPLLDMHTVTREEGEGMETTDTESVSSASTYTQSLEQLLNSPETKLEPPLWHAEFTKEELVQKLSSTTKSADHLNGLLRETEATNAILMEQIKLLKSEIRRLERNQEREKSAANLEYLKNVLLQFIFLKPGSERERLLPVINTMLQLSPEEKGKLAAVAQGEEENASRSSGWASYLHSWSGLR

SEQ ID NO: 805979 - protein, 1696 aa, Homo sapiens
ARPLTCSRAYVRGWRKQKCSGGGGWLRAGGGLAEMEDLVQDGVASPATPGTGKSKLETLPKEDLIKFAKKQMMLIQKAKSRCTELEKEIEELRSKPVTEGTGDIIKALTERLDALLLEKAETEQQCLSLKKENIKMKQEVEDSVTKMGDAHKELEQSHINYVKEIENLKNELMAVRSKYSEDKANLQKQLEEAMNTQLELSEQLKFQNNSEDNVKKLQEEIEKIRPGFEEQILYLQKQLDATTDEKKETVTQLQNIIEANSQHYQKNINSLQEELLQLKAIHQEEVKELMCQIEASAKEHEAEINKLNELKENLVKQCEASEKNIQKKYECELENLRKATSNANQDNQICSILLQENTFVEQVVNEKVKHLEDTLKELESQHSILKDEVTYMNNLKLKLEMDAQHIKDEFFHEREDLEFKINELLLAKEEQGCVIEKLKSELAGLNKQFCYTVEQHNREVQSLKEQHQKEISELNETFLSDSEKEKLTLMFEIQGLKEQCENLQQEKQEAILNYESLREIMEILQTELGESAGKISQEFESMKQQQASDVHELQQKLRTAFTEKDALLETVNRLQGENEKLLSQQELVPELENTIKNLQEKNGVYLLSLSQRDTMLKELEGKINSLTEEKDDFINKLKNSHEEMDNFHKKCEREERLILELGKKVEQTIQYNSELEQKVNELTGGLEETLKEKDQNDQKLEKLMVQMKVLSEDKEVLSAEVKSLYEENNKLSSEKKQLSRDLEVFLSQKEDVILKEHITQLEKKLQLMVEEQDNLNKLLENEQVQKLFVKTQLYGFLKEMGSEVSEDSEEKDVVNVLQAVGESLAKINEEKCNLAFQRDEKVLELEKEIKCLQEESVVQCEELKSLLRDYEQEKVLLRKELEEIQSEKEALQSDLLEMKNANEKTRLENQNLLIQVEEVSQTCSKSEIHNEKEKCFIKEHENLKPLLEQKELRDRRAELILLKDSLAKSPSVKNDPLSSVKELEEKIENLEKECKEKEEKINKIKLVAVKAKKELDSSRKETQTVKEELESLRSEKDQLSASMRDLIQGAESYKNLLLEYEKQSEQLDVEKNCETINSDNEDLLARIETLQSNAKLLEVQILEVQRAKAMVDKELEAEKLQKEQKIKEHATTVNELEELQVQLQKEKKQLQKTMQELELVKKDAQQTTLMNMEIADYERLMKELNQKLTNKNNKIEDLEQEIKIQKQKQETLQEEITSLQSSVQQYEEKNTKIKQLLVKTKKELADSKQAETDHLILQASLKGELEASQQQVEVYKIQLAEITSEKHKIHEHLKTSAEQHQRTLSAYQQRVTALQEECRAAKAEQATVTSEFESYKVRVHNVLKQQKNKSMSQAETEGAKQEREHLEMLIDQLKIKLQDSQNNLQINVSELQTLQSEHDTLLERHNKMLQETVSKEAELREKLCSIQSENMMMKSEHTQTVSQLTSQNEVLRNSFRDQVRHLQEEHRKTVETLQQQLSKMEAQLFQLKNEPTTRSPVSSQQSLKNLRERRNTDLPLLDMHTVTREEGEGMETTDTESVSSASTYTQSLEQLLNSPETKLEPPLWHAEFTKEELVQKLSSTTKSADHLNGLLRETEATNAILMEQIKLLKSEIRRLERNQEREKSAANLEYLKNVLLQFIFLKPGSERERLLPVINTMLQLSPEEKGKLAAVAQGEEENASRSSGWASYLHSWSGLR

SEQ ID NO: 805980 - protein, 1718 aa, Homo sapiens; identical to SEQ ID NO: 805976

SEQ ID NO: 805981 - protein, 1726 aa, Homo sapiens
ARPLTCSRAYVRGWRKQKCSGGGGWLRAGGGLAEMEDLVQDGVASPATPGTGKSKLETLPKEDLIKFAKKQMMLIQKAKSRCTELEKEIEELRSKPVTEGTGDIIKALTERLDALLLEKAETEQQCLSLKKENIKMKQEVEDSVTKMGDAHKELEQSHINYVKEIENLKNELMAVRSKYSEDKANLQKQLEEAMNTQLELSEQLKFQNNSEDNVKKLQEEIEKIRPGFEEQILYLQKQLDATTDEKKETVTQLQNIIEANSQHYQKNINSLQEELLQLKAIHQEEVKELMCQIEASAKEHEAEINKLNELKENLVKQCEASEKNIQKKYECELENLRKATSNANQDNQICSILLQENTFVEQVVNEKVKHLEDTLKELESQHSILKDEVTYMNNLKLKLEMDAQHIKDEFFHEREDLEFKINELLLAKEEQGCVIEKLKSELAGLNKQFCYTVEQHNREVQSLKEQHQKEISELNETFLSDSEKEKLTLMFEIQGLKEQCENLQQEKQEAILNYESLREIMEILQTELGESAGKISQEFESMKQQQASDVHELQQKLRTAFTEKDALLETVNRLQGENEKLLSQQELVPELENTIKNLQEKNGVYLLSLSQRDTMLKELEGKINSLTEEKDDFINKLKNSHEEMDNFHKKCEREERLILELGKKVEQTIQYNSELEQKVNELTGGLEETLKEKDQNDQKLEKLMVQMKVLSEDKEVLSAEVKSLYEENNKLSSEKKQLSRDLEVFLSQKEDVILKEHITQLEKKLQLMVEEQDNLNKLLENEQVQKLFVKTQLYGFLKEMGSEVSEDSEEKDVVNVLQAVGESLAKINEEKCNLAFQRDEKVLELEKEIKCLQEESVVQCEELKSLLRDYEQEKVLLRKELEEIQSEKEALQSDLLEMKNANEKTRLENQNLLIQVEEVSQTCSKSEIHNEKEKCFIKEHENLKPLLEQKELRDRRAELILLKDSLAKSPSVKNDPLSSVKELEEKIENLEKECKEKEEKINKIKLVAVKAKKELDSSRKETQTVKEELESLRSEKDQLSASMRDLIQGAESYKNLLLEYEKQSEQLDVEKERANNFEHRIEDLTRQLRNSTLQCETINSDNEDLLARIETLQSNAKLLEVQILEVQRAKAMVDKELEAEKLQKEQKIKEHATTVNELEELQVQLQKEKKQLQKTMQELELVKKDAQQTTLMNMEIADYERLMKELNQKLTNKNNKIEDLEQEIKIQKQKQETLQEEITSLQSSVQQYEEKNTKIKQLLVKTKKELADSKQAETDHLILQASLKGELEASQQQVEVYKIQLAEITSEKHKIHEHLKTSAEQHQRTLSAYQQRVTALQEECRAAKAEQATVTSEFESYKVRVHNVLKQQKNKSMSQAETEGAKQEREHLEMLIDQLKIKLQDSQNNLQINVSELQTLQSEHDTLLERHNKMLQETVSKEAELREKLCSIQSENMMMKSEHTQTVSQLTSQNEVLRNSFRDQVRHLQEEHRKTVETLQQQLSKMEAQLFQLKNEPTTRSPVSSQQSLKNLRERRNTDLPLLDMHTVTREEGEGMETTDTESVSSASTYTQSLEQLLNSPETKLEPPLWHAEFTKEELVQKLSSTTKSADHLNGLLRETEATNAILMEQIKLLKSEIRRLERNQEREKSAANLEYLKNVLLQFIFLKPGSERERLLPVINTMLQLSPEEKGKLAAVAQGEEENASRSSGWASYLHSWSGLPSTYRSPVD

SEQ ID NO: 805982 - protein, 525 aa, Homo sapiens
MEIADYERLMKELNQKLTNKNNKIEDLEQEIKIQKQKQETLQEEITSLQSSVQQYEEKNTKIKQLLVKTKKELADSKQAETDHLILQASLKGELEASQQQVEVYKIQLAEITSEKHKIHEHLKTSAEQHQRTLSAYQQRVTALQEECRAAKAEQATVTSEFESYKVRVHNVLKQQKNKSMSQAETEGAKQEREHLEMLIDQLKIKLQDSQNNLQINVSELQTLQSEHDTLLERHNKMLQETVSKEAELREKLCSIQSENMMMKSEHTQTVSQLTSQNEVLRNSFRDQVRHLQEEHRKTVETLQQQLSKMEAQLFQLKNEPTTRSPVSSQQSLKNLRERRNTDLPLLDMHTVTREEGEGMETTDTESVSSASTYTQSLEQLLNSPETKLEPPLWHAEFTKEELVQKLSSTTKSADHLNGLLRETEATNAILMEQIKLLKSEIRRLERNQEREKSAANLEYLKNVLLQFIFLKPGSERERLLPVINTMLQLSPEEKGKLAAVAQGEEENASRSSGWASYLHSWSGLR

SEQ ID NO: 805983 - protein, 346 aa, Homo sapiens
MSQAETEGAKQEREHLEMLIDQLKIKLQDSQNNLQINVSELQTLQSEHDTLLERHNKMLQETVSKEAELREKLCSIQSENMMMKSEHTQTVSQLTSQNEVLRNSFRDQVRHLQEEHRKTVETLQQQLSKMEAQLFQLKNEPTTRSPVSSQQSLKNLRERRNTDLPLLDMHTVTREEGEGMETTDTESVSSASTYTQSLEQLLNSPETKLEPPLWHAEFTKEELVQKLSSTTKSADHLNGLLRETEATNAILMEQIKLLKSEIRRLERNQEREKSAANLEYLKNVLLQFIFLKPGSERERLLPVINTMLQLSPEEKGKLAAVAQGEEENASRSSGWASYLHSWSGLR

SEQ ID NO: 805984 - protein, 999 aa, Homo sapiens
ARPLTCSRAYVRGWRKQKCSGGGGWLRAGGGLAEMEDLVQDGVASPATPGTGKSKLETLPKEDLIKFAKKQMMLIQKAKSRCTELEKEIEELRSKPVTEGTGDIIKALTERLDALLLEKAETEQQCLSLKKENIKMKQEVEDSVTKMGDAHKELEQSHINYVKEIENLKNELMAVRSKYSEDKANLQKQLEEAMNTQLELSEQLKFQNNSEDNVKKLQEEIEKIRPGFEEQILYLQKQLDATTDEKKETVTQLQNIIEANSQHYQKNINSLQEELLQLKAIHQEEVKELMCQIEASAKEHEAEINKLNELKENLVKQCEASEKNIQKKYECELENLRKATSNANQDNQICSILLQENTFVEQVVNEKVKHLEDTLKELESQHSILKDEVTYMNNLKLKLEMDAQHIKDEFFHEREDLEFKINELLLAKEEQGCVIEKLKSELAGLNKQFCYTVEQHNREVQSLKEQHQKEISELNETFLSDSEKEKLTLMFEIQGLKEQCENLQQEKQEAILNYESLREIMEILQTELGESAGKISQEFESMKQQQASDVHELQQKLRTAFTEKDALLETVNRLQGENEKLLSQQELVPELENTIKNLQEKNGVYLLSLSQRDTMLKELEGKINSLTEEKDDFINKLKNSHEEMDNFHKKCEREERLILELGKKVEQTIQYNSELEQKVNELTGGLEETLKEKDQNDQKLEKLMVQMKVLSEDKEVLSAEVKSLYEENNKLSSEKKQLSRDLEVFLSQKEDVILKEHITQLEKKLQLMVEEQDNLNKLLENEQVQKLFVKTQLYGFLKEMGSEVSEDSEEKDVVNVLQAVGESLAKINEEKCNLAFQRDEKVLELEKEIKCLQEESVVQCEELKSLLRDYEQEKVLLRKELEEIQSEKEALQSDLLEMKNANEKTRLENQNLLIQVEEVSQTCSKSEIHNEKEKCFIKEHENLKPLLEQKELRDRRAELILLKDSLAKSPSVKNDPLSSVKELEEKIGNYGFADVVTIN

SEQ ID NO: 805985 - protein, 1008 aa, Homo sapiens
ARPLTCSRAYVRGWRKQKCSGGGGWLRAGGGLAEMEDLVQDGVASPATPGTGKSKLETLPKEDLIKFAKKQMMLIQKAKSRCTELEKEIEELRSKPVTEGTGDIIKALTERLDALLLEKAETEQQCLSLKKENIKMKQEVEDSVTKMGDAHKELEQSHINYVKEIENLKNELMAVRSKYSEDKANLQKQLEEAMNTQLELSEQLKFQNNSEDNVKKLQEEIEKIRPGFEEQILYLQKQLDATTDEKKETVTQLQNIIEANSQHYQKNINSLQEELLQLKAIHQEEVKELMCQIEASAKEHEAEINKLNELKENLVKQCEASEKNIQKKYECELENLRKATSNANQDNQICSILLQENTFVEQVVNEKVKHLEDTLKELESQHSILKDEVTYMNNLKLKLEMDAQHIKDEFFHEREDLEFKINELLLAKEEQGCVIEKLKSELAGLNKQFCYTVEQHNREVQSLKEQHQKEISELNETFLSDSEKEKLTLMFEIQGLKEQCENLQQEKQEAILNYESLREIMEILQTELGESAGKISQEFESMKQQQASDVHELQQKLRTAFTEKDALLETVNRLQGENEKLLSQQELVPELENTIKNLQEKNGVYLLSLSQRDTMLKELEGKINSLTEEKDDFINKLKNSHEEMDNFHKKCEREERLILELGKKVEQTIQYNSELEQKVNELTGGLEETLKEKDQNDQKLEKLMVQMKVLSEDKEVLSAEVKSLYEENNKLSSEKKQLSRDLEVFLSQKEDVILKEHITQLEKKLQLMVEEQDNLNKLLENEQVQKLFVKTQLYGFLKEMGSEVSEDSEEKDVVNVLQAVGESLAKINEEKCNLAFQRDEKVLELEKEIKCLQEESVVQCEELKSLLRDYEQEKVLLRKELEEIQSEKEALQSDLLEMKNANEKTRLENQNLLIQVEEVSQTCSKSEIHNEKEKCFIKEHENLKPLLEQKELRDRRAELILLKDSLAKSPSVKNDPLSSVKELEEKIGKNRLERGKLLLQKKEGELLL

SEQ ID NO: 805986 - protein, 74 aa, Homo sapiens
TSEKHKIHEHLKTSAEQHQRTLSAYQQRVTALQEECRAAKVRSSGQPQQATGILLSASHWFTPGLCSAFLVFSC

SEQ ID NO: 805987 - protein, 113 aa, Homo sapiens
MCSRPTHLPGSCLPLDVLTPAPAAAAAAAAVAAAAAVAVLSRAGGTEQPPGQHSGAWPSADAHLVCQTATCFPTQPTKHSAHQDGLPRHPNPASYPLPVLEPQGPPFPCRHPV

SEQ ID NO: 805988 - protein, 228 aa, Homo sapiens
PREGNTSARYEAGWCSIKKKMTKVAEAKKVMKRNFKVNKKITFTDEGELVQQWPQMQKSAIKDAEEDDDTGGINLHKAKERLQEEDKFDKEEYRKKIKAKHREKRLKEREARREANKRQAKAKDEEEAFLDWSDDDDDDDDGFDPSTLPDPDKYRSSEDSDSEDMENKISDTKKKQGMKKRSNSEVEDVGPTSHNRKKARWDTLEPLDTGLSLAEDEELVLHLLRSQS

SEQ ID NO: 805989 - protein, 322 aa, Homo sapiens
  misc_feature (9)..(9): Xaa can be any naturally occurring amino acid
GTRVHPGVXEKDSKGQSTDRIMILVMKNRREEEDDEEEMEEKLAKAKGSQAPSLPNTSEAQKIKEVPTQFLDRDEEEEDADFLKVKRHNVFGLDLKDEKTLQKKEPSKSSIKKKMTKVAEAKKVMKRNFKVNKKITFTDEGELVQQWPQMQKSAIKDAEEDDDTGGINLHKAKERLQEEDKFDKEEYRKKIKAKHREKRLKEREARREANKRQAKAKDEEEAFLDWSDDDDDDDDGFDPSTLPDPDKYRSSEDSDSEDMENKISDTKKKQGMKKRSNSEVEDVGPTSHNRKKARWDTLEPLDTGLSLAEDEELVLHLLRSQS

SEQ ID NO: 805990 - protein, 228 aa, Homo sapiens; identical to SEQ ID NO: 805988

SEQ ID NO: 805991 - protein, 109 aa, Homo sapiens
MKAKDEEEAFLDWSDDDDDDDDGFDPSTLPDPDKYRSSEDSDSEDMENKISDTKKKQGMKKRSNSEVEDVGPTSHNRKKARWDTLEPLDTGLSLAEDEELVLHLLRSQS

SEQ ID NO: 805992 - protein, 107 aa, Homo sapiens
MSRSRPGCYFDAEAVWFTKCLNLAVNDNCQTHVEGKFLLIHKKEDSLPTLSGTNQSCMHYIIQISRNQIVKKFCWARWLIPVIPALWEAEAVGSPEVRSLRPAWPTG

SEQ ID NO: 805993 - protein, 118 aa, Homo sapiens
MPAPPKPGKPKKRKSLKLLGFLDVENTPCARHSILYGSLGSVVAGFGHFLFTSRIRRSCDVGVGGFILVTLGCWFHCRYNYAKQRIQERIAREEIKKKILYEGTHLDPERKHNGSSSN

SEQ ID NO: 805994 - protein, 74 aa, Homo sapiens
LRRQKQEAGRIRRSCDVGVGGFILVTLGCWFHCRYNYAKQRIQERIAREEIKKKILYEGTHLDPERKHNGSSSN

SEQ ID NO: 805995 - protein, 152 aa, Homo sapiens
MDEPQIFARPKSMICMYYMVPFIHEFLQLSYFKVVEIMLCRHSIIIPLKTRANILFLIIANAIRRLKNNGFYHFTNCYVDILFFLIKKECVDRYSDTKTAQKYHYKLEHIFQSQGSSHLYLSFVDLEKFHKLISVGLYINNLFIFFSSKVSL

SEQ ID NO: 805996 - protein, 118 aa, Homo sapiens
MAAPPEPGEPEERKSLKLLGFLDVENTPCARHSILYGSLGSVVAGFGHFLFTSRIRRSCDVGVGGFILVTLGCWFHCRYNYAKQRIQERIAREEIKKKILYEGTHLDPERKHNGSSSN

SEQ ID NO: 805997 - protein, 118 aa, Homo sapiens; identical to SEQ ID NO: 805996

SEQ ID NO: 805998 - protein, 71 aa, Homo sapiens
PLLSILQFSVLNCKGIQAQVVAYSSCFDRNCRDLCTESYYSLDDVTTGKLPTKPSSLGYFLMMWFGTMKMS

SEQ ID NO: 805999 - protein, 118 aa, Homo sapiens; identical to SEQ ID NO: 805996

SEQ ID NO: 806000 - protein, 70 aa, Homo sapiens
WYRPEIYGSGLSGSVTPPPRQESRSRFVFRTHLLPLSRPCRLCAELGRKCDPFDGTKDMTARPRAATAER

SEQ ID NO: 806001 - protein, 89 aa, Homo sapiens
SLLSIKSIGHQWYWTYEYTDYGGLIFNSYILPPLFLEPRRPVTRGNVHVDISTLSRGTYSSLNPQLQEKKWCIVIFAKAPQNEILSYSI

SEQ ID NO: 806002 - protein, 70 aa, Homo sapiens; identical to SEQ ID NO: 806000

SEQ ID NO: 806003 - protein, 117 aa, Homo sapiens
QASCTSLHLSYWKSLKLLGFLDVENTPCARHSILYGSLGSVVAGFGHFLFTSRIRRSCDVGVGGFILVTLGCWFHCRYNYAKQRIQERIAREEIKKKILYEGTHLDPERKHNGSSSN

SEQ ID NO: 806004 - protein, 70 aa, Homo sapiens; identical to SEQ ID NO: 806000

SEQ ID NO: 806005 - protein, 104 aa, Homo sapiens
HKTLLRISHLKQANMTNTLNSIHPPLPEEACPRGRSRKRRIRRSCDVGVGGFILVTLGCWFHCRYNYAKQRIQERIAREEIKKKILYEGTHLDPERKHNGSSSN

SEQ ID NO: 806006 - protein, 118 aa, Homo sapiens; identical to SEQ ID NO: 805996

SEQ ID NO: 806007 - protein, 70 aa, Homo sapiens; identical to SEQ ID NO: 806000

SEQ ID NO: 806008 - protein, 70 aa, Homo sapiens; identical to SEQ ID NO: 806000

SEQ ID NO: 806009 - protein, 118 aa, Homo sapiens; identical to SEQ ID NO: 805996

SEQ ID NO: 806010 - protein, 104 aa, Homo sapiens
  misc_feature (80)..(80): Xaa can be any naturally occurring amino acid
MQSKESRKELPEKKLKRRYYMKVPTSILKENTTAAAAIEQYWQCNRHLSSEPLSEKKTLPLYSNLPTNLLSYNIHHVTWXYYSYLISSSKTNNFNPPNALGGVN

SEQ ID NO: 806011 - protein, 152 aa, Homo sapiens [sequence omitted]

SEQ ID NO: 806012 - protein, 144 aa, Homo sapiens [sequence omitted]

SEQ ID NO: 806013 - protein, 144 aa, Homo sapiens [sequence omitted]

SEQ ID NO: 806014 - protein, 384 aa, Homo sapiens
MIGIVSQASRGLSSQITEFQNKRLEGRNADVLIESERARIKKLQEEKTRNLESSRKLEPTIVSEHKGGLRTEQTDIDVLGQHLTKEHVSSHSQSPIRDSQWFTLSPQEKLAWGTSSKDPRIAAGQQSPLEKKILNLGGVHTTAARQLIMQKYQEECEILCREQAVSLDYWLAKAESYYNKIIVEMMKEETGNEIYKKMEEKTTQSVEGLKQYCLVPEREMKHIERHIHQTGKAGEFKNKPFRQVLQPPNETKLPKIMPEGHGIQNAQRRKQVNEREQMQTKDHQERMIRGRELAEQRLKERILRRSQSQLLTYEKHERVKEIKEFERVIAYLLFQPCSRSRIKVSILMDKSQNGEKVNTIVKPYQRKFLAMPPFLRSQIGKIRD

SEQ ID NO: 806015 - protein, 167 aa, Homo sapiens [sequence omitted]

SEQ ID NO: 806016 - protein, 349 aa, Homo sapiens
MIGIVSQASRGLSSQITEFQNKRLEGRNADVLIESERARIKKLQEEKTRNLESSRKLEPTIVSEHKGGLRTEQTDIDVLGQHLTKEHVSSHSQSPIRDSQWFTLSPQEKLAWGTSSKDPRIAAGQQSPLEKKILNLGGVHTTAARQLIMQKYQEECEILCREQAVSLDYWLAKAESYYNKIIVEMMKEETGNEIYKKMEEKTTQSVEGLKQYCLVPEREMKHIERHIHQTGKAGEFKNKPFRQVLQPPNETKLPKIMPEGHGIQNAQRRKQVNEREQMQTKDHQERMIRGRELAEQRLKERILRRSQSQLLTYEKHERVKEIKEFERVIAYLLFQPCSRSRIKHVFQVL

SEQ ID NO: 806017 - protein, 144 aa, Homo sapiens [sequence omitted]

SEQ ID NO: 806018 - protein, 144 aa, Homo sapiens [sequence omitted]

SEQ ID NO: 806019 - protein, 592 aa, Homo sapiens
WGSIARVTLTVAAGRRSLQLAGRLGGPGAETMADHNPDSDSTPRTLLRRVLDTADPRTPRRPRSARAGARRALLETASPRKLSGQTRTIARGRSHGARSVGRSAHIQASGHLEEQTPRTLLKNILLTAPESSILMPESVVKPVPAPQAVQPSRQESSCGSLELQLPELEPPTTLAPGLLAPGRRKQRLRLSVFQQGVDQGLSLSQEPQGNADASSLTRSLNLTFATPLQPQSVQRPGLARRPPARRAVDVGAFLRDLRDTSLAPPNIVLEDTQPFSQPMVGSPNVYHSLPCTPHTGAEDAEQAAGRKTQSSGPGLQKNSPGKPAQFLAGEAEEVNAFALGFLSTSSGVSGEDEVEPLHDGVEEAEKKMEEEGVSVSEMEATGAQGPSRVEEAEGHTEVTEAEGSQGTAEADGPGASSGDEDASGRAASPESASSTPESLQARRHHQFLEPAPAPGAAVLSSEPAEPLLVRHPPRPRTTGPRPRQDPHKAGLSHYVKLFSFYAKMPMERKALEMVEKCLDKYFQHLCDDLEVFAAHAGRKTVKPEDLELLMRRQGLVTDQVSLHVLVERHLPLEYRQLLIPCAYSGNSVFPAQ

SEQ ID NO: 806020 - protein, 330 aa, Homo sapiens
WGSIARVTLTVAAGRRSLQLAGRLGGPGAETMADHNPDSDSTPRTLLRRVLDTADPRTPRRPRSARAGARRALLETASPRKLSGQTRTIARGRSHGARSVGRSAHIQASGHLEEQTPRTLLKNILLTAPESSILMPESVVKPVPAPQAVQPSRQESSCGSLELQLPELEPPTTLAPGLLAPGRRKQRLRLSVFQQGVDQGLSLSQEPQGNADASSLTRSLNLTFATPLQPQSVQRPGLARRPPARRAVDVGAFLRDLRDTSLAPPNIVLEDTQPFSQPMVGSPNVYHSLPCTPHTGAEDAEQAAGRKTQSSGPGLQKNSECVALVAWSQI

SEQ ID NO: 806021 - protein, 335 aa, Homo sapiens
WGSIARVTLTVAAGRRSLQLAGRLGGPGAETMADHNPDSDSTPRTLLRRVLDTADPRTPRRPRSARAGARRALLETASPRKLSGQTRTIARGRSHGARSVGRSAHIQASGHLEEQTPRTLLKNILLTAPESSILMPESVVKPVPAPQAVQPSRQESSCGSLELQLPELEPPTTLAPGLLAPGRRKQRLRLSVFQQGVDQGLSLSQEPQGNADASSLTRSLNLTFATPLQPQSVQRPGLARRPPARRAVDVGAFLRDLRDTSLAPPNIVLEDTQPFSQPMVGSPNVYHSLPCTPHTGAEDAEQAAGRKTQSSGPGLQKNTGQHLRRRVCCCLRRVC

SEQ ID NO: 806022 - protein, 292 aa, Homo sapiens
MQPWPAASPACILSPSLRRPGKPAQFLAGEAEEVNAFALGFLSTSSGVSGEDEVEPLHDGVEEAEKKMEEEGVSVSEMEATGAQGPSRVEEAEGHTEVTEAEGSQGTAEADGPGASSGDEDASGRAASPESASSTPESLQARRHHQFLEPAPAPGAAVLSSEPAEPLLVRHPPRPRTTGPRPRQDPHKAGLSHYVKLFSFYAKMPMERKALEMVEKCLDKYFQHLCDDLEVFAAHAGRKTVKPEDLELLMRRQGLVTDQVSLHVLVERHLPLEYRQLLIPCAYSGNSVFPAQ

SEQ ID NO: 806023 - protein, 292 aa, Homo sapiens; identical to SEQ ID NO: 806022

SEQ ID NO: 806024 - protein, 330 aa, Homo sapiens; identical to SEQ ID NO: 806020

SEQ ID NO: 806025 - protein, 330 aa, Homo sapiens; identical to SEQ ID NO: 806020

SEQ ID NO: 806026 - protein, 292 aa, Homo sapiens; identical to SEQ ID NO: 806022

SEQ ID NO: 806027 - protein, 292 aa, Homo sapiens; identical to SEQ ID NO: 806022

SEQ ID NO: 806028 - protein, 458 aa, Homo sapiens
MPESVVKPVPAPQAVQPSRQESSCGSLELQLPELEPPTTLAPGLLAPGRRKQRLRLSVFQQGVDQGLSLSQEPQGNADASSLTRSLNLTFATPLQPQSVQRPGLARRPPARRAVDVGAFLRDLRDTSLAPPNIVLEDTQPFSQPMVGSPNVYHSLPCTPHTGAEDAEQAAGRKTQSSGPGLQKNSPGKPAQFLAGEAEEVNAFALGFLSTSSGVSGEDEVEPLHDGVEEAEKKMEEEGVSVSEMEATGAQGPSRVEEAEGHTEVTEAEGSQGTAEADGPGASSGDEDASGRAASPESASSTPESLQARRHHQFLEPAPAPGAAVLSSEPAEPLLVRHPPRPRTTGPRPRQDPHKAGLSHYVKLFSFYAKMPMERKALEMVEKCLDKYFQHLCDDLEVFAAHAGRKTVKPEDLELLMRRQGLVTDQVSLHVLVERHLPLEYRQLLIPCAYSGNSVFPAQ

SEQ ID NO: 806029 - protein, 555 aa, Homo sapiens
  misc_feature (5)..(5): Xaa can be any naturally occurring amino acid
  misc_feature (9)..(9): Xaa can be any naturally occurring amino acid
GNNKXGTQXSNTSAGRKPPGYVVCWERVYDSARRALLETASPRKLSGQTRTIARGRSHGARSVGRSAHIQASGHLEEQTPRTLLKNILLTAPESSILMPESVVKPVPAPQAVQPSRQESSCGSLELQLPELEPPTTLAPGLLAPGRRKQRLRLSVFQQGVDQGLSLSQEPQGNADASSLTRSLNLTFATPLQPQSVQRPGLARRPPARRAVDVGAFLRDLRDTSLAPPNIVLEDTQPFSQPMVGSPNVYHSLPCTPHTGAEDAEQAAGRKTQSSGPGLQKNSPGKPAQFLAGEAEEVNAFALGFLSTSSGVSGEDEVEPLHDGVEEAEKKMEEEGVSVSEMEATGAQGPSRVEEAEGHTEVTEAEGSQGTAEADGPGASSGDEDASGRAASPESASSTPESLQARRHHQFLEPAPAPGAAVLSSEPAEPLLVRHPPRPRTTGPRPRQDPHKAGLSHYVKLFSFYAKMPMERKALEMVEKCLDKYFQHLCDDLEVFAAHAGRKTVKPEDLELLMRRQGLVTDQVSLHVLVERHLPLEYRQLLIPCAYSGNSVFPAQ

SEQ ID NO: 806030 - protein, 330 aa, Homo sapiens; identical to SEQ ID NO: 806020

SEQ ID NO: 806031 - protein, 534 aa, Homo sapiens
WGSIARVTLTVAAGRRSLQLAGRLGGPGAETMADHNPDSDSTPRTLLRRVLDTADPRTPRRPRSARAGARRALLETASPRKLSGQTRTIARGRSHGARSVGRSAHIQASGHLEEQTPRTLLKNILLTAPESSILMPESVVKPVPAPQAVQPSRQESSCGSLELQLPELEPPTTLAPGLLAPGRRKQRLRLSVFQQGVDQGLSLSQEPQGNADASSLTRSLNLTFATPLQPQSVQRPGLARRPPARRAVDVGAFLRDLRDTSLAPPNIVLEDTQPFSQPMVGSPNVYHSLPCTPHTGAEDAEQAAGRKTQSSGPGLQKNSPGKPAQFLAGEAEEVNAFALGFLSTSSGVSGEDEVEPLHDGVEEAEKKMEEEGVSVSEMEATGAQGPSRVEEAEGHTEVTEAEGSQGTAEADGPGASSGDEDASGRAASPESASSTPESLQARRHHQFLEPAPAPGAAVLSSEPAEPLLVRHPPRPRTTGPRPRQDPHKAGLSHYVKLFSFYAKMPMERKALEMVEKCIFVMIWRYLLLMLAARL

SEQ ID NO: 806032 - protein, 592 aa, Homo sapiens
  misc_feature (510)..(512): Xaa can be any naturally occurring amino acid
WGSIARVTLTVAAGRRSLQLAGRLGGPGAETMADHNPDSDSTPRTLLRRVLDTADPRTPRRPRSARAGARRALLETASPRKLSGQTRTIARGRSHGARSVGRSAHIQASGHLEEQTPRTLLKNILLTAPESSILMPESVVKPVPAPQAVQPSRQESSCGSLELQLPELEPPTTLAPGLLAPGRRKQRLRLSVFQQGVDQGLSLSQEPQGNADASSLTRSLNLTFATPLQPQSVQRPGLARRPPARRAVDVGAFLRDLRDTSLAPPNIVLEDTQPFSQPMVGSPNVYHSLPCTPHTGAEDAEQAAGRKTQSSGPGLQKNSPGKPAQFLAGEAEEVNAFALGFLSTSSGVSGEDEVEPLHDGVEEAEKKMEEEGVSVSEMEATGAQGPSRVEEAEGHTEVTEAEGSQGTAEADGPGASSGDEDASGRAASPESASSTPESLQARRHHQFLEPAPAPGAAVLSSEPAEPLLVRHPPRPRTTGPRPRQDPHKAGLSHYVKLFSFYAKIPNKKKXXXKEKKCLDKYFQHLCDDLEVFAAHAGRKTVKPEDLELLMRRQGLVTDQVSLHVLVERHLPLEYRQLLIPCAYSGNSVFPAQ

SEQ ID NO: 806033 - protein, 330 aa, Homo sapiens; identical to SEQ ID NO: 806020

SEQ ID NO: 806034 - protein, 552 aa, Homo sapiens
WGSIARVTLTVAAGRRSLQLAGRLGGPGAETMADHNPDSDSTPRTLLRRVLDTADPRTPRRPRSARAGARRALLETASPRKLSGQTRTIARGRSHGARSVGRSAHIQASGHLEEQTPRTLLKNILLTAPESSILMPESVVKPVPAPQAVQPSRQESSCGSLELQLPELEPPTTLAPGLLAPGRRKQRLRLSVFQQGVDQGLSLSQEPQGNADASSLTRSLNLTFATPLQPQSVQRPGLARRPPARRAVDVGAFLRDLRDTSLAPPNIVLEDTQPFSQPMVGSPNVYHSLPCTPHTGAEDAEQAAGRKTQSSGPGLQKNSPGKPAQFLAGEAEEVNAFALGFLSTSSGVSGEDEVEPLHDGVEEAEKKMEEEGVSVSEMEATGAQGPSRVEEAEGHTEVTEAEGSQGTAEADGPGASSGDEDASGRAASPESASSTPESLQARRHHQFLEPAPAPGAAVLSSEPAEPLLVRHPPRPRTTGPRPRQDPHKAGLSHYVKLFSFYAKMPMERKALEMVEKCLDKYFQHLCDDLEVFAAHAGRKTVKPEDLELLMRR

SEQ ID NO: 806035 - protein, 469 aa, Homo sapiens
WGSIARVTLTVAAGRRSLQLAGRLGGPGAETMADHNPDSDSTPRTLLRRVLDTADPRTPRRPRSARAGARRALLETASPRKLSGQTRTIARGRSHGARSVGRSAHIQASGHLEEQTPRTLLKNILLTAPESSILMPESVVKPVPAPQAVQPSRQESSCGSLELQLPELEPPTTLAPGLLAPGRRKQRLRLSVFQQGVDQGLSLSQEPQGNADASSLTRSLNLTFATPLQPQSVQRPGLARRPPARRAVDVGAFLRDLRDTSLAPPNIVLEDTQPFSQPMVGSPNVYHSLPCTPHTGAEDAEQAAGRKTQSSGPGLQKNSPGKPAQFLAGEAEEVNAFALGFLSTSSGVSGEDEVEPLHDGVEEAEKKMEEEGVSVSEMEATGAQGPSRVEEAEGHTEVTEAEGSQGTAEADGPGASSGDEDASGRAASPESASSTPESLQARRHHQFLEPAPAPGAAVLCQDAHGEEGS

SEQ ID NO: 806036 - protein, 180 aa, Homo sapiens
MELKRQRKRWKKKVSSPESASSTPESLQARRHHQFLEPAPAPGAAVLSSEPAEPLLVRHPPRPRTTGPRPRQDPHKAGLSHYVKLFSFYAKMPMERKALEMVEKCLDKYFQHLCDDLEVFAAHAGRKTVKPEDLELLMRRQGLVTDQVSLHVLVERHLPLEYRQLLIPCAYSGNSVFPAQ

SEQ ID NO: 806037 - protein, 181 aa, Homo sapiens
MVRPGIPVTPPFFFVASPESASSTPESLQARRHHQFLEPAPAPGAAVLSSEPAEPLLVRHPPRPRTTGPRPRQDPHKAGLSHYVKLFSFYAKMPMERKALEMVEKCLDKYFQHLCDDLEVFAAHAGRKTVKPEDLELLMRRQGLVTDQVSLHVLVERHLPLEYRQLLIPCAYSGNSVFPAQ

SEQ ID NO: 806038 - protein, 261 aa, Homo sapiens
MPLAGQQVQSRPPAPLSLSRPGDIISFLSQPQRLVLQFYAKMPMERKALEIVEKCLDKYFQHLCDDLEVFAAHAGRKTVKPAGGQGCWSWLAKGHVVPSLSRSQQDLLLNKSLLEEVQPPLSTVALSLSSEPAEPLLVRHPPRPRTTGPRPRQDPHKAGLSHYVKLFSFYAKMPMERKALEMVEKCLDKYFQHLCDDLEVFAAHAGRKTVKPEDLELLMRRQGLVTDQVSLHVLVERHLPLEYRQLLIPCAYSGNSVFPAQ

SEQ ID NO: 806039 - protein, 234 aa, Homo sapiens
  misc_feature (11)..(11): Xaa can be any naturally occurring amino acid
MQLRSQTQTVXWLRKYPESPGKPAQFLAGEAEEVNAFALGFLSTSSGVSGEDEVEPLHDGVEEAEKKMEEEGVSVSEMEATGAQGPSRVEEAEGHTEVTEAEGSQGTAEADGPGASSGDEDASGRAASPESASSTPESLQARRHHQFLEPAPAPGAAVLSSEPAEPLLVRHPPRPRTTGPRPRQDPHKAGLSHYVKLFSFYAKMPMERKALEMVEKCIFVMIWRYLLLMLAARL

SEQ ID NO: 806040 - protein, 175 aa, Homo sapiens
WGSIARVTLTVAAGRRSLQLAGRLGGPGAETMADHNPDSDSTPRTLLRRVLDTADPRTPRRPRSARAGARRALLETASPRKLSGQTRTIARGRSHGARSVGRSAHIQASGHLEEQTPRTLLKNILLTAISQAVAILPPLPKIPTPSISPVAACAPLVVLPRYVGGSTRGDSLALH

SEQ ID NO: 806041 - protein, 481 aa, Homo sapiens
QPARGQPAAQRICRRGAKCTRRAARSCSPATAPRPAPPRGDSEPLPPPPGAERRALGWESGTRSRQLFISRKPPQPERKGTFCHQRGISQRRAWIYEDTHARSGQDLDKLFHRLRVRRSPRLVSFPLLSRRPPLPAMVAALLGGGGEARGGTVPGAWLCLMALLQLLGSAPRGSGLAHGRRLICWQALLQCQGEPECSYAYNQYAEACAPVLAQHGGGDAPGAAAAAFPASAASFSSRWRCPSHCISALIQLNHTRRGPALEDCDCAQDENCKSTKRAIEPCLPRTSGGGAGGPGAGGVMGCTEARRRCDRDSRCNLALSRYLTYCGKVFNGLRCTDECRTVIEDMLAMPKVALLNDCVCDGLERPICESVKENMARLCFGAELGNGPGSSGSDGGLDDYYDEDYDDEQRTGGAGGEQPLDDDDGVPHPPRPGSGAAASGGRGDLPYGPGRRSSGGGGRLAPRGAWTPLASILLLLLGPLF

SEQ ID NO: 806042 - protein, 557 aa, Homo sapiens
QPARGQPAAQRICRRGAKCTRRAARSCSPATAPRPAPPRGDSEPLPPPPGAERRALGWESGTRSRQLFISRKPPQPERKGTFCHQRGISQRRAWIYEDTHARSGQDLDKLFHRLRVRRSPRLVSFPLLSRRPPLPAMVAALLGGGGEARGGTVPGAWLCLMALLQLLGSAPRGSGLAHGRRLICWQALLQCQGEPECSYAYNQYAEACAPVLAQHGGGDAPGAAAAAFPASAASFSSRWRCPSHCISALIQLNHTRRGPALEDCDCAQDENCKSTKRAIEPCLPRTSGGGAGGPGAGGVMGCTEARRRCDRDSRCNLALSRYLTYCGKVFNGLRCTDECRTVIEDMLAMPKVALLNDCVCDGLERPICESVKENMARLCFGAELGNGPGSSGSDGGLDDYYDEDYDDEQRTGGAGGEQPLDDDDGARTHRARAAALLHRAAAGTCPMGLGAGAAAAAAAWRPGAPGPHSPPSCCCCLGRSFSPRAPRAGHLWLGTDRRDGWGYFPKLFPSQLGVAGSPATTLGTSPEAPLRSLTSWTSSPAPIPSSRNSQLVCRPES

SEQ ID NO: 806043 - protein, 71 aa, Homo sapiens
SSRHGDSRPHNGSAGAEQNAPAAPRGPAAPPRPRGPHPPGATVSLSRHHRGPSGGLSGGRAGPDLDSCSFP

SEQ ID NO: 806044 - protein, 138 aa, Homo sapiens
MCGLFSAQCVTWHGLGVLGVCEMNVFKTQTLLCPSGVHSRPEDHDETPFLCSKAQSVTVVAFLVARLLATLATHQMTSHTEGLRKGGGRKDTQLMKGQCSAIKVIFWPGCLPQPRMHSRLHIRSINKGGQLRPTGCNK

SEQ ID NO: 806045 - protein, 86 aa, Homo sapiens
DWVIAPQGYSAYYCEGECSFPLDSCMNATNHAILQSLVHLMKPNAVPKACCAPTKLSATSVLYYDSSNNVILRKHRNMVVKACGCH

SEQ ID NO: 806046 - protein, 110 aa, Homo sapiens
GAERGPERSSSAGRGAKSGRQGSQAGERSGSGGQGLVTKAAGDGPRGTKLAAQLPRRGHLLRVPGPNRYQISGARKWTGAVQGEMVDGHKNPKYNVQNEEQLIKFWASLE

SEQ ID NO: 806047 - protein, 88 aa, Homo sapiens
ASTQPRASLFSHKKVAVRGWSRLAGATYRGVYGTSLLRHAKVVWEMLKFEVALRLETLAMRLTALLARALVHLSLVPPAEELYQYLET

SEQ ID NO: 806048 - protein, 257 aa, Homo sapiens
GGLVLCPLQCLSSPQIAEKLIKAFAEQIFYTGFIHSDPHPGNVLVRKGPDGKAELVLLDHGLYQFLEEKDRAALCQLWRAIILRDDAAMRAHAAALGVQDYLLFAEMLMQRPVRLGQLWGSHLLSREEAAYMVDMARERFEAVMAVLRELPRPMLLVLRNINTVRAINVALGAPVDRYFLMAKRAVRGWSRLAGATYRGVYGTSLLRHAKVVWEMLKFEVALRLETLAMRLTALLARALVHLSLVPPAEELYQYLET

SEQ ID NO: 806049 - protein, 250 aa, Homo sapiens
EPGVAVHDIAEKLIKAFAEQIFYTGFIHSDPHPGNVLVRKGPDGKAELVLLDHGLYQFLEEKDRAALCQLWRAIILRDDAAMRAHAAALGVQDYLLFAEMLMQRPVRLGQLWGSHLLSREEAAYMVDMARERFEAVMAVLRELPRPMLLVLRNINTVRAINVALGAPVDRYFLMAKRAVRGWSRLAGATYRGVYGTSLLRHAKVVWEMLKFEVALRLETLAMRLTALLARALVHLSLVPPAEELYQYLET

SEQ ID NO: 806050 - protein, 93 aa, Homo sapiens
TAWRYFEERLLDAETLLVVLDVGEQVAAVGAGRDVVGVLDGRARDHVVHSEECLVANLVLAEPQSRLPVALRGPSSSACGQAGQRRPETPRWT

SEQ ID NO: 806051 - protein, 157 aa, Homo sapiens
DEKETGHTLGSQPRPCPRDTLALGHSHGSRQGQLDQEVKGDWRPTDRWGFGLKLQVNPQFRNSGTGTRALLTWQHRQGAGGRAHASLRHAGREPVATPNTPLLLTPGLRPTLHGSAQKAARTTHTEAGISLTTRVCRGGAVDGPAPSVPIFLPKHIL

SEQ ID NO: 806052 - protein, 329 aa, Homo sapiens
IRHEPAAADLLGPGPSPSPAPASPDGAMRGPSGALWLLLALRTVLGGMEVRWCATSDPEQHKCGNMSEAFREAGIQPSLLCVRGTSADHCVQLIAAQEADAITLDGGAIYEAGKEHGLKPVVGEVYDQEVGTSYYAVAVVRRSSHVTIDTLKGVKSCHTGINRTVGWNVPVGYLVESGRLSVMGCDVLKAVSDYFGGSCVPGAGETSYSESLCRLCRGDSSGEGVCDKSPLERYYDYSGAFRCLAEGAGDVAFVKHSTVLENTDESPSRRQTWTRSEEEEGECPAHEEARRTMRSSAGQAWKWAPVHRPQDESDKGEFGKRAKSRDMLG

SEQ ID NO: 806053 - protein, 765 aa, Homo sapiens
IRHEPAAADLLGPGPSPSPAPASPDGAMRGPSGALWLLLALRTVLGGMEVRWCATSDPEQHKCGNMSEAFREAGIQPSLLCVRGTSADHCVQLIAAQEADAITLDGGAIYEAGKEHGLKPVVGEVYDQEVGTSYYAVAVVRRSSHVTIDTLKGVKSCHTGINRTVGWNVPVGYLVESGRLSVMGCDVLKAVSDYFGGSCVPGAGETSYSESLCRLCRGDSSGEGVCDKSPLERYYDYSGAFRCLAEGAGDVAFVKHSTVLENTDGKTLPSWGQALLSQDFELLCRDGSRADVTEWRQCHLARVPAHAVVVRADTDGGLIFRLLNEGQRLFSHEGSSFQMFSSEAYGQKDLLFKDSTSELVPIATQTYEAWLGHEYLHAMKGLLCDPNRLPPYLRWCVLSTPEIQKCGDMAVAFRRQRLKPEIQCVSAKSPQHCMERIQAEQVDAVTLSGEDIYTAGKKYGLVPAAGEHYAPEDSSNSYYVVAVVRRDSSHAFTLDELRGKRSCHAGFGSPAGWDVPVGALIQRGFIRPKDCDVLTAVSEFFNASCVPVNNPKNYPSSLCALCVGDEQGRNKCVGNSQERYYGYRGAFRCLVENAGDVAFVRHTTVFDNTNGHNSEPWAAELRSEDYELLCPNGARAEVSQFAACNLAQIPPHAVMVRPDTNIFTVYGLLDKAQDLFGDDHNKNGFKMFDSSNYHGQDLLFKDATVRAVPVGEKTTYRGWLGLDYVAALEGMSSQQCSGAAAPAPGAPLLPLLLPALAARLLPPAL

SEQ ID NO: 806054 - protein, 516 aa, Homo sapiens
IRHEPAAADLLGPGPSPSPAPASPDGAMRGPSGALWLLLALRTVLGGMEVRWCATSDPEQHKCGNMSEAFREAGIQPSLLCVRGTSADHCVQLIAAQEADAITLDGGAIYEAGKEHGLKPVVGEVYDQEVGTSYYAVAVVRRSSHVTIDTLKGVKSCHTGINRTVGWNVPVGYLVESGRLSVMGCDVLKAVSDYFGGSCVPGAGETSYSESLCRLCRGDSSGEGVCDKSPLERYYDYSGAFRCLAEGAGDVAFVKHSTVLENTDGKTLPSWGQALLSQDFELLCRDGSRADVTEWRQCHLARVPAHAVVVRADTDGGLIFRLLNEGQRLFSHEGSSFQMFSSEAYGQKDLLFKDSTSELVPIATQTYEAWLGHEYLHAMKGLLCDPNRLPPYLRWCVLSTPEIQKCGDMAVAFRRQRLKPEIQCVSAKSPQHCMERIQVGVTQVQRGPGGRVVAVPGQFLLPTPPAAWGRGECLLQQAHRDGWGGATAGASTHPRGQRQAGRSDRRGQHPPQGTGR

SEQ ID NO: 806055 - protein, 437 aa, Homo sapiens
MSRFFTTGSDSESESSLSGEELVTKPVGGNYGKQPLLLSEDEEDTKRVVRSAKDKRFEELTNLIRTIRNAMKIRDVTKCLEEFELLGKDTCAILCHIYHHALHSRWYQARDLMLMSHLQDNIQHADPPVQILYNRTMVQLGICAFRQGLTKDAHNALLDIQSSGRAKELLGQGLLLRSLQERNQEQEKVERRRQVPFHLHINLELLECVYLVSAMLLEIPYMAAHESDARRRMISKQFHHQLRVGERQPLLGPPESMREHVVAASKAMKMGDWKTCHSFIINEKMNGKVWDLFPEADKVRTMLVRKIQEESLRTYLFTYSSVYDSISMETLSDMFELDLPTVHSIISKMIINEELMASLDQPTQTVVMHRTEPTAQQNLALQLAEKLGSLVENNERVFDHKQGTYGGYFRDQKDGYRKNEGYMRRGGYRQQQSQTAY

SEQ ID NO: 806056 - protein, 413 aa, Homo sapiens
MWQCHLSAQDYRYYPVDGYSLLKRFPLHPLTGPRCPVQTVGQWLESIGLPQYENHLMANGFDNVQFMGSNVMEDQDLLEIGILNSGHRQRILQAIQLLPKMRPIGHDGYHPTSVAEWLDSIELGDYTKAFLINGYTSMDLLKKIWEVELINVLKINLIGHRKRILASLGDRLHDDPPQKPPRSITLRTGDWGEPSITLRPPNEATASTPVQYWQHHPEKLIFQSCDYKAFYLGSMLIKELRGTESTQDACAKMRANCQKSTEQMKKVPTIILSVSYKGVKFIDATNKNIIAEHEIRNISCAAQDPEDLSTFAYITKDLKSNHHYCHVFTAFDVNLAYEIILTLGQAFEVAYQLALQARKGGHSSTLPESFENKPSKPIPKPRVSIRKSVDLLHASHTGQEPSERHTEEALRKF

SEQ ID NO: 806057 - protein, 955 aa, Homo sapiens
LEEPVQEDATQETHISSPVESPSQKTKSETVTGELSKLLDEIKLCQEKDYSFEDLCHTISDHYLDNLSKISEEELGKNGSQSVRTSSTINLSPGEVEEEDDDENTCGPSGLWEALTPCNGCRNLGFPMLAQESYPKKRNYTMEIVPSASLDTFPSENENFLCDLMDTAVTKKPCSLEIARAPSPRTDNASEVAVTTPGTSNHRNSSTGPTPDCSPPSPDTALKNIVKVIRPQPKQRTSIVSSLDFHRMNHNQEYFEINTSTGCTSFTASPPASPPTSSVGTTEVKNEGTNHTDDLSRQDDNDPPKEYDPGQFAGLLHGSSPACESPENPFHLYGKREQCEKGQDEVSLANSPLPFKQSPIENNSEPLVKKIKPKVVSRTIFHKKSNQLENHTIVGTRSTRSGSRNGDQWVMNAGGFVERACTLGRIRSLPKALIDMHLSKSVSKSDSDLIAYPSNEKTSRVNWSESSTAEHSSKGNSERTPSFTSEWEEIDKIMSSIDVGINNELKEMNGETTRPRCPVQTVGQWLESIGLPQYENHLMANGFDNVQFMGSNVMEDQDLLEIGILNSGHRQRILQAIQLLPKMRPIGHDGYHPTSVAEWLDSIELGDYTKAFLINGYTSMDLLKKIWEVELINVLKINLIGHRKRILASLGDRLHDDPPQKPPRSITLREPSGNHTPPQLSPSLSQSTYTTGGSLDVPHIIMQGDARRRRNENYFDDIPRSKLERQMAQTGDWGEPSITLRPPNEATASTPVQYWQHHPEKLIFQSCDYKAFYLGSMLIKELRGTESTQDACAKMRANCQKSTEQMKKVPTIILSVSYKGVKFIDATNKNIIAEHEIRNISCAAQDPEDLSTFAYITKDLKSNHHYCHVFTAFDVNLAYEIILTLGQAFEVAYQLALQARKGGHSSTLPESFENKPSKPIPKPRVSIRKSVDLLHASHTGQEPSERHTEEALRKF

SEQ ID NO: 806058 - protein, 331 aa, Homo sapiens
AEGGARAGLGSSRGEPGARRSAARPSSAPLPPFLGALALASPLAFAGGAQKDAQRQRLGERRFKPHVCVLGGQSPPALADPGSRPARAARVLKINLIGHRKRILASLGDRLHDDPPQKPPRSITLREPSGNHTPPQLSPSLSQSTYTTGGSLDVPHIIMQGDARRRRNENYFDDIPRSKLERQMAQQSSVCEIWTNQNAGFPFSAIHQVHNTGDWGEPSITLRPPNEATASTPVQYWQHHPEKLIFQSCDYKAFYLGSMLIKELRGTESTQDACAKMRANCQKSTEQMKKVPTIILSVSYKGVKFIDATNKNHIGGPETSGIFLGGQSQKN

SEQ ID NO: 806059 - protein, 219 aa, Homo sapiens
MWQCHLSAQDYRYYPVDGYSLLKRFPLHPLTGPRCPVQTVGQWLESIGLPQYENHLMANGFDNVQFMGSNVMEDQDLLEIGILNSGHRQRILQAIQLLPKMRPIGHDGYHPTSVAEWLDSIELGDYTKAFLINGYTSMDLLKKIWEVELINVLKINLIGHRKRILASLGDRLHDDPPQKPPRSITLRVSAKHIHLVLCPYLKNYLFETSLANMVRPCLY

SEQ ID NO: 806060 - protein, 482 aa, Homo sapiens
AEGGARAGLGSSRGEPGARRSAARPSSAPLPPFLGALALASPLAFAGGAQKDAQRQRLGERRFKPHVCVLGGQSPPALADPGSRPARAARVLKINLIGHRKRILASLGDRLHDDPPQKPPRSITLREPSGNHTPPQLSPSLSQSTYTTGGSLDVPHIIMQGDARRRRNENYFDDIPRSKLERQMAQTGDWGEPSITLRPPNEATASTPVQYWQHHPEKLIFQSCDYKAFYLGSMLIKELRGTESTQDACAKMRANCQKSTEQMKKVPTIILSVSYKGVKFIDATNKNIIAEHEIRNISCAAQDPEDLSTFAYITKDLKSNHHYCHVFTAFDVNLAYEIILTLGQAFEVAYQLALQARKGGHSSTLPESFENKPSKPIPKPRVSIRKSVRSTHLSKRLWPIYRGLWSRAKKPRGALIPSMKPRFSDTRRPPVLAVPCSPSGPGAGFPSRLRVHPAQEEDCSERAALLRAKGHWPFLGKFFLHQ

SEQ ID NO: 806061 - protein, 482 aa, Homo sapiens; identical to SEQ ID NO: 806060

SEQ ID NO: 806062 - protein, 543 aa, Homo sapiens
MWQCHLSAQDYRYYPVDGYSLLKRFPLHPLTGPRCPVQTVGQWLESIGLPQYENHLMANGFDNVQFMGSNVMEDQDLLEIGILNSGHRQRILQAIQLLPKMRPIGHDGYHPTSVAEWLDSIELGDYTKAFLINGYTSMDLLKKIWEVELINVLKINLIGHRKRILASLGDRLHDDPPQKPPRSITLREPSGNHTPPQLSPSLSQSTYTTGGSLDVPHIIMQGDARRRRNENYFDDIPRSKLERQMAQTGDWGEPSITLRPPNEATASTPVQYWQHHPEKLIFQSCDYKAFYLGSMLIKELRGTESTQDACAKMRANCQKSTEQMKKVPTIILSVSYKGVKFIDATNKNIIAEHEIRNISCAAQDPEDLSTFAYITKDLKSNHHYCHVFTAFDVNLAYEIILTLGQAFEVAYQLALQARKGGHSSTLPESFENKPSKPIPKPRVSIRKSVRSTHLSKRLWPIYRGLWSRAKKPRGALIPSMKPRFSDTRRPPVLAVPCSPSGPGAGFPSRLRVHPAQEEDCSERAALLRAKGHWPFLGKFFLHQ

SEQ ID NO: 806063 - protein, 507 aa, Homo sapiens
AEGGARAGLGSSRGEPGARRSAARPSSAPLPPFLGALALASPLAFAGGAQKDAQRQRLGERRFKPHVCVLGGQSPPALADPGSRPARAARVLKINLIGHRKRILASLGDRLHDDPPQKPPRSITLREPSGNHTPPQLSPSLSQSTYTTGGSLDVPHIIMQGDARRRRNENYFDDIPRSKLERQMAQQSSVCEIWTNQNAGFPFSAIHQVHNTGDWGEPSITLRPPNEATASTPVQYWQHHPEKLIFQSCDYKAFYLGSMLIKELRGTESTQDACAKMRANCQKSTEQMKKVPTIILSVSYKGVKFIDATNKNIIAEHEIRNISCAAQDPEDLSTFAYITKDLKSNHHYCHVFTAFDVNLAYEIILTLGQAFEVAYQLALQARKGGHSSTLPESFENKPSKPIPKPRVSIRKSVRSTHLSKRLWPIYRGLWSRAKKPRGALIPSMKPRFSDTRRPPVLAVPCSPSGPGAGFPSRLRVHPAQEEDCSERAALLRAKGHWPFLGKFFLHQ

SEQ ID NO: 806064 - protein, 422 aa, Homo sapiens
AEGGARAGLGSSRGEPGARRSAARPSSAPLPPFLGALALASPLAFAGGAQKDAQRQRLGERRFKPHVCVLGGQSPPALADPGSRPARAARVLKINLIGHRKRILASLGDRLHDDPPQKPPRSITLRTGDWGEPSITLRPPNEATASTPVQYWQHHPEKLIFQSCDYKAFYLGSMLIKELRGTESTQDACAKMRANCQKSTEQMKKVPTIILSVSYKGVKFIDATNKNIIAEHEIRNISCAAQDPEDLSTFAYITKDLKSNHHYCHVFTAFDVNLAYEIILTLGQAFEVAYQLALQARKGGHSSTLPESFENKPSKPIPKPRVSIRKSVRSTHLSKRLWPIYRGLWSRAKKPRGALIPSMKPRFSDTRRPPVLAVPCSPSGPGAGFPSRLRVHPAQEEDCSERAALLRAKGHWPFLGKFFLHQ

SEQ ID NO: 806065 - protein, 487 aa, Homo sapiens
MANGFDNVQFMGSNVMEDQDLLEIGILNSGHRQRILQAIQLLPKMRPIGHDGYHPTSVAEWLDSIELGDYTKAFLINGYTSMDLLKKIWEVELINVLKINLIGHRKRILASLGDRLHDDPPQKPPRSITLREPSGNHTPPQLSPSLSQSTYTTGGSLDVPHIIMQGDARRRRNENYFDDIPRSKLERQMAQTGDWGEPSITLRPPNEATASTPVQYWQHHPEKLIFQSCDYKAFYLGSMLIKELRGTESTQDACAKMRANCQKSTEQMKKVPTIILSVSYKGVKFIDATNKNIIAEHEIRNISCAAQDPEDLSTFAYITKDLKSNHHYCHVFTAFDVNLAYEIILTLGQAFEVAYQLALQARKGGHSSTLPESFENKPSKPIPKPRVSIRKSVRSTHLSKRLWPIYRGLWSRAKKPRGALIPSMKPRFSDTRRPPVLAVPCSPSGPGAGFPSRLRVHPAQEEDCSERAALLRAKGHWPFLGKFFLHQ

SEQ ID NO: 806066 - protein, 416 aa, Homo sapiens
MANGFDNVQFMGSNVMEDQDLLEIGILNSGHRQRILQAIQLLPKMRPIGHDGYHPTSVAEWLDSIELGDYTKAFLINGYTSMDLLKKIWEVELINQSSVCEIWTNQNAGFPFSAIHQVHNTGDWGEPSITLRPPNEATASTPVQYWQHHPEKLIFQSCDYKAFYLGSMLIKELRGTESTQDACAKMRANCQKSTEQMKKVPTIILSVSYKGVKFIDATNKNIIAEHEIRNISCAAQDPEDLSTFAYITKDLKSNHHYCHVFTAFDVNLAYEIILTLGQAFEVAYQLALQARKGGHSSTLPESFENKPSKPIPKPRVSIRKSVRSTHLSKRLWPIYRGLWSRAKKPRGALIPSMKPRFSDTRRPPVLAVPCSPSGPGAGFPSRLRVHPAQEEDCSERAALLRAKGHWPFLGKFFLHQ

SEQ ID NO: 806067 - protein, 472 aa, Homo sapiens
MEDQDLLEIGILNSGHRQRILQAIQLLPKMRPIGHDGYHPTSVAEWLDSIELGDYTKAFLINGYTSMDLLKKIWEVELINVLKINLIGHRKRILASLGDRLHDDPPQKPPRSITLREPSGNHTPPQLSPSLSQSTYTTGGSLDVPHIIMQGDARRRRNENYFDDIPRSKLERQMAQTGDWGEPSITLRPPNEATASTPVQYWQHHPEKLIFQSCDYKAFYLGSMLIKELRGTESTQDACAKMRANCQKSTEQMKKVPTIILSVSYKGVKFIDATNKNIIAEHEIRNISCAAQDPEDLSTFAYITKDLKSNHHYCHVFTAFDVNLAYEIILTLGQAFEVAYQLALQARKGGHSSTLPESFENKPSKPIPKPRVSIRKSVRSTHLSKRLWPIYRGLWSRAKKPRGALIPSMKPRFSDTRRPPVLAVPCSPSGPGAGFPSRLRVHPAQEEDCSERAALLRAKGHWPFLGKFFLHQ

SEQ ID NO: 806068 - protein, 472 aa, Homo sapiens
AEGGARAGLGSSRGEPGARRSAARPSSAPLPPFLGALALASPLAFAGGAQKDAQRQRLGERRFKPHVCVLGGQSPPALADPGSRPARAARVLKINLIGHRKRILASLGDRLHDDPPQKPPRSITLRLSPSLSQSTYTTGGSLDVPHIIMQGDARRRRNENYFDDIPRSKLERQMAQTGDWGEPSITLRPPNEATASTPVQYWQHHPEKLIFQSCDYKAFYLGSMLIKELRGTESTQDACAKMRANCQKSTEQMKKVPTIILSVSYKGVKFIDATNKNIIAEHEIRNISCAAQDPEDLSTFAYITKDLKSNHHYCHVFTAFDVNLAYEIILTLGQAFEVAYQLALQARKGGHSSTLPESFENKPSKPIPKPRVSIRKSVRSTHLSKRLWPIYRGLWSRAKKPRGALIPSMKPRFSDTRRPPVLAVPCSPSGPGAGFPSRLRVHPAQEEDCSERAALLRAKGHWPFLGKFFLHQ

SEQ ID NO: 806069 - protein, 231 aa, Homo sapiens
MRANCQKSTEQMKKVPTIILSVSYKGVKFIDATNKNIIAEHEIRNISCAAQDPEDLSTFAYITKDLKSNHHYCHVFTAFDVNLAYEIILTLGQAFEVAYQLALQARKGGHSSTLPESFENKPSKPIPKPRVSIRKSVRSTHLSKRLWPIYRGLWSRAKKPRGALIPSMKPRFSDTRRPPVLAVPCSPSGPGAGFPSRLRVHPAQEEDCSERAALLRAKGHWPFLGKFFLHQ

SEQ ID NO: 806070 - protein, 324 aa, Homo sapiens
MQGDARRRRNENYFDDIPRSKLERQMAQTGDWGEPSITLRPPNEATASTPVQYWQHHPEKLIFQSCDYKAFYLGSMLIKELRGTESTQDACAKMRANCQKSTEQMKKVPTIILSVSYKGVKFIDATNKNIIAEHEIRNISCAAQDPEDLSTFAYITKDLKSNHHYCHVFTAFDVNLAYEIILTLGQAFEVAYQLALQARKGGHSSTLPESFENKPSKPIPKPRVSIRKSVRSTHLSKRLWPIYRGLWSRAKKPRGALIPSMKPRFSDTRRPPVLAVPCSPSGPGAGFPSRLRVHPAQEEDCSERAALLRAKGHWPFLGKFFLHQ

SEQ ID NO: 806071 - protein, 482 aa, Homo sapiens; identical to SEQ ID NO: 806060

SEQ ID NO: 806072 - protein, 482 aa, Homo sapiens; identical to SEQ ID NO: 806060

SEQ ID NO: 806073 - protein, 341 aa, Homo sapiens
AEGGARAGLGSSRGEPGARRSAARPSSAPLPPFLGALALASPLAFAGGAQKDAQRQRLGERRFKPHVCVLGGQSPPALADPGSRPARAARVLKINLIGHRKRILASLGDRLHDDPPQKPPRSITLREPSGNHTPPQLSPSLSQSTYTTGGSLDVPHIIMQGDARRRRNENYFDDIPRSKLERQMAQTGDWGEPSITLRPPNEATASTPVQYWQHHPEKLIFQSCDYKAFYLGSMLIKELRGTESTQDACAKMRANCQKSTEQMKKVPTIILSVSYKGVKFIDATNKNIIAEHEIRNISCAAQDPEDLSTFAYITKDLKSNHHYCHVFTAFDVVSTHPLSTD

SEQ ID NO: 806074 - protein, 362 aa, Homo sapiens
AEGGARAGLGSSRGEPGARRSAARPSSAPLPPFLGALALASPLAFAGGAQKDAQRQRLGERRFKPHVCVLGGQSPPALADPGSRPARAARVLKINLIGHRKRILASLGDRLHDDPPQKPPRSITLREPSGNHTPPQLSPSLSQSTYTTGGSLDVPHIIMQGDARRRRNENYFDDIPRSKLERQMAQTGDWGEPSITLRPPNEATASTPVQYWQHHPEKLIFQSCDYKAFYLGSMLIKELRGTESTQDACAKMRANCQKSTEQMKKVPTIILSVSYKGVKFIDATNKNIIAEHEIRNISCAAQDPEDLSTFAYITKDLKSNHHYCHVFTAFDVKLARIFAQASWVDSVPLSSFISIEPLQGTH

SEQ ID NO: 806075 - protein, 353 aa, Homo sapiens
AEGGARAGLGSSRGEPGARRSAARPSSAPLPPFLGALALASPLAFAGGAQKDAQRQRLGERRFKPHVCVLGGQSPPALADPGSRPARAARVLKINLIGHRKRILASLGDRLHDDPPQKPPRSITLREPSGNHTPPQLSPSLSQSTYTTGGSLDVPHIIMQGDARRRRNENYFDDIPRSKLERQMAQTGDWGEPSITLRPPNEATASTPVQYWQHHPEKLIFQSCDYKAFYLGSMLIKELRGTESTQDACAKMRANCQKSTEQMKKVPTIILSVSYKGVKFIDATNKNIIAEHEIRNISCAAQDPEGPGMPEGPGMPEGPGMPEGPGMPEGPGMPEGPGMQKVQVCQKSRMPVR

SEQ ID NO: 806076 - protein, 211 aa, Homo sapiens
LCAHLFGLSDCPVLSGSGAVYRVCAGTATFHLLQAVLLVHLHSPTSPRAQLHNSMALHWHLWRLCIHPTAVGAYYSFCPFLEQELSNPALASYKLLSSAAIIMYLTFSALSSRPPERVILQGQNHTLCLPGLSKMEPQTPDISLAMLSASIMYACVLFACNEASYLAEVFGPLWIVKVYSYEFQKPSLCFCCPETVEADKGEAKGWGCEAS

SEQ ID NO: 806077 - protein, 136 aa, Homo sapiens
CVPTCLASLTVQCSVALGLCTEYVQEPPPSTCCRLCCWSTSTPPPARGHSCIIAWHYIGICGGFAFILLQLVLITAFAHSWNKNCNEASYLAEVFGPLWIVKVYSYEFQKPSLCFCCPETVEADKGEAKGWGCEAS

SEQ ID NO: 806078 - protein, 102 aa, Homo sapiens
  misc_feature (3)..(3): Xaa can be any naturally occurring amino acid
  misc_feature (14)..(14): Xaa can be any naturally occurring amino acid
GQXRQAQGVILSLXGLLSLEDGWSKMEPQTPDISLAMLSASIMYACVLFACNEASYLAEVFGPLWIVKVYSYEFQKPSLCFCCPETVEADKGEAKGWGCEAS

SEQ ID NO: 806079 - protein, 70 aa, Homo sapiens
QFDIFPLVPILQHGITLASVEALHSSYCSWCLLQLLPIPGTRTGKGHITLKAFPGEFLVLLHGKGWAKGT

SEQ ID NO: 806080 - protein, 178 aa, Homo sapiens
LKYSFFTYGLFSENKEKLINNAITALLSQEGDVVASNAELESQFQAVRRLVASKAGFLAFTQLPKFRERLGVKVVKALKRSNNGIIHAAVDMLCALMCPMHDDYDLRQEQLNKASLLSSKKFLENLLEKFNSHVDHGTGALVISSLLDFLTFALCAPYSETTEGQQFDMLLEMVASNG

SEQ ID NO: 806081 - protein, 207 aa, Homo sapiens
MNVARFLVEKHTLHVIIDFILSKVSNQQSNLAQHQRVYTGEKPYKCNEWGKALSGKSSLFYHQAIHGVGKLCKCNDCHKVFSNATTIANHWRIHNEDRSYKCNKCGKIFRHRSYLAVYQRTHTGEKPYKYHDCGKVFSQASSYAKHRRIHTGEKPHKCDDCGKVLTSRSHLIRHQRIHTGQKSYKCLKCGKVFSLWALHAEHQKIHF

SEQ ID NO: 806082 - protein, 465 aa, Homo sapiens
MALPQGLLTFRDVAIEFSQEEWKCLDPAQRTLYRDVMLENYRNLVSLDTSSKCMMKMFSSTGQGNTEVVHTGTLQIHASHHIGDTCFQEIEKDIHDFVFQWQENETNGHEALMTKIKKLMSSTERHDQRHAGNKPIKNELGSSFHSHLPEVHIFHPEGKIGNQVEKAINDAFSVSASQRISCRPKTRISNKYRNNFLQSSLLTQKREVHTREKSFQRNESGKAFNGSSLLKKHQIIHLGDKQYKCDVCGKDFHQKRYLACHRCHTGENPYKCNECGKTFSHNSALLVHKAIHTGEKPYKCNECGKVFNQQSNLARHHRVHTGEKPYKCEECDKVFSRKSHLERHRRIHTGEKPYKCKVCDKAFRRDSHLAQHTVIHTGEKPYKCNECGKTFVQNSSLVMHKVIHTGEKRYKCNECGKVFNHKSNLACHHRLHTGEKPYKCNECGKVFNRKSNLERHHRLHTGKKS

SEQ ID NO: 806083 - protein, 173 aa, Homo sapiens [sequence omitted]

SEQ ID NO: 806084 - protein, 173 aa, Homo sapiens [sequence omitted]

SEQ ID NO: 806085 - protein, 173 aa, Homo sapiens [sequence omitted]

SEQ ID NO: 806086 - protein, 107 aa, Homo sapiens
SVALPFGINELCGACAASERPAGGAWRLPANPPFSSRARGQSQSHHREHPGQKNGSYTQSLPPSYHSCRFPSSFLHASTLPHRKRRPFLLQFLPAVPQRLSSLARRE

SEQ ID NO: 806087 - protein, 219 aa, Homo sapiens
QQDVAQFADFREVLTTRATQLSEELAQLRDAYQKQKEQLRQQLEAPPSQRDGHFLQESRRLSAQFENLMAESRQDLEEEYEPQFLRLLERKEAGTKALQRTQAEIQEMKEALRPLQAEARQLRLQNRNLEDQIALVRQKRDEEVQQYREQLEEMEERQRQLRNGVQLQQQKNKEMEQLRLSLAEELSTYKAMLLPKSLEQADAPTSQAGGMETQSQGAV

SEQ ID NO: 806088 - protein, 213 aa, Homo sapiens
QQDVAQFADFREVLTTRATQLSEELAQLRDAYQKQKEQLRQQLEAPPSQRDGHFLQESRRLSAQFENLMAESRQDLEEEYEPQFLRLLERKEAGTKALQRTQAEIQEMKEALRPLQAEARQLRLQNRNLEDQIALVRQKRDEEVQQYREQLEEMEERQRQLRNGVQLQQQKNKEMEQLRLSLAEELSTYKGCLEIYGQICNPETAKNFLAKDH

SEQ ID NO: 806089 - protein, 102 aa, Homo sapiens
MSNTTVPNAPQANSDSMVGYVLGPFFLITLVGVVVAVVMYVQKKKRVDRLRHHLLPMYSYDPAEELHEAEQELLSDMGDPKVVHGWQSGYQHKRMPLLDVKT

SEQ ID NO: 806090 - protein, 102 aa, Homo sapiens; identical to SEQ ID NO: 806089

SEQ ID NO: 806091 - protein, 102 aa, Homo sapiens; identical to SEQ ID NO: 806089

SEQ ID NO: 806092 - protein, 102 aa, Homo sapiens; identical to SEQ ID NO: 806089

SEQ ID NO: 806093 - protein, 159 aa, Homo sapiens
MYRRKSGWTGCAITCSPCTAMTQLRNCMRLSRSCSLTWETPRWYMAGRVATSTSGCHCWMSRRDLTPLPHPSEPGVLDCLGPCHLLPLLSPGSPCWVLGLHFSLHPPSAASASHALTITSLPPGLLPFVGVELTAHPQALMGRGFPSGMAAAGRHLCFL

SEQ ID NO: 806094 - protein, 139 aa, Homo sapiens
MTQLRNCMRLSRSCSLTWETPRWYMAGRVATSTSGCHCWMSRRDLTPLPHPSEPGVLDCLGPCHLLPLLSPGSPCWVLGLHFSLHPPSAASASHALTITSLPPGLLPFVGVELTAHPQALMGRGFPSGMAAAGRHLCFL

SEQ ID NO: 806095 - protein, 139 aa, Homo sapiens; identical to SEQ ID NO: 806094

SEQ ID NO: 806096 - protein, 102 aa, Homo sapiens; identical to SEQ ID NO: 806089

SEQ ID NO: 806097 - protein, 167 aa, Homo sapiens [sequence omitted]

SEQ ID NO: 806098 - protein, 167 aa, Homo sapiens [sequence omitted]

SEQ ID NO: 806099 - protein, 102 aa, Homo sapiens; identical to SEQ ID NO: 806089

SEQ ID NO: 806100 - protein, 161 aa, Homo sapiens
GRPGVGAIAALPCPPGSLGASAPLFVETSFHRRRVTPAAVQRPRDVQSQAHGAQARRAAWNGPRQAVTGTSPEGRGRCPPGQELARQALPRAASLLDYGIATELYKDTIWGRTAGEDWRGGTRLACCLSSSGGQGQESRVTVSRDGQCVPKERNREKGNQA

SEQ ID NO: 806101 - protein, 338 aa, Homo sapiens
MEQLRAAARLQIVLGHLGRPSAGAVVAHPTSGTISSASFHPQQFQYTLDNNVLTLEQRKFYEENGFLVIKNLVPDADIQRFRNEFEKICRKEVKPLGLTVMRDVTISKSEYAPSEKMITKVQDFQEDKELFRYCTLPEILKYVECFTGPNIMAMHTMLINKPPDSGKKTSRHPLHQDLHYFPFRPSDLIVCAWTAMEHISRNNGCLVVLPGTHKGSLKPHDYPKWEGGVNKMFHGIQDYEENKARVHLVMEKGDTVFFHPLLIHGSGQNKTQGFRKAISCHFASADCHYIDVKGTSQENIEKEVVGIAHKFFGAENSVNLKDIWMFRARLVKGERTNL

SEQ ID NO: 806102 - protein, 66 aa, Homo sapiens
PELLRDPGSFCWSETLGRAESRRKPEGLPSGSLGAAVLLPACANRKGLVMLAAGLPPGLRHCHQIL

SEQ ID NO: 806103 - protein, 338 aa, Homo sapiens; identical to SEQ ID NO: 806101

SEQ ID NO: 806104 - protein, 238 aa, Homo sapiens
MRDVTISKSEYAPSEKMITKVQDFQEDKELFRYCTLPEILKYVECFTGPNIMAMHTMLINKPPDSGKKTSRHPLHQDLHYFPFRPSDLIVCAWTAMEHISRNNGCLVVLPGTHKGSLKPHDYPKWEGGVNKMFHGIQDYEENKARVHLVMEKGDTVFFHPLLIHGSGQNKTQGFRKAISCHFASADCHYIDVKGTSQENIEKEVVGIAHKFFGAENSVNLKDIWMFRARLVKGERTNL

SEQ ID NO: 806105 - protein, 238 aa, Homo sapiens; identical to SEQ ID NO: 806104

SEQ ID NO: 806106 - protein, 238 aa, Homo sapiens; identical to SEQ ID NO: 806104

SEQ ID NO: 806107 - protein, 246 aa, Homo sapiens
MPIFNAFVMRDVTISKSEYAPSEKMITKVQDFQEDKELFRYCTLPEILKYVECFTGPNIMAMHTMLINKPPDSGKKTSRHPLHQDLHYFPFRPSDLIVCAWTAMEHISRNNGCLVVLPGTHKGSLKPHDYPKWEGGVNKMFHGIQDYEENKARVHLVMEKGDTVFFHPLLIHGSGQNKTQGFRKAISCHFASADCHYIDVKGTSQENIEKEVVGIAHKFFGAENSVNLKDIWMFRARLVKGERTNL

SEQ ID NO: 806108 - protein, 238 aa, Homo sapiens; identical to SEQ ID NO: 806104

SEQ ID NO: 806109 - protein, 338 aa, Homo sapiens; identical to SEQ ID NO: 806101

SEQ ID NO: 806110 - protein, 102 aa, Homo sapiens
RPPWGRGNCRVALPSGIPGGLCSSLCGDVVSPAARDPGSCPETQRCPITGARCTGAQGCLERAQAGSDRDLSGGERTVPSRAGAGQAGAAQGGLPAGLRHCH

SEQ ID NO: 806111 - protein, 119 aa, Homo sapiens
MPPPTGTARQPCLETQRHRVTFALHTWLSLDVGLCATARNTKEDTHANTIKSLLFYFNIQEQCTLSVQPSSQHVLCGCGHVWIAEPTSAQRRRVLLLKNLEVCVWSFVLCNSLIIEAIY

SEQ ID NO: 806112 - protein, 259 aa, Homo sapiens
RQFLPLPVPPGSSSGHGTGNYQPVGLRALHSLAMDRDLLRQSLNCHGSSLLSLLRSEQQDNPHFRSLLGSAAEPARGPPPQHPLQGRKEKRVDNIEIQKFISKKADLLFALSWKSDAPATSEINEDSEDHYAIMPPLEQFMEIPSMDRRELFFRDIERGDIVIGRISSIREFGFFMVLICLGSGIMRDIAHLEITALCPLRDVPSHSNHGDPLSYYQTGDIIRAGSRYCRSRGISLRASYLPESVTNSILRPLKESSPW

SEQ ID NO: 806113 - protein, 174 aa, Homo sapiens
MDRDLLRQSLNCHGSSLLSLLRSEQQDNPHFRSLLGSAAEPARGPPPQHPLQGRKEKRVDNIEIQKFISNEINEDSEDHYAIMPPLEQFMEIPSMDRRELFFRDIERGDIVIGRISSIREFGFFMVLICLGSGIMRDIAHLEITALCPLRDVPSHSNHGDPLSYYQTGDIIRGD

SEQ ID NO: 806114 - protein, 472 aa, Homo sapiens
RQFLPLPVPPGSSSGHGTGNYQPVGLRALHSLAMDRDLLRQSLNCHGSSLLSLLRSEQQDNPHFRSLLGSAAEPARGPPPQHPLQGRKEKRVDNIEIQKFISKKADLLFALSWKSDAPATSEINEDSEDHYAIMPPLEQFMEIPSMDRRELFFRDIERGDIVIGRISSIREFGFFMVLICLGSGIMRDIAHLEITALCPLRDVPSHSNHGDPLSYYQTGDIIRAGIKDIDRYHEKLAVSLYSSSLPPHLSGIKLGVISSEELPLYYRRSVELNSNSLESYENVMQSSLGFVNPGVVEFLLEKLGIDESNPPSLMRGLQSKNFSEDDFASALRKKQSASWALKCVKIGVDYFKVGRHVDAMNEYNKALEIDKQNVEALVARGALYATKGSLNKAIEDFELALENCPTHRNARKYLCQTLVERGGQLEEEEKFLNAESYYKKALALDETFKDAEDALQKLHKYMQVIPYFLLEI

SEQ ID NO: 806115 - protein, 472 aa, Homo sapiens; identical to SEQ ID NO: 806114

SEQ ID NO: 806116 - protein, 339 aa, Homo sapiens
MPPLEQFMEIPSMDRRELFFRDIERGDIVIGRISSIREFGFFMVLICLGSGIMRDIAHLEITALCPLRDVPSHSNHGDPLSYYQTGDIIRAGIKDIDRYHEKLAVSLYSSSLPPHLSGIKLGVISSEELPLYYRRSVELNSNSLESYENVMQSSLGFVNPGVVEFLLEKLGIDESNPPSLMRGLQSKNFSEDDFASALRKKQSASWALKCVKIGVDYFKVGRHVDAMNEYNKALEIDKQNVEALVARGALYATKGSLNKAIEDFELALENCPTHRNARKYLCQTLVERGGQLEEEEKFLNAESYYKKALALDETFKDAEDALQKLHKYMQVIPYFLLEI

SEQ ID NO: 806117 - protein, 454 aa, Homo sapiens
RQFLPLPVPPGSSSGHGTGNYQPVGLRALHSLAMDRDLLRQSLNCHGSSLLSLLRSEQQDNPHFRSLLGSAAEPARGPPPQHPLQGRKEKRVDNIEIQKFISNEINEDSEDHYAIMPPLEQFMEIPSMDRRELFFRDIERGDIVIGRISSIREFGFFMVLICLGSGIMRDIAHLEITALCPLRDVPSHSNHGDPLSYYQTGDIIRAGIKDIDRYHEKLAVSLYSSSLPPHLSGIKLGVISSEELPLYYRRSVELNSNSLESYENVMQSSLGFVNPGVVEFLLEKLGIDESNPPSLMRGLQSKNFSEDDFASALRKKQSASWALKCVKIGVDYFKVGRHVDAMNEYNKALEIDKQNVEALVARGALYATKGSLNKAIEDFELALENCPTHRNARKYLCQTLVERGGQLEEEEKFLNAESYYKKALALDETFKDAEDALQKLHKYMQVIPYFLLEI

SEQ ID NO: 806118 - protein, 224 aa, Homo sapiens
EFHRNANGYAVRIHKNREVRSVELNSNSLESYENVMQSSLGFVNPGVVEFLLEKLGIDESNPPSLMRGLQSKNFSEDDFASALRKKQSASWALKCVKIGVDYFKVGRHVDAMNEYNKALEIDKQNVEALVARGALYATKGSLNKAIEDFELALENCPTHRNARKYLCQTLVERGGQLEEEEKFLNAESYYKKALALDETFKDAEDALQKLHKYMQVIPYFLLEI

SEQ ID NO: 806119 - protein, 246 aa, Homo sapiens
METYHISNARVSGRKFFHEEVYELVVAERGYAVRIQKYREVRSVELNSNSLESYENVMQSSLGFVNPGVVEFLLEKLGIDESNPPSLMRGLQSKNFSEDDFASALRKKQSASWALKCVKIGVDYFKVGRHVDAMNEYNKALEIDKQNVEALVARGALYATKGSLNKAIEDFELALENCPTHRNARKYLCQTLVERGGQLEEEEKFLNAESYYKKALALDETFKDAEDALQKLHKYMQVIPYFLLEI

SEQ ID NO: 806120 - protein, 472 aa, Homo sapiens; identical to SEQ ID NO: 806114

SEQ ID NO: 806121 - protein, 472 aa, Homo sapiens; identical to SEQ ID NO: 806114

SEQ ID NO: 806122 - protein, 500 aa, Homo sapiens
RQFLPLPVPPGSSSGHGTGNYQPVGLRALHSLAMDRDLLRQSLNCHGSSLLSLLRSEQQDNPHFRSLLGSAAEPARGPPPQHPLQGRKEKRVDNIEIQKFISKKADLLFALSWKSDAPATSEINEDSEDHYAIMPPLEQFMEIPSMDRRELFFRDIERGDIVIGRISSIREFGFFMVLICLGSGIMRDIAHLEITALCPLRDVPSHSNHGDPLSYYQTGDIIRAGIKDIDRYHEKLAVSLYSSSLPPHLSGIKLGVISSEELPLYYRRSVELNSNSLESYENVMQSSLGFVNPGVVEFLLEKLGIDESNPPSLMRGLQSKNFSEDDFASALRKKQSASWALKCVKIGVDYFKVGRHVDAMNEYNKALEIDKQNVEALVARGALYATKGSLNKAIEDFELALENCPTHRNARKYLCQTLVERGGQLEEEEKFLNAESYYKKALALDETFKDAEDALQKLHKYMQKSLELREKQAEKEEKQKTKKIETSAEKLRKLLKEEKR

SEQ ID NO: 806123 - protein, 472 aa, Homo sapiens; identical to SEQ ID NO: 806114

SEQ ID NO: 806124 - protein, 472 aa, Homo sapiens; identical to SEQ ID NO: 806114

SEQ ID NO: 806125 - protein, 472 aa, Homo sapiens; identical to SEQ ID NO: 806114

SEQ ID NO: 806126 - protein, 803 aa, Homo sapiens
RQFLPLPVPPGSSSGHGTGNYQPVGLRALHSLAMDRDLLRQSLNCHGSSLLSLLRSEQQDNPHFRSLLGSAAEPARGPPPQHPLQGRKEKRVDNIEIQKFISKKADLLFALSWKSDAPATSEINEDSEDHYAIMPPLEQFMEIPSMDRRELFFRDIERGDIVIGRISSIREFGFFMVLICLGSGIMRDIAHLEITALCPLRDVPSHSNHGDPLSYYQTGDIIRAGIKDIDRYHEKLAVSLYSSSLPPHLSGIKLGVISSEELPLYYRRSVELNSNSLESYENVMQSSLGFVNPGVVEFLLEKLGIDESNPPSLMRGLQSKNFSEDDFASALRKKQSASWALKCVKIGVDYFKVGRHVDAMNEYNKALEIDKQNVEALVARGALYATKGSLNKAIEDFELALENCPTHRNARKYLCQTLVERGGQLEEEEKFLNAESYYKKALALDETFKDAEDALQKLHKYMQKSLELREKQAEKEEKQKTKKIETSAEKLRKLLKEEKRLKKKRRKSTSSSSVSSADESVSSSSSSSSSGHKRHKKHKRNRSESSRSSRRHSSRASSNQIDQNRKDECYPVPANTSASFLNHKQEVEKLLGKQDRLQYEKTQIKEKDRCPLSSSSLEIPDDFGGRSEDPRDFYNSYKTQAGSSKTEKPYKSERHFSSRRNSSDSFCRNSEDKIYGYRRFEKDIEGRKEHYRRWEPGSVRHSTSPASSEYSWKSVEKYKKYAHSGSRDFSRHEQRYRLNTNQGEYEREDNYGEDIKTEVPEEDALSSKEHSESSVKKNLPQNLLNIFNQIAEFEKEKGNKSKN

SEQ ID NO: 806127 - protein, 472 aa, Homo sapiens; identical to SEQ ID NO: 806114

SEQ ID NO: 806128 - protein, 472 aa, Homo sapiens; identical to SEQ ID NO: 806114

SEQ ID NO: 806129 - protein, 472 aa, Homo sapiens; identical to SEQ ID NO: 806114

SEQ ID NO: 806130 - protein, 472 aa, Homo sapiens; identical to SEQ ID NO: 806114

SEQ ID NO: 806131 - protein, 253 aa, Homo sapiens
MMMKIPWGSIPVLMLLLLLGLIDISQAQLSCTGPPAIPGIPGIPGTPGPDGQPGTPGIKGEKGLPGLAGDHGEFGEKGDPGIPGNPGKVGPKGPMGPKGGPGAPGAPGPKGESGDYKATQKIAFSATRTINVPLRRDQTIRFDHVITNMNNNYEPRSGKFTCKVPGLYYFTYHASSRGNLCVNLMRGRERAQKVVTFCDYAYNTFQVTTGGMVLKLEQGENVFLQATDKNSLLGMEGANSIFSGFLLFPDMEA

SEQ ID NO: 806132 - protein, 253 aa, Homo sapiens; identical to SEQ ID NO: 806131

SEQ ID NO: 806133 - protein, 253 aa, Homo sapiens; identical to SEQ ID NO: 806131

SEQ ID NO: 806134 - protein, 253 aa, Homo sapiens; identical to SEQ ID NO: 806131

SEQ ID NO: 806135 - protein, 253 aa, Homo sapiens; identical to SEQ ID NO: 806131

SEQ ID NO: 806136 - protein, 206 aa, Homo sapiens
MGVWQEIKYLSNLIPDAFHTRIKSLMTAKFQAYLWLPNETGPTRMGTGEGTHMSAQASVYTSPLQPEVRLGAHPGAFSATRTINVPLRRDQTIRFDHVITNMNNNYEPRSGKFTCKVPGLYYFTYHASSRGNLCVNLMRGRERAQKVVTFCDYAYNTFQVTTGGMVLKLEQGENVFLQATDKNSLLGMEGANSIFSGFLLFPDMEA

SEQ ID NO: 806137 - protein, 105 aa, Homo sapiens [sequence omitted]

SEQ ID NO: 806138 - protein, 259 aa, Homo sapiens
MMMKIPWGSIPVLMLLLLLGLIDISQAQLSCTGPPAIPGIPGIPGTPGPDGQPGTPGIKGEKGLPGLAGDHGEFGEKGDPGIPGNPGKVGPKGPMGPKGGPGAPGAPGPKGESGDYKATQKIAFSATRTINVPLRRDQTIRFDHVITNMNNNYEPRSGKFTCKVPGLYYFTYHASSRGNLCVNLMRGRERAQKVVTFCDYAYNTFQVTTGGMVLKLEQGENVFLQATLTCGLLHIHPGSPCQQRSLYPQHHPLPSQCTQ

SEQ ID NO: 806139 - protein, 210 aa, Homo sapiens
MMMKIPWGSIPVLMLLLLLGLIDISQAQLSCTGPPAIPGIPGIPGTPGPDGQPGTPGIKGEKGLPGLAGDHGEFGEKGDPGIPGNPGKVGPKGPMGPKGGPGAPGAPGPKGESGDYKATQKIAFSATRTINVPLRRDQTIRFDHVITNMNNNYEPRSGKFTCKVTTGGMVLKLEQGENVFLQATDKNSLLGMEGANSIFSGFLLFPDMEA

SEQ ID NO: 806140 - protein, 109 aa, Homo sapiens
MMSDASDMLAAALEQMDGIIAGSKALEYSNGIFDCQSPTSPFMGSLRALHLVEDLRGLLEMMETDEKEGLRCQIPDSTAETLVEWLQSQMVGSACSKFCYKSFVAYSKI

SEQ ID NO: 806141 - protein, 1005 aa, Homo sapiens
MMSDASDMLAAALEQMDGIIAGSKALEYSNGIFDCQSPTSPFMGSLRALHLVEDLRGLLEMMETDEKEGLRCQIPDSTAETLVEWLQSQMTNGHLPGNGDVYQERLARLENDKESLVLQVSVLTDQVEAQGEKIRDLEFCLEEHREKLNATEEMLQQELLSRTSLETQKLDLMAEISNLKLKLTAVEKDRLDYEDKFRDTEGLIQEINDLRLKVSEMDSERLQYEKKLKSTKDELASLKEQLEEKESEVKRLQEKLVCKMKGEGVEIVDRDENFKKKLKEKNIEVQKMKKAVESLMAANEEKDRKIEDLRQCLNRYKKMQDTVVLAQGKKGKDGEYEELLNSSSISSLLDAQGFSDLEKSPSPTPVMGSPSCDPFNTSVPEEFHTTILQVSIPSLLPATVSMETSEKSKLTPKPETSFEENDGNIILGATVDTQLCDKLLTSSLQKSSSLGNLKKETSDGEKETIQKTSEDRAPAESRPFGTLPPRPPGQDTSMDDNPFGTRKVRSSFGRGFFKIKSNKRTASAPNLDRKRSASAPTLAETEKETAEHLDLAGASSRPKDSQRNSPFQIPPPSPDSKKKSRGIMKLFGKLRRSQSTTFNPDDMSEPEFKRGGTRATAGPRLGWSRDLGQSNSDLDMPFAKWTKEQVCNWLMEQGLGSYLNSGKHWIASGQTLLQASQQDLEKELGIKHSLHRKKLQLALQALGSEEETNHGKLDFNWVTRWLDDIGLPQYKTQFDEGRVDGRMLHYMTVDDLLSLKVVSVLHHLSIKRAIQVLRINNFEPNCLRRRPSDENTIAPSEVQKWTNHRVMEWLRSVDLAEYAPNLRGSGVHGGLMVLEPRFNVETMAQLLNIPPNKTLLRRHLATHFNLLIGAEAQHQKRDAMELPDYVLLTATAKVKPKKLAFSNFGNLRKKKQEDGEEYVCPMELGQASGSASKKGFKPGLDMRLYEEDDLDRLEQMEDSEGTVRQIGAFSEGINNLTHMLKEDDMFKDFAARSPSASITDEDSNV

SEQ ID NO: 806142 - protein, 1005 aa, Homo sapiens; identical to SEQ ID NO: 806141

SEQ ID NO: 806143 - protein, 1005 aa, Homo sapiens; identical to SEQ ID NO: 806141

SEQ ID NO: 806144 - protein, 1005 aa, Homo sapiens; identical to SEQ ID NO: 806141

SEQ ID NO: 806145 - protein, 1014 aa, Homo sapiens
MMSDASDMLAAALEQMDGIIAGSKALEYSNGIFDCQSPTSPFMGSLRALHLVEDLRGLLEMMETDEKEGLRCQIPDSTAETLVEWLQSQMTNGHLPGNGDVYQERLARLENDKESLVLQVSVLTDQVEAQGEKIRDLEFCLEEHREKLNATEEMLQQELLSRTSLETQKLDLMAEISNLKLKLTAVEKDRLDYEDKFRDTEGLIQEINDLRLKVSEMDSERLQYEKKLKSTKSLMAKLSSMKIKVGQMQYEKQRMEQKWESLKDELASLKEQLEEKESEVKRLQEKLVCKMKGEGVEIVDRDIEVQKMKKAVESLMAANEEKDRKIEDLRQCLNRYKKMQDTVVLAQGKKGKDGEYEELLNSSSISSLLDAQGFSDLEKSPSPTPVMGSPSCDPFNTSVPEEFHTTILQVSIPSLLPATVSMETSEKSKLTPKPETSFEENDGNIILGATVDTQLCDKLLTSSLQKSSSLGNLKKETSDGEKETIQKTSEDRAPAESRPFGTLPPRPPGQDTSMDDNPFGTRKVRSSFGRGFFKIKSNKRTASAPNLAETEKETAEHLDLAGASSRPKDSQRNSPFQIPPPSPDSKKKSRGIMKLFGKLRRSQSTTFNPDDMSEPEFKRGGTRATAGPRLGWSRDLGQSNSDLDMPFAKWTKEQVCNWLMEQGLGSYLNSGKHWIASGQTLLQASQQDLEKELGIKHSLHRKKLQLALQALGSEEETNHGKLDFNWVTRWLDDIGLPQYKTQFDEGRVDGRMLHYMTVDDLLSLKVVSVLHHLSIKRAIQVLRINNFEPNCLRRRPSDENTIAPSEVQKWTNHRVMEWLRSVDLAEYAPNLRGSGVHGGLMVLEPRFNVETMAQLLNIPPNKTLLRRHLATHFNLLIGAEAQHQKRDAMELPDYVLLTATAKVKPKKLAFSNFGNLRKKKQEDGEEYVCPMELGQASGSASKKGFKPGLDMRLYEEDDLDRLEQMEDSEGTVRQIGAFSEGINNLTHMLKEDDMFKDFAARSPSASITDEDSNV

SEQ ID NO: 806146 - protein, 998 aa, Homo sapiens
MVSSTGSKALEYSNGIFDCQSPTSPFMGSLRALHLVEDLRGLLEMMETDEKEGLRCQIPDSTAETLVEWLQSQMTNGHLPGNGDVYQERLARLENDKESLVLQVSVLTDQVEAQGEKIRDLEFCLEEHREKLNATEEMLQQELLSRTSLETQKLDLMAEISNLKLKLTAVEKDRLDYEDKFRDTEGLIQEINDLRLKVSEMDSERLQYEKKLKSTKSLMAKLSSMKIKVGQMQYEKQRMEQKWESLKDELASLKEQLEEKESEVKRLQEKLVCKMKGEGVEIVDRDIEVQKMKKAVESLMAANEEKDRKIEDLRQCLNRYKKMQDTVVLAQGKKGKDGEYEELLNSSSISSLLDAQGFSDLEKSPSPTPVMGSPSCDPFNTSVPEEFHTTILQVSIPSLLPATVSMETSEKSKLTPKPETSFEENDGNIILGATVDTQLCDKLLTSSLQKSSSLGNLKKETSDGEKETIQKTSEDRAPAESRPFGTLPPRPPGQDTSMDDNPFGTRKVRSSFGRGFFKIKSNKRTASAPNLAETEKETAEHLDLAGASSRPKDSQRNSPFQIPPPSPDSKKKSRGIMKLFGKLRRSQSTTFNPDDMSEPEFKRGGTRATAGPRLGWSRDLGQSNSDLDMPFAKWTKEQVCNWLMEQGLGSYLNSGKHWIASGQTLLQASQQDLEKELGIKHSLHRKKLQLALQALGSEEETNHGKLDFNWVTRWLDDIGLPQYKTQFDEGRVDGRMLHYMTVDDLLSLKVVSVLHHLSIKRAIQVLRINNFEPNCLRRRPSDENTIAPSEVQKWTNHRVMEWLRSVDLAEYAPNLRGSGVHGGLMVLEPRFNVETMAQLLNIPPNKTLLRRHLATHFNLLIGAEAQHQKRDAMELPDYVLLTATAKVKPKKLAFSNFGNLRKKKQEDGEEYVCPMELGQASGSASKKGFKPGLDMRLYEEDDLDRLEQMEDSEGTVRQIGAFSEGINNLTHMLKEDDMFKDFAARSPSASITDEDSNV

SEQ ID NO: 806147 - protein, 983 aa, Homo sapiens
MMSDASDMLAAALEQMDGIIAGSKALEYSNGIFDCQSPTSPFMGSLRALHLVEDLRGLLEMMETDEKEGLRCQIPDSTAETLVEWLQSQMTNGHLPGNGDVYQERLARLENDKESLVLQVSVLTDQVEAQGEKIRDLEFCLEEHREKLNATEEMLQQELLSRTSLETQKLDLMAEISNLKLKLTAVEKDRLDYEDKFRDTEGLIQEINDLRLKVSEMDSERLQYEKKLKSTKDELASLKEQLEEKESEVKRLQEKLVCKMKGEGVEIVDRDIEVQKMKKAVESLMAANEEKDRKIEDLRQCLNRYKKMQDTVVLAQGKKGKDGEYEELLNSSSISSLLDAQGFSDLEKSPSPTPVMGSPSCDPFNTSVPEEFHTTILQVSIPSLLPATVSMETSEKSKLTPKPETSFEENDGNIILGATVDTQLCDKLLTSSLQKSSSLGNLKKETSDGEKETIQKTSEDRAPAESRPFGTLPPRPPGQDTSMDDNPFGTRKVRSSFGRGFFKIKSNKRTASAPNLAETEKETAEHLDLAGASSRPKDSQRNSPFQIPPPSPDSKKKSRGIMKLFGKLRRSQSTTFNPDDMSEPEFKRGGTRATAGPRLGWSRDLGQSNSDLDMPFAKWTKEQVCNWLMEQGLGSYLNSGKHWIASGQTLLQASQQDLEKELGIKHSLHRKKLQLALQALGSEEETNHGKLDFNWVTRWLDDIGLPQYKTQFDEGRVDGRMLHYMTVDDLLSLKVVSVLHHLSIKRAIQVLRINNFEPNCLRRRPSDENTIAPSEVQKWTNHRVMEWLRSVDLAEYAPNLRGSGVHGGLMVLEPRFNVETMAQLLNIPPNKTLLRRHLATHFNLLIGAEAQHQKRDAMELPDYVLLTATAKVKPKKLAFSNFGNLRKKKQEDGEEYVCPMELGQASGSASKKGFKPGLDMRLYEEDDLDRLEQMEDSEGTVRQIGAFSEGINNLTHMLKEDDMFKDFAARSPSASITDEDSNV

SEQ ID NO: 806148 - protein, 780 aa, Homo sapiens
MAKLSSMKIKVGQMQYEKQRMEQKWESLKDELASLKEQLEEKESEVKRLQEKLVCKMKGEGVEIVDRDIEVQKMKKAVESLMAANEEKDRKIEDLRQCLNRYKKMQDTVVLAQGKKGKDGEYEELLNSSSISSLLDAQGFSDLEKSPSPTPVMGSPSCDPFNTSVPEEFHTTILQVSIPSLLPATVSMETSEKSKLTPKPETSFEENDGNIILGATVDTQLCDKLLTSSLQKSSSLGNLKKETSDGEKETIQKTSEDRAPAESRPFGTLPPRPPGQDTSMDDNPFGTRKVRSSFGRGFFKIKSNKRTASAPNLAETEKETAEHLDLAGASSRPKDSQRNSPFQIPPPSPDSKKKSRGIMKLFGKLRRSQSTTFNPDDMSEPEFKRGGTRATAGPRLGWSRDLGQSNSDLDMPFAKWTKEQVCNWLMEQGLGSYLNSGKHWIASGQTLLQASQQDLEKELGIKHSLHRKKLQLALQALGSEEETNHGKLDFNWVTRWLDDIGLPQYKTQFDEGRVDGRMLHYMTVDDLLSLKVVSVLHHLSIKRAIQVLRINNFEPNCLRRRPSDENTIAPSEVQKWTNHRVMEWLRSVDLAEYAPNLRGSGVHGGLMVLEPRFNVETMAQLLNIPPNKTLLRRHLATHFNLLIGAEAQHQKRDAMELPDYVLLTATAKVKPKKLAFSNFGNLRKKKQEDGEEYVCPMELGQASGSASKKGFKPGLDMRLYEEDDLDRLEQMEDSEGTVRQIGAFSEGINNLTHMLKEDDMFKDFAARSPSASITDEDSNV

SEQ ID NO: 806149 - protein, 984 aa, Homo sapiens
MMSDASDMLAAALEQMDGIIAGSKALEYSNGIFDCQSPTSPFMGSLRALHLVEDLRGLLEMMETDEKEGLRCQIPDSTAETLVEWLQSQMTNGHLPGNGDVYQERLARLENDKESLVLQVSVLTDQVEAQGEKIRDLEFCLEEHREKLNATEEMLQQELLSRTSLETQKLDLMAEISNLKLKLTAVEKDRLDYEDKFRDTEGLIQEINDLRLKVSEMDSERLQYEKKLKSTKDELASLKEQLEEKESEVKRLQEKLVCKMKGEGVEIVDRDIEVQKMKKAVESLMAANEEKDRKIEDLRQCLNRYKKMQDTVVLAQGKKGKDGEYEELLNSSSISSLLDAQGFSDLEKSPSPTPVMGSPSCDPFNTSVPEEFHTTILQVSIPSLLPATVSMETSEKSKLTPKPETSFEENDGNIILGATVDTQLCDKLLTSSLQKSSSLGNLKKETSDGDRAPAESRPFGTLPPRPPGQDTSMDDNPFGTRKVRSSFGRGFFKIKSNKRTASAPNLDRKRSASAPTLAETEKETAEHLDLAGASSRPKDSQRNSPFQIPPPSPDSKKKSRGIMKLFGKLRRSQSTTFNPDDMSEPEFKRGGTRATAGPRLGWSRDLGQSNSDLDMPFAKWTKEQVCNWLMEQGLGSYLNSGKHWIASGQTLLQASQQDLEKELGIKHSLHRKKLQLALQALGSEEETNHGKLDFNWVTRWLDDIGLPQYKTQFDEGRVDGRMLHYMTVDDLLSLKVVSVLHHLSIKRAIQVLRINNFEPNCLRRRPSDENTIAPSEVQKWTNHRVMEWLRSVDLAEYAPNLRGSGVHGGLMVLEPRFNVETMAQLLNIPPNKTLLRRHLATHFNLLIGAEAQHQKRDAMELPDYVLLTATAKVKPKKLAFSNFGNLRKKKQEDGEEYVCPMELGQASGSASKKGFKPGLDMRLYEEDDLDRLEQMEDSEGTVRQIGAFSEGINNLTHMLKEDDMFKDFAARSPSASITDEDSNV

SEQ ID NO: 806150 - protein, 170 aa, Homo sapiens [sequence omitted]

SEQ ID NO: 806151 - protein, 886 aa, Homo sapiens
MMSDASDMLAAALEQMDGIIAGSKALEYSNGIFDCQSPTSPFMGSLRALHLVEDLRGLLEMMETDEKEGLRCQIPDSTAETLVEWLQSQMTNGHLPGNGDVYQERLARLENDKESLVLQVSVLTDQVEAQGEKIRDLEFCLEEHREKLNATEEMLQQELLSRTSLETQKLDLMAEISNLKLKLTAVEKDRLDYEDKFRDTEGLIQEINDLRLKVSEMDSERLQYEKKLKSTKDELASLKEQLEEKESEVKRLQEKLVCKMKGEGVEIVDRDIEVQKMKKAVESLMAANEEKDRKIEDLRQCLNRYKKMQDTVVLAQGKKGKDGEYEELLNSSSISSLLDAQGFSDLEKSPSPTPVMGSPSCDPFNTSVPEEFHTTILQVSIPSLLPATVSMETSEKSKLTPKPETSFEENDGNIILGATVDTQLCDKLLTSSLQKSSSLGNLKKETSDGEKETIQKTSEDRAPAESRPFGTLPPRPPGQDTSMDDNPFGTRKVRSSFGRGFFKIKSNKRTASAPNLAETEKETAEHLDLAGASSRPKDSQRNSPFQIPPPSPDSKKKSRGIMKLFGKLRRSQSTTFNPDDMSEPEFKRGGTRATAGPRLGWSRDLGQSNSDLDMPFAKWTKEQVCNWLMEQGLGSYLNSGKHWIASGQTLLQASQQDLEKELGIKHSLHRKKLQLALQALGSEEETNHGKLDFNWVTRWLDDIGLPQYKTQFDEGRVDGRMLHYMTVDDLLSLKVVSVLHHLSIKRAIQVLRINNFEPNCLRRRPSDENTIAPSEVQKWTNHRVMEWLRSVDLAEYAPNLRGSGVHGGLMVLEPRFNVETMAQLLNIPPNKTLLRRHLATHFNLLIGAEAQHQKRDAMELPDYVLLTATAKVKPKKLAFSNPVNLW

SEQ ID NO: 806152 - protein, 845 aa, Homo sapiens
MMSDASDMLAAALEQMDGIIAGSKALEYSNGIFDCQSPTSPFMGSLRALHLVEDLRGLLEMMETDEKEGLRCQIPDSTAETLVEWLQSQMTNGHLPGNGDVYQERLARLENDKESLVLQVSVLTDQVEAQGEKIRDLEFCLEEHREKLNATEEMLQQELLSRTSLETQKLDLMAEISNLKLKLTAVEKDRLDYEDKFRDTEGLIQEINDLRLKVSEMDSERLQYEKKLKSTKDELASLKEQLEEKESEVKRLQEKLVCKMKGEGVEIVDRDIEVQKMKKAVESLMAANEEKDRKIEDLRQCLNRYKKMQDTVVLAQGKKGKDGEYEELLNSSSISSLLDAQGFSDLEKSPSPTPVMGSPSCDPFNTSVPEEFHTTILQVSIPSLLPATVSMETSEKSKLTPKPETSFEENDGNIILGATVDTQLCDKLLTSSLQKSSSLGNLKKETSDGEKETIQKTSEDRAPAESRPFGTLPPRPPGQDTSMDDNPFGTRKVRSSFGRGFFKIKSNKRTASAPNLAETEKETAEHLDLAGASSRPKDSQRNSPFQIPPPSPDSKKKSRGIMKLFGKLRRSQSTTFNPDDMSEPEFKRGGTRATAGPRLGWSRDLGQSNSDLDMPFAKWTKEQVCNWLMEQGLGSYLNSGKHWIASGQTLLQASQQDLEKELGIKHSLHRKKLQLALQALGSEEETNHGKLDFNWVTRWLDDIGLPQYKTQFDEGRVDGRMLHYMTVNTIAPSEVQKWTNHRVMEWLRSVDLAEYAPNLRGSGVHGGLMVLEPRFNVETMAQLLNIPPNKTLLRRHLATHFNLLIGAEAQHQKRDAMELPDYVLLTATAKVKPKKLAFSNPVNLW

SEQ ID NO: 806153 - protein, 170 aa, Homo sapiens [sequence omitted]

SEQ ID NO: 806154 - protein, 283 aa, Homo sapiens
MMSDASDMLAAALEQMDGIIAGSKALEYSNGIFDCQSPTSPFMGSLRALHLVEDLRGLLEMMETDEKEGLRCQIPDSTAETLVEWLQSQMTNGHLPGNGDVYQERLARLENDKESLVLQVSVLTDQVEAQGEKIRDLEFCLEEHREKLNATEEMLQQELLSRTSLETQKLDLMAEISNLKLKLTAVEKDRLDYEDKFRDTEGLIQEINDLRLKVSEMDSERLQYEKKLKSTKDELASLKEQLEEKESEVKRLQEKLVCKMKGEGVEIVDRGKKIYFTFIISFC

SEQ ID NO: 806155 - protein, 261 aa, Homo sapiens
MMSDASDMLAAALEQMDGIIAGSKALEYSNGIFDCQSPTSPFMGSLRALHLVEDLRGLLEMMETDEKEGLRCQIPDSTAETLVEWLQSQMTNGHLPGNGDVYQERLARLENDKESLVLQVSVLTDQVEAQGEKIRDLEFCLEEHREKLNATEEMLQQELLSRTSLETQKLDLMAEISNLKLKLTAVEKDRLDYEDKFRDTEGLIQEINDLRLKVSEMDSERLQYEKKLKSTKVSFSHRLTFSNKWHHYSSMPNNINKMFST

SEQ ID NO: 806156 - protein, 85 aa, Homo sapiens
RRRRRLKRQIPVPPTRERRLRQRGEWAGGSHKLQGKEKPSTGITFIPDAPNIISLQGKRVFIALRLKMYSRFSPFSLLLCIFWMW

SEQ ID NO: 806157 - protein, 149 aa, Homo sapiens
IQVVKTGRGLQPRVHLPTEQVVNSPGERNCQLPLSVSPEGPRTPPPPCLLRSREEEPEVGAPSAAARAPPTEPAAGTPNPRLEPAAPGLSHRNASPRGATGAWRLTAAFGSRSAHTLSGFRLSPEARLRLACGSIRCGQARSYTQEKWS

SEQ ID NO: 806158 - protein, 164 aa, Homo sapiens
MAKEWGYASHNGPDHWHELFPNAKGENQSPIELHTKDIRHDPSLQPWSVSYDGGSAKTILNNGKTCRVVFDDTYDRSMLRGGPLPGPYRLRQFHLHWGSSDDHGSEHTVDGVKYAAEVRGTAIIHSRSHTVKTAKLKIRTTATKHHPLLLFQVYSYEKSCTSFS

SEQ ID NO: 806159 - protein, 260 aa, Homo sapiens [sequence omitted]

SEQ ID NO: 806160 - protein, 260 aa, Homo sapiens [sequence omitted]

SEQ ID NO: 806161 - protein, 225 aa, Homo sapiens
MHGGRREDEVRAACISARRRRLETLQFGERRRGDGGARSHDSRESAGRGVGAPSPTSAPVTSTAVPLLEFIGFLYPASQTPPQSSLAPRPTLADLIRPCSVRGSYIKARARGDSAPRRGRESRSRPARRKATMAKEWGYASHNGPDHWHELFPNAKGENQSPIELHTKDIRHDPSLQPWSVSYDGGSAKTILNNGKTCRVVFDDTYDRSMLRGGPLPGPYRTAYQ

SEQ ID NO: 806162 - protein, 184 aa, Homo sapiens
  misc_feature (13)..(13): Xaa can be any naturally occurring amino acid
FGIKLETNMLPIXGTLCPKIYLCFSKIKISRMVLNEDGYSSTIKDKILTIDVKPGWRQGTRITFEKEGDQGPNIIPADIIFIVKEKLHPRFRRENDNLFFVNPIPLGKALTCCTVEVRTLDDRLLNIPINDIIHPKYFKKVPGEGMPLPEDPTKKGDLFIFFDIQFPTRLTPQKKQMLRQALLT

SEQ ID NO: 806163 - protein, 720 aa, Homo sapiens
WGAGVGWGRMLDGPLFSEGPDSPRELQDEESGSCLWVQKSKLLVIEVKTISCHYSRRAPSRQPMDFQASHWARGFQNRTCGPRPGSPQPPPRRPWASRVLQEATNWRAGPLAEVRAREQEKRKAASQEREAKETERKRRKAGGARRSPPGRPRPEPRNAPRVAQLAGLPAPLRPERLAPVGRAPRPSAQPQSDPGSAWAGPWGGRRPGPPSYEAHLLLRGSAGTAPRRRWDRPPPYVAPPSYEGPHRTLGTKRGPGNSQVPTSSAPAATPARTDGGRTKKRLDPRIYRDVLGAWGLRQGQGLLGGSPGCGAARARPEPGKGVVEKSLGLAAADLNSGSDSHPQAKATGSAGTEIAPAGSATAAPCAPHPAPRSRHHLKGSREGKEGEQIWFPKCWIPSPKKQPPRHSQTLPRPWAPGGTGWRESLGLGEGAGPETLEGWKATRRAHTLPRSSQGLSRGEGVFVIDATCVVIRSQYVPTPRTQQVQLLPSGVTRVVGDSPSQSKPGKEEGEGATVFPSPCQKRLSSSRLLHQPGGGRGGEAEGGRPGDSTLEERTFRILGLPAPEVNLRDAPTQPGSPEHQALGPAASGAQGRAEGSEVAVVQRRAGRGWARTPGPYAGALREAVSRIRRHTAPDSDTDEAEELSVHSGSSDGSDTEAPGASWRNERTLPEVGNSSPEEDGKTAELSDSVGEILDVISQTEEVLFGVRDIRGTQQGNRKRQ

SEQ ID NO: 806164 - protein, 720 aa, Homo sapiens; identical to SEQ ID NO: 806163

SEQ ID NO: 806165 - protein, 743 aa, Homo sapiens
  misc_feature (712)..(712): Xaa can be any naturally occurring amino acid
  misc_feature (721)..(721): Xaa can be any naturally occurring amino acid
WGAGVGWGRMLDGPLFSEGPDSPRELQDEESGSCLWVQKSKLLVIEVKTISCHYSRRAPSRQPMDFQASHWARGFQNRTCGPRPGSPQPPPRRPWASRVLQEATNWRAGPLAEVRAREQEKRKAASQEREAKETERKRRKAGGARRSPPGRPRPEPRNAPRVAQLAGLPAPLRPERLAPVGRAPRPSAQPQSDPGSAWAGPWGGRRPGPPSYEAHLLLRGSAGTAPRRRWDRPPPYVAPPSYEGPHRTLGTKRGPGNSQVPTSSAPAATPARTDGGRTKKRLDPRIYRDVLGAWGLRQGQGLLGGSPGCGAARARPEPGKGVVEKSLGLAAADLNSGSDSHPQAKATGSAGTEIAPAGSATAAPCAPHPAPRSRHHLKGSREGKEGEQIWFPKCWIPSPKKQPPRHSQTLPRPWAPGGTGWRESLGLGEGAGPETLEGWKATRRAHTLPRSSQGLSRGEGVFVIDATCVVIRSQYVPTPRTQQVQLLPSGVTRVVGDSPSQSKPGKEEGEGATVFPSPCQKRLSSSRLLHQPGGGRGGEAEGGRPGDSTLEERTFRILGLPAPEVNLRDAPTQPGSPEHQALGPAASGAQGRAEGSEVAVVQRRAGRGWARTPGPYAGALREAVSRIRRHTAPDSDTDEAEELSVHSGSSDGSDTEAPGASWRNERTLPEVGNSSPEEDGKTAELSDSVGEILDVIRDSGTERQCRGDPRCXSHGLSFPLXKASVEQSPFTPARRGPRGEAEG

SEQ ID NO: 806166 - protein, 115 aa, Homo sapiens
MNRSLSQRELRGNALQKRCWYQKSAVFSVISRAEGLPAPHTVSVTGAACSPDPFRKELPPLSAATDTAPSRAAPCPSTPGAAGRANNKEPPLPLLADLTLQVVLFWDLQQQKTPS

SEQ ID NO: 806167 - protein, 666 aa, Homo sapiens
MTGTPKTQEGAKDLEVDMNKTEVTPRLWTTCRDGEVLLRLSKHGPGHETPMTIPEFFRESVNRFGTYPALASKNGKKWEILNFNQYYEACRKAAKSLIKLGLERFHGVGILGFNSAEWFITAVGAILAGGLCVGIYATNSAEACQYVITHAKVNILLVENDQQLQKILSIPQSSLEPLKAIIQYRLPMKKNNNLYSWDDFMELGRSIPDTQLEQVIESQKANQCAVLIYTSGTTGIPKGVMLSHDNITWIAGAVTKDFKLTDKHETVVSYLPLSHIAAQMMDIWVPIKIGALTYFAQADALKGTLVSTLKEVKPTVFIGVPQIWEKIHEMVKKNSAKSMGLKKKAFVWARNIGFKVNSKKMLGKYNTPVSYRMAKTLVFSKVKTSLGLDHCHSFISGTAPLNQETAEFFLSLDIPIGELYGLSESSGPHTISNQNNYRLLSCGKILTGCKNMLFQQNKDGIGEICLWGRHIFMGYLESETETTEAIDDEGWLHSGDLGQLDGLGFLYVTGHIKEILITAGGENVPPIPVETLVKKKIPIISNAMLVGDKLKFLSMLLTLKCEMNQMSGEPLDKLNFEAINFCRGLGSQASTVTEIVKQQDPLVYKAIQQGINAVNQEAMNNAQRIEKWVILEKDFSIYGGELGPMMKLKRHFVAQKYKKQIDHMYH

SEQ ID NO: 806168 - protein, 666 aa, Homo sapiens; identical to SEQ ID NO: 806167

SEQ ID NO: 806169 - protein, 479 aa, Homo sapiens
MKKNNNLYSWDDFMELGRSIPDTQLEQVIESQKANQCAVLIYTSGTTGIPKGVMLSHDNITWIAGAVTKDFKLTDKHETVVSYLPLSHIAAQMMDIWVPIKIGALTYFAQADALKGTLVSTLKEVKPTVFIGVPQIWEKIHEMVKKNSAKSMGLKKKAFVWARNIGFKVNSKKMLGKYNTPVSYRMAKTLVFSKVKTSLGLDHCHSFISGTAPLNQETAEFFLSLDIPIGELYGLSESSGPHTISNQNNYRLLSCGKILTGCKNMLFQQNKDGIGEICLWGRHIFMGYLESETETTEAIDDEGWLHSGDLGQLDGLGFLYVTGHIKEILITAGGENVPPIPVETLVKKKIPIISNAMLVGDKLKFLSMLLTLKCEMNQMSGEPLDKLNFEAINFCRGLGSQASTVTEIVKQQDPLVYKAIQQGINAVNQEAMNNAQRIEKWVILEKDFSIYGGELGPMMKLKRHFVAQKYKKQIDHMYH

SEQ ID NO: 806170 - protein, 479 aa, Homo sapiens; identical to SEQ ID NO: 806169

SEQ ID NO: 806171 - protein, 666 aa, Homo sapiens; identical to SEQ ID NO: 806167

SEQ ID NO: 806172 - protein, 666 aa, Homo sapiens; identical to SEQ ID NO: 806167

SEQ ID NO: 806173 - protein, 479 aa, Homo sapiens; identical to SEQ ID NO: 806169

SEQ ID NO: 806174 - protein, 126 aa, Homo sapiens
MLRSVSNDCNFCIVSFNEKGQLWCEESLSLLLNSSTKQGFPTSGIRTCTNPWPVRKWATQQKLSRNTSLKTKCLQDPQYCSSSPEGLVLAFLPEKVEKQHKCLFTLQIVVFYKTTIQMQLFRILSR

SEQ ID NO: 806175 - protein, 524 aa, Homo sapiens
MAASKKAVLGPLVGAVDQGTSSTRFLVFNSKTAELLSHHQVEIKQEFPREGWVEQDPKEILHSVYECIEKTCEKLGQLNIDISNIKAIGVSNQRETTVVWDKITGEPLYNAVVWLDLRTQSTVESLSKRIPGNNNFVKSKTGLPLSTYFSAVKLRWLLDNVRKVQKAVEEKRALFGTIDSWLIWSLTGGVNGGVHCTDVTNASRTMLFNIHSLEWDKQLCEFFGIPMEILPNVRSSSEIYGLMKAGALEGVPISGCLGDQSAALVGQMCFQIGQAKNTYGTGCFLLCNTGHKCVFSDHGLLTTVAYKLGRDKPVYYALEGSVAIAGAVIRWLRDNLGIIKTSEEIEKLAKEVGTSYGCYFVPAFSGLYAPYWEPSARGIICGLTQFTNKCHIAFAALEAVCFQTREILDAMNRDCGIPLSHLQVDGGMTSNKILMQLQADILYIPVVKPSMPETTALGAAMAAGAAEGVGVWSLEPEDLSAVTMERFEPQINAEESEIRYSTWKKAVMKSMGWVTTQSPESGIP

SEQ ID NO: 806176 - protein, 553 aa, Homo sapiens
MAASKKAVLGPLVGAVDQGTSSTRFLVFNSKTAELLSHHQVEIKQEFPREGWVEQDPKEILHSVYECIEKTCEKLGQLNIDISNIKAIGVSNQRETTVVWDKITGEPLYNAVVWLDLRTQSTVESLSKRIPGNNNFVKSKTGLPLSTYFSAVKLRWLLDNVRKVQKAVEEKRALFGTIDSWLIWSLTGGVNGGVHCTDVTNASRTMLFNIHSLEWDKQLCEFFGIPMEILPNVRSSSEIYGLMKAGALEGVPISGCLGDQSAALVGQMCFQIGQAKNTYGTGCFLLCNTGHKCVFSDHGLLTTVAYKLGRDKPVYYALEGSVAIAGAVIRWLRDNLGIIKTSEEIEKLAKEVGTSYGCYFVPAFSGLYAPYWEPSARGIICGLTQFTNKCHIAFAALEAVCFQTREILDAMNRDCGIPLSHLQVDGGMTSNKILMQLQADILYIPVVKPSMPETTALGAAMAAGAAEGVGVWSLEPEDLSAVTMERFEPQINAEESEIRYSTWKKAVMKSMGWVTTQSPESGDPSIFCSLPLGFFIVSSMVMLIGARYISGIP

SEQ ID NO: 806177 - protein, 118 aa, Homo sapiens
MAASKKAVLGPLVGAVDQGTSSTRFLVFNSKTAELLSHHQVEIKQEFPREGWVEQDPKEILHSVYECIEKTCEKLGQLNIDISNIKAIGVSNQRETTVVWDKITGEPLYNAVDCLTNE

SEQ ID NO: 806178 - protein, 530 aa, Homo sapiens
MAASKKAVLGPLVGAVDQGTSSTRFLVFNSKTAELLSHHQVEIKQEFPREGWVEQDPKEILHSVYECIEKTCEKLGQLNIDISNIKAIGVSNQRETTVVWDKITGEPLYNAVVWLDLRTQSTVESLSKRIPGNNNFVKSKTGLPLSTYFSAVKLRWLLDNVRKVQKAVEEKRALFGTIDSWLIWSLTGGVNGGVHCTDVTNASRTMLFNIHSLEWDKQLCEFFGIPMEILPNVRSSSEIYGLMKISHSVKAGALEGVPISGCLGDQSAALVGQMCFQIGQAKNTYGTGCFLLCNTGHKCVFSDHGLLTTVAYKLGRDKPVYYALEGSVAIAGAVIRWLRDNLGIIKTSEEIEKLAKEVGTSYGCYFVPAFSGLYAPYWEPSARGIICGLTQFTNKCHIAFAALEAVCFQTREILDAMNRDCGIPLSHLQVDGGMTSNKILMQLQADILYIPVVKPSMPETTALGAAMAAGAAEGVGVWSLEPEDLSAVTMERFEPQINAEESEIRYSTWKKAVMKSMGWVTTQSPESGIP

SEQ ID NO: 806179 - protein, 465 aa, Homo sapiens
RSARVAKFRCCLIPDSDSITCIPLKPAFSGMAPDVAYSTPTSGGQQAQATHCQVWLDLRTQSTVESLSKRIPGNNNFVKSKTGLPLSTYFSAVKLRWLLDNVRKVQKAVEEKRALFGTIDSWLIWSLTGGVNGGVHCTDVTNASRTMLFNIHSLEWDKQLCEFFGIPMEILPNVRSSSEIYGLMKAGALEGVPISGCLGDQSAALVGQMCFQIGQAKNTYGTGCFLLCNTGHKCVFSDHGLLTTVAYKLGRDKPVYYALEGSVAIAGAVIRWLRDNLGIIKTSEEIEKLAKEVGTSYGCYFVPAFSGLYAPYWEPSARGIICGLTQFTNKCHIAFAALEAVCFQTREILDAMNRDCGIPLSHLQVDGGMTSNKILMQLQADILYIPVVKPSMPETTALGAAMAAGAAEGVGVWSLEPEDLSAVTMERFEPQINAEESEIRYSTWKKAVMKSMGWVTTQSPESGIP

SEQ ID NO: 806180 - protein, 499 aa, Homo sapiens
MAASKKAVLGPLVGAVDQGTSSTRFLVFNSKTAELLSHHQVEIKQEFPREGWVEQDPKEILHSVYECIEKTCEKLGQLNIDISNIKAIGVSNQRETTVVWDKITGEPLYNAVVWLDLRTQSTVESLSKRIPGNNNFVKSKTGLPLSTYFSAVKLRWLLDNVRKVQKAVEEKRALFGTIDSWLIWSLTGGVNGGVHCTDVTNASRTMLFNIHSLEWDKQLCEFFGIPMEILPNVRSSSEIYGLMKAGALEGVPISGCLGDQSAALVGQMCFQIGQAKNTYGTGCFLLCNTGHKCVFSDHGLLTTVAYKLGRDKPVYYALEGSVAIAGAVIRWLRDNLGIIKTSEEIEKLAKEVGTSYGCYFVPAFSGLYAPYWEPSARGIICGLTQFTNKCHIAFAALEAVCFQTREILDAMNRDCGIPLSHLQVDGGMTSNKILMQLQADILYIPVVKPSMPETTALGAAMAAGAAEGVGVWSLEPEDLSAVTMERFEPQINAEGTFKE

SEQ ID NO: 806181 - protein, 420 aa, Homo sapiens
LNPHEAESLALVGAMIDQVLELHPGAQRLHIGCDEVYYLGEGEASRRWLQQEQNSTGKLCLSHMRAVASGVKARRPSVTPLVWDDMLRDLPEDQLAASGVPQLVEPVLWDYTADLDVHGKVLLMQKYRRCGFPQLWAASAFKGATGPSQAVPPVEHHLRNHVQWLQVAGSGPTDSLQGIILTGWQRYDHYSVLCELLPAGVPSLAACLQLLLRGMSGLATPSPTGPSPKDPEGRRPSTQCSNHPAGLWWSSQSEDGLTAPAQPPTCPEVHPGWACVWVSRPKPKAGWRVTREAPLRHSESAEMHAGRRWGTAPPLLHTRPAHLAEQVWGSGARPWKAPHPGPSTHTSRSPEGAAGPMGRGRHRGTLGVGRGLGQRSCVCGNSQATREISDCVVLMQKEKWPRRAERYPAGAAAQGRGRGR

SEQ ID NO: 806182 - protein, 372 aa, Homo sapiens
LNPHEAESLALVGAMIDQVLELHPGAQRLHIGCDEVYYLGEGEASRRWLQQEQNSTGKLCLSHMRAVASGVKARRPSVTPLVWDDMLRDLPEDQLAASGVPQLVEPVLWDYTADLDVHGKVLLMQKYRRCGFPQLWAASAFKGATGPSQAVPPVEHHLRNHVQWLQVAGSGPTDSLQGIILTGWQRYDHYSVLCELLPAGVPSLAACLQLLLRGGFDEDVKAKVENLLGISSLEKTDPVREGAGSFPGSNILALVTQVSLHLRSSVDALLEGNRYVTGWFSPYHRQRKLIHPVMVQHIQPAALSLLAQWSTLVQELEAALQLAFYPDAVEEWLEENVHPSLQRLQALLQDLSEVSAPPLPPTSPGRDVAQDP

SEQ ID NO: 806183 - protein, 578 aa, Homo sapiens
LNPHEAESLALVGAMIDQVLELHPGAQRLHIGCDEVYYLGEGEASRRWLQQEQNSTGKLCLSHMRAVASGVKARRPSVTPLVWDDMLRDLPEDQLAASGVPQLVEPVLWDYTADLDVHGKVLLMQKYRRCGFPQLWAASAFKGATGPSQAVPPVEHHLRNHVQWLQVAGSGPTDSLQGIILTGWQRYDHYSVLCELLPAGVPSLAACLQLLLRGMSGLATPSPTGPSPKDPEGRRPSTQCSNHPAGLWWSSQSEDGLTAPAQPPTCPEVHPGWACVWVSRPKPKAGWRVTREAPLRHSESAEMHAGRRWGTAPPLLHTRPAHLAEQVWGSGARPWKAPHPGPSTHTSRSPEGAAGPMGRGRHRGTLGVGRGLGQRSCVCGNSQATREISDCVVLMQKEKWPRRAERYPEARRPRDGDAAGGFDEDVKAKVENLLGISSLEKTDPVREGAGSFPGSNILALVTQVSLHLRSSVDALLEGNRYVTGWFSPYHRQRKLIHPVMVQHIQPAALSLLAQWSTLVQELEAALQLAFYPDAVEEWLEENVHPSLQRLQALLQDLSEVSAPPLPPTSPGRDVAQDP

SEQ ID NO: 806184 - protein, 248 aa, Homo sapiens
GEGGWAGGAAAWAPGGWQHAWARRGLPSPSPSRPQESGSPTAERRGKGGGRELEEKKGSAESLTLLSAGSWAGWVARGGEKGRGRGWGKGGALARCSFRAAPAAATAGASFPIHSNKQDGCRYAAALPAAQILGSNRQDVYGQNGTCAPAPAQAPPSPQKERPGAMTISFSLEPALCLWSPQLSKRKEIFPVMKEIEEDTQKWKYIPCSWIGRINIVKISILPRAIYRFNVIPIKISMTFFTERGKKS

SEQ ID NO: 806185 - protein, 704 aa, Homo sapiens
PGPPPAFSLRFPWSLRGVRSRWAPGKMAAAAGDRGGEGGAGLGSAAGLGPGPGLRGQGPSAEAHEGAPDPMPAALHPEEVAARLQRMQRELSNRRKILVKNLPQDSNCQEVHDLLKDYDLKYCYVDRNKRTAFVTLLNGEQAQNAIQMFHQYSFRGKDLIVQLQPTDALLCITNVPISFTSEEFEELVRAYGNIERCFLVYSEVTGHSKGYGFVEYMKKDFAAKARLELLGRQLGASALFAQWMDVNLLASELIHSKCLCIDKLPSDYRDSEELLQIFSSVHKPVFCQLAQDEGSYVGGFAVVEYSTAEQAEEVQQAADGMTIKGSKVQVSFCAPGAPGRSTLAALIAAQRVMHSNQKGLLPEPNPVQIMKSLNNPAMLQVLLQPQLCGRAVKPAVLGTPHSLPHLMNPSISPAFLHLNKAHQNLSHIPLAQQQLMKFENIHTNNKPGLLGEPPAVVLQTALGIGSVLPLKKELGHHHGEAHKTSSLIPTQTTITAGMGMLPFFPNQHIAGQAGPGHSNTQEKQPATVGMAEGNFSGSQPYLQSFPNLAAGSLLVGHHKQQQSQPKGTEISSGAASKNQTSLLGEPPKEIRLSKNPYLNLASVLPSVCLSSPASKTTLHKTGIASSILDAISQGSESQHALEKCIAYSPPFGDYAQVSSLRNEKRGSSYLISAPEGGSVECVDQHSQGTGAYYMETYLKKKRVY

SEQ ID NO: 806186 - protein, 458 aa, Homo sapiens
RASSRFLSPLSLEPPRSPQPLGAREDGGGGGRPRRRGGRGPGQRGALHPEEVAARLQRMQRELSNRRKILVKNLPQDSNCQEVHDLLKDYDLKYCYVDRNKRTAFVTLLNGEQAQNAIQMFHQYSFRGKDLIVQLQPTDALLCITNVPISFTSEEFEELVRAYGNIERCFLVYSEVTGHSKGYGFVEYMKKDFAAKARLELLGRQLGASALFAQWMDVNLLASELIHSKCLCIDKLPSDYRDSEELLQIFSSVHKPVFCQLAQDEGSYVGGFAVVEYSTAEQAEEVQQAADGMTIKGSKVQVSFCAPGAPGRSTLAALIAAQRVMHSNQKGLLPEPNPVQIMKSLNNPAMLQVLLQPQLCGRAVKPAVLGTPHSLPHLMNPSISPAFLHLNKAHQNLSHIPLAQQQLMKFENIHTNNKPGLLGEPPAVVLQTALGIGSVLPLKKELGHHHGEAHKSCL

SEQ ID NO: 806187 - protein, 629 aa, Homo sapiens
RASSRFLSPLSLEPPRSPQPLGAREDGGGGGRPRRRGGRGPGQRGALHPEEVAARLQRMQRELSNRRKILVKNLPQDSNCQEVHDLLKDYDLKYCYVDRNKRTAFVTLLNGEQAQNAIQMFHQYSFRGKDLIVQLQPTDALLCITNVPISFTSEEFEELVRAYGNIERCFLVYSEVTGHSKGYGFVEYMKKDFAAKARLELLGRQLGASALFAQWMDVNLLASELIHSKCLCIDKLPSDYRDSEELLQIFSSVHKPVFCQLAQDEGSYVGGFAVVEYSTAEQAEEVQQAADGMTIKGSKVQVSFCAPGAPGRSTLAALIAAQRVMHSNQKGLLPEPNPVQIMKSLNNPAMLQVLLQPQLCGRAVKPAVLGTPHSLPHLMNPSISPAFLHLNKAHQNLSHIPLAQQQLMKFENIHTNNKPGLLGEPPAVVLQTALGIGSVLPLKKELGHHHGEAHKTSSLIPTQTTITAGMGMLPFFPNQHIAGQAGPGHSNTQEKQPATVGMAEGNFSGSQPYLQSFPNLAAGSLLVGHHKQQQSQPKGTEISSGAASKNQTSLLGEPPKEIRLSKNPYLNLASVLPSVCLSSPASKTTLHKTGIASSILDAISQGSESQHALEKCIAYSPPFGDYAQV

SEQ ID NO: 806188 - protein, 676 aa, Homo sapiens
RASSRFLSPLSLEPPRSPQPLGAREDGGGGGRPRRRGGRGPGQRGALHPEEVAARLQRMQRELSNRRKILVKNLPQDSNCQEVHDLLKDYDLKYCYVDRNKRTAFVTLLNGEQAQNAIQMFHQYSFRGKDLIVQLQPTDALLCITNVPISFTSEEFEELVRAYGNIERCFLVYSEVTGHSKGYGFVEYMKKDFAAKARLELLGRQLGASALFAQWMDVNLLASELIHSKCLCIDKLPSDYRDSEELLQIFSSVHKPVFCQLAQDEGSYVGGFAVVEYSTAEQAEEVQQAADGMTIKGSKVQVSFCAPGAPGRSTLAALIAAQRVMHSNQKGLLPEPNPVQIMKSLNNPAMLQVLLQPQLCGRAVKPAVLGTPHSLPHLMNPSISPAFLHLNKAHQNLSHIPLAQQQLMKFENIHTNNKPGLLGEPPAVVLQTALGIGSVLPLKKELGHHHGEAHKTSSLIPTQTTITAGMGMLPFFPNQHIAGQAGPGHSNTQEKQPATVGMAEGNFSGSQPYLQSFPNLAAGSLLVGHHKQQQSQPKGTEISSGAASKNQTSLLGEPPKEIRLSKNPYLNLASVLPSVCLSSPASKTTLHKTGIASSILDAISQGSESQHALEKCIAYSPPFGDYAQVSSLRNEKRGSSYLISAPEGGSVECVDQHSQGTGAYYMETYLKKKRVY

SEQ ID NO: 806189 - protein, 676 aa, Homo sapiens; identical to SEQ ID NO: 806188

SEQ ID NO: 806190 - protein, 629 aa, Homo sapiens; identical to SEQ ID NO: 806187

SEQ ID NO: 806191 - protein, 722 aa, Homo sapiens
MEGSRPRAPSGHLAPSPPAFDGELDLQRYSNGPAVSAGSLGMGAVSWSESRAGERRFPCPVCGKRFRFNSILALHLRAHPGAQAFQCPHCGHRAAQRALLRSHLRTHQPERPRSPAARLLLELEERALLREARLGRARSSGGMQATPATEGLARPQAPSSSAFRCPYCKGKFRTSAERERHLHILHRPWKCGLCSFGSSQEEELLHHSLTAHGAPERPLAATSAAPPPQPQPQPPPQPEPRSVPQPEPEPEPEREATPTPAPAAPEEPPAPPEFRCQVCGQSFTQSWFLKGHMRKHKASFDHACPVCGRCFKEPWFLKNHMKVHASKLGPLRAPGPASGPARAPQPPDLGLLAYEPLGPALLLAPAPTPAERREPPSLLGYLSLRAGEGRPNGEGAEPGPGRSFGGFRPLSSALPARARRHRAEEPEEEEEVVEAEEETWARGRSLGSLASLHPRPGEGPGHSASAAGAQARSTATQEENGLLVGGTRPEGGRGATGKDCPFCGKSFRSAHHLKVHLRVHTGERPYKCPHCDYAGTQSGSLKYHLQRHHREQRSGAGPGPPPEPPPPSQRGSAPQSGAKPSPQPATWVEGASSPRPPSSGAGPGSRRKPASPGRTLRNGRGGEAEPLDLSLRAGPGGEAGPGGALHRCLFCPFATGAPELMALHLQVHHSRRARGRRPPQADASPPYARVPSGETPPSPSQEGEEGSGLSRPGEAGLGGQER

SEQ ID NO: 806192 - protein, 593 aa, Homo sapiens
MEGSRPRAPSGHLAPSPPAFDGELDLQRYSNGPAVSAGSLGMGAVSWSESRAGERRFPCPVCGKRFRFNSILALHLRAHPGAQAFQCPHCGHRAAQRALLRSHLRTHQPERPRSPAARLLLELEERALLREARLGRARSSGGMQATPATEGLARPQAPSSSAFRCPYCKGKFRTSAERERHLHILHRPWKCGLCSFGSSQEEELLHHSLTAHGAPERPLAATSAAPPPQPQPQPPPQPEPRSVPQPEPEPEPEREATPTPAPAAPEEPPAPPEFRCQVCGQSFTQSWFLKGHMRKHKASFDHACPVCGRCFKEPWFLKNHMKVHASKLGPLRAPGPASGPARAPQPPDLGLLAYEPLGPALLLAPAPTPAERREPPSLLGYLSLRAGEGRPNGEGAEPGPGRSFGGFRPLSSALPARARRHRAEEPEEEEEVVEAEEETWARGRSLGSLASLHPRPGEGPGHSASAAGAQARSTATQEENGLLVGGTRPEGGRGATGKDCPFCGKSFRSAHHLKVHLRVHTGERPYKCPHCDYAGTQSGSLKYHLQRRPEEPPAPPEFRCQVCGQSFTQSWFLKGHMRKHKASFDHACPVCGR

SEQ ID NO: 806193 - protein, 361 aa, Homo sapiens
MEGSRPRAPSGHLAPSPPAFDGELDLQRYSNGPAVSAGSLGMGAVSWSESRAGERRFPCPVCGKRFRFNSILALHLRAHPGAQAFQCPHCGHRAAQRALLRSHLRTHQPERPRSPAARLLLELEERALLREARLGRARSSGGMQATPATEGLARPQAPSSSAFRCPYCKGKFRTSAERERHLHILHRPWKCGLCSFGSSQEEELLHHSLTAHGAPERPLAATSAAPPPQPQPQPPPQPEPRSVPQPEPEPEPEREATPTPAPAAPEEPPAPPEFRCQVCGQSFTQSWFLKGHMRKHKASFDHACPVCGRCFKEPWFLKNHMKVHASKLGPLRAPGPASGPARAPQPPDLGLAPSSAPQPPG

SEQ ID NO: 806194 - protein, 655 aa, Homo sapiens
MEGSRPRAPSGHLAPSPPAFDGELDLQRYSNGPAVSAGSLGMGAVSWSESRAGERRFPCPVCGKRFRFNSILALHLRAHPGAQAFQCPHCGHRAAQRALLRSHLRTHQPERPRSPAARLLLELEERALLREARLGRARSSGGMQATPATEGLARPQAPSSSAFRCPYCKGKFRTSAERERHLHILHRPWKCGLCSFGSSQEEELLHHSCQVCGQSFTQSWFLKGHMRKHKASFDHACPVCGRCFKEPWFLKNHMKVHASKLGPLRAPGPASGPARAPQPPDLGLLAYEPLGPALLLAPAPTPAERREPPSLLGYLSLRAGEGRPNGEGAEPGPGRSFGGFRPLSSALPARARRHRAEEPEEEEEVVEAEEETWARGRSLGSLASLHPRPGEGPGHSASAAGAQARSTATQEENGLLVGGTRPEGGRGATGKDCPFCGKSFRSAHHLKVHLRVHTGERPYKCPHCDYAGTQSGSLKYHLQRHHREQRSGAGPGPPPEPPPPSQRGSAPQSGAKPSPQPATWVEGASSPRPPSSGAGPGSRRKPASPGRTLRNGRGGEAEPLDLSLRAGPGGEAGPGGALHRCLFCPFATGAPELMALHLQVHHSRRARGRRPPQADASPPYARVPSGETPPSPSQEGEEGSGLSRPGEAGLGGQER

SEQ ID NO: 806195 - protein, 454 aa, Homo sapiens
MTKREAEELIEIEIDGTEKAECTEESIVEQTYAPAECVSQAIDINEPIGNLKKLLEPRLQCSLDAHEICLQDIQLDPERSLFDQGVKTDGTVQLSVQVISYQGIEPKLNILEIVKPADTVEVVIDPDAHHAESEAHLVEEAQVITLDGTKHITTISDETSEQVTRWAAALEGYRKEQERLGIPYDPIQWSTDQVLHWVVWVMKEFSMTDIDLTTLNISGRELCSLNQEDFFQRVPRGEILWSHLELLRKYVLASQEQQMNEIVTIDQPVQIIPASVQSATPTTIKVINSSAKAAKVQRAPRISGEDRSSPGNRTGNNGQIQLWQFLLELLTDKDARDCISWVGDEGEFKLNQPELVAQKWGQRKNKPTMNYEKLSRALRYYYDGDMICKVQGKRFVYKFVCDLKTLIGYSAAELNRLVTECEQKKLAKMQLHGIAQPVTAVALATASLQTEKDN

SEQ ID NO: 806196 - protein, 454 aa, Homo sapiens; identical to SEQ ID NO: 806195

SEQ ID NO: 806197 - protein, 454 aa, Homo sapiens; identical to SEQ ID NO: 806195

SEQ ID NO: 806198 - protein, 454 aa, Homo sapiens; identical to SEQ ID NO: 806195

SEQ ID NO: 806199 - protein, 96 aa, Homo sapiens
AQPSSAAPLPTRAPQLLRAFEPRWSSETRGGGEGESRLSRSRSRGFMRWPWKQPGRLPSLLVPSPERKVERPAGDQGRTESPGLVNSWAPRSPGIP

SEQ ID NO: 806200 - protein, 97 aa, Homo sapiens
PTFLCSALPTRAPQLLRAFEPRWSSETRGGGEGESRLSRSRSRGFMRWPWKQPGRLPSLLVPSPERKVERPAGDQGRTESPGLVNSWAPRSLFLSLC

SEQ ID NO: 806201 - protein, 96 aa, Homo sapiens; identical to SEQ ID NO: 806199

SEQ ID NO: 806202 - protein, 296 aa, Homo sapiens
MSGALDVLQMKEEDVLKFLAAGTHLGGTNLDFQMEQYICKRKSNGIYIINLKRTWEKLLLAASAIVAIENPAECQCYIPPGILARRAVLKFAAATGATPIAGRFTPGTFTNQIQAAFREPRLLVVTDPRADHQPLTEASYVNLPTIALCNTDSPLRYVDIAIPCNNKGAHSVGLMWWMLAREVLRMRGTISCEHPWEVMPDLYFYRDPEEIEKEEQAAAEKAVTKEEFQGEWTAPAPEFTATQPEVADWSEGVQVPSVPIQQFPTEDWSAQPATEDWSAAPTAQATEWVGAPTDWS

SEQ ID NO: 806203 - protein, 118 aa, Homo sapiens
MDSSDETGSSFMSFWPHLQSDDLARNGITGFPYFSFIILNESDQILELDGTLVKIWLLVPSHQPATHFKFEETKTHGPYVITGDYPRSLWQKSVSSLPASPPCLWYFLPTLGCFCDHT

SEQ ID NO: 806204 - protein, 118 aa, Homo sapiens; identical to SEQ ID NO: 806203

SEQ ID NO: 806205 - protein, 118 aa, Homo sapiens; identical to SEQ ID NO: 806203

SEQ ID NO: 806206 - protein, 223 aa, Homo sapiens
MTWRHHVRLLFTVSLALQIINLGNSYQREKHNGGREEVTKVATQKHRQSPLNWTSSHFGEVTGSAEGWGPEEPLPYSRAFGEGASARPRCCRNGGTCVLGSFCVCPAHFTGRYCEHDQRRSECGALEHGAWTLRACHLCRCIFGALHCLPLQTPDRCDPKDFLASHAHGPSAGGAPSLLLLLPCALLHRLLRPDAPAHPRSLVPSVLQRERRPCGRPGLGHRL

SEQ ID NO: 806207 - protein, 223 aa, Homo sapiens; identical to SEQ ID NO: 806206

SEQ ID NO: 806208 - protein, 194 aa, Homo sapiens
MTWRHHVRLLFTVSLALQIINLGNSYQREKHNGGREEVTKVATQKHRQSPLNWTSSHFGEVTGSAEGWGPEEPLPYSRAFGEGASARPRCCRNGGTCVLGSFCVCPAHFTGRYCEHDQRRSECGALEHGAWTLRACHLCRCIFGALHCLPLQTPDRCGKRPCDSVPSSPPHAVAPSLRLTLHTDPQCIFQCQAT

SEQ ID NO: 806209 - protein, 261 aa, Homo sapiens
MVVLSVPAEVTVILLDIEGTTTPIAFVKDILFPYIEENVKEYLQTHWEEEECQQDVSLLRKQAEEDAHLDGAVPIPAASGNGVDDLQQMIQAVVDNVCWQMSLDRKTTALKQLQGHMWRAAFTAGRMKAEFFADVVPAVRKWREAGMKVYIYSSGSVEAQKLLFGHSTEGDILELVDGHFDTKIGHKVESESYRKIADSIGCSTNNILFLTDVTREASAAEEADVHVAVVVRPGNAGLTDDEKTYYSLITSFSELYLPSST

SEQ ID NO: 806210 - protein, 349 aa, Homo sapiens
EIKARYEAWWCSCPVLLTSSGLLGGRLFQFQVCRSVLSPRAAGCTWSLAPRSRGAAGSPRRYRGPQPQPAPPSALPNSRPSPVASGREMVVLSVPAEVTVILLDIEGTTTPIAFVKDILFPYIEENVKEYLQTHWEEEECQQDVSLLRKQAEEDAHLDGAVPIPAASGNGVDDLQQMIQAVVDNVCWQMSLDRKTTALKQLQGHMWRAAFTAGRMKAEFFADVVPAVRKWREAGMKVYIYSSGSVEAQKLLFGHSTEGDILELVDGHFDTKIGHKVESESYRKIADSIGCSTNNILFLTDVTREASAAEEADVHVAVVVRPGNAGLTDDEKTYYSLITSFSELYLPSST

SEQ ID NO: 806211 - protein, 261 aa, Homo sapiens; identical to SEQ ID NO: 806209

SEQ ID NO: 806212 - protein, 115 aa, Homo sapiens
MKVYIYSSGSVEAQKLLFGHSTEGDILELVDGHFDTKIGHKVESESYRKIADSIGCSTNNILFLTDVTREASAAEEADVHVAVVVRPGNAGLTDDEKTYYSLITSFSELYLPSST

SEQ ID NO: 806213 - protein, 115 aa, Homo sapiens; identical to SEQ ID NO: 806212

SEQ ID NO: 806214 - protein, 115 aa, Homo sapiens; identical to SEQ ID NO: 806212

SEQ ID NO: 806215 - protein, 261 aa, Homo sapiens; identical to SEQ ID NO: 806209

SEQ ID NO: 806216 - protein, 214 aa, Homo sapiens
MVVLSVPAEVTVILLDIEGTTTPIAFVKDILFPYIEENVKEYLQTHWEEEECQQDVSLLRKQAEEDAHLDGAVPIPAASGNGVDDLQQMIQAVVDNVCWQMSLDRKTTALKQLQGHMWRAAFTAGRMKAEFFADVVPAVRKWREAGMKVYIYSSGSVEAQKLLFGHSTEGDILEVGYLVYFVVLTLSKHKIMNLNGKLIGTNRMLFFFWLFKIR

SEQ ID NO: 806217 - protein, 173 aa, Homo sapiens
MIQAVVDNVCWQMSLDRKTTALKQLQGHMWRAAFTAGRMKAEFFADVVPAVRKWREAGMKVYIYSSGSVEAQKLLFGHSTEGDILELVDGHFDTKIGHKVESESYRKIADSIGCSTNNILFLTDVTREASAAEEADVHVAVVVRPGNAGLTDDEKTYYSLITSFSELYLPSST

SEQ ID NO: 806218 - protein, 233 aa, Homo sapiens
MVVLSVPAEVTVILLDIEDILFPYIEDVSLLRKQAEEDAHLDGAVPIPAASGNGVDDLQQMIQAVVDNVCWQMSLDRKTTALKQLQGHMWRAAFTAGRMKAEFFADVVPAVRKWREAGMKVYIYSSGSVEAQKLLFGHSTEGDILELVDGHFDTKIGHKVESESYRKIADSIGCSTNNILFLTDVTREASAAEEADVHVAVVVRPGNAGLTDDEKTYYSLITSFSELYLPSST

SEQ ID NO: 806219 - protein, 115 aa, Homo sapiens; identical to SEQ ID NO: 806212

SEQ ID NO: 806220 - protein, 217 aa, Homo sapiens
MVVLSVPAEVTVILLDIEGTTTPIAFVKDILFPYIEENVKEYLQTHWEEEECQQDVSLLRKQAEEDAHLDGAVPIPAASGNGVDDLQQMIQAVVDNVCWQMSLDRKTTALKQLQGHMWRAAFTAGRMKAEFFADVVPAVRKWREAGMKVYIYSSGSVEAQKLLFGHSTEGDILELVDGHFDTKIGHKVESESYRKIADSIGCSTNNILFLTDVTRGE

SEQ ID NO: 806221 - protein, 105 aa, Homo sapiens
MVVLSVPAEVTVILLDIEGTTTPIAFVKDILFPYIEENVKEYLQTHWEEEECQQDVSLLRKQAEEDAHLDGAVPIPAASGNGVDDLQQMIQAVVDNVCSLGTRRV

SEQ ID NO: 806222 - protein, 105 aa, Homo sapiens
ELALARPWGKKSNWRNSWELGRWALSIGGLEPSDFYLKFLSLSCVGEMVTLPSGTWAFSCPYLALVDGGMLGSAREDAHETASRMLPRLALKAWPQAIFLPQPPK

SEQ ID NO: 806223 - protein, 124 aa, Homo sapiens
ELALARPWGKKSNWRNSWELGRWALSIGGLEPSDFYLKFLSLSCVGEMVTLPSGTWAFSCPYLALVDGGMLGSAREDAHETGTCCVAQAGLELLVLSNHTALATQSTGITGVNHHTQLLKPQYF

SEQ ID NO: 806224 - protein, 66 aa, Homo sapiens
ELALARPWGKKSNWRNSWELGRWALSIGGLEPSDFYLKFLSLSCVGEMSPLTMSGWRRLRCHEMAI

SEQ ID NO: 806225 - protein, 138 aa, Homo sapiens
LSQCYDSMLQTRKLSLSNPDILEQNNPLRDLVLKTLLEMDQTLPRPLSRPNTGITQESFVLTSHRRSLVKISSLAKSSWFHSSRSFSCPFQLSLSCSLVLKAVRGQEKTQLTKGSEIRVRTIQCGQLSELFITDRICS

SEQ ID NO: 806226 - protein, 294 aa, Homo sapiens
MAGILASGLGVLAHLERLETQVSRSRKQSEELQSVQAQEGALGTKIHKLRRLRDELRAVVRHRRASVKACIANVEPNQTVEINEQEALEEKLENVKAILQAYHFTGLSGKLTSRGVCVCISTAFEGNLLDSYFVDLVIQKPLRIHHHSVPVFIPLEEIAAKYLQTNIQHFLFSLCEYLNAYSGRKYQADRLQSDFAALLTGPLQRNPLCNLLSFTYKLDPGGQSFPFCARLLYKDLTATLPTDVTVTCQGVEVLSTSWEEQRASHETLFCTKPLHQVFASFTRKGEKLDMSLVS

SEQ ID NO: 806227 - protein, 120 aa, Homo sapiens [sequence omitted]

SEQ ID NO: 806228 - protein, 300 aa, Homo sapiens
MEQANPLRPDGESKGGVLAHLERLETQVSRSRKQSEELQSVQAQEGALGTKIHKLRRLRDELRAVVRHRRASVKACIANVEPNQTVEINEQEALEEKLENVKAILQAYHFTGLSGKLTSRGVCVCISTAFEGNLLDSYFVDLVIQKPLRIHHHSVPVFIPLEEIAAKYLQTNIQHFLFSLCEYLNAYSGRKYQADRLQSDFAALLTGPLQRNPLCNLLSFTYKLDPGGQSFPFCARLLYKDLTATLPTDVTVTCQGVEVLSTSWEEQRASHETLFCTKPLHQVFASFTRKGEKLDMSLVS

SEQ ID NO: 806229 - protein, 165 aa, Homo sapiens
MEQANPLRPDGESKGGVLAHLERLETQVSRSRKQSEELQSVQAQEGALGTKIHKLRRLRDELRAVVRHRRASVKACIANVEPNQTVEINEQEALEEKLENVKAILQAYHFTETTPDTSPFSPSLHSPGRDSCKIFTDQHPALPVQSLRVPECLLWEEVPGRPASE

SEQ ID NO: 806230 - protein, 254 aa, Homo sapiens
MAGILASGLGVLAHLERLETQVSRSRKQSEELQSVQAQEGALGTKIHKLRRLRDELRAVVRHRRASVKACIANVEPNQTVEINEQEALEEKLENVKAILQAYHFTGLSGKLTSRGVCVCISTAFEGNLLDSYFVDLVIQKPLRIHHHSVPVFIPLEEIAAKYLQTNIQHFLFSLCEYLNAYSGRKYQADRLQSDFAALLTGPLQRNPLCNLLSFTYKLDPGGQSFPFCARLLYKDLTATLPTLVLPWHRLRECK

SEQ ID NO: 806231 - protein, 300 aa, Homo sapiens; identical to SEQ ID NO: 806228

SEQ ID NO: 806232 - protein, 300 aa, Homo sapiens; identical to SEQ ID NO: 806228

SEQ ID NO: 806233 - protein, 294 aa, Homo sapiens; identical to SEQ ID NO: 806226

SEQ ID NO: 806234 - protein, 126 aa, Homo sapiens
GVFLFASGLSGKLTSRGVCVCISTAFEGNLLDSYFVDLVIQKPLRIHHHSVPVFIPLEEIAAKYLQTNIQHFLFSLCEYLNAYSGRKYQADRLQVSLWDVICLIRGPKINLKGGCFLYFQCFLTVS

SEQ ID NO: 806235 - protein, 102 aa, Homo sapiens
MLYRLILRPTPCGRQMRKQAKKGHLQPTDLCSWKPSLSHLYPWSSLRLGLCKVSDSLPAPNTGFFFFSLRHAVSQLPRLKCSGEIMRHCRLDLPGSRDRPPK

SEQ ID NO: 806236 - protein, 122 aa, Homo sapiens
MLPRLFLNSWAQADDPLTLTSRSAGTYSCGFRKESAFMKGMAPQNHSPVGGIDFEGRLILGAKPPLFKVPSQPETLGETWVIAKMAGTYGGSRNTLPRSPGGNFRSRVPSPGRSRKDCPDSF

SEQ ID NO: 806237 - protein, 109 aa, Homo sapiens
MDKPCGCPPGVCDHGTGDRRDPWYSTVGLLPPVRAMSQRNLNAKTEQGPTGVTMTSNPITWGQIKKTTQEAEKLLERQGQAKTPDSMFLAMLAVVSCASIGSGEPPTGN

SEQ ID NO: 806238 - protein, 109 aa, Homo sapiens; identical to SEQ ID NO: 806237

SEQ ID NO: 806239 - protein, 74 aa, Homo sapiens
MSQRNLNAKTEQGPTGVTMTSNPITWGQIKKTTQEAEKLLERQGQAKTPDSMFLAMLAVVSCASIGSGEPPTGN

SEQ ID NO: 806240 - protein, 106 aa, Homo sapiens
KTQDKEIKGSWAWGTTTTNARRPVVAPNVWLRSYLLDTKQKGQGKECESSPMIGKVTWVMCPLVRGPFPACVDATCMCRCDLRCVSIPHTPYHHCLFALPPASGNH

SEQ ID NO: 806241 - protein, 44 aa, Homo sapiens
GDVLSKNIRTDDITSGYMTDGGLGLYTRRLNRLPDGMAVVRETL

SEQ ID NO: 806242 - protein, 68 aa, Homo sapiens
  misc_feature (5)..(6): Xaa can be any naturally occurring amino acid
GGEGXXGRRRAEGEYRGEGFRKNSTFAEGTHSTEEDINKQINDKERVAAAMENPNLREIVEQCVLEPD

SEQ ID NO: 806243 - protein, 160 aa, Homo sapiens
MQRVSGLLSWTLSRVLWLSGLSEPGAARQPRIMEEKALEVYDLIRTIRDPEKPNTLEELEVVSESCVEVQEINEEEYLVIIRFTPTVPHCSLATLIGLCLRVKLQRCLPFKHKLEIYISEGTHSTEEDINKQINDKERVAAAMENPNLREIVEQCVLEPD

SEQ ID NO: 806244 - protein, 181 aa, Homo sapiens
AVVSTQRGHYGRGRQGWLSVKMQRVSGLLSWTLSRVLWLSGLSEPGAARQPRIMEEKALEVYDLIRTIRDPEKPNTLEELEVVSESCVEVQEINEEEYLVIIRFTPTVPHCSLATLIGLCLRVKLQRCLPFKHKLEIYISEGTHSTEEDINKQINDKERVAAAMENPNLREIVEQCVLEPD

SEQ ID NO: 806245 - protein, 102 aa, Homo sapiens
MQRVSGLLSWTLSRVLWLSGLSEPGAARQPRIMEEKALEVYDLIRTIRDPEKPNTLEELEVVSESCVEVQEINEEEYLVIIRFTPTVPHCSLATLIVGNLHF

SEQ ID NO: 806246 - protein, 160 aa, Homo sapiens; identical to SEQ ID NO: 806243

SEQ ID NO: 806247 - protein, 103 aa, Homo sapiens
MQRVSGLLSWTLSRVLWLSGLSEPGAARQPRIMEEKALEVYDLIRTIRDPEKPNTLEELEVVSESCVEVQEINEENFWGINKGYRKQPPFCFFGGIFYWAFCF

SEQ ID NO: 806248 - protein, 160 aa, Homo sapiens; identical to SEQ ID NO: 806243

SEQ ID NO: 806249 - protein, 160 aa, Homo sapiens; identical to SEQ ID NO: 806243

SEQ ID NO: 806250 - protein, 134 aa, Homo sapiens
MQRPRIMEEKALEVYDLIRTIRDPEKPNTLEELEVVSESCVEVQEINEEEYLVIIRFTPTVPHCSLATLIGLCLRVKLQRCLPFKHKLEIYISEGTHSTEEDINKQINDKERVAAAMENPNLREIVEQCVLEPD

SEQ ID NO: 806251 - protein, 102 aa, Homo sapiens; identical to SEQ ID NO: 806245

SEQ ID NO: 806252 - protein, 275 aa, Homo sapiens
EGKPSLSTTAREAPCCGHGWVTHRSDAWSPGAWTPAPRLPPAPPARGPASCASSAGHRRSWEAVSAVSLRHWQKTEAQRGRVTCLDHPRMSMPEHQAAPAAPPGLLQPHRPPTWNMAGVDCRDGAGAGHSPRSTCLAPASADGSPTAPSHVAKRVPTQPWLQLLQGWPETSQRRCCARSPGTPTWPDPADAAGPQPSQVRCRVPPPCAECPVTRTMPSSHVGRLWCPWGGDPDPRWALSISPVRTRLAALGIKTYRPTWEVPSPWSFHPSQLPPR

SEQ ID NO: 806253 - protein, 184 aa, Homo sapiens
MPEHQAAPAAPPGLLQPHRPPTWNMAGVDCRDGAGAGHSPRSTCLAPASADGSPTAPSHVAKRVPTQPWLQLLQGWPETSQRRCCARSPGTPTWPDPADAAGPQPSQVRCRVPPPCAECPVTRTMPSSHVGRLWCPWGGDPDPRWALSISPVRTRLAALGIKTYRPTWEVPSPWSFHPSQLPPR

SEQ ID NO: 806254 - protein, 48 aa, Homo sapiens
MAKPDASPDAVPQDGALWSAGYFCAQASGLSLLDAKLGKHSLISIHVT

SEQ ID NO: 806255 - protein, 92 aa, Homo sapiens
DCVRGGGMERSGKGRNLDLSSRPPRRRLPRAGPSVSETSSPSFTRLTWRVGRGRQPSAAEPPEGMSSALRLWPGLWSLQAVEGMLRPVPRGA

SEQ ID NO: 806256 - protein, 92 aa, Homo sapiens; identical to SEQ ID NO: 806255

SEQ ID NO: 806257 - protein, 171 aa, Homo sapiens
MILPTKAMATQELTVKRKLSGNTLQVQASSPVALGVRIPTVALHMMELFDTTVEQLYSIFTVKELVQKFSKSTAVLETEKGGKFQMFDGNITGEYLGLLTNKKIIMKWRCGNWPEEHYAMVALNFVPTLGQTELQLKEFLSICKEENMKFCWQKQHFEEIKGSLQLTPLNG

SEQ ID NO: 806258 - protein, 146 aa, Homo sapiens
MILPTKAMATQELTVKRKLSGNTLQVQASSPVALGVRIPTVALHMMELFDTTVEQLYSIFTVKEEERVCVLFSLTNKKIIMKWRCGNWPEEHYAMVALNFVPTLGQTELQLKEFLSICKEENMKFCWQKQHFEEIKGSLQLTPLNG

SEQ ID NO: 806259 - protein, 137 aa, Homo sapiens
MILPTKAMATQELTVKRKLSGNTLQVQASSPVALGVRIPTVALHMMELFDTTVEQLYSIFTVKELTNKKIIMKWRCGNWPEEHYAMVALNFVPTLGQTELQLKEFLSICKEENMKFCWQKQHFEEIKGSLQLTPLNG

SEQ ID NO: 806260 - protein, 92 aa, Homo sapiens; identical to SEQ ID NO: 806255

SEQ ID NO: 806261 - protein, 104 aa, Homo sapiens [sequence omitted]

SEQ ID NO: 806262 - protein, 946 aa, Homo sapiens
TERSLGGTQGPGQPCSCPGAMASAVRGSRPWPRLGLQLQFAALLLGTLSPQVHTLRPENLLLVSTLDGSLHALSKQTGDLKWTLRDDPVIEGPMYVTEMAFLSDPADGSLYILGTQKQLGLMKLPFTIPELVHASPCRSSDGVFYTGRKQDAWFVVDPESGETQMTLTTEGPSTPRLYIGRTQYTVTMHDPRAPALRWNTTYRRYSAPPMDGSPGKYMSHLASCGMGLLLTVDPGSGAVLWTQDLGMPVMGVYTWHQDGLRQLPHLTLARDTLHFLALRWGHIRLPASGPQDTATLFSALDTQLLMTLYVGKDETGFYVSKALVHTGVALVPRGLTLAPADGPTTDEVTLQVSGEREGSPSTAVRYPSGSVALPSQWLLIGHHELPPVLHTTMLRVHPTLGSGTAETRPPENTQAPAFFLELLSLSREKLWDSELHPEEKTPDSYLGLGPQDLLAASLTAVLLGGWILFVMRQQQPQVVEKQQETPLAPADFAHISQDAQSLHSGATRRSQKRLQSPSKQAQPLDDPEAEQLTVVGKISFNPKDVLGRGAGGTFVFRGQFEGRAVAVKRLLRECFGLVRREVQLLQESDRHPNVLRYFCTERGPQFHYIALELCRASLQEYVENPDLDRGGLEPEVVLQQLMSGLAHLHSLHIVHRDLKPGNILITGPDSQGLGRVVLSDFGLCKKLPAGRCSFSLHSGIPGTEGWMAPELLQLLPPDSPTSAVDIFSAGCVFYYVLSGGSHPFGDSLYRQANILTGAPCLAHLEEEVHDKVVARDLVGAMLSPLPQPRPSAPQVLAHPFFWSRAKQLQFFQDVSDWLEKESEQEPLVRALEAGGCAVVRDNWHEHISMPLQTDLRKFRSYKGTSVRDLLRAVRNKKHHYRELPVEVRQALGQVPDGFVQYFTNRFPRLLLHTHRAMRSCASESLFLPYYPPDSEARGPCPGATGR

SEQ ID NO: 806263 - protein, 782 aa, Homo sapiens
MTLTTEGPSTPRLYIGRTQYTVTMHDPRAPALRWNTTYRRYSAPPMDGSPGKYMSHLASCGMGLLLTVDPGSGAVLWTQDLGMPVMGVYTWHQDGLRQLPHLTLARDTLHFLALRWGHIRLPASGPQDTATLFSALDTQLLMTLYVGKDETGFYVSKALVHTGVALVPRGLTLAPADGPTTDEVTLQVSGEREGSPSTAVRYPSGSVALPSQWLLIGHHELPPVLHTTMLRVHPTLGSGTAETRPPENTQAPAFFLELLSLSREKLWDSELHPEEKTPDSYLGLGPQDLLAASLTAVLLGGWILFVMRQQQPQVVEKQQETPLAPADFAHISQDAQSLHSGATRRSQKRLQSPSKQAQPLDDPEAEQLTVVGKISFNPKDVLGRGAGGTFVFRGQFEGRAVAVKRLLRECFGLVRREVQLLQESDRHPNVLRYFCTERGPQFHYIALELCRASLQEYVENPDLDRGGLEPEVVLQQLMSGLAHLHSLHIVHRDLKPGNILITGPDSQGLGRVVLSDFGLCKKLPAGRCSFSLHSGIPGTEGWMAPELLQLLPPDSPTSAVDIFSAGCVFYYVLSGGSHPFGDSLYRQANILTGAPCLAHLEEEVHDKVVARDLVGAMLSPLPQPRPSAPQVLAHPFFWSRAKQLQFFQDVSDWLEKESEQEPLVRALEAGGCAVVRDNWHEHISMPLQTDLRKFRSYKGTSVRDLLRAVRNKKHHYRELPVEVRQALGQVPDGFVQYFTNRFPRLLLHTHRAMRSCASESLFLPYYPPDSEARGPCPGATGR

SEQ ID NO: 806264 - protein, 793 aa, Homo sapiens
DGWACLRDSEASSGSSGCPRVQELGILPHHKENPPTQEDSSEASWNTTYRRYSAPPMDGSPGKYMSHLASCGMGLLLTVDPGSGAVLWTQDLGMPVMGVYTWHQDGLRQLPHLTLARDTLHFLALRWGHIRLPASGPQDTATLFSALDTQLLMTLYVGKDETGFYVSKALVHTGVALVPRGLTLAPADGPTTDEVTLQVSGEREGSPSTAVRYPSGSVALPSQWLLIGHHELPPVLHTTMLRVHPTLGSGTAETRPPENTQAPAFFLELLSLSREKLWDSELHPEEKTPDSYLGLGPQDLLAASLTAVLLGGWILFVMRQQQPQVVEKQQETPLAPADFAHISQDAQSLHSGATRRSQKRLQSPSKQAQPLDDPEAEQLTVVGKISFNPKDVLGRGAGGTFVFRGQFEGRAVAVKRLLRECFGLVRREVQLLQESDRHPNVLRYFCTERGPQFHYIALELCRASLQEYVENPDLDRGGLEPEVVLQQLMSGLAHLHSLHIVHRDLKPGNILITGPDSQGLGRVVLSDFGLCKKLPAGRCSFSLHSGIPGTEGWMAPELLQLLPPDSPTSAVDIFSAGCVFYYVLSGGSHPFGDSLYRQANILTGAPCLAHLEEEVHDKVVARDLVGAMLSPLPQPRPSAPQVLAHPFFWSRAKQLQFFQDVSDWLEKESEQEPLVRALEAGGCAVVRDNWHEHISMPLQTDLRKFRSYKGTSVRDLLRAVRNKKHHYRELPVEVRQALGQVPDGFVQYFTNRFPRLLLHTHRAMRSCASESLFLPYYPPDSEARGPCPGATGR

SEQ ID NO: 806265 - protein, 749 aa, Homo sapiens
MTLTTEGPSTPRLYIGRTQYTVTMHDPRAPALRWNTTYRRYSAPPMDGSPGKYMSHLASCGMGLLLTVDPGSGAVLWTQDLGMPVMGVYTWHQDGLRQLPHLTLARDTLHFLALRWGHIRLPASGPQDTATLFSALDTQLLMTLYVGKDETGFYVSKALVHTGVALVPRGLTLAPADGPTTDEVTLQVSGEREGSPSTAVRYPSGSVALPSQWLLIGHHELPPVLHTTMLRVHPTLGSGTAETRPPENTQAPAFFLELLSLSREKLWDSELHPEEKTPDSYLGLGPQDLLAASLTAVLLGGWILFVMRQQQPQVVEKQQETPLAPADFAHISQDAQSLHSGATRRSQKRLQSPSKQAQPLDDPEAEQLTVVGKISFNPKDVLGRGAGGTFVFRGQFEGRAVAVKRLLRECFGLVRREVQLLQESDRHPNVLRYFCTERGPQFHYIALELCRASLQEVHRDLKPGNILITGPDSQGLGRVVLSDFGLCKKLPAGRCSFSLHSGIPGTEGWMAPELLQLLPPDSPTSAVDIFSAGCVFYYVLSGGSHPFGDSLYRQANILTGAPCLAHLEEEVHDKVVARDLVGAMLSPLPQPRPSAPQVLAHPFFWSRAKQLQFFQDVSDWLEKESEQEPLVRALEAGGCAVVRDNWHEHISMPLQTDLRKFRSYKGTSVRDLLRAVRNKKHHYRELPVEVRQALGQVPDGFVQYFTNRFPRLLLHTHRAMRSCASESLFLPYYPPDSEARGPCPGATGR

SEQ ID NO: 806266 - protein, 328 aa, Homo sapiens
MTLTTEGPSTPRLYIGRTQYTVTMHDPRAPALRWNTTYRRYSAPPMDGSPGKYMSHLASCGMGLLLTVDPGSGAVLWTQDLGMPVMGVYTWHQDGLRQLPHLTLARDTLHFLALRWGHIRLPASGPQDTATLFSALDTQLLMTLYVGKDETGFYVSKALVHTGVALVPRGLTLAPADGPTTDEVTLQVSGEREGSPSTAVRYPSGSVALPSQWLLIGHHELPPVLHTTMLRVHPTLGSGTAETRPPENTQAPAFFLELLSLSREKLWDSELHPEEKTPDSYLGLGPQDLLAASLTAVLLGGWILFVMRQQQPQVVEKQQETPLAPAWG

SEQ ID NO: 806267 - protein, 352 aa, Homo sapiens
MTLTTEGPSTPRLYIGRTQYTVTMHDPRAPALRWNTTYRRYSAPPMDGSPGKYMSHLASCGMGLLLTVDPGSGAVLWTQDLGMPVMGVYTWHQDGLRQLPHLTLARDTLHFLALRWGHIRLPASGPQDTATLFSALDTQLLMTLYVGKDETGFYVSKALVHTGVALVPRGLTLAPADGPTTDEVTLQVSGEREGSPSTAVRYPSGSVALPSQWLLIGHHELPPVLHTTMLRVHPTLGSGTAETRPPENTQAPAFFLELLSLSREKLWDSELHPEEKTPDSYLGLGPQDLLAASLTAVLLGGWILFVMRQQQPQVVEKQQETPLAPALRKYKKKNIHICLMCIKPRKGQFRIQ

SEQ ID NO: 806268 - protein, 121 aa, Homo sapiens
LRSCSVSSCSLVRPSQSQILGPSRGRAWPGQSSLRLSCYSNSRRWWRSSRRPPWHLQTLLTSPRMPSPCTRGPPGGARRGFRVPQSKPSHSTTLKVSLCEQDRAVRNREKPGADLAAKLVY

SEQ ID NO: 806269 - protein, 104 aa, Homo sapiens
RHPYEPHPASIPALAQCLEGPPSLAKRCPHTPPPPEWQQPCLCAVTAYQALCKSISLFHPHGNPLREPPFNGSFAGGRERQRRAPSTVRTWRRGMEGGAGAGKH

SEQ ID NO: 806270 - protein, 222 aa, Homo sapiens [sequence omitted]

SEQ ID NO: 806271 - protein, 327 aa, Homo sapiens
AAAPFGSASLAPAGLFPRRGLWFVESNFPATSARLAGAPAWAPARTAGVVTMAASAGGPGSWSENILEYFLRNSQITAEDGAEITWYHAANHKAQTNEALKSTAHMIEADVLLPSDGSEHSQPIMAHPPETNSDNTLQEWLTEVMKSNKGIKLDFKSLAVVEPSMMLLENVKRHLKRPVWINADILPGPNGNSKVIDAKPFLDTVTSFFPDVTFSLGWTTGWHPEKVNEGYSWTMVKEMEYICNELSQPVTFPVRAALVRQSCSQLLWLLKKSNRYSLTIWTGKNDNYSVEDLLYIRDHFDKKQVFYDILEPQNHEFKQAIGIKVNL

SEQ ID NO: 806272 - protein, 116 aa, Homo sapiens
PVGVRHAAVRTRPGARARARVEAGLGVVAHELVLQERAGHGVAGPGHDLRARRVVGRGGQAVHVTAGVDPAGLFQKPLGKSRARSNHERLAFTRVLEPEVCCWKPPKYLVSIVSPV

SEQ ID NO: 806273 - protein, 341 aa, Homo sapiens
MVPAAGALLWVLLLNLGPRAAGAQGLTQTPTEMQRVSLRFGGPMTRSYRSTARTGLPRKTRIILEDENDAMADADRLAGPAAAELLAATVSTGFSRSSAINEEDGSSEEGVVINAGKDSTSRELPSATPNTAGSSSTRFIANSQEPEIRLTSSLPRSPGRSTEDLPGSQATLSQWSTPGSTPSRWPSPSPTAMPSPEDLRLVLMPWGPWHCHCKSGTMSRSRSGKLHGLSGRLRVGALSQLRTEHKPCTYQQCPCNRLREECPLDTSLCTDTNCASQSTTSTRTTTTPFPTIHLRSSPSLPPASPCPALAFWKRVRIGLEDIWNSLSSVFTEMQPIDRNQR

SEQ ID NO: 806274 - protein, 341 aa, Homo sapiens; identical to SEQ ID NO: 806273

SEQ ID NO: 806275 - protein, 341 aa, Homo sapiens; identical to SEQ ID NO: 806273

SEQ ID NO: 806276 - protein, 170 aa, Homo sapiens
MVPAAGALLWVLLLNLGPRAAGAQGLTQTPTEMQRVSLRFGGPMTRSYRSTARTGLPRKTRIILEDENDAMADADRLAGPAAAELLAATVSTGFSRSSAINEEDGSSEEGVVINAGKDSTSRELPSATPNTAGSSSTRFIANSQEPEIRLTSSLPRSPGRSTEDLSHAIS

SEQ ID NO: 806277 - protein, 309 aa, Homo sapiens [sequence omitted]

SEQ ID NO: 806278 - protein, 220 aa, Homo sapiens
MVPAAGALLWVLLLNLGPRAAGAQGLTQTPTEMQRVSLRFGGPMTRSYRSTARTGLPRKTRIILEDENDAMADADRLAGPAAAELLAATVSTGFSRSSAINEEDGSSEEGVVINAGKDSTSRELPSATPNTAGSSSTRFIANSQEPEIRLTSSLPRSPGRSTEDLPGSQATLSQWSTPGSTPSRWPSPSPTQPWLFGNGSGLAWRIFGIASLQCSQRCNQ

SEQ ID NO: 806279 - protein, 119 aa, Homo sapiens
SRACAGSAPTFLSGAAPGPCILGPACSPSAPSALRPVAQHPCSSRLPTMPAGVPMSTYLKMFAASLLAMCAGAEVVHRYYRPDLTIPEIPPKRGELKTELLGLKERKHKPQVSQQEELK

SEQ ID NO: 806280 - protein, 165 aa, Homo sapiens
MPAGVPMSTYLKMFAASLLAMCAGAEVVHRYYRPDLVLNSGLEHNVGSSHFCLDSAWTDEKQVEKSEVDFSKSHSLVRRFEDLKPKLSVCKTGSQVFRSENWKVWAESSRGDHDDCLDLCSVLCWGELLQTIPEIPPKRGELKTELLGLKERKHKPQVSQQEELK

SEQ ID NO: 806281 - protein, 165 aa, Homo sapiens; identical to SEQ ID NO: 806280

SEQ ID NO: 806282 - protein, 176 aa, Homo sapiens
MDAVDATMEKLRAQCLSRGASGIQGLARFFRQLDRDGSRSLDADEFRQGLAKLGLVLDQAEAEGVCRKWDRNGSGTLDLEEFLRALRPPMSQAREAVIAAAFAKLDRSGDGVVTVDDLRGVYSGRAHPKVRSGEWTEDEVLRRFLDNFDSSEKDGQVTLAEFQGLLQRRECLHEHG

SEQ ID NO: 806283 - protein, 176 aa, Homo sapiens; identical to SEQ ID NO: 806282

SEQ ID NO: 806284 - protein, 262 aa, Homo sapiens
MPPWRNSGHSACPAGPRASRAWPGELSPLTFLTPAPETTVPTVSPASRFFRQLDRDGSRSLDADEFRQGLAKLGLVLDQAEAEGVCRKWDRNGSGTLDLEEFLRALRVSPHLTVKACALGMGRQRMLRCGDGDSSLRAAVKRRLLGHTAPVLCTASWGFGCATHHPSHHLLSQPPMSQAREAVIAAAFAKLDRSGDGVVTVDDLRGVYSGRAHPKVRSGEWTEDEVLRRFLDNFDSSEKDGQVTLAEFQGLLQRRECLHEHG

SEQ ID NO: 806285 - protein, 176 aa, Homo sapiens; identical to SEQ ID NO: 806282

SEQ ID NO: 806286 - protein, 149 aa, Homo sapiens
MDAVDATMEKLRAQCLSRGASGIQGLARFFRQLDRDGSRSLDADEFRQGLAKLGLVLDQAEAEGVCRKWDRNGSGTLDLEEFLRALRPPMSQAREAVIAAAFAKLDRSGDGVVTVDDLRGVYSGRAHPKVTLAEFQGLLQRRECLHEHG

SEQ ID NO: 806287 - protein, 149 aa, Homo sapiens
MFFRQLDRDGSRSLDADEFRQGLAKLGLVLDQAEAEGVCRKWDRNGSGTLDLEEFLRALRPPMSQAREAVIAAAFAKLDRSGDGVVTVDDLRGVYSGRAHPKVRSGEWTEDEVLRRFLDNFDSSEKDGQVTLAEFQGLLQRRECLHEHG

SEQ ID NO: 806288 - protein, 598 aa, Homo sapiens
HTNCSKAWSGSSKAERTASGQRSRAEEEAVAAGGGTPRPLSPRALLWGVQLSTLGAKQAARRNQTVLLVVASPHSLEMANKGNKKRRQFSLEEKMKVVGAVDSGKRKGDVAKEFGITPSTLSTFLKDRTKFEEKVREASVGPQRKRMRSALYDDIDKAVFAWFQEIHAKNILVTGSVIRKKALNLANMLGYDNFQASVGWLNRFRDRHGIALKAVCREDSDRLMNGLGIDKINEWHAGEIIKLIADYSPDDIFNADETGVFFQLLPQHTLAAKGDHCRGGKKAKQRLTALFCCNASGTEKMRPLIVGRSASPHCLKNIHSLPCDYRANQWAWMTRDLFNEWLMQVDARMKRAERRILLLIDNCSAHNMLPHLERIQVGYLPSNCTAVLQPLNLGIIHTMKVLYQSHLLKQILLKLNSSEDQEEVDIKQAIDMIAAAWWSVKPSTVVKCWQKAGIVPMEFAECDTESAASEPDIAIEKLWHTVAIATCVPNEVNFQDFVTADDDLIISQDTDIIQDMVAGENTSEAGSEDEGEVSLPEQPKVTITEAISSVQKLRQFLSTCVDIPDAIFGQLNGIDEYLMKRVTQTLIDSKITDFLQTK

SEQ ID NO: 806289 - protein, 521 aa, Homo sapiens
MANKGNKKRRQFSLEEKMKVVGAVDSGKRKGDVAKEFGITPSTLSTFLKDRTKFEEKVREASVGPQRKRMRSALYDDIDKAVFAWFQEIHAKNILVTGSVIRKKALNLANMLGYDNFQASVGWLNRFRDRHGIALKAVCREDSDRLMNGLGIDKINEWHAGEIIKLIADYSPDDIFNADETGVFFQLLPQHTLAAKGDHCRGGKKAKQRLTALFCCNASGTEKMRPLIVGRSASPHCLKNIHSLPCDYRANQWAWMTRDLFNEWLMQVDARMKRAERRILLLIDNCSAHNMLPHLERIQVGYLPSNCTAVLQPLNLGIIHTMKVLYQSHLLKQILLKLNSSEDQEEVDIKQAIDMIAAAWWSVKPSTVVKCWQKAGIVPMEFAECDTESAASEPDIAIEKLWHTVAIATCVPNEVNFQDFVTADDDLIISQDTDIIQDMVAGENTSEAGSEDEGEVSLPEQPKVTITEAISSVQKLRQFLSTCVDIPDAIFGQLNGIDEYLMKRVTQTLIDSKITDFLQTK

SEQ ID NO: 806290 - protein, 80 aa, Homo sapiens
CGRACLPHLVRACDLTRPAAGRCIRAVGLLSVRFPPAAPAGIPPSVLATRSPLFPNRCSFSGALSRHGLTPLQSYLRSVL

SEQ ID NO: 806291 - protein, 80 aa, Homo sapiens
CGRACLPHLVRACDLTRPAAGRCIRAVGLLSVRFPPAAPAGIPPSVLATRSPLFPNRCSFSGALSRHGLTPLQSYLRTSD

SEQ ID NO: 806292 - protein, 134 aa, Homo sapiens
VKYRQELLERRLMEKKEVALQEAHEDKERARRLEALRKQVAVVAQFDPVRMMSDTMASKARMGIEIEEEFILQKPLFTLNTYNEQQIISDPRLRFELALREAGLHRTLYAKEILPKISPQKPPRKDMESTVFKI

SEQ ID NO: 806293 - protein, 134 aa, Homo sapiens; identical to SEQ ID NO: 806292

SEQ ID NO: 806294 - protein, 480 aa, Homo sapiens
FSVPLGRIGGAIPTVFSYFAEVLAREKRGEHLSWLCMFWMIGGIYASAMAWAIIPHYGWSFSMGSAYQFHSWRVFVIVCALPCVSSVVALTFMPESPRFLLEVGKHDEAWMILKLIHDTNMRARGQPEKVFTVNKIKTPKQIDELIEIESDTGTWYRRCFVRIRTELYGIWLTFMRCFNYPVRDNTIKLTIVWFTLSFGYYGLSVWFPDVIKPLQSDEYALLTRNVERDKYANFSINFTMENQIHTGMEYDNGRFIGVKFKSVTFKDSVFKSCTFEDVTSVNTYFKNCTFIDTVFNNTDFEPYKFIDSEFKNCSFFHNKTGCQITFDDDYSAYWIYFVNFLGTLAVLPGNIVSALLMDRIGRLTMLGGSMVLSGISCFFLWFGTSESMMIGMLCLYNGLTISAWNSLDVVTVELYPTDRRATGFGFLNALCKAAAVLGNLIFGSLVSITKSIPILLASTVLVCGGLVGLCLPDTRTQVLM

SEQ ID NO: 806295 - protein, 259 aa, Homo sapiens
FSVPLGRIGGAIPTVFSYFAEVLAREKRGEHLSWLCMFWMIGGIYASAMAWAIIPHYGWSFSMGSAYQFHSWRVFVIVCALPCVSSVVALTFMPESPRFLLEVGKHDEAWMILKLIHDTNMRARGQPEKVFTVNKIKTPKQIDELIEIESDTGTWYRRCFVRIRTELYGIWLTFMRCFNYPVRDNTIKLTIVWFTLSFGYYGLSVWFPDVIKPLQSDEYALLTRNVERDKYANFSINFTMENQIHTGMEYDNGRSRNLK

SEQ ID NO: 806296 - protein, 165 aa, Homo sapiens
MDAPRRDMELLSNSLAAYAHIRANPESFGLYFVLGVCFGLLLTLCLLVISISWAPRPRPRGPAQRRDPRSSTLEPEDDDEDEEDTVTRLGPDDTLPGPELSAEPDGPLNVNVFTSAEELERAQRLEERERILREIWRTGQPDLLGTGTLGPSPTATGTLGRMHYY

SEQ ID NO: 806297 - protein, 165 aa, Homo sapiens; identical to SEQ ID NO: 806296

SEQ ID NO: 806298 - protein, 165 aa, Homo sapiens; identical to SEQ ID NO: 806296

SEQ ID NO: 806299 - protein, 102 aa, Homo sapiens
MDAPRRDMELLSNSLAAYAHIRANPESFGLYFVLGVCFGLLLTLCLLVISISWAPRPRPRGPAQRRDPRSSTLEPEDDDEDEEDTVTRLGPDDTLPGYRTCT

SEQ ID NO: 806300 - protein, 165 aa, Homo sapiens; identical to SEQ ID NO: 806296

SEQ ID NO: 806301 - protein, 165 aa, Homo sapiens; identical to SEQ ID NO: 806296

SEQ ID NO: 806302 - protein, 172 aa, Homo sapiens
PPGSGALTAGRGAAPQSSMDAPRRDMELLSNSLAAYAHIRANPESFGLYFVWAPTTRCRAPSCPQSRTGPSTSTSSRRRRSWSGRSGWRSANGSCGRSGAPGSRTCWAQARWGPAPRPRAPWAACTITDGPRLPLQGARGTGPAHELRATPHLRTASAPTAPRCYWAWTATP

SEQ ID NO: 806303 - protein, 164 aa, Homo sapiens
VAPGSAAAEVWGPGLASEGAVGSPMGLSKSKEKPRKGEEQKKGSTYSVPKSKEKLMEKHSQEARQADRESEKPVDSLHPGAGTAKHPPPAASLEEKPDVKQKSSRKKVVVPQIIITRASNETLVSCSSSGSDQQRTIREPEDWGPYRRHRNPSTADAYNSHLKE

SEQ ID NO: 806304 - protein, 109 aa, Homo sapiens
MEKHSQEARQADRESEKPVDSLHPGAGTAKHPPPAASLEEKPDVKQKSSRKKVVVPQIIITRASNETLVSCSSSGSDQQRTIREPEDWGPYRRHRNPSTADAYNSHLKE

SEQ ID NO: 806305 - protein, 119 aa, Homo sapiens
VAPGSAAAEVWGPGLASEGAVGSPMGLSKSKEKPRKGEEQKKGSTYSVPKSKEKLMEKHSQEARQADRESEKPVDSLHPGAGTAKHPPPAASLEGRRRREGAKRGQWLGGSGAGVRSLL

SEQ ID NO: 806306 - protein, 119 aa, Homo sapiens; identical to SEQ ID NO: 806305

SEQ ID NO: 806307 - protein, 164 aa, Homo sapiens; identical to SEQ ID NO: 806303

SEQ ID NO: 806308 - protein, 164 aa, Homo sapiens; identical to SEQ ID NO: 806303

SEQ ID NO: 806309 - protein, 97 aa, Homo sapiens
VAPGSAAAEVWGPGLASEGAVGSPMGLSKSKEKPRKGEEQKKGSTYSVPKSKEKLMEKHSQEARQADRESEKPVDSLHPGAGTAKHPPPAASLEVTG

SEQ ID NO: 806310 - protein, 97 aa, Homo sapiens; identical to SEQ ID NO: 806309

SEQ ID NO: 806311 - protein, 104 aa, Homo sapiens
VAPGSAAAEVWGPGLASEGAVGSPMGLSKSKEKPRKGEEQKKGSTYSVPKSKEKLMEKHSQEARQADRESEKPVDSLHPGAGTAKHPPPAASLEVNECHEIRWF

SEQ ID NO: 806312 - protein, 97 aa, Homo sapiens; identical to SEQ ID NO: 806309

SEQ ID NO: 806313 - protein, 106 aa, Homo sapiens
VAPGSAAAEVWGPGLASEGAVGSPMGLSKSKEKPRKEKPDVKQKSSRKKVVVPQIIITRASNETLVSCSSSGSDQQRTIREPEDWGPYRRHRNPSTADAYNSHLKE

SEQ ID NO: 806314 - protein, 97 aa, Homo sapiens; identical to SEQ ID NO: 806309

SEQ ID NO: 806315 - protein, 66 aa, Homo sapiens
  misc_feature (2)..(2): Xaa can be any naturally occurring amino acid
RXPTHVPLPNACAAPQRMCRSQRMCRSQRMCRSQRMCRSQRMCRSQQHVPLLFNWNLMDPMWFPPS

SEQ ID NO: 806316 - protein, 72 aa, Homo sapiens
TYDFVTLQWCKSGKNSAFSSTSGRASTVLSQRLSLLPAARLSARRPHPDAVAQTLSLSWSFPPNPALNTLRR

SEQ ID NO: 806317 - protein, 593 aa, Homo sapiens
VELTVVWNGHFNIDNPAQNKVHLYKCGAMRESCGLCLKADPDFACGWCQGPGQCTLRQHCPAQESQWLELSGAKSKCTNPRITEIIPVTGPREGGTKVTIRGENLGLEFRDIASHVKVAGVECSPLVDGYIPAEQIVCEMGEAKPSQHAGFVEICVAVCRPEFMARSSQLYYFMTLTLSDLKPSRGPMSGGTQVTITGTNLNAGSNVVVMFGKQPCLFHRRSPSYIVCNTTSSDEVLEMKVSVQVDRAKIHQDLVFQYVEDPTIVRIEPEWSIVSGNTPIAVWGTHLDLIQNPQIRAKHGGKEHINICEVLNATEMTCQAPALALGPDHQSDLTERPEEFGFILDNVQSLLILNKTNFTYYPNPVFEAFGPSGILELKPGTPIILKGKNLIPPVAGGNVKLNYTVLVGEKPCTVTVSDVQLLCESPNLIGRHKVMARVGGMEYSPGMVYIAPDSPLSLPAIVSIAVAGGLLIIFIVAVLIAYKRKSRESDLTLKRLQMQMDNLESRVALECKEGTEWPHAGGHVCVRVCICVCMHICVCVCICFIYKQAGWAAVGSAGGWRCVCLCECVCVHVCVCTSVCIYVSYTSKQAGQQ

SEQ ID NO: 806318 - protein, 734 aa, Homo sapiens
VELTVVWNGHFNIDNPAQNKVHLYKCGAMRESCGLCLKADPDFACGWCQGPGQCTLRQHCPAQESQWLELSGAKSKCTNPRITEIIPVTGPREGGTKVTIRGENLGLEFRDIASHVKVAGVECSPLVDGYIPAEQIVCEMGEAKPSQHAGFVEICVAVCRPEFMARSSQLYYFMTLTLSDLKPSRGPMSGGTQVTITGTNLNAGSNVVVMFGKQPCLFHRRSPSYIVCNTTSSDEVLEMKVSVQVDRAKIHQDLVFQYVEDPTIVRIEPEWSIVSGNTPIAVWGTHLDLIQNPQIRAKHGGKEHINICEVLNATEMTCQAPALALGPDHQSDLTERPEEFGFILDNVQSLLILNKTNFTYYPNPVFEAFGPSGILELKPGTPIILKGKNLIPPVAGGNVKLNYTVLVGEKPCTVTVSDVQLLCESPNLIGRHKVMARVGGMEYSPGMVYIAPDSPLSLPAIVSIAVAGGLLIIFIVAVLIAYKRKSRESDLTLKRLQMQMDNLESRVALECKEGTEWPHAGGHVCVRVCICVCMHICVCVCICFIYKQAGWAAVGSAGGWRCVCLCECVCVHVCVCTSVCIYVSYTSKQAGQQCAVLEAVYVSVCVRICVCVYVSCTSKQAGQQWAVLEALCVRVHVCVCMCMCSIYKQAGQATVSSAGGCVRVCVCMCMCFIYKQAGQAAVGNAGGCASYLHTCKASHSIVPMPVSQTTPIPKQAPPWQHQRGQGLLALSLKV

SEQ ID NO: 806319 - protein, 809 aa, Homo sapiens
VELTVVWNGHFNIDNPAQNKVHLYKCGAMRESCGLCLKADPDFACGWCQGPGQCTLRQHCPAQESQWLELSGAKSKCTNPRITEIIPVTGPREGGTKVTIRGENLGLEFRDIASHVKVAGVECSPLVDGYIPAEQIVCEMGEAKPSQHAGFVEICVAVCRPEFMARSSQLYYFMVSLGQQLIWLGAGHRAHYHDCWAPLELCEQTQGKGLPCNLPQFMRLLSYVSESTAFEVWKTWIQIQTFLCLAVWFQTLTLSDLKPSRGPMSGGTQVTITGTNLNAGSNVVVMFGKQPCLFHRRSPSYIVCNTTSSDEVLEMKVSVQVDRAKNPTTSCFVMWRTTPPSVRSSTKDHCGNTPIAVWGTHLDLIQNPQIRAKHGGKEHINICEVLNATEMTCQAPALALGPDHQSDLTERPEEFGFILDNVQSLLILNKTNFTYYPNPVFEAFGPSGILELKPGTPIILKGKNLIPPVAGGNVKLNYTVLVGEKPCTVTVSDVQLLCESPNLIGRHKVMARVGGMEYSPGMVYIAPDSPLSLPAIVSIAVAGGLLIIFIVAVLIAYKRKSRESDLTLKRLQMQMDNLESRVALECKEGTEWPHAGGHVCVRVCICVCMHICVCVCICFIYKQAGWAAVGSAGGWRCVCLCECVCVHVCVCTSVCIYVSYTSKQAGQQCAVLEAVYVSVCVRICVCVYVSCTSKQAGQQWAVLEALCVRVHVCVCMCMCSIYKQAGQATVSSAGGCVRVCVCMCMCFIYKQAGQAAVGNAGGCASYLHTCKASHSIVPMPVSQTTPIPKQAPPWQHQRGQGLLALSLKV

SEQ ID NO: 806320 - protein, 177 aa, Homo sapiens
KKLQSMKTQTVTKPAREEHTFDLQRSFMANTGTARWLPTTHTGTQNAPNIMRLLRRADFHVGAHVNTFWRTPCRGATEGLSKKSVVWENKHITWFGECGGAGVSGWGALGLAWLTTKTLTLPLPATLDGGIGLLLPMQEKTYRRLLMLQNALTTMLPHHAGLNPRAFRMLHADALKG

SEQ ID NO: 806321 - protein, 141 aa, Homo sapiens
CLHAGHMLPLLQLDPGIGNSLPADRGDELDGEGLLLGADVPLISLDGLKGYVAAGTCLMQGEEVTCRGRILIMDVIEVVPEPGQPLTKNKFKVLYEKEQKGPVTALCHCNGHLGLPIRARNLSHLAPPANRSDAIPSSIRY

SEQ ID NO: 806322 - protein, 944 aa, Homo sapiens
AAASVLTTSMVTMEPGYLFLGSRLGNSLLLKYTEKLQEPPASAVREAADKEEPPSKKKRVDATAGWSAAGKSVPQDEVDEIEVYGSEAQSGTQLATYSFEVCDSILNIGPCANAAVGEPAFLSEEFQNSPEPDLEIVVCSGHGKNGALSVLQKSIRPQVVTTFELPGCYDMWTVIAPVRKEEEDNPKGEGTEQEPSTTPEADDDGRRHGFLILSREDSTMILQTGQEIMELDTSGFATQGPTVFAGNIGDNRYIVQVSPLGIRLLEGVNQLHFIPVDLGAPIVQCAVADPYVVIMSAEGHVTMFLLKSDSYGGRHHRLALHKPPLHHQSKVITLCLYRDLSGMFTTESRLGGARDELGGRSGPEAEGLGSETSPTVDDEEEMLYGDSGSLFSPSKEEARRSSQPPADRDPAPFRAEPTHWCLLVRENGTMEIYQLPDWRLVFLVKNFPVGQRVLVDSSFGQPTTQGEARREEATRQGELPLVKEVLLVALGSRQSRPYLLVHVDQELLIYEAFPHDSQLGQGNLKVRFKKVPHNINFREKKPKPSKKKAEGGGAEEGAGARGRVARFRYFEDIYGYSGVFICGPSPHWLLVTGRGALRLHPMAIDGPVDSFAPFHNVNCPRGFLYFNRQGELRISVLPAYLSYDAPWPVRKIPLRCTAHYVAYHVESKVYAVATSTNTPCARIPRMTGEEKEFETIERDERYIHPQQEAFSIQLISPVSWEAIPNARIELQEWEHVTCMKTVSLRSEETVSGLKGYVAAGTCLMQGEEVTCRGRILIMDVIEVVPEPGQPLTKNKFKVLYEKEQKGPVTALCHCNGHLVSAIGQKIFLWSLRASELTGMAFIDTQLYIHQMISVKNFILAADVMKSISLLRYQEESKTLSLVSRDAKPLEVYSVDFMVDNAQLGFLVSDRDRNLMVYMYLPEEPRRVSGACACCVGQTSTWVPT

SEQ ID NO: 806323 - protein, 932 aa, Homo sapiens
MEPGYLFLGSRLGNSLLLKYTEKLQEPPASAVREAADKEEPPSKKKRVDATAGWSAAGKSVPQDEVDEIEVYGSEAQSGTQLATYSFEVCDSILNIGPCANAAVGEPAFLSEEFQNSPEPDLEIVVCSGHGKNGALSVLQKSIRPQVVTTFELPGCYDMWTVIAPVRKEEEDNPKGEGTEQEPSTTPEADDDGRRHGFLILSREDSTMILQTGQEIMELDTSGFATQGPTVFAGNIGDNRYIVQVSPLGIRLLEGVNQLHFIPVDLGAPIVQCAVADPYVVIMSAEGHVTMFLLKSDSYGGRHHRLALHKPPLHHQSKVITLCLYRDLSGMFTTESRLGGARDELGGRSGPEAEGLGSETSPTVDDEEEMLYGDSGSLFSPSKEEARRSSQPPADRDPAPFRAEPTHWCLLVRENGTMEIYQLPDWRLVFLVKNFPVGQRVLVDSSFGQPTTQGEARREEATRQGELPLVKEVLLVALGSRQSRPYLLVHVDQELLIYEAFPHDSQLGQGNLKVRFKKVPHNINFREKKPKPSKKKAEGGGAEEGAGARGRVARFRYFEDIYGYSGVFICGPSPHWLLVTGRGALRLHPMAIDGPVDSFAPFHNVNCPRGFLYFNRQGELRISVLPAYLSYDAPWPVRKIPLRCTAHYVAYHVESKVYAVATSTNTPCARIPRMTGEEKEFETIERDERYIHPQQEAFSIQLISPVSWEAIPNARIELQEWEHVTCMKTVSLRSEETVSGLKGYVAAGTCLMQGEEVTCRGRILIMDVIEVVPEPGQPLTKNKFKVLYEKEQKGPVTALCHCNGHLVSAIGQKIFLWSLRASELTGMAFIDTQLYIHQMISVKNFILAADVMKSISLLRYQEESKTLSLVSRDAKPLEVYSVDFMVDNAQLGFLVSDRDRNLMVYMYLPEEPRRVSGACACCVGQTSTWVPT

SEQ ID NO: 806324 - protein, 984 aa, Homo sapiens
MEPGYLFLGSRLGNSLLLKYTEKLQEPPASAVREAADKVGFLGPLGHHPSCGHCCGMPLSAPPASQEEPPSKKKRVDATAGWSAAGKSVPQDEVDEIEVYGSEAQSGTQLATYSFEVRLRQQGPRPSQRPQRAPDSCCAQVCDSILNIGPCANAAVGEPAFLSEEFQNSPEPDLEIVVCSGHGKNGALSVLQKSIRPQVVTTFELPGCYDMWTVIAPVRKEEEDNPKGEGTEQEPSTTPEADDDGRRHGFLILSREDSTMILQTGQEIMELDTSGFATQGPTVFAGNIGDNRYIVQVSPLGIRLLEGVNQLHFIPVDLGAPIVQCAVADPYVVIMSAEGHVTMFLLKSDSYGGRHHRLALHKPPLHHQSKVITLCLYRDLSGMFTTESRLGGARDELGGRSGPEAEGLGSETSPTVDDEEEMLYGDSGSLFSPSKEEARRSSQPPADRDPAPFRAEPTHWCLLVRENGTMEIYQLPDWRLVFLVKNFPVGQRVLVDSSFGQPTTQGEARREEATRQGELPLVKEVLLVALGSRQSRPYLLVHVDQELLIYEAFPHDSQLGQGNLKVRFKKVPHNINFREKKPKPSKKKAEGGGAEEGAGARGRVARFRYFEDIYGYSGVFICGPSPHWLLVTGRGALRLHPMAIDGPVDSFAPFHNVNCPRGFLYFNRQGELRISVLPAYLSYDAPWPVRKIPLRCTAHYVAYHVESKVYAVATSTNTPCARIPRMTGEEKEFETIERDERYIHPQQEAFSIQLISPVSWEAIPNARIELQEWEHVTCMKTVSLRSEETVSGLKGYVAAGTCLMQGEEVTCRGRILIMDVIEVVPEPGQPLTKNKFKVLYEKEQKGPVTALCHCNGHLVSAIGQKIFLWSLRASELTGMAFIDTQLYIHQMISVKNFILAADVMKSISLLRYQEESKTLSLVSRDAKPLEVYSVDFMVDNAQLGFLVSDRDRNLMVYMYLPEEPRRVSGACACCVGQTSTWVPT

SEQ ID NO: 806325 - protein, 862 aa, Homo sapiens
LEDLSRSRREHSWPLSFEVCDSILNIGPCANAAVGEPAFLSEEFQNSPEPDLEIVVCSGHGKNGALSVLQKSIRPQVVTTFELPGCYDMWTVIAPVRKEEEDNPKGEGTEQEPSTTPEADDDGRRHGFLILSREDSTMILQTGQEIMELDTSGFATQGPTVFAGNIGDNRYIVQVSPLGIRLLEGVNQLHFIPVDLGAPIVQCAVADPYVVIMSAEGHVTMFLLKSDSYGGRHHRLALHKPPLHHQSKVITLCLYRDLSGMFTTESRLGGARDELGGRSGPEAEGLGSETSPTVDDEEEMLYGDSGSLFSPSKEEARRSSQPPADRDPAPFRAEPTHWCLLVRENGTMEIYQLPDWRLVFLVKNFPVGQRVLVDSSFGQPTTQGEARREEATRQGELPLVKEVLLVALGSRQSRPYLLVHVDQELLIYEAFPHDSQLGQGNLKVRFKKVPHNINFREKKPKPSKKKAEGGGAEEGAGARGRVARFRYFEDIYGYSGVFICGPSPHWLLVTGRGALRLHPMAIDGPVDSFAPFHNVNCPRGFLYFNRQGELRISVLPAYLSYDAPWPVRKIPLRCTAHYVAYHVESKVYAVATSTNTPCARIPRMTGEEKEFETIERDERYIHPQQEAFSIQLISPVSWEAIPNARIELQEWEHVTCMKTVSLRSEETVSGLKGYVAAGTCLMQGEEVTCRGRILIMDVIEVVPEPGQPLTKNKFKVLYEKEQKGPVTALCHCNGHLVSAIGQKIFLWSLRASELTGMAFIDTQLYIHQMISVKNFILAADVMKSISLLRYQEESKTLSLVSRDAKPLEVYSVDFMVDNAQLGFLVSDRDRNLMVYMYLPEEPRRVSGACACCVGQTSTWVPT

SEQ ID NO: 806326 - protein, 1209 aa, Homo sapiens
AAASVLTTSMVTMEPGYLFLGSRLGNSLLLKYTEKLQEPPASAVREAADKEEPPSKKKRVDATAGWSAAGKSVPQDEVDEIEVYGSEAQSGTQLATYSFEVCDSILNIGPCANAAVGEPAFLSEEFQNSPEPDLEIVVCSGHGKNGALSVLQKSIRPQVVTTFELPGCYDMWTVIAPVRKEEEDNPKGEGTEQEPSTTPEADDDGRRHGFLILSREDSTMILQTGQEIMELDTSGFATQGPTVFAGNIGDNRYIVQVSPLGIRLLEGVNQLHFIPVDLGAPIVQCAVADPYVVIMSAEGHVTMFLLKSDSYGGRHHRLALHKPPLHHQSKVITLCLYRDLSGMFTTESRLGGARDELGGRSGPEAEGLGSETSPTVDDEEEMLYGDSGSLFSPSKEEARRSSQPPADRDPAPFRAEPTHWCLLVRENGTMEIYQLPDWRLVFLVKNFPVGQRVLVDSSFGQPTTQGEARREEATRQGELPLVKEVLLVALGSRQSRPYLLVHVDQELLIYEAFPHDSQLGQGNLKVRFKKVPHNINFREKKPKPSKKKAEGGGAEEGAGARGRVARFRYFEDIYGYSGVFICGPSPHWLLVTGRGALRLHPMAIDGPVDSFAPFHNVNCPRGFLYFNRQVGSGRFPTHWLMLPQLGAEGEGTGEGTIGSTLRTMKECPEGDGVEVNEVETCDLVAPKVWKGVVGNWGCIPWGPHHCSAGSPGKPSQGLASTLLRRADVSASSAPWLLCDFGRAHRLSHPGSLFKPPHHQVTGDPAWDAVSASWVPEDSGLSMKEGSPGSLCLVFSPQHGSLWAALCSLQCPPGLAFPSPVASTPSPSCAWENGQEEPQRLSGSPFQDLARTQLPLTHPCSHRAEGNIPGLLAAWACLPLPLASPGSPAPVPPPQGELRISVLPAYLSYDAPWPVRKIPLRCTAHYVAYHVESKVYAVATSTNTPCARIPRMTGEEKEFETIERDERYIHPQQEAFSIQLISPVSWEAIPNARIELQEWEHVTCMKTVSLRSEETVSGLKGYVAAGTCLMQGEEVTCRGRILIMDVIEVVPEPGQPLTKNKFKVLYEKEQKGPVTALCHCNGHLVSAIGQKIFLWSLRASELTGMAFIDTQLYIHQMISVKNFILAADVMKSISLLRYQEESKTLSLVSRDAKPLEVYSVDFMVDNAQLGFLVSDRDRNLMVYMYLPEEPRRVSGACACCVGQTSTWVPT

SEQ ID NO: 806327 - protein, 952 aa, Homo sapiens
AAASVLTTSMVTMEPGYLFLGSRLGNSLLLKYTEKLQEPPASAVREAADKEEPPSKKKRVDATAGWSAAGKSVPQDEVDEIEVYGSEAQSGTQLATYSFEVCDSILNIGPCANAAVGEPAFLSEEFQNSPEPDLEIVVCSGHGKNGALSVLQKSIRPQVVTTFELPGCYDMWTVIAPVRKEEPAPLWPWQEDNPKGEGTEQEPSTTPEADDDGRRHGFLILSREDSTMILQTGQEIMELDTSGFATQGPTVFAGNIGDNRYIVQVSPLGIRLLEGVNQLHFIPVDLGAPIVQCAVADPYVVIMSAEGHVTMFLLKSDSYGGRHHRLALHKPPLHHQSKVITLCLYRDLSGMFTTESRLGGARDELGGRSGPEAEGLGSETSPTVDDEEEMLYGDSGSLFSPSKEEARRSSQPPADRDPAPFRAEPTHWCLLVRENGTMEIYQLPDWRLVFLVKNFPVGQRVLVDSSFGQPTTQGEARREEATRQGELPLVKEVLLVALGSRQSRPYLLVHVDQELLIYEAFPHDSQLGQGNLKVRFKKVPHNINFREKKPKPSKKKAEGGGAEEGAGARGRVARFRYFEDIYGYSGVFICGPSPHWLLVTGRGALRLHPMAIDGPVDSFAPFHNVNCPRGFLYFNRQGELRISVLPAYLSYDAPWPVRKIPLRCTAHYVAYHVESKVYAVATSTNTPCARIPRMTGEEKEFETIERDERYIHPQQEAFSIQLISPVSWEAIPNARIELQEWEHVTCMKTVSLRSEETVSGLKGYVAAGTCLMQGEEVTCRGRILIMDVIEVVPEPGQPLTKNKFKVLYEKEQKGPVTALCHCNGHLVSAIGQKIFLWSLRASELTGMAFIDTQLYIHQMISVKNFILAADVMKSISLLRYQEESKTLSLVSRDAKPLEVYSVDFMVDNAQLGFLVSDRDRNLMVYMYLPEEPRRVSGACACCVGQTSTWVPT

SEQ ID NO: 806328 - protein, 898 aa, Homo sapiens
AAASVLTTSMVTMEPGYLFLGSRLGNSLLLKYTEKLQEPPASAVREAADKEEPPSKKKRVDATAGWSAAGKSVPQDEVDEIEVYGSEAQSGTQLATYSFEVCDSILNIGPCANAAVGEPAFLSEEFQNSPEPDLEIVVCSGHGKNGALSVLQKSIRPQVVTTFELPGCYDMWTVIAPVRKEEEDNPKGEGTEQEPSTTPEADDDGRRHGFLILSREDSTMILQTGQEIMELDTSGFATQGPTVFAGNIGDNRYIVQVSPLGIRLLEGVNQLHFIPVDLGAPIVQCAVADPYVVIMSAEGHVTMFLLKSDSYGGRHTAWRCTSPRCTIPTVDDEEEMLYGDSGSLFSPSKEEARRSSQPPADRDPAPFRAEPTHWCLLVRENGTMEIYQLPDWRLVFLVKNFPVGQRVLVDSSFGQPTTQGEARREEATRQGELPLVKEVLLVALGSRQSRPYLLVHVDQELLIYEAFPHDSQLGQGNLKVRFKKVPHNINFREKKPKPSKKKAEGGGAEEGAGARGRVARFRYFEDIYGYSGVFICGPSPHWLLVTGRGALRLHPMAIDGPVDSFAPFHNVNCPRGFLYFNRQGELRISVLPAYLSYDAPWPVRKIPLRCTAHYVAYHVESKVYAVATSTNTPCARIPRMTGEEKEFETIERDERYIHPQQEAFSIQLISPVSWEAIPNARIELQEWEHVTCMKTVSLRSEETVSGLKGYVAAGTCLMQGEEVTCRGRILIMDVIEVVPEPGQPLTKNKFKVLYEKEQKGPVTALCHCNGHLVSAIGQKIFLWSLRASELTGMAFIDTQLYIHQMISVKNFILAADVMKSISLLRYQEESKTLSLVSRDAKPLEVYSVDFMVDNAQLGFLVSDRDRNLMVYMYLPEEPRRVSGACACCVGQTSTWVPT

SEQ ID NO: 806329 - protein, 747 aa, Homo sapiens
HLEDPQLRRRITDSDLSREDSTMILQTGQEIMELDTSGFATQGPTVFAGNIGDNRYIVQVSPLGIRLLEGVNQLHFIPVDLGAPIVQCAVADPYVVIMSAEGHVTMFLLKSDSYGGRHHRLALHKPPLHHQSKVITLCLYRDLSGMFTTESRLGGARDELGGRSGPEAEGLGSETSPTVDDEEEMLYGDSGSLFSPSKEEARRSSQPPADRDPAPFRAEPTHWCLLVRENGTMEIYQLPDWRLVFLVKNFPVGQRVLVDSSFGQPTTQGEARREEATRQGELPLVKEVLLVALGSRQSRPYLLVHVDQELLIYEAFPHDSQLGQGNLKVRFKKVPHNINFREKKPKPSKKKAEGGGAEEGAGARGRVARFRYFEDIYGYSGVFICGPSPHWLLVTGRGALRLHPMAIDGPVDSFAPFHNVNCPRGFLYFNRQGELRISVLPAYLSYDAPWPVRKIPLRCTAHYVAYHVESKVYAVATSTNTPCARIPRMTGEEKEFETIERDERYIHPQQEAFSIQLISPVSWEAIPNARIELQEWEHVTCMKTVSLRSEETVSGLKGYVAAGTCLMQGEEVTCRGRILIMDVIEVVPEPGQPLTKNKFKVLYEKEQKGPVTALCHCNGHLVSAIGQKIFLWSLRASELTGMAFIDTQLYIHQMISVKNFILAADVMKSISLLRYQEESKTLSLVSRDAKPLEVYSVDFMVDNAQLGFLVSDRDRNLMVYMYLPEEPRRVSGACACCVGQTSTWVPT

SEQ ID NO: 806330 - protein, 970 aa, Homo sapiens
AAASVLTTSMVTMEPGYLFLGSRLGNSLLLKYTEKLQEPPASAVREAADKEEPPSKKKRVDATAGWSAAGKSVPQDEVDEIEVYGSEAQSGTQLATYSFEVCDSILNIGPCANAAVGEPAFLSEEFQNSPEPDLEIVVCSGHGKNGALSVLQKSIRPQVVTTFELPGCYDMWTVIAPVRKEEEDNPKGEGTEQEPSTTPEADDDGRRHGFLILSREDSTMILQTGQEIMELDTSGFATQGPTVFAGNIGDNRYIVQVSPLGIRLLEGVNQLHFIPVDLGAPIVQCAVADPYVVIMSAEGHVTMFLLKSDSYGGRHHRLALHKPPLHHQSKVITLCLYRDLSGMFTTESRLGGARDELGGRSGPEAEGLGSETSPTVDDEEEMLYGDSGSLFSPSKEEARRSSQPPADRDPAPFRAEPTHWCLLVRENGTMEIYQLPDWRLVFLVKNFPVGQRVLVDSSFGQPTTQGEARREEATRQGELPLVKEVLLVALGSRQSRPYLLVHVDQELLIYEAFPHDSQLGQGNLKVRFKKVPHNINFREKKPKPSKKKAEGGGAEEGAGARGRVARFRYFEDIYGYSGVFICGPSPHWLLVTGRGALRLHPMAIDGPVDSFAPFHNVNCPRGFLYFNRQGELRISVLPAYLSYDAPWPVRKIPLRCTAHYVAYHVESKVYAVATSTNTPCARIPRMTGEEKEFETIERDERYIHPQQEAFSIQLISPVSWEAIPNARIELQEWEHVTCMKTVSLRSEETVSGLKGYVAAGTCLMQGEEVTCRGRILIMDVIEVVPEPGQPLTKNKFKVLYEKEQKGPVTALCHCNGHLVSAIGQKIFLWSLRASELTGMAFIDTQLYIHQMISVKNFILAADVMKSISLLRYQEESKTLSLVSRVHLWRRCSCLGGYPPKAPLTPPSRPQDAKPLEVYSVDFMVDNAQLGFLVSDRDRNLMVYMYLPEEPRRVSGACACCVGQTSTWVPT

SEQ ID NO: 806331 - protein, 944 aa, Homo sapiens; identical to SEQ ID NO: 806322

SEQ ID NO: 806332 - protein, 978 aa, Homo sapiens
AAASVLTTSMVTMEPGYLFLGSRLGNSLLLKYTEKLQEPPASAVREAADKEEPPSKKKRVDATAGWSAAGKSVPQDEVDEIEVYGSEAQSGTQLATYSFEVCDSILNIGPCANAAVGEPAFLSEEFQNSPEPDLEIVVCSGHGKNGALSVLQKSIRPQVVTTFELPGCYDMWTVIAPVRKEEEDNPKGEGTEQEPSTTPEADDDGRRHGFLILSREDSTMILQTGQEIMELDTSGFATQGPTVFAGNIGDNRYIVQVSPLGIRLLEGVNQLHFIPVDLGAPIVQCAVADPYVVIMSAEGHVTMFLLKSDSYGGRHHRLALHKPPLHHQSKVITLCLYRDLSGMFTTESRLGGARDELGGRSGPEAEGLGSETSPTVDDEEEMLYGDSGSLFSPSKEEARRSSQPPADRDPAPFRAEPTHWCLLVRENGTMEIYQLPDWRLVFLVKNFPVGQRVLVDSSFGQPTTQGEARREEATRQGELPLVKEVLLVALGSRQSRPYLLVHVDQELLIYEAFPHDSQLGQGNLKVRFKKVPHNINFREKKPKPSKKKAEGGGAEEGAGARGRVARFRYFEDIYGYSGVFICGPSPHWLLVTGRGALRLHPMAIDGPVDSFAPFHNVNCPRGFLYFNRQGELRISVLPAYLSYDAPWPVRKIPLRCTAHYVAYHVESKVYAVATSTNTPCARIPRMTGEEKEFETIERDERYIHPQQEAFSIQLISPVSWEAIPNARIELQEWEHVTCMKTVSLRSEETVSGLKGYVAAGTCLMQGEEVTCRGRILIMDVIEVVPEPGQPLTKNKFKVLYEKEQKGPVTALCHCNGHLVSAIGQKIFLWSLRASELTGMAFIDTQLYIHQMISVKNFILAADVMKSISLLRYQEESKTLSLVSRDAKPLEVYSVDFMVDNAQLGFLVSDRDRNLMKYMPGEAGSPKESENVVVLEDTAYQEQTDRELVYVGLGAGALGLVGAALFFLPRRRRHEAVAA

SEQ ID NO: 806333 - protein, 678 aa, Homo sapiens
AAASVLTTSMVTMEPGYLFLGSRLGNSLLLKYTEKLQEPPASAVREAADKEEPPSKKKRVDATAGWSAAGKSVPQDEVDEIEVYGSEAQSGTQLATYSFEVCDSILNIGPCANAAVGEPAFLSEEFQNSPEPDLEIVVCSGHGKNGALSVLQKSIRPQVVTTFELPGCYDMWTVIAPVRKEEEDNPKGEGTEQEPSTTPEADDDGRRHGFLILSREDSTMILQTGQEIMELDTSGFATQGPTVFAGNIGDNRYIVQVSPLGIRLLEGVNQLHFIPVDLGAPIVQCAVADPYVVIMSAEGHVTMFLLKSDSYGGRHHRLALHKPPLHHQSKVITLCLYRDLSGMFTTESRLGGARDELGGRSGPEAEGLGSETSPTVDDEEEMLYGDSGSLFSPSKEEARRSSQPPADRDPAPFRAEPTHWCLLVRENGTMEIYQLPDWRLVFLVKNFPVGQRVLVDSSFGQPTTQGEARREEATRQGELPLVKEVLLVALGSRQSRPYLLVHVDQELLIYEAFPHDSQLGQGNLKVRFKKVPHNINFREKKPKPSKKKAEGGGAEEGAGARGRVARFRYFEDIYGYSGVFICGPSPHWLLVTGRGALRLHPMAIDGPVDSFAPFHNVNCPRGFLYFNRQAAEDQCLLLTVYDANGCREIRWVRHYCSREVKVCVGTHNAWPATHMGER

SEQ ID NO: 806334 - protein, 151 aa, Homo sapiens
  misc_feature (29)..(29): Xaa can be any naturally occurring amino acid
SFVGTRSYMAPERLQGTHYSVRSDIWSMXLSLVELAVRKVPLPPAVSTLDGGIGLLLPMQEKTYRRLLMLQNALTTMLPHHAGLNPRAFRMLHVDRRTLQNAVRNVLDGELLNRYLYLSTMERSELAKKIGTTPDIILDDLLETDRVTAHF

SEQ ID NO: 806335 - protein, 287 aa, Homo sapiens
FPSAGCFSLATPRLCQRYRTLSGGNLLTAKNYLLQLHRHLLRAADRWVPAPLVSQFRGCPPPSPARSIIGEGSLRFLRRAFARCVLRSQWNRWSQGWFHQVGRFLALAPLCAFAGPGRSQHREVLSKGDCLSWLGKLLWDDSFLEVSSLAQLAVSGSQNHCCAELDVLLWPRMFLCGIPTAVVEIAVFLWPHRHVGNFFSGCGVLSTELLVLIHAFSQRADETLFCLCQLLVVLCTVSSSRCGAFSIRGPLVPASRSQHPAFPLALSPAARSRRFCCHSTCCTEFLG

SEQ ID NO: 806336 - protein, 139 aa, Homo sapiens
FPSAGCFSLATPRLCQRYRTLSGGNLLTAKNYLLQLHRHLLRAADRWVPAPLVSQFRGCPPPSPARSIIGEGSLRFLRRAFARCVLRSQWNRWSQGNYDRSNLQGFRSDRNILMVGIASLSHICNFFFVGLVLCNFCLP

SEQ ID NO: 806337 - protein, 119 aa, Homo sapiens
WFSPVQYRLGPPEKLNDGSLCPPPSWAHPGDPPILASQIAGDLGIVLCFVCLFFSIPTLSLFPQYIEFCWFLFFGFFFPLSLMLLPVHCSCCCFRFLSPRLKCSYLITANYSLDLPGLR

SEQ ID NO: 806338 - protein, 120 aa, Homo sapiens
GEFPGSSCPVSVRKIKERCSDTVAWPFIHKTTRAVCAAPLPATSLMAAHYPFVDCQLQTSPSFPRCVRTRLNSVSFASWPVPFSPDLYAKQSEILLSNHYTTSEVRVFGVPEVLENLEAL

SEQ ID NO: 806339 - protein, 120 aa, Homo sapiens; identical to SEQ ID NO: 806338

SEQ ID NO: 806340 - protein, 291 aa, Homo sapiens
MGILSFLPVLATESDWADCKSPQPWGHMLLWTAVLFLAPVAGTPAAPPKAVLKLEPQWINVLQEDSVTLTCRGTHSPESDSIQWFHNGNLIPTHTQPSYRFKANNNDSGEYTCQTGQTSLSDPVHLTVLSEWLVLQTPHLEFQEGETIVLRCHSWKDKPLVKVTFFQNGKSKKFSRSDPNFSIPQANHSHSGDYHCTGNIGYTLYSSKPVTITVQAPSSSPMGIIVAVVTGIAVAAIVAAVVALIYCRKKRISANPTNPDEADKVGAENTITYSLLMHPDALEEPDDQNRI

SEQ ID NO: 806341 - protein, 146 aa, Homo sapiens
MGILSFLPVLATESDWADCKSPQPWGHMLLWTAVLFLAPVAGTPAAPPKAVLKLEPQWINVLQEDSVTLTCRGTHSPESDSIQWFHNGNLIPTHTQPSYRFKANNNDSGEYTCQTGQTSLSDPVHLTVLSGQWRKAPGWTWEGQDG

SEQ ID NO: 806342 - protein, 291 aa, Homo sapiens; identical to SEQ ID NO: 806340

SEQ ID NO: 806343 - protein, 310 aa, Homo sapiens
MGILSFLPVLATESDWADCKSPQPWGHMLLWTAVLFLAPVAGTPAAPPKAVLKLEPQWINVLQEDSVTLTCRGTHSPESDSIQWFHNGNLIPTHTQPSYRFKANNNDSGEYTCQTGQTSLSDPVHLTVLSEWLVLQTPHLEFQEGETIVLRCHSWKDKPLVKVTFFQNGKSKKFSRSDPNFSIPQANHSHSGDYHCTGNIGYTLYSSKPVTITVQAPSSSPMGIIVAVVTGIAVAAIVAAVVALIYCRKKRISALPGYPECREMGETLPEKPANPTNPDEADKVGAENTITYSLLMHPDALEEPDDQNRI

SEQ ID NO: 806344 - protein, 291 aa, Homo sapiens; identical to SEQ ID NO: 806340

SEQ ID NO: 806345 - protein, 310 aa, Homo sapiens; identical to SEQ ID NO: 806343

SEQ ID NO: 806346 - protein, 146 aa, Homo sapiens; identical to SEQ ID NO: 806341

SEQ ID NO: 806347 - protein, 303 aa, Homo sapiens
MGILSFLPVLATESDWADCKSPQPWGHMLLWTAVLFLAAPPKAVLKLEPQWINVLQEDSVTLTCRGTHSPESDSIQWFHNGNLIPTHTQPSYRFKANNNDSGEYTCQTGQTSLSDPVHLTVLSEWLVLQTPHLEFQEGETIVLRCHSWKDKPLVKVTFFQNGKSKKFSRSDPNFSIPQANHSHSGDYHCTGNIGYTLYSSKPVTITVQAPSSSPMGIIVAVVTGIAVAAIVAAVVALIYCRKKRISALPGYPECREMGETLPEKPANPTNPDEADKVGAENTITYSLLMHPDALEEPDDQNRI

SEQ ID NO: 806348 - protein, 377 aa, Homo sapiens
MGILSFLPVLATESDWADCKSPQPWGHMLLWTAVLFLAPVAGTPAAPPKAVLKLEPQWINVLQEDSVTLTCRGTHSPESDSIQWFHNGNLIPTHTQPSYRFKANNNDSGEYTCQTGQTSLSDPVHLTVLSEWLVLQTPHLEFQEGETIVLRCHSWKDKPLVKVTFFQNGKSKKFSRSDPNFSIPQANHSHSGDYHCTGNIGYTLYSSKPVTITVQAPSSSPMGIIVAVVTGIAVAAIVAAVVALIYCRKKRISANPTNPDEADKVGVSDPSHLPLPSPLLPFLLPSFLGPLCGSLLLVSAFSRLRTQSPIHFSCTRMLWKSLMTRTVFSLHCLALGFEKKIREGRSGISWPKFPLGRTGRCCSSKREGFFQSHLPES

SEQ ID NO: 806349 - protein, 323 aa, Homo sapiens
MGILSFLPVLATESDWADCKSPQPWGHMLLWTAVLFLAPVAGTPAAPPKAVLKLEPQWINVLQEDSVTLTCRGTHSPESDSIQWFHNGNLIPTHTQPSYRFKANNNDSGEYTCQTGQTSLSDPVHLTVLSEWLVLQTPHLEFQEGETIVLRCHSWKDKPLVKVTFFQNGKSKKFSRSDPNFSIPQANHSHSGDYHCTGNIGYTLYSSKPVTITVQAPSSSPMGIIVAVVTGIAVAAIVAAVVALIYCRKKRISANSTDPVKAAQFEPPGRQMIAIRKRQPEETNNDYETADGGYMTLNPRAPTDDDKNIYLTLPPNDHVNSNN

SEQ ID NO: 806350 - protein, 356 aa, Homo sapiens
SICALNSGFFCWLYRSGVPGHLLCSGRHSLQGVMGILSFLPVLATESDWADCKSPQPWGHMLLWTAVLFLAPVAGTPAAPPKAVLKLEPQWINVLQEDSVTLTCRGTHSPESDSIQWFHNGNLIPTHTQPSYRFKANNNDSGEYTCQTGQTSLSDPVHLTVLSEWLVLQTPHLEFQEGETIVLRCHSWKDKPLVKVTFFQNGKSKKFSRSDPNFSIPQANHSHSGDYHCTGNIGYTLYSSKPVTITVQAPSSSPMGIIVAVVTGIAVAAIVAAVVALIYCRKKRISANSTDPVKAAQFEPPGRQMIAIRKRQPEETNNDYETADGGYMTLNPRAPTDDDKNIYLTLPPNDHVNSNN

SEQ ID NO: 806351 - protein, 267 aa, Homo sapiens
MGILSFLPVLATESDWADCKSPQPWGHMLLWTAVLFLAPVAGTPAAPPKAVLKLEPQWINVLQEDSVTLTCRGTHSPESDSIQWFHNGNLIPTHTQPSYRFKANNNDSGEYTCQTGQTSLSDPVHLTVLSEWLVLQTPHLEFQEGETIVLRCHSWKDKPLVKVTFFQNGKSKKFSRSDPNFSIPQANHSHSGDYHCTGNIGYTLYSSKPVTITVQAPSSSPMGIIVAVVTGIAVAAIVAAVVALIYCRKKRISATWTSNDCHQKETT

SEQ ID NO: 806352 - protein, 234 aa, Homo sapiens
MGILSFLPVLATESDWADCKSPQPWGHMLLWTAVLFLAPVAGTPAAPPKAVLKLEPQWINVLQEDSVTLTCRGTHSPESDSIQWFHNGNLIPTHTQPSYRFKANNNDSGEYTCQTGQTSLSDPVHLTVLSEWLVLQTPHLEFQEGETIVLRCHSWKDKPLVKVTFFQNGKSKKFSRSDPNFSIPQANHSHSGDYHCTGNIGYTLYSSKPVTITVQGPRLRTAAKQSSLVGAEVP

SEQ ID NO: 806353 - protein, 237 aa, Homo sapiens
MGILSFLPVLATESDWADCKSPQPWGHMLLWTAVLFLAPVAGTPAAPPKAVLKLEPQWINVLQEDSVTLTCRGTHSPESDSIQWFHNGNLIPTHTQPSYRFKANNNDSGEYTCQTGQTSLSDPVHLTVLSEWLVLQTPHLEFQEGETIVLRCHSWKDKPLVKVTFFQNGKSKKFSRSDPNFSIPQANHSHSGDYHCTGNIGYTLYSSKPVTITVQGMRSLPRCREGRRGDGQGLRSH

SEQ ID NO: 806354 - protein, 352 aa, Homo sapiens
MGILSFLPVLATESDWADCKSPQPWGHMLLWTAVLFLAPVAGTPAAPPKAVLKLEPQWINVLQEDSVTLTCRGTHSPESDSIQWFHNGNLIPTHTQPSYRFKANNNDSGEYTCQTGQTSLSDPVHLTVLSEWLVLQTPHLEFQEGETIVLRCHSWKDKPLVKVTFFQNGKSKKFSRSDPNFSIPQANHSHSGDYHCTGNIGYTLYSSKPVTITVQGPRLRTAAKQSSLVGAEVPYSSWAFVRTEAPSSSPMGIIVAVVTGIAVAAIVAAVVALIYCRKKRISANSTDPVKAAQFEPPGRQMIAIRKRQPEETNNDYETADGGYMTLNPRAPTDDDKNIYLTLPPNDHVNSNN

SEQ ID NO: 806355 - protein, 606 aa, Homo sapiens
MAVTFEDVTIIFTWEEWKFLDSSQKRLYREVMWENYTNVMSVENWNESYKSQEEKFRYLEYENFSYWQGWWNAGAQMYENQNYGETVQGTDSKDLTQQDRSQCQEWLILSTQVPGYGNYELTFESKSLRNLKYKNFMPWQSLETKTTQDYGREIYMSGSHGFQGGRYRLGISRKNLSMEKEQKLIVQHSYIPVEEALPQYVGVICQEDLLRDSMEEKYCGCNKCKGIYYWNSRCVFHKRNQPGENLCQCSIRKACFSQRSDLYRHPRNHIGKKLYGCDEVDGNFHQSSGVHFHQRVHIGEVPYSCNACGKSFSQISSLHNHQRVHTEEKFYKIECDKDLSRNSLLHIHQRLHIGEKPFKCNQCGKSFNRSSVLHVHQRVHTGEKPYKCDECGKGFSQSSNLRIHQLVHTGEKSYKCEDCGKGFTQRSNLQIHQRVHTGEKPYKCDDCGKDFSHSSDLRIHQRVHTGEKPYTCPECGKGFSKSSKLHTHQRVHTGEKPYKCEECGKGFSQRSHLLIHQRVHTGEKPYKCHDCGKGFSHSSNLHIHQRVHTGEKPYQCAKCGKGFSHSSALRIHQRVHAGEKPYKCREYYKGFDHNSHLHNNHRRGNL

SEQ ID NO: 806356 - protein, 198 aa, Homo sapiens
QERPAGGGRPAPRPRPGAGRSPPSRRSRFQQDGQARGQRPQSPPAAAFSPAVPVGALAQHVPAAEVQLVAGLALAALVAGAEAHRGHGHHPPGGGAATAHRAGRRLGLRVPEALLRLHLLQQETLGPGALQHVPEPGLRQLHVAAQVLQEHAAAVGAQHLETGSPHVAQAGLELLKRSTCLSLPEHWNYRREPPRGAC

SEQ ID NO: 806357 - protein, 112 aa, Homo sapiens
KGLLSRSCIARMGGENLALESLSLFLLFYVPHVSFYNCFLRFAPSAPSPHHISPRRVPAPSSILQRTQPPYTQQPSGSHLKSYQPETNSSFQPNGIHVHGKQEAGSPLSFEK

SEQ ID NO: 806358 - protein, 176 aa, Homo sapiens
LRSSTELHPDLLTDCLTVQSLQPATSPRDAAAEGTVGRSPGPGPDLYSAPIFSSNYSSRSGTAAGAVPPPHPVSHPSPGHNVQGSPHNPSSQLPPLTAVDAGAERFAPSAPSPHHISPRRVPAPSSILQRTQPPYTQQPSGSHLKSYQPETNSSFQPNGIHVHGKQEAGSPLSFEK

SEQ ID NO: 806359 - protein, 458 aa, Homo sapiens
MATESPATRRVQVAEHPRLLKLKEMFNSKFGSIPKFYVRAPGRVNIIGEHIDYCGYSVLPMAVEQDVLIAVEPVKTYALQLANTNPLYPDFSTSANNIQIDKTKPLWHNYFLCGLKGIQEHFGLSNLTGMNCLVDGNIPPSSGLSSSSALVCCAGLVTLTVLGRNLSKVELAEICAKSERYIGTEGGGMDQSISFLAEEGTAKLIEFSPLRATDVKLPSGAVFVIANSCVEMNKAATSHFNIRVMECRLAAKLLAKYKSLQWDKVLRLEEVQAKLGISLEEMLLVTEDALHPEPYNPEEICRCLGISLEELRTQILSPNTQDVLIFKLYQRAKHVYSEAARVLQFKKICEEAPENMVQLLGELMNQSHMSCRDMYECSCPELDQLVDICRKFGAQGSRLTGAGWGGCTVSMVPADKLPSFLANVHKAYYQRSDGSLAPEKQSLFATKPGGGALVLLEA

SEQ ID NO: 806360 - protein, 458 aa, Homo sapiens; identical to SEQ ID NO: 806359

SEQ ID NO: 806361 - protein, 458 aa, Homo sapiens; identical to SEQ ID NO: 806359

SEQ ID NO: 806362 - protein, 458 aa, Homo sapiens; identical to SEQ ID NO: 806359

SEQ ID NO: 806363 - protein, 458 aa, Homo sapiens; identical to SEQ ID NO: 806359

SEQ ID NO: 806364 - protein, 447 aa, Homo sapiens
MPVLYDRLLKLKEMFNSKFGSIPKFYVRAPGRVNIIGEHIDYCGYSVLPMAVEQDVLIAVEPVKTYALQLANTNPLYPDFSTSANNIQIDKTKPLWHNYFLCGLKGIQEHFGLSNLTGMNCLVDGNIPPSSGLSSSSALVCCAGLVTLTVLGRNLSKVELAEICAKSERYIGTEGGGMDQSISFLAEEGTAKLIEFSPLRATDVKLPSGAVFVIANSCVEMNKAATSHFNIRVMECRLAAKLLAKYKSLQWDKVLRLEEVQAKLGISLEEMLLVTEDALHPEPYNPEEICRCLGISLEELRTQILSPNTQDVLIFKLYQRAKHVYSEAARVLQFKKICEEAPENMVQLLGELMNQSHMSCRDMYECSCPELDQLVDICRKFGAQGSRLTGAGWGGCTVSMVPADKLPSFLANVHKAYYQRSDGSLAPEKQSLFATKPGGGALVLLEA

SEQ ID NO: 806365 - protein, 434 aa, Homo sapiens
MFNSKFGSIPKFYVRAPGRVNIIGEHIDYCGYSVLPMAVEQDVLIAVEPVKTYALQLANTNPLYPDFSTSANNIQIDKTKPLWHNYFLCGLKGIQEHFGLSNLTGMNCLVDGNIPPSSGLSSSSALVCCAGLVTLTVLGRNLSKVELAEICAKSERYIGTEGGGMDQSISFLAEEGTAKLIEFSPLRATDVKLPSGAVFVIANSCVEMNKAATSHFNIRVMECRLAAKLLAKYKSLQWDKVLRLEEVQAKLGISLEEMLLVTEDALHPEPYNPEEICRCLGISLEELRTQILSPNTQDVLIFKLYQRAKHVYSEAARVLQFKKICEEAPENMVQLLGELMNQSHMSCRDMYECSCPELDQLVDICRKFGAQGSRLTGAGWGGCTVSMVPADKLPSFLANVHKAYYQRSDGSLAPEKQSLFATKPGGGALVLLEA

SEQ ID NO: 806366 - protein, 329 aa, Homo sapiens [sequence omitted]

SEQ ID NO: 806367 - protein, 329 aa, Homo sapiens [sequence omitted]

SEQ ID NO: 806368 - protein, 404 aa, Homo sapiens
MATESPATRRVQVAEHPRLLKLKEMFNSKFGSIPKFYVRAPGRVNIIGEHIDYCGYSVLPMAVEQDVLIAVEPVKTYALQLANTNPLYPDFSTSANNIQIDKTKPLWHNYFLCGLKGIQEHFGLSNLTGMNCLVDGNIPPSSGLSSSSALVCCAGLVTLTVLGRNLSKVELAEICAKSERYIGTEGGGMDQSISFLAEEGTAKLIEFSPLRATDVKLPSGAVFVIANSCVEMNKAATSHFNIRVMECRLAAKLLAKYKSLQWDKVLRLEEVQAKLGISLEEMLLVTEDALHPEPYNPEEICRCLGISLEELRTQILSPNTQDVLIFKLYQRAKHVYSEAARVLQFKKICEEAPENMVQLLGELMNQSHMSCRDMYECSCPELDQLVDICRCFGNTSQLMHLKII

SEQ ID NO: 806369 - protein, 485 aa, Homo sapiens
MATESPATRRVQVAEHPRLLKLKEMFNSKFGSIPKFYVRAPGRVNIIGEHIDYCGYSVLPMAVEQDVLIAVEPVKTYALQLANTNPLYPDFSTSANNIQIDKTKPLWHNYFLCGLKGIQEHFGLSNLTGMNCLVDGNIPPSSGLSSSSALVCCAGLVTLTVLGRNLSKVELAEICAKSERYIGTEGGGMDQSISFLAEEGTAKLIEFSPLRATDVKLPSGAVFVIANSCVEMNKAATSHFNIRVMECRLAAKLLAKYKSLQWDKVLRLEEVQAKLGISLEEMLLVTEDALHPEPYNPEEICRCLGISLEELRTQILSPNTQDGLGIFINFPKFSQTHHTSSATVSMGENVLIFKLYQRAKHVYSEAARVLQFKKICEEAPENMVQLLGELMNQSHMSCRDMYECSCPELDQLVDICRKFGAQGSRLTGAGWGGCTVSMVPADKLPSFLANVHKAYYQRSDGSLAPEKQSLFATKPGGGALVLLEA

SEQ ID NO: 806370 - protein, 434 aa, Homo sapiens; identical to SEQ ID NO: 806365

SEQ ID NO: 806371 - protein, 387 aa, Homo sapiens
LGSLCYLHLQANTMPLYPDFSTSANNIQIDKTKPLWHNYFLCGLKGIQEHFGLSNLTGMNCLVDGNIPPSSGLSSSSALVCCAGLVTLTVLGRNLSKVELAEICAKSERYIGTEGGGMDQSISFLAEEGTAKLIEFSPLRATDVKLPSGAVFVIANSCVEMNKAATSHFNIRVMECRLAAKLLAKYKSLQWDKVLRLEEVQAKLGISLEEMLLVTEDALHPEPYNPEEICRCLGISLEELRTQILSPNTQDVLIFKLYQRAKHVYSEAARVLQFKKICEEAPENMVQLLGELMNQSHMSCRDMYECSCPELDQLVDICRKFGAQGSRLTGAGWGGCTVSMVPADKLPSFLANVHKAYYQRSDGSLAPEKQSLFATKPGGGALVLLEA

SEQ ID NO: 806372 - protein, 505 aa, Homo sapiens
MTCGSGFGGRAFSCISACGPRPGRCCITAAPYRGISCYRGLTGGFGSHSVCGGFRAGSCGRSFGYRSGGVCGPSPPCITTVSVNESLLTPLNLEIDPNAQCVKQEEKEQIKSLNSRFAAFIDKVRFLEQQNKLLETKLQFYQNRECCQSNLEPLFEGYIETLRREAECVEADSGRLASELNHVQEVLEGYKKKYEEEVSLRATAENEFVALKKDVDCAYLRKSDLEANVEALIQEIDFLRRLYEEEIRILQSHISDTSVVVKLDNSRDLNMDCIIAEIKAQYDDIVTRSRAEAESWYRSKCEEMKATVIRHGETLRRTKEEINELNRMIQRLTAEVENAKCQNSKLEAAVAQSEQQGEAALSDARCKLAELEGALQKAKQDMACLIREYQEVMNSKLGLDIEIATYRRLLEGEEQRLCEGIGAVNVCVSSSRGGVVCGDLCVSGSRPVTGSVCSAPCNGNVAVSTGLCAPCGQLNTTCGGGSCGVGSCGISSLGVGSCGSSCRKC

SEQ ID NO: 806373 - protein, 137 aa, Homo sapiens
LLQSLYSIPFQRLLRHWGCECLCQQLPGRGRVRGPLRVRLPASDWQCLQRSVQRERGGEHRPVCALRPIEHHLRRGFLRRGLLWYQLPGCGVLRQQLPEMLGTPTQVPGPRHLSCPALLGPSSPGAWSKCSATSPAL

SEQ ID NO: 806374 - protein, 505 aa, Homo sapiens; identical to SEQ ID NO: 806372

SEQ ID NO: 806375 - protein, 189 aa, Homo sapiens
MARLGKREGILRSTCSYSWKGRSTTQNSKLEAAVAQSEQQGEAALSDARCKLAELEGALQKAKQDMACLIREYQEVMNSKLGLDIEIATYRRLLEGEEQRLCEGIGAVNVCVSSSRGGVVCGDLCVSGSRPVTGSVCSAPCNGNVAVSTGLCAPCGQLNTTCGGGSCGVGSCGISSLGVGSCGSSCRKC

SEQ ID NO: 806376 - protein, 303 aa, Homo sapiens
MTCGSGFGGRAFSCISACGPRPGRCCITAAPYRGISCYRGLTGGFGSHSVCGGFRAGSCGRSFGYRSGGVCGPSPPCITTVSVNESLLTPLNLEIDPNAQCVKQEEKEQIKSLNSRFAAFIDKVRFLEQQNKLLETKLQFYQNRECCQSNLEPLFEGYIETLRREAECVEADSGRLASELNHVQEVLEGYKKKYEEEVSLRATAENEFVALKKDVDCAYLRKSDLEANVEALIQEIDFLRRLYEEEIRILQSHISDTSVVVKLDNSRDLNMDCIIAEIKAQYDDIVTRSRAEPSASGSCGSAR

SEQ ID NO: 806377 - protein, 505 aa, Homo sapiens; identical to SEQ ID NO: 806372

SEQ ID NO: 806378 - protein, 236 aa, Homo sapiens
MFPCIIAEIKAQYDDIVTRSRAEAESWYRSKCEEMKATVIRHGETLRRTKEEINELNRMIQRLTAEVENAKCQNSKLEAAVAQSEQQGEAALSDARCKLAELEGALQKAKQDMACLIREYQEVMNSKLGLDIEIATYRRLLEGEEQRLCEGIGAVNVCVSSSRGGVVCGDLCVSGSRPVTGSVCSAPCNGNVAVSTGLCAPCGQLNTTCGGGSCGVGSCGISSLGVGSCGSSCRKC

SEQ ID NO: 806379 - protein, 98 aa, Homo sapiens
RLKSIPGSRLCEGIWGFNVCVSSSRGGVVCGDLCVSGSRPVTGSVCSAPCNGNVAVSTGLCAPCGQLNTTCGGGSCGVGSCGISSLGVGSCGSSCRKC

SEQ ID NO: 806380 - protein, 315 aa, Homo sapiens
STHASADAWVDPRVACRMWGACKVKVHDSLATISITLRRYLRLGATMAKSKFEYVRDFEADDTCLAHCWVVVRLDGRNFHRFAEKHNFAKPNDSRALQLMTKCAQTVMEELEDIVIAYGQSDEYSFVFKRKTNWFKRRASKFMTHVASQFASSYVFYWRDYFEDQPLLYPPGFDGRVVVYPSNQTLKDYLSWRQADCHINNLYNTVFWALIQQSGLTPVQAQGRLQGTLAADKNEILFSEFNINYNNELPMYRKGTVLIWQKVDEVMTKEIKLPTEMEGKKMAVTRTRTKPVPLHCDIIGDAFWKEHPEILDEDS

SEQ ID NO: 806381 - protein, 300 aa, Homo sapiens
STHASADAWVDPRVACRMWGACKVKVHDSLATISITLRRYLRLGATMAKSKFEYVRDFEADDTCLAHCWVVVRLDGRNFHRFAEKHNFAKPNDSRALQLMTKCAQTVMEELEDIVIAYGQSDEYSFVFKRKTNWFKRRASKFMTHVASQFASSYVFYWRDYFEDQPLLYPPGFDGRVVVYPSNQTLKDYLSWRQADCHINNLYNTVFWALIQQSGLTPVQAQGRLQGTLAADKNEILFSEFNINYNNELPMYRKGTVLIWQKVDEVMTKEIKLPTEMEGKKMAVTRTRTKPPPTSQGSLP

SEQ ID NO: 806382 - protein, 172 aa, Homo sapiens
STHASADAWVDPRVACRMWGACKVKVHDSLATISITLRRYLRLGATMAKSKFEYVRDFEADDTCLAHCWVVVRLDGRNFHRFAEKHNFAKPNDSRALQLMTKCAQTVMEELEDIVIAYGQSDEYSFVFKRKTNWFKRRASMCFIGGITLRTSPFCIPQALTEESWCIPATRL

SEQ ID NO: 806383 - protein, 315 aa, Homo sapiens; identical to SEQ ID NO: 806380

SEQ ID NO: 806384 - protein, 315 aa, Homo sapiens; identical to SEQ ID NO: 806380

SEQ ID NO: 806385 - protein, 141 aa, Homo sapiens
STHASADAWVDPRVACRMWGACKVKVHDSLATISITLRRYLRLGATMAKSKFEYVRDFEADDTCLAHCWVVVRLDGRNFHRFAEKHNFAKPNDSRALQLMTKCAQTVMEELEDIVIAYGQSDEYSFVFKRKTNWFKRRARL

SEQ ID NO: 806386 - protein, 267 aa, Homo sapiens
VSTSVRPRWKTRAAAPGCLQRPGPERKLNHLSPEMSSESKEQHNVSPRDSAEGNDSYPSGIHLELQRESSTDFKQFETNDQCRPYHRILIERQEKSDTNFKEFVIKKLQKNCQCSPAKAKNMILGFLPVLQWLPKYDLKKNILGDVMSGLIVGILLVPQSIAYSLLAGQEPVYGLYTSFFASIIYFLLGTSRHISVGIFGVLCLMIGETVDRELQKAGYDNAHSAPSLGMVSNGSTLLNHTSDRICDKSCYAIMVGSTVTFIAGVYQ

SEQ ID NO: 806387 - protein, 773 aa, Homo sapiens
VSTSVRPRWKTRAAAPGCLQRPGPERKLNHLSPEMSSESKEQHNVSPRDSAEGNDSYPSGIHLELQRESSTDFKQFETNDQCRPYHRILIERQEKSDTNFKEFVIKKLQKNCQCSPAKAKNMILGFLPVLQWLPKYDLKKNILGDVMSGLIVGILLVPQSIAYSLLAGQEPVYGLYTSFFASIIYFLLGTSRHISVGIFGVLCLMIGETVDRELQKAGYDNAHSAPSLGMVSNGSTLLNHTSDRICDKSCYAIMVGSTVTFIAGVYQVAMGFFQVGFVSVYLSDALLSGFVTGASFTILTSQAKYLLGLNLPRTNGVGSLITTWIHVFRNIHKTNLCDLITSLLCLLVLLPTKELNEHFKSKLKAPIPIELVVVVAATLASHFGKLHENYNSSIAGHIPTGFMPPKVPEWNLIPSVAVDAIAISIIGFAITVSLSEMFAKKHGYTVKANQEMYAIGFCNIIPSFFHCFTTSAALAKTLVKESTGCHTQLSGVVTALVLLLVLLVIAPLFYSLQKSVLGVITIVNLRGALRKFRDLPKMWSISRMDTVIWFVTMLSSALLSTEIGLLVGVCFSIFCVILRTQKPKSSLLGLVEESEVFESVSAYKNLQTKPGIKIFRFVAPLYYINKECFKSALYKQTVNPILIKVAWKKAAKRKIKEKVVTLGGIQDEMSVQLSHDPLELHTIVIDCSAIQFLDTAGIHTLKEVRRDYEAIGIQVLLAQCNPTVRDSLTNGEYCKKEEENLLFYSVYEAMAFAEVSKNQKGVCVPNGLSLSSD

SEQ ID NO: 806388 - protein, 126 aa, Homo sapiens
MFHSVTFFFRQVPWSLDKSELEFDSDSQRGDAYIMWLHRGELPDKQRTQCIPPLTCLWEWVALQGFIKMKSYPSSTNVETVNDGAESAMFKQLFQKWSVKDQTMGLGKTFSIGKIGETAPRSSSHC

SEQ ID NO: 806389 - protein, 938 aa, Homo sapiens
VPGQWPNTELHFPACSRRPLNSEAGGRFRLHQRGIHGEMRLFVSDGVPGCLPVLAAAGRARGRAEVLISTVGPEDCVVPFLTRPKVPVLQLDSGNYLFSTSAICRYFFLLSGWEQDDLTNQWLEWEATELQPALSAALYYLVVQGKKGEDVLGSVRRALTHIDHSLSRQNCPFLAGETESLADIVLWGALYPLLQDPAYLPEELSALHSWFQTLSTQEPCQRAAETVLKQQGVLALRPYLQKQPQPSPAEGRAVTNEPEEEELATLSEEEIAMAVTAWEKGLESLPPLRPQQNPVLPVAGERNVLITSALPYVNNVPHLGNIIGCVLSADVFARYSRLRQWNTLYLCGTDEYGTATETKALEEGLTPQEICDKYHIIHADIYRWFNISFDIFGRTTTPQQTKITQDIFQQLLKRGFVLQDTVEQLRCEHCARFLADRFVEGVCPFCGYEEARGDQCDKCGKLINAVELKKPQCKVCRSCPVVQSSQHLFLDLPKLEKRLEEWLGRTLPGSDWTPNAQFITRSWLRDGLKPRCITRDLKWGTPVPLEGFEDKVFYVWFDATIGYLSITANYTDQWERWWKNPEQVDLYQFMAKDNVPFHSLVFPCSALGAEDNYTLVSHLIATEYLNYEDGKFSKSRGVGVFGDMAQDTGIPADIWRFYLLYIRPEGQDSAFSWTDLLLKNNSELLNNLGNFINRAGMFVSKFFGGYVPEMVLTPDDQRLLAHVTLELQHYHQLLEKVRIRDALRSILTISRHGNQYIQVNEPWKRIKGSEADRQRAGTVTGLAVNIAALLSVMLQPYMPTVSATIQAQLQLPPPACSILLTNFLCTLPAGHQIGTVSPLFQKLENDQIESLRQRFGGGQAKTSPKPAVVETVTTAKPQQIQALMDEVTKQGNIVRELKAQKADKNEVAAEVAKLLDLKKQLAVAEGKPPEAPKGKKKK

SEQ ID NO: 806390 - protein, 938 aa, Homo sapiens; identical to SEQ ID NO: 806389

SEQ ID NO: 806391 - protein, 281 aa, Homo sapiens
GNTLYLCGTDEYGTATETKALEEARVPGKDIGTEQHNQWNTLYLCGTDEYGTATETKALEEGLTPQEICDKYHIIHADIYRWFNISFDIFGRTTTPQQTKITQDIFQQLLKRGFVLQDTVEQLRCEHCARFLADRFVEGVCPFCGYEEARGDQCDKCGKLINAVELKKPQCKVCRSCPVVQSSQHLFLDLPKLEKRLEDAGGEDISLGSDSDTPKTKNTSTVQEPEDRLKANAAVTPSNSNGAKPMDPEKDKKTKAYKDIEKDAPKAHRSITGKQHTNPGE

SEQ ID NO: 806392 - protein, 914 aa, Homo sapiens
MIRRAGVISFTRRAMRLFVSDGVPGCLPVLAAAGRARGRAEVLISTVGPEDCVVPFLTRPKVPVLQLDSGNYLFSTSAICRYFFLLSGWEQDDLTNQWLEWEATELQPALSAALYYLVVQGKKGEDVLGSVRRALTHIDHSLSRQNCPFLAGETESLADIVLWGALYPLLQDPAYLPEELSALHSWFQTLSTQEPCQRAAETVLKQQGVLALRPYLQKQPQPSPAEGRAVTNEPEEEELATLSEEEIAMAVTAWEKGLESLPPLRPQQNPVLPVAGERNVLITSALPYVNNVPHLGNIIGCVLSADVFARYSRLRQWNTLYLCGTDEYGTATETKALEEGLTPQEICDKYHIIHADIYRWFNISFDIFGRTTTPQQTKITQDIFQQLLKRGFVLQDTVEQLRCEHCARFLADRFVEGVCPFCGYEEARGDQCDKCGKLINAVELKKPQCKVCRSCPVVQSSQHLFLDLPKLEKRLEEWLGRTLPGSDWTPNAQFITRSWLRDGLKPRCITRDLKWGTPVPLEGFEDKVFYVWFDATIGYLSITANYTDQWERWWKNPEQVDLYQFMAKDNVPFHSLVFPCSALGAEDNYTLVSHLIATEYLNYEDGKFSKSRGVGVFGDMAQDTGIPADIWRFYLLYIRPEGQDSAFSWTDLLLKNNSELLNNLGNFINRAGMFVSKFFGGYVPEMVLTPDDQRLLAHVTLELQHYHQLLEKVRIRDALRSILTISRHGNQYIQVNEPWKRIKGSEADRQRAGTVTGLAVNIAALLSVMLQPYMPTVSATIQAQLQLPPPACSILLTNFLCTLPAGHQIGTVSPLFQKLENDQIESLRQRFGGGQAKTSPKPAVVETVTTAKPQQIQALMDEVTKQGNIVRELKAQKADKNEVAAEVAKLLDLKKQLAVAEGKPPEAPKGKKKK

SEQ ID NO: 806393 - protein, 914 aa, Homo sapiens; identical to SEQ ID NO: 806392

SEQ ID NO: 806394 - protein, 958 aa, Homo sapiens
MIRRAGVISFTRRAMRLFVSDGVPGCLPVLAAAGRARGRAEVLISTVGPEDCVVPFLTRPKVPVLQLDSGNYLFSTSAICRYFFLLSGWEQDDLTNQWLEWEATELQPALSAALYYLVVQGKKGEDVLGSVRRALTHIDHSLSRQNCPFLAGETESLADIVLWGALYPLLQDPAYLPEELSALHSWFQTLSTQEPCQRAAETVLKQQGVLALRPYLQKQPQPSPAEGRAVTNEPEEEELATLSEEEIAMAVTAWEKGLESLPPLRPQQNPVLPVAGERNVLITSALPYVNNVPHLGNIIGCVLSADVFARYSRLRQWNTLYLCGTDEYGTATETKALEEGLTPQEICDKYHIIHADIYRWFNISFDIFGRTTTPQQTKITQDIFQQLLKRGFVLQDTVEQLRCEHCARFLADRFVEGVCPFCGYEEARGDQCDKCGKLINAVELKKPQCKVCRSCPVVQSSQHLFLDLPKLEKRLEEWLGRTLPGSDWTPNAQFITRSWLRDGLKPRCITRDLKWGTPVPLEGFEDKVFYVWFDATIGYLSITANYTDQWERWWKNPEQVSSSWLGCAWGGEAVGCGCKGWVSGLPWAFEGGLRKSLLTTFPKVDLYQFMAKDNVPFHSLVFPCSALGAEDNYTLVSHLIATEYLNYEDGKFSKSRGVGVFGDMAQDTGIPADIWRFYLLYIRPEGQDSAFSWTDLLLKNNSELLNNLGNFINRAGMFVSKFFGGYVPEMVLTPDDQRLLAHVTLELQHYHQLLEKVRIRDALRSILTISRHGNQYIQVNEPWKRIKGSEADRQRAGTVTGLAVNIAALLSVMLQPYMPTVSATIQAQLQLPPPACSILLTNFLCTLPAGHQIGTVSPLFQKLENDQIESLRQRFGGGQAKTSPKPAVVETVTTAKPQQIQALMDEVTKQGNIVRELKAQKADKNEVAAEVAKLLDLKKQLAVAEGKPPEAPKGKKKK

SEQ ID NO: 806395 - protein, 914 aa, Homo sapiens; identical to SEQ ID NO: 806392

SEQ ID NO: 806396 - protein, 560 aa, Homo sapiens
MIRRAGVISFTRRAMRLFVSDGVPGCLPVLAAAGRARGRAEVLISTVGPEDCVVPFLTRPKVPVLQLDSGNYLFSTSAICRYFFLLSGWEQDDLTNQWLEWEATELQPALSAALYYLVVQGKKGEDVLGSVRRALTHIDHSLSRQNCPFLAGETESLADIVLWGALYPLLQDPAYLPEELSALHSWFQTLSTQEPCQRAAETVLKQQGVLALRPYLQKQPQPSPAEGRAVTNEPEEEELATLSEEEIAMAVTAWEKGLESLPPLRPQQNPVLPVAGERNVLITSALPYVNNVPHLGNIIGCVLSADVFARYSRLRQWNTLYLCGTDEYGTATETKALEEGLTPQEICDKYHIIHADIYRWFNISFDIFGRTTTPQQTKITQDIFQQLLKRGFVLQDTVEQLRCEHCARFLADRFVEGVCPFCGYEEARGDQCDKCGKLINAVELKKPQCKVCRSCPVVQSSQHLFLDLPKLEKRLEEWLGRTLPGSDWTPNAQFITRSWLRDGLKPRCITRDLKWGTPVPLEGFEDKVFYVWFDATIGYLSITANYTDQWERWWKNPEQP

SEQ ID NO: 806397 - protein, 882 aa, Homo sapiens
MIRRAGVISFTRRAMRLFVSDGVPGCLPVLAAAGRARGRAEVLISTVGPEDCVVPFLTRPKVPVLQLDSGNYLFSTSAICRYFFLLSGWEQDDLTNQWLEWEATELQPALSAALYYLVVQGKKGEDVLGSVRRALTHIDHSLSRQNCPFLAGETESLADIVLWGALYPLLQDPAYLPEELSALHSWFQTLSTQEPCQRAAETVLKQQGVLALRPYLQKQPQPSPAEGRAVTNEPEEEELATLSEEEIAMAVTAWEKGLESLPPLRPQQNPVLPVAGERNVLITSALPYVNNVPHLGNIIGCVLSADVFARYSRLRQWNTLYLCGTDEYGTATETKALEEGLTPQEICDKYHIIHADIYRWFNISFDIFGRTTTPQQTKITQDIFQQLLKRGFVLQDTVEQLRCEHCARFLADRFVEGVCPFCGYEEARGDQCDKCGKLINAVELKKPQCKVCRSCPVVQSSQHLFLDLPKLEKRLEEWLGRTLPGSDWTPNAQFITRSWLRDGLKPRCITRDLKWGTPVPLEGFEDKVFYVWFDATIGYLSITANYTDQWERWWKNPEQVDLYQFMAKDNVPFHSLVFPCSALGAEDNYTLVSHLIATEYLNYEDGKFSKSRGVGVFGDMAQDTGIPADIWRFYLLYIRPEGQDSAFSWTDLLLKNNSELLNNLGNFINRAGMFVSKFFGGYVPEMVLTPDDQRLLAHVTLELQHYHQLLEKVRIRDALRSILTISRHGNQYIQVNEPWKRIKGSEADRQRAGTVTGLAVNIAALLSVMLQPYMPTVSATIQAQLQLPPPACSILLTNFLCTLPAGHQIGTVSPLFQKLENDQIESLRQRFGGGQAKTSPKPAVVETVTTAKPQQIQALMDEVTKQSMKLKPCGRLDKLNPK

SEQ ID NO: 806398 - protein, 879 aa, Homo sapiens
MIRRAGVISFTRRAMRLFVSDGVPGCLPVLAAAGRARGRAEVLISTVGPEDCVVPFLTRPKVPVLQLDSGNYLFSTSAICRYFFLLSGWEQDDLTNQWLEWEATELQPALSAALYYLVVQGKKGEDVLGSVRRALTHIDHSLSRQNCPFLAGETESLADIVLWGALYPLLQDPAYLPEELSALHSWFQTLSTQEPCQRAAETVLKQQGVLALRPYLQKQPQPSPAEGRAVTNEPEEEELATLSEEEIAMAVTAWEKGLESLPPLRPQQNPVLPVAGERNVLITSALPYVNNVPHLGNIIGCVLSADVFARYSRLRQWNTLYLCGTDEYGTATETKALEEGLTPQEICDKYHIIHADIYRWFNISFDIFGRTTTPQQTKITQDIFQQLLKRGFVLQDTVEQLRCEHCARFLADRFVEGVCPFCGYEEARGDQCDKCGKLINAVELKKPQCKVCRSCPVVQSSQHLFLDLPKLEKRLEEWLGRTLPGSDWTPNAQFITRSWLRDGLKPRCITRDLKWGTPVPLEGFEDKVFYVWFDATIGYLSITANYTDQWERWWKNPEQVDLYQFMAKDNVPFHSLVFPCSALGAEDNYTLVSHLIATEYLNYEDGKFSKSRGVGVFGDMAQDTGIPADIWRFYLLYIRPEGQDSAFSWTDLLLKNNSELLNNLGNFINRAGMFVSKFFGGYVPEMVLTPDDQRLLAHVTLELQHYHQLLEKVRIRDALRSILTISRHGNQYIQVNEPWKRIKGSEADRQRAGTVTGLAVNIAALLSVMLQPYMPTVSATIQAQLQLPPPACSILLTNFLCTLPAGHQIGTVSPLFQKLENDQIESLRQRFGGGQAKTSPKPAVVETVTTAKPQQIQALMDEVTKQGETLGSKETVGCS

SEQ ID NO: 806399 - protein, 835 aa, Homo sapiens
MIRRAGVISFTRRAMRLFVSDGVPGCLPVLAAAGRARGRAEVLISTVGPEDCVVPFLTRPKVPVLQLDSGNYLFSTSAICRYFFLLSGWEQDDLTNQWLEWEATELQPALSAALYYLVVQGKKGEDVLGSVRRALTHIDHSLSRQNCPFLAGETESLADIVLWGALYPLLQDPAYLPEELSALHSWFQTLSTQEPCQRAAETVLKQQGVLALRPYLQKQPQPSPAEGRAVTNEPEEEELATLSEEEIAMAVTAWEKGLESLPPLRPQQNPVLPVAGERNVLITSALPYVNNVPHLGNIIGCVLSADVFARYSRLRQWNTLYLCGTDEYGTATETKALEEGLTPQEICDKYHIIHADIYRWFNISFDIFGRTTTPQQTKITQDIFQQLLKRGFVLQDTVEQLRCEHCARFLADRFVEGVCPFCGYEEARGDQCDKCGKLINAVELKKPQCKVCRSCPVVQSSQHLFLDLPKLEKRLEEWLGRTLPGSDWTPNAQFITRSWLRDGLKPRCITRDLKWGTPVPLEGFEDKVFYVWFDATIGYLSITANYTDQWERWWKNPEQVDLYQFMAKDNVPFHSLVFPCSALGAEDNYTLVSHLIATEYLNYEDGKFSKSRGVGVFGDMAQDTGIPADIWRFYLLYIRPEGQDSAFSWTDLLLKNNSELLNNLGNFINRAGMFVSKFFGGYVPEMVLTPDDQRLLAHVTLELQHYHQLLEKVRIRDALRSILTISRHGNQYIQVNEPWKRIKGSEADRQRAGTVTGLAVNIAALLSVMLQPYMPTVSATIQAQLQLPPPACSILLTNFLCTLPAGHQIGTVSPLFQKLENDQIESLRQRFGGGQ

SEQ ID NO: 806400 - protein, 776 aa, Homo sapiens
MIRRAGVISFTRRAMRLFVSDGVPGCLPVLAAAGRARGRAEVLISTVGPEDCVVPFLTRPKVPVLQLDSGNYLFSTSAICRYFFLLSGWEQDDLTNQWLEWEATELQPALSAALYYLVVQGKKGEDVLGSVRRALTHIDHSLSRQNCPFLAGETESLADIVLWGALYPLLQDPAYLPEELSALHSWFQTLSTQEPCQRAAETVLKQQGVLALRPYLQKQPQPSPAEGRAVTNEPEEEELATLSEEEIAMAVTAWEKGLESLPPLRPQQNPVLPVAGERNVLITSALPYVNNVPHLGNIIGCVLSADVFARYSRLRQWNTLYLCGTDEYGTATETKALEEGLTPQEICDKYHIIHADIYRWFNISFDIFGRTTTPQQTKITQDIFQQLLKRGFVLQDTVEQLRCEHCARFLADRFVEGVCPFCGYEEARGDQCDKCGKLINAVELKKPQCKVCRSCPVVQSSQHLFLDLPKLEKRLEEWLGRTLPGSDWTPNAQFITRSWLRDGLKPRCITRDLKWGTPVPLEGFEDKVFYVWFDATIGYLSITANYTDQWERWWKNPEQVDLYQFMAKDNVPFHSLVFPCSALGAEDNYTLVSHLIATEYLNYEDGKFSKSRGVGVFGDMAQDTGIPADIWRFYLLYIRPEGQDSAFSWTDLLLKNNSELLNNLGNFINRAGMFVSKFFGGYVPEMVLTPDDQRLLAHVTLELQHYHQLLEKVRIRDALRSILTISRHGNQYIQVNEPWKRIKGSEADRQRAGTVTGLAVNIAALLSVMLQPAVSC

SEQ ID NO: 806401 - protein, 349 aa, Homo sapiens [sequence omitted]

SEQ ID NO: 806402 - protein, 734 aa, Homo sapiens
MIRRAGVISFTRRAMRLFVSDGVPGCLPVLAAAGRARGRAEVLISTVGPEDCVVPFLTRPKVPVLQLDSGNYLFSTSAICRYFFLLSGWEQDDLTNQWLEWEATELQPALSAALYYLVVQGKKGEDVLGSVRRALTHIDHSLSRQNCPFLAGETESLADIVLWGALYPLLQDPAYLPEELSALHSWFQTLSTQEPCQRAAETVLKQQGVLALRPYLQKQPQPSPAEGRAVTNEPEEEELATLSEEEIAMAVTAWEKGLESLPPLRPQQNPVLPVAGERNVLITSALPYVNNVPHLGNIIGCVLSADVFARYSRLRQWNTLYLCGTDEYGTATETKALEEGLTPQEICDKYHIIHADIYRWFNISFDIFGRTTTPQQTKITQDIFQQLLKRGFVLQDTVEQLRCEHCARFLADRFVEGVCPFCGYEEARGDQCDKCGKLINAVELKKPQCKVCRSCPVVQSSQHLFLDLPKLEKRLEEWLGRTLPGSDWTPNAQFITRSWLRDGLKPRCITRDLKWGTPVPLEGFEDKVFYVWFDATIGYLSITANYTDQWERWWKNPEQVDLYQFMAKDNVPFHSLVFPCSALGAEDNYTLVSHLIATEYLNYEDGKFSKSRGVGVFGDMAQDTGIPADIWRFYLLYIRPEGQDSAFSWTDLLLKNNSELLNNLGNFINRAGMFVSKFFGGYVPEMVLTPDDQRLLAHVTLELQHYHQLLEKVRIRDALRSILTISRHGRNSWI

SEQ ID NO: 806403 - protein, 835 aa, Homo sapiens; identical to SEQ ID NO: 806399

SEQ ID NO: 806404 - protein, 879 aa, Homo sapiens; identical to SEQ ID NO: 806398

SEQ ID NO: 806405 - protein, 882 aa, Homo sapiens; identical to SEQ ID NO: 806397

SEQ ID NO: 806406 - protein, 835 aa, Homo sapiens; identical to SEQ ID NO: 806399

SEQ ID NO: 806407 - protein, 819 aa, Homo sapiens
MIRRAGVISFTRRAMRLFVSDGVPGCLPVLAAAGRARGRAEVLISTVGPEDCVVPFLTRPKVPVLQLDSGNYLFSTSAICRYFFLLSGWEQDDLTNQWLEWEATELQPALSAALYYLVVQGKKGEDVLGSVRRALTHIDHSLSRQNCPFLAGETESLADIVLWGALYPLLQDPAYLPEELSALHSWFQTLSTQEPCQRAAETVLKQQGVLALRPYLQKQPQPSPAEGRAVTNEPEEEELATLSEEEIAMAVTAWEKGLESLPPLRPQQNPVLPVAGERNVLITSALPYVNNVPHLGNIIGCVLSADVFARYSRLRQWNTLYLCGTDEYGTATETKALEEGLTPQEICDKYHIIHADIYRWFNISFDIFGRTTTPQQTKITQDIFQQLLKRGFVLQDTVEQLRCEHCARFLADRFVEGVCPFCGYEEARGDQCDKCGKLINAVELKKPQCKVCRSCPVVQSSQHLFLDLPKLEKRLEEWLGRTLPGSDWTPNAQFITRSWLRDGLKPRCITRDLKWGTPVPLEGFEDKVFYVWFDATIGYLSITANYTDQWERWWKNPEQVDLYQFMAKDNVPFHSLVFPCSALGAEDNYTLVSHLIATEYLNYEDGKFSKSRGVGVFGDMAQDTGIPADIWRFYLLYIRPEGQDSAFSWTDLLLKNNSELLNNLGNFINRAGMFVSKFFGGYVPEMVLTPDDQRLLAHVTLELQHYHQLLEKVRIRDALRSILTISRHGNQYIQVNEPWKRIKGSEADRQRAGTVTGLAVNIAALLSVMLQPYMPTVSATIQAQLQLPPPACSILLTNFLCTLPAGHQIGTVGGRASLS

SEQ ID NO: 806408 - protein, 602 aa, Homo sapiens
MIRRAGVISFTRRAMRLFVSDGVPGCLPVLAAAGRARGRAEVLISTVGPEDCVVPFLTRPKVPVLQLDSGNYLFSTSAICRYFFLLSGWEQDDLTNQWLEWEATELQPALSAALYYLVVQGKKGEDVLGSVRRALTHIDHSLSRQNCPFLAGETESLADIVLWGALYPLLQDPAYLPEELSALHSWFQTLSTQEPCQRAAETVLKQQGVLALRPYLQKQPQPSPAEGRAVTNEPEEEELATLSEEEIAMAVTAWEKGLESLPPLRPQQNPVLPVAGERNVLITSALPYVNNVPHLGNIIGCVLSADVFARYSRLRQWNTLYLCGTDEYGTATETKALEEGLTPQEICDKYHIIHADIYRWFNISFDIFGRTTTPQQTKITQDIFQQLLKRGFVLQDTVEQLRCEHCARFLADRFVEGVCPFCGYEEARGDQCDKCGKLINAVELKKPQCKVCRSCPVVQSSQHLFLDLPKLEKRLEEWLGRTLPGSDWTPNAQFITRSWLRDGLKPRCITRDLKWGTPVPLEGFEDKVFYVWFDATIGYLSITANYTDQWERWWKNPEQVDLYQFMAKDNVPFHSLVFPCSALGAEDNYTLVSHLIATGTYH

SEQ ID NO: 806409 - protein, 440 aa, Homo sapiens
MIRRAGVISFTRRAMRLFVSDGVPGCLPVLAAAGRARGRAEVLISTVGPEDCVVPFLTRPKVPVLQLDSGNYLFSTSAICRYFFLLSGWEQDDLTNQWLEWEATELQPALSAALYYLVVQGKKGEDVLGSVRRALTHIDHSLSRQNCPFLAGETESLADIVLWGALYPLLQDPAYLPEELSALHSWFQTLSTQEPCQRAAETVLKQQGVLALRPYLQKQPQPSPAEGRAVTNEPEEEELATLSEEEIAMAVTAWEKGLESLPPLRPQQNPVLPVAGERNVLITSALPYVNNVPHLGNIIGCVLSADVFARYSRLRQWNTLYLCGTDEYGTATETKALEEGLTPQEICDKYHIIHADIYRWFNISFDIFGRTTTPQQTKITQDIFQQLLKRGFVLQDTVEQLRCEHCARFLADRFVEGVCPFCGYEEARGDQCDKWRNSWI

SEQ ID NO: 806410 - protein, 535 aa, Homo sapiens
MIRRAGVISFTRRAMRLFVSDGVPGCLPVLAAAGRARGRAEVLISTVGPEDCVVPFLTRPKVPVLQLDSGNYLFSTSAICRYFFLLSGWEQDDLTNQWLEWEATELQPALSAALYYLVVQGKKGEDVLGSVRRALTHIDHSLSRQNCPFLAGETESLADIVLWGALYPLLQDPAYLPEELSALHSWFQTLSTQEPCQRAAETVLKQQGVLALRPYLQKQPQPSPAEGRAVTNEPEEEELATLSEEEIAMAVTAWEKGLESLPPLRPQQNPVLPVAGERNVLITSALPYVNNVPHLGNIIGCVLSADVFARYSRLRQWNTLYLCGTDEYGTATETKALEEGLTPQEICDKYHIIHADIYRWFNISFDIFGRTTTPQQTKITQDIFQQLLKRGFVLQDTVEQLRCEHCARFLADRFVEGVCPFCGYEEARGDQCDKCGKLINAVELKKPQCKVCRSCPVVQSSQHLFLDLPKLEKRLEEWLGRTLPGSDWTPNAQFITRSWLRDGLKPRCITRDLKWGTPVPLEGFEDKAMRWLTKV

SEQ ID NO: 806411 - protein, 1010 aa, Homo sapiens
MIRRAGVISFTRRAMRLFVSDGVPGCLPVLAAAGRARGRAEVLISTVGPEDCVVPFLTRPKVPVLQLDSGNYLFSTSAICRYFFLLSGWEQDDLTNQWLEWEATELQPALSAALYYLVVQGKKGEDVLGSVRRALTHIDHSLSRQNCPFLAGETESLADIVLWGALYPLLQDPAYLPEELSALHSWFQTLSTQEPCQRAAETVLKQQGVLALRPYLQKQPQPSPAEGRAVTNEPEEEELATLSEEEIAMAVTAWEKGLESLPPLRPQQNPVLPVAGERNVLITSALPYVNNVPHLGNIIGCVLSADVFARYSRLRQWNTLYLCGTDEYGTATETKALEEGLTPQEICDKYHIIHADIYRWFNISFDIFGRTTTPQQTKITQDIFQQLLKRGFVLQDTVEQLRCEHCARFLADRFVEGVCPFCGYEEARGDQCDKCGKLINAVELKKMELALVPVSAHGNFYEGDCYVILSTRRVASLLSQDIHFWIGKDSSQDEQSCAAIYTTQLDDYLGGSPVQHREVQYHESDTFRGYFKQGIIYKQGGVASGMKHVETNTYDVKRLLHVKGKRNIRATEVEMSWDSFNRGDVFLLDLGKVIIQWNGPESNSGERLKAMLLAKDIRDRERGGRAEIGVIEGDKEAASPELMKVLQDTLGRRSIIKPTVPDEIIDQKQKSTIMLYHISDSAGQLAVTEVATRPLVQDLLNHDDCYILDQSGTKIYVWKGKGATKAEKQAAMSKALGFIKMKSYPSSTNVETVNDGAESAMFKQLFQKWSVKDQTMGLGKTFSIGKIAKVFQDKFDVTLLHTKPEVAAQERMVDDGNGKVEVWRIENLELVPVEYQWYGFFYGGDCYLVLYTYEVNGKPHHILYIWQGRHASQDELAASAYQAVEVDRQFDGAAVQVRVRMGTEPRHFMAIFKGKLVIFEGGTSRKGNAEPDPPVRLFQIHGNDKSNTKAVEVPAFASSLNSNDVFLLRTQAEHYLWYGKVGWLGPGSDQPLGAQTCTPLLLSARSKDLE

SEQ ID NO: 806412 - protein, 1142 aa, Homo sapiens
MIRRAGVISFTRRAMRLFVSDGVPGCLPVLAAAGRARGRAEVLISTVGPEDCVVPFLTRPKVPVLQLDSGNYLFSTSAICRYFFLLSGWEQDDLTNQWLEWEATELQPALSAALYYLVVQGKKGEDVLGSVRRALTHIDHSLSRQNCPFLAGETESLADIVLWGALYPLLQDPAYLPEELSALHSWFQTLSTQEPCQRAAETVLKQQGVLALRPYLQKQPQPSPAEGRAVTNEPEEEELATLSEEEIAMAVTAWEKGLESLPPLRPQQNPVLPVAGERNVLITSALPYVNNVPHLGNIIGCVLSADVFARYSRLRQWNTLYLCGTDEYGTATETKALEEGLTPQEICDKYHIIHADIYRWFNISFDIFGRTTTPQQTKITQDIFQQLLKRGFVLQDTVEQLRCEHCARFLADRFVEGVCPFCGYEEARGDQCDKCGKLINAVELKKMELALVPVSAHGNFYEGDCYVILSTRRVASLLSQDIHFWIGKDSSQDEQSCAAIYTTQLDDYLGGSPVQHREVQYHESDTFRGYFKQGIIYKQGGVASGMKHVETNTYDVKRLLHVKGKRNIRATEVEMSWDSFNRGDVFLLDLGKVIIQWNGPESNSGERLKAMLLAKDIRDRERGGRAEIGVIEGDKEAASPELMKVLQDTLGRRSIIKPTVPDEIIDQKQKSTIMLYHISDSAGQLAVTEVATRPLVQDLLNHDDCYILDQSGTKIYVWKGKGATKAEKQAAMSKALGFIKMKSYPSSTNVETVNDGAESAMFKQLFQKWSVKDQTMGLGKTFSIGKIAKVFQDKFDVTLLHTKPEVAAQERMVDDGNGKVEVWRIENLELVPVEYQWYGFFYGGDCYLVLYTYEVNGKPHHILYIWQGRHASQDELAASAYQAVEVDRQFDGAAVQVRVRMGTEPRHFMAIFKGKLVIFEGGTSRKGNAEPDPPVRLFQIHGNDKSNTKAVEVPAFASSLNSNDVFLLRTQAEHYLWYGKGSSGDERAMAKELASLLCDGSENTVAEGQEPAEFWDLLGGKTPYANDKRYGNTASPSSGLPLPARLVNCTKAKTSVLKTFLSSLMPLNGLYCRLQQEILDVQSRLFECSNKTGQFVVTEITDFTQDDLNPTDVMLLDTWDQVRHSCRSQNMRKTPTVRVVFV

SEQ ID NO: 806413 - protein, 1039 aa, Homo sapiens
MIRRAGVISFTRRAMRLFVSDGVPGCLPVLAAAGRARGRAEVLISTVGPEDCVVPFLTRPKVPVLQLDSGNYLFSTSAICRYFFLLSGWEQDDLTNQWLEWEATELQPALSAALYYLVVQGKKGEDVLGSVRRALTHIDHSLSRQNCPFLAGETESLADIVLWGALYPLLQDPAYLPEELSALHSWFQTLSTQEPCQRAAETVLKQQGVLALRPYLQKQPQPSPAEGRAVTNEPEEEELATLSEEEIAMAVTAWEKGLESLPPLRPQQNPVLPVAGERNVLITSALPYVNNVPHLGNIIGCVLSADVFARYSRLRQWNTLYLCGTDEYGTATETKALEEGLTPQEICDKYHIIHADIYRWFNISFDIFGRTTTPQQTKITQDIFQQLLKRGFVLQDTVEQLRCEHCARFLADRFVEGVCPFCGYEEARGDQCDKCGKLINAVELKKMELALVPVSAHGNFYEGDCYVILSTRRVASLLSQDIHFWIGKDSSQDEQSCAAIYTTQLDDYLGGSPVQHREVQYHESDTFRGYFKQGIIYKQGGVASGMKHVETNTYDVKRLLHVKGKRNIRATEVEMSWDSFNRGDVFLLDLGKVIIQWNGPESNSGERLKAMLLAKDIRDRERGGRAEIGVIEGDKEAASPELMKVLQDTLGRRSIIKPTVPDEIIDQKQKSTIMLYHISDSAGQLAVTEVATRPLVQDLLNHDDCYILDQSGTKIYVWKGKGATKAEKQAAMSKALGFIKMKSYPSSTNVETVNDGAESAMFKQLFQKWSVKDQTMGLGKTFSIGKIAKVFQDKFDVTLLHTKPEVAAQERMVDDGNGKVEVWRIENLELVPVEYQWYGFFYGGDCYLVLYTYEVNGKPHHILYIWQGRHASQDELAASAYQAVEVDRQFDGAAVQVRVRMGTEPRHFMAIFKGKLVIFEGGTSRKGNAEPDPPVRLFQIHGNDKSNTKAVEVPAFASSLNSNDVFLLRTQAEHYLWYGKGSSGDERAMAKELASLLCDGSENTVAEGQEPAEFWDLLGGKTPYANDKRLPQGPKSGRV

SEQ ID NO: 806414 - protein, 285 aa, Homo sapiens
MIRRAGVISFTRRAMRLFVSDGVPGCLPVLAAAGRARGRAEVLISTVGPEDCVVPFLTRPKVPVLQLDSGNYLFSTSAICRYFFLLSGWEQDDLTNQWLEWEATELQPALSAALYYLVVQGKKGEDVLGSVRRALTHIDHSLSRQNCPFLAGETESLADIVLWGALYPLLQDPAYLPEELSALHSWFQTLSTQEPCQRAAETVLKQQGVLALRPYLQKQPQPSPAEGRAVTNEPEEEELATLSEEEIAMAVTAWEKGLESLPPLRPQQNPVCCRGWRRMATQGSY

SEQ ID NO: 806415 - protein, 900 aa, Homo sapiens
MRLFVSDGVPGCLPVLAAAGRARGRAEVLISTVGPEDCVVPFLTRPKVPVLQLDSGNYLFSTSAICRYFFLLSGWEQDDLTNQWLEWEATELQPALSAALYYLVVQGKKGEDVLGSVRRALTHIDHSLSRQNCPFLAGETESLADIVLWGALYPLLQDPAYLPEELSALHSWFQTLSTQEPCQRAAETVLKQQGVLALRPYLQKQPQPSPAEGRAVTNEPEEEELATLSEEEIAMAVTAWEKGLESLPPLRPQQNPVLPVAGERNVLITSALPYVNNVPHLGNIIGCVLSADVFARYSRLRQWNTLYLCGTDEYGTATETKALEEGLTPQEICDKYHIIHADIYRWFNISFDIFGRTTTPQQTKITQDIFQQLLKRGFVLQDTVEQLRCEHCARFLADRFVEGVCPFCGYEEARGDQCDKCGKLINAVELKKPQCKVCRSCPVVQSSQHLFLDLPKLEKRLEEWLGRTLPGSDWTPNAQFITRSWLRDGLKPRCITRDLKWGTPVPLEGFEDKVFYVWFDATIGYLSITANYTDQWERWWKNPEQVDLYQFMAKDNVPFHSLVFPCSALGAEDNYTLVSHLIATEYLNYEDGKFSKSRGVGVFGDMAQDTGIPADIWRFYLLYIRPEGQDSAFSWTDLLLKNNSELLNNLGNFINRAGMFVSKFFGGYVPEMVLTPDDQRLLAHVTLELQHYHQLLEKVRIRDALRSILTISRHGNQYIQVNEPWKRIKGSEADRQRAGTVTGLAVNIAALLSVMLQPYMPTVSATIQAQLQLPPPACSILLTNFLCTLPAGHQIGTVSPLFQKLENDQIESLRQRFGGGQAKTSPKPAVVETVTTAKPQQIQALMDEVTKQGNIVRELKAQKADKNEVAAEVAKLLDLKKQLAVAEGKPPEAPKGKKKK

SEQ ID NO: 806416 - protein, 291 aa, Homo sapiens
VPGQWPNTELHFPACSRRPLNSEAGGRFRLHQRGIHGEMRLFVSDGVPGCLPVLAAAGRARGRAEVLISTVGPEDCVVPFLTRPKVPVLQLDSGNYLFSTSAICRYFFLLSGWEQDDLTNQWLEWEATELQPALSAALYYLVVQGKKGEDVLGSVRRALTHIDHSLSRQNCPFLAGETESLADIVLWGALYPLLQDPAYLPEELSALHSWFQTLSTQEPCQRAAETVLKQQGVLALRPYLQKQPQPSPAEGRAVTNEPEEEELVPYLRRRSHEVTAGKGPKFDHDANKTVA

SEQ ID NO: 806417 - protein, 914 aa, Homo sapiens; identical to SEQ ID NO: 806392

SEQ ID NO: 806418 - protein, 610 aa, Homo sapiens
MIRRAGVISFTRRAMRLFVSDGVPGCLPVLAAAGRARGRAEVLISTVGPEDCVVPFLTRPKVPVLQLDSGNYLFSTSAICRYFFLLSGWEQDDLTNQWLEWEATELQPALSAALYYLVVQGKKGEDVLGSVRRALTHIDHSLSRQNCPFLAGETESLADIVLWGALYPLLQDPAYLPEELSALHSWFQTLSTQEPCQRAAETVLKQQGVLALRPYLQKQPQPSPAEGRAVTNEPEEEELATLSEEEIAMAVTAWEKGLESLPPLRPQQNPVLPVAGERNVLITSALPYVNNVPHLGNIIGCVLSADVFARYSRLRQWNTLYLCGTDEYGTATETKALEEGLTPQEICDKYHIIHADIYRWFNISFDIFGRTTTPQQTKITQDIFQQLLKRGFVLQDTVEQLRCEHCARFLADRFVEGVCPFCGYEEARGDQCDKCGKLINAVELKKPQCKVCRSCPVVQSSQHLFLDLPKLEKRLEEWLGRTLPGSDWTPNAQFITRSWLRDGLKPRCITRDLKWGTPVPLEGFEDKVFYVWFDATIGYLSITANYTDQWERWWKNPEQVDLYQFMAKDNVPFHSLVFPCSALGAEDNYTLVSHLIATGKYPGRLLMGCS

SEQ ID NO: 806419 - protein, 608 aa, Homo sapiens
MSPTLGTSLVVCSVPMSLPDEYGTATETKALEEGLTPQEICDKYHIIHADIYRWFNISFDIFGRTTTPQQTKITQDIFQQLLKRGFVLQDTVEQLRCEHCARFLADRFVEGVCPFCGYEEARGDQCDKCGKLINAVELKKPQCKVCRSCPVVQSSQHLFLDLPKLEKRLEEWLGRTLPGSDWTPNAQFITRSWLRDGLKPRCITRDLKWGTPVPLEGFEDKVFYVWFDATIGYLSITANYTDQWERWWKNPEQVDLYQFMAKDNVPFHSLVFPCSALGAEDNYTLVSHLIATEYLNYEDGKFSKSRGVGVFGDMAQDTGIPADIWRFYLLYIRPEGQDSAFSWTDLLLKNNSELLNNLGNFINRAGMFVSKFFGGYVPEMVLTPDDQRLLAHVTLELQHYHQLLEKVRIRDALRSILTISRHGNQYIQVNEPWKRIKGSEADRQRAGTVTGLAVNIAALLSVMLQPYMPTVSATIQAQLQLPPPACSILLTNFLCTLPAGHQIGTVSPLFQKLENDQIESLRQRFGGGQAKTSPKPAVVETVTTAKPQQIQALMDEVTKQGNIVRELKAQKADKNEVAAEVAKLLDLKKQLAVAEGKPPEAPKGKKKK

SEQ ID NO: 806420 - protein, 571 aa, Homo sapiens
MIRRAGVISFTRRAMRLFVSDGVPGCLPVLAAAGRARGRAEVLISTVGPEDCVVPFLTRPKVPVLQLDSGNYLFSTSAICRYFFLLSGWEQDDLTNQWLEWEATELQPALSAALYYLVVQGKKGEDVLGSVRRALTHIDHSLSRQNCPFLAGETESLADIVLWGALYPLLQDPAYLPEELSALHSWFQTLSTQEPCQRAAETVLKQQGVLALRPYLQKQPQPSPAEGRAVTNEPEEEELATLSEEEIAMAVTAWEKGLESLPPLRPQQNPVLPVAGERNVLITSALPYVNNVPHLGNIIGCVLSADVFARYSRLRQWNTLYLCGTDEYGTATETKALEEGLTPQEICDKYHIIHADIYRWFNISFDIFGRTTTPQQTKITQDIFQQLLKRGFVLQDTVEQLRCEHCARFLADRFVEGVCPFCGYEEARGDQCDKCGKLINAVELKKPQCKVCRSCPVVQSSQHLFLDLPKLEKRLEEWLGRTLPGSDWTPNAQFITRSWLRDGLKPRCITRDLKWGTPVPLEGFEDKVFYVWFDATIGYLSITANYTDQWERWWKNPEQVSSSWLGCAWGG

SEQ ID NO: 806421 - protein, 914 aa, Homo sapiens; identical to SEQ ID NO: 806392

SEQ ID NO: 806422 - protein, 914 aa, Homo sapiens; identical to SEQ ID NO: 806392

SEQ ID NO: 806423 - protein, 914 aa, Homo sapiens; identical to SEQ ID NO: 806392

SEQ ID NO: 806424 - protein, 945 aa, Homo sapiens
MIRRAGVISFTRRAMRLFVSDGVPGCLPVLAAAGRARGRAEVLISTVGPEDCVVPFLTRPKVPVLQLDSGNYLFSTSAICRYFFLLSGWEQDDLTNQWLEWEATELQPALSAALYYLVVQGKKGEDVLGSVRRALTHIDHSLSRQNCPFLAGETESLADIVLWGALYPLLQDPAYLPEELSALHSWFQTLSTQEPCQRAAETVLKQQGVLALRPYLQKQPQPSPAEGRAVTNEPEEEELATLSEEEIAMAVTAWEKGLESLPPLRPQQNPVLPVAGERNVLITSALPYVNNVPHLGNIIGCVLSADVFARYSRLRQWNTLYLCGTDEYGTATETKALEEGLTPQEICDKYHIIHADIYRWFNISFDIFGRTTTPQQTKITQDIFQQLLKRGFVLQDTVEQLRCEHCARFLADRFVEGVCPFCGYEEARGDQCDKCGKLINAVELKKPQCKVCRSCPVVQSSQHLFLDLPKLEKRLEEWLGRTLPGSDWTPNAQFITRSWLRDGLKPRCITRDLKWGTPVPLEGFEDKVFYVWFDATIGYLSITANYTDQWERWWKNPEQVDLYQFMAKDNVPFHSLVFPCSALGAEDNYTLVSHLIATEYLNYEDGKFSKSRGVGVFGDMAQDTGIPADIWRFYLLYIRPEGQDSAFSWTDLLLKNNSELLNNLGNFINRAGMFVSKFFGGYVPEMVLTPDDQRLLAHVTLELQHYHQLLEKVRIRDALRSILTISRHGNQYIQVNEPWKRIKGSEADRQRAGTVTGLAVNIAALLSVMLQPYMPTVSATIQAQLQLPPPACSILLTNFLCTLPAGHQIGTVSPLFQKLENDQIESLRQRFGGGQAKTSPKPAVVETVTTAKPQQIQALMDEVTKQGNIVRELKAQKADKNEVAAEVAKLLDLKKQLAVAEGKPPEAPTLHFQEVKHRYPHFHLKTGPLAGPHTRLPAPSWTVSR

SEQ ID NO: 806425 - protein, 776 aa, Homo sapiens; identical to SEQ ID NO: 806400

SEQ ID NO: 806426 - protein, 882 aa, Homo sapiens; identical to SEQ ID NO: 806397

SEQ ID NO: 806427 - protein, 835 aa, Homo sapiens; identical to SEQ ID NO: 806399

SEQ ID NO: 806428 - protein, 835 aa, Homo sapiens; identical to SEQ ID NO: 806399

SEQ ID NO: 806429 - protein, 734 aa, Homo sapiens; identical to SEQ ID NO: 806402

SEQ ID NO: 806430 - protein, 604 aa, Homo sapiens
MIRRAGVISFTRRAMRLFVSDGVPGCLPVLAAAGRARGRAEVLISTVGPEDCVVPFLTRPKVPVLQLDSGNYLFSTSAICRYFFLLSGWEQDDLTNQWLEWEATELQPALSAALYYLVVQGKKGEDVLGSVRRALTHIDHSLSRQNCPFLAGETESLADIVLWGALYPLLQDPAYLPEELSALHSWFQTLSTQEPCQRAAETVLKQQGVLALRPYLQKQPQPSPAEGRAVTNEPEEEELATLSEEEIAMAVTAWEKGLESLPPLRPQQNPVLPVAGERNVLITSALPYVNNVPHLGNIIGCVLSADVFARYSRLRQWNTLYLCGTDEYGTATETKALEEGLTPQEICDKYHIIHADIYRWFNISFDIFGRTTTPQQTKITQDIFQQLLKRGFVLQDTVEQLRCEHCARFLADRFVEGVCPFCGYEEARGDQCDKCGKLINAVELKKPQCKVCRSCPVVQSSQHLFLDLPKLEKRLEEWLGRTLPGSDWTPNAQFITRSWLRDGLKPRCITRDLKWGTPVPLEGFEDKVFYVWFDATIGYLSITANYTDQWERWWKNPEQVDLYQFMAKDNVPFHSLVFPCSALGAEDNYTLGETLGSKETVGCS

SEQ ID NO: 806431 - protein, 1286 aa, Homo sapiens
MIRRAGVISFTRRAMRLFVSDGVPGCLPVLAAAGRARGRAEVLISTVGPEDCVVPFLTRPKVPVLQLDSGNYLFSTSAICRYFFLLSGWEQDDLTNQWLEWEATELQPALSAALYYLVVQGKKGEDVLGSVRRALTHIDHSLSRQNCPFLAGETESLADIVLWGALYPLLQDPAYLPEELSALHSWFQTLSTQEPCQRAAETVLKQQGVLALRPYLQKQPQPSPAEGRAVTNEPEEEELATLSEEEIAMAVTAWEKGLESLPPLRPQQNPVLPVAGERNVLITSALPYVNNVPHLGNIIGCVLSADVFARYSRLRQWNTLYLCGTDEYGTATETKALEEGLTPQEICDKYHIIHADIYRWFNISFDIFGRTTTPQQTKITQDIFQQLLKRGFVLQDTVEQLRCEHCARFLADRFVEGVCPFCGYEEARGDQCDKCGKLINAVELKKMELALVPVSAHGNFYEGDCYVILSTRRVASLLSQDIHFWIGKDSSQDEQSCAAIYTTQLDDYLGGSPVQHREVQYHESDTFRGYFKQGIIYKQGGVASGMKHVETNTYDVKRLLHVKGKRNIRATEVEMSWDSFNRGDVFLLDLGKVIIQWNGPESNSGERLKAMLLAKDIRDRERGGRAEIGVIEGDKEAASPELMKVLQDTLGRRSIIKPTVPDEIIDQKQKSTIMLYHISDSAGQLAVTEVATRPLVQDLLNHDDCYILDQSGTKIYVWKGKGATKAEKQAAMSKALGFIKMKSYPSSTNVETVNDGAESAMFKQLFQKWSVKDQTMGLGKTFSIGKIAKVFQDKFDVTLLHTKPEVAAQERMVDDGNGKVEVWRIENLELVPVEYQWYGFFYGGDCYLVLYTYEVNGKPHHILYIWQGRHASQDELAASAYQAVEVDRQFDGAAVQVRVRMGTEPRHFMAIFKGKLVIFEGGTSRKGNAEPDPPVRLFQIHGNDKSNTKAVEVPAFASSLNSNDVFLLRTQAEHYLWYGKGSSGDERAMAKELASLLCDGSENTVAEGQEPAEFWDLLGGKTPYANDKRYGNTASPSSGLPLPARLVNCTKAKTSVLKTFLSSLMPLNGLYCRLQQEILDVQSRLFECSNKTGQFVVTEITDFTQDDLNPTDVMLLDTWDQVFLWIGAEANATEKESALATAQQYLHTHPSGRDPDTPILIIKQGFEPPIFTGWFLAWDPNIWSAGKTYEQLKEELGDAAAIMRITADMKNATLSLNSNDSEPKYYPIAVLLKNQNQELPEDVNPAKKENYLSEQDFVSVFGITRGQFAALPGWKQLQMKKEKGLF

SEQ ID NO: 806432 - protein, 1010 aa, Homo sapiens; identical to SEQ ID NO: 806411

SEQ ID NO: 806433 - protein, 385 aa, Homo sapiens
MIRRAGVISFTRRAMRLFVSDGVPGCLPVLAAAGRARGRAEVLISTVGPEDCVVPFLTRPKVPVLQLDSGNYLFSTSAICRYFFLLSGWEQDDLTNQWLEWEATELQPALSAALYYLVVQGKKGEDVLGSVRRALTHIDHSLSRQNCPFLAGETESLADIVLWGALYPLLQDPAYLPEELSALHSWFQTLSTQEPCQRAAETVLKQQGVLALRPYLQKQPQPSPAEGRAVTNEPEEEELATLSEEEIAMAVTAWEKGLESLPPLRPQQNPVLPVAGERNVLITSALPYVNNVPHLGNIIGCVLSADVFARYSRLRQWNTLYLCGTDEYGTATETKALEEGLTPQEICDKYHIIHADIYRWFNISFDIFGRTTTPQQTKYCGATAM

SEQ ID NO: 806434 - protein, 133 aa, Homo sapiens
KEAGTNPEGRTIPWGDPKWPPTLKRSRLLSCAGGPETSTAKGKHTTPCPSAPLPKACVSSRFPYPLQGPVAPATKVAMLTPEALRLRQNWGWGREKARWWRSGGNGLSDGHPVLERGCVLLTCLPADRPNDEA

SEQ ID NO: 806435 - protein, 836 aa, Homo sapiens [sequence omitted]

SEQ ID NO: 806436 - protein, 836 aa, Homo sapiens [sequence omitted]

SEQ ID NO: 806437 - protein, 836 aa, Homo sapiens [sequence omitted]

SEQ ID NO: 806438 - protein, 452 aa, Homo sapiens
MQTPNLRLTGELGRVHFWSPLCMASMPHFFQGCTDHRYCQRKSYSLQVPSDILHLPVELHDFSWKLLVPKDRLSLVLVPAQKLQQHTHEKPCNTSFSYLVASAIPSQDLYFGSFCPGGSIKQIQVKQNISVTLRTFAPSFRQEASRQGLTVSFIPYFKEEGVFTVTPDTKSKVYLRTPNWDRGLPSLTSVSWNISVPRDQVACLTFFKERSGVVCQTGRAFMIIQEQRTRAEEIFSLDEDVLPKPSFHHHSFWVNISNCSPTSGKQLDLLFSVTLTPRTVDLTVILIAAVGGGVLLLSALGLIICCVKKKKKKTNKGPAVGIYNGNINTEMPRQPKKFQKGRKDNDSHVYAVIEDTMVYGHLLQDSSGSFLQPEVDTYRPFQGTMGVCPPSPPTICSRAPTAKLATEEPPPRSPPESESEPYTFSHPNNGDVSSKDTDIPLLNTQEPMEPAE

SEQ ID NO: 806439 - protein, 487 aa, Homo sapiens
MAGLNCGVSIALLGVLLLGAARLPRGAEAFEIALPRESNITVLIKLGTPTLLAKPCYIVISKRHITMLSIKSGERIVFTFSCQSPENHFVIEIQKNIDCMSGPCPFGEVQLQPSTSLLPTLNRTFIWDVKAHKSIGLELQFSIPRLRQIGPGESCPDGVTHSISGRIDATVVRIGTFCSNGTVSRIKMQEGVKMALHLPWFHPRNVSGFSIANRSSIKRLCIIESVFEGEGSATLMSANYPEGFPEDELMTWQFVVPAHLRASVSFLNFNLSNCERKEERVEYYIPGSTTNPEVFKLEDKQPGNMAGNFNLSLQGCDQDAQSPGILRLQFQVLVQHPQNESNKIYVVDLSNERAMSLTIEPRPVKQSRKFVPGCFVCLESRTCSSNLTLTSGSKHKISFLCDDLTRLWMNVEKTISTPLNQCICPWPWIALLSPPCLSGVPWVGCKSYQKGPSGRARWLTPVIPALWEAKAGGSLEVRSSRPAWPTW

SEQ ID NO: 806440 - protein, 836 aa, Homo sapiens [sequence omitted]

SEQ ID NO: 806441 - protein, 836 aa, Homo sapiens [sequence omitted]

SEQ ID NO: 806442 - protein, 836 aa, Homo sapiens [sequence omitted]

SEQ ID NO: 806443 - protein, 836 aa, Homo sapiens [sequence omitted]

SEQ ID NO: 806444 - protein, 716 aa, Homo sapiens
MSGSKKKKVTKAERLKLLQEEEERRLKEEEEARLKYEKEEMERLEIQRIEKEKWHRLEAKDLERRNEELEELYLLERCFPEAEKLKQETKLLSQWKHYIQCDGSPDPSVAQEMNTFISLWKEKTNETFEEVIEKSKVVLNLIEKLKFILLETPPCDLQDKNIIQYQESILQLQELLHLKFGVATEILLKQASTLADLDSGNMEKVIKDENVTLYVWANLKKNPRHRSVRFSETQIGFEIPRILATSDIAVRLLHTHYDHVSALHPVSTPSKEYTSAVTELVKDDVKNVEKAISKEVEEESKQQERGSHLIQEEEIKVEEEQGDIEVKMSSAEEESEAIKCEREMKVLSETVSAAQLLLVENSSEKPDFFEDNVVDLCQFTTLGGVYHLDILELPPQCKPVKGWMIVEILKEGLQKYTYPPETTEEFETENAFPPIEVHLRFMRIVIFFEDPVVVRWDAEGKHWRTDGISNVSYKPKERLVTFSLDTFGPVTLIQDAHINMPYQSWELRPLDVNKVLLTVTTVFTEIQIQIKENLCMLSSIKLKDKKHISILEGTWMTPIPFIIALKEAGLNIFPTRHSHFYVIINNKVPLVEVKAYRQMALLSSAFAFGWSKWNLLCNSTKVVFKVREHLTEECTENPNWALLMFSGDRAQRLKIKEESEAFSEALKEETEFHSTLYHMVKDFASEEAMEKVRSSNCQFVNSVCHMLLSTRLLSYS

SEQ ID NO: 806445 - protein, 676 aa, Homo sapiens
MERLEIQRIEKEKWHRLEAKDLERRNEELEELYLLERCFPEAEKLKQETKLLSQWKHYIQCDGSPDPSVAQEMNTFISLWKEKTNETFEEVIEKSKVVLNLIEKLKFILLETPPCDLQDKNIIQYQESILQLQELLHLKFGVATEILLKQASTLADLDSGNMEKVIKDENVTLYVWANLKKNPRHRSVRFSETQIGFEIPRILATSDIAVRLLHTHYDHVSALHPVSTPSKEYTSAVTELVKDDVKNVEKAISKEVEEESKQQERGSHLIQEEEIKVEEEQGDIEVKMSSAEEESEAIKCEREMKVLSETVSAAQLLLVENSSEKPDFFEDNVVDLCQFTTLGGVYHLDILELPPQCKPVKGWMIVEILKEGLQKYTYPPETTEEFETENAFPPIEVHLRFMRIVIFFEDPVVVRWDAEGKHWRTDGISNVSYKPKERLVTFSLDTFGPVTLIQDAHINMPYQSWELRPLDVNKVLLTVTTVFTEIQIQIKENLCMLSSIKLKDKKHISILEGTWMTPIPFIIALKEAGLNIFPTRHSHFYVIINNKVPLVEVKAYRQMALLSSAFAFGWSKWNLLCNSTKVVFKVREHLTEECTENPNWALLMFSGDRAQRLKIKEESEAFSEALKEETEFHSTLYHMVKDFASEEAMEKVRSSNCQFVNSVCHMLLSTRLLSYS

SEQ ID NO: 806446 - protein, 774 aa, Homo sapiens
MSGSKKKKVTKAERLKLLQEEEERRLKEEVTVLKKGELTLFSYLPCNKDCDFYKRFHHYILKILGVILRAEKYSDLFTEKKIIFGSLEEARLKYEKEEMERLEIQRIEKEKWHRLEAKDLERRNEELEELYLLERCFPEAEKLKQETKLLSQWKHYIQCDGSPDPSVAQEMNTFISLWKEKTNETFEEVIEKSKVVLNLIEKLKFILLETPPCDLQDKNIIQYQESILQLQELLHLKFGVATEILLKQASTLADLDSGNMEKVIKDENVTLYVWANLKKNPRHRSVRFSETQIGFEIPRILATSDIAVRLLHTHYDHVSALHPVSTPSKEYTSAVTELVKDDVKNVEKAISKEVEEESKQQERGSHLIQEEEIKVEEEQGDIEVKMSSAEEESEAIKCEREMKVLSETVSAAQLLLVENSSEKPDFFEDNVVDLCQFTTLGGVYHLDILELPPQCKPVKGWMIVEILKEGLQKYTYPPETTEEFETENAFPPIEVHLRFMENVIFFEDPVVVRWDAEGKHWRTDGISNVSYKPKERLVTFSLDTFGPVTLIQDAHINMPYQSWELRPLDVNKVLLTVTTVFTEIQIQIKENLCMLSSIKLKDKKHISILEGTWMTPIPFIIALKEAGLNIFPTRHSHFYVIINNKVPLVEVKAYRQMALLSSAFAFGWSKWNLLCNSTKVVFKVREHLTEECTENPNWALLMFSGDRAQRLKIKEESEAFSEALKEETEFHSTLYHMVKDFASEEAMEKVRSSNCQFVNSVCHMLLSTRLLSYS

SEQ ID NO: 806447 - protein, 444 aa, Homo sapiens
MSGSKKKKVTKAERLKLLQEEEERRLKEEEEARLKYEKEEMERLEIQRIEKEKWHRLEAKDLERRNEELEELYLLERCFPEAEKLKQETKLLSQWKHYIQCDGSPDPSVAQEMNTFISLWKEKTNETFEEVIEKSKVVLNLIEKLKFILLETPPCDLQDKNIIQYQESILQLQELLHLKFGVATEILLKQASTLADLDSGNMEKVIKDENVTLYVWANLKKNPRHRSVRFSETQIGFEIPRILATSDIAVRLLHTHYDHVSALHPVSTPSKEYTSAVTELVKDDVKNVEKAISKEVEEESKQQERGSHLIQEEEIKVEEEQGDIEVKMSSAEEESEAIKCEREMKVLSETVSAAQLLLVENSSEKPDFFEDNVVDLCQFTTLGGVYHLDILELPPQCKPVKGWMIVEILKEGLQKYTYPPETTEEFETENAFPPIEVHLRFMRM

SEQ ID NO: 806448 - protein, 257 aa, Homo sapiens
MSGSKKKKVTKAERLKLLQEEEERRLKEEVTVLKKGELTLFSYLPCNKDCDFYKRFHHYILKILGVILRAEKYSDLFTEKKIIFGSLEEARLKYEKEEMERLEIQRIEKEKWHRLEAKDLERRNEELEELYLLERCFPEAEKLKQETKLLSQWKHYIQCDGSPDPSVAQEMNTFISLWKEKTNETFEEVIEKSKVVLNLIEKLKFILLETPPCDLQDKNIIQYQESILQLQELLHLKFGVATEILLKVSVIFCLYIK

SEQ ID NO: 806449 - protein, 676 aa, Homo sapiens; identical to SEQ ID NO: 806445

SEQ ID NO: 806450 - protein, 604 aa, Homo sapiens
MNTFISLWKEKTNETFEEVIEKSKVVLNLIEKLKFILLETPPCDLQDKNIIQYQESILQLQELLHLKFGVATEILLKQASTLADLDSGNMEKVIKDENVTLYVWANLKKNPRHRSVRFSETQIGFEIPRILATSDIAVRLLHTHYDHVSALHPVSTPSKEYTSAVTELVKDDVKNVEKAISKEVEEESKQQERGSHLIQEEEIKVEEEQGDIEVKMSSAEEESEAIKCEREMKVLSETVSAAQLLLVENSSEKPDFFEDNVVDLCQFTTLGGVYHLDILELPPQCKPVKGWMIVEILKEGLQKYTYPPETTEEFETENAFPPIEVHLRFMRIVIFFEDPVVVRWDAEGKHWRTDGISNVSYKPKERLVTFSLDTFGPVTLIQDAHINMPYQSWELRPLDVNKVLLTVTTVFTEIQIQIKENLCMLSSIKLKDKKHISILEGTWMTPIPFIIALKEAGLNIFPTRHSHFYVIINNKVPLVEVKAYRQMALLSSAFAFGWSKWNLLCNSTKVVFKVREHLTEECTENPNWALLMFSGDRAQRLKIKEESEAFSEALKEETEFHSTLYHMVKDFASEEAMEKVRSSNCQFVNSVCHMLLSTRLLSYS

SEQ ID NO: 806451 - protein, 169 aa, Homo sapiens
MERLEIQRIEKEKWHRLEAKDLERRNEELEELYLLERCFPEAEKLKQETKLLSQWKHYIQCDGSPDPSVAQEMNTFISLWKEKTNETFEEVIEKSKVVLNLIEKLKFILLETPPCDLQDKNIIQYQESILQLQELLHLKFGVATEILLKVNIGELMASAMYPTNQKKDL

SEQ ID NO: 806452 - protein, 104 aa, Homo sapiens
MSPVRDHLSFEQELTPSTPWWRTKKAQLVVTAHVDPIELVVFLPALCHKMGVPYCIIKGKGRLGCLVHRKTKLVEAIRTNYNDRYDEIHRHWGGNVLAPKSVAR

SEQ ID NO: 806453 - protein, 557 aa, Homo sapiens
GSAAAGRRRVGLEPVTMPRRKQSHPQPVKCEGVKVDTEDSLDEGPGALVLESDLLLGQDLEFEEEEEEEEGDGNSDQLMGFERDSEGDSLGARPGLPYGLSDDESGGGRALSAESEVEEPARGPGEARGERPGPACQLCGGPTGEGPCCGAGGPGGGPLLPPRLLYSCRLCTFVSHYSSHLKRHMQTHSGEKPFRCGRCPYASAQLVNLTRHTRTHTGEKPYRCPHCPFACSSLGNLRRHQRTHAGPPTPPCPTCGFRCCTPRPARPPSPTEQEGAVPRRPEDALLLPDLSLHVPPGGASFLPDCGQLRGEGEGLCGTGSEPLPELLFPWTCRGCGQELEEGEGSRLGAAMCGRCMRGEAGGGASGGPQGPSDKGFACSLCPFATHYPNHLARHMKTHSGEKPFRCARCPYASAHLDNLKRHQRVHTGEKPYKCPLCPYACGNLANLKRHGRIHSGDKPFRCSLCNYSCNQSMNLKRHMLRHTGEKPFRCATCAYTTGHWDNYKRHQKVHGHGGAGGPGLSASEGWAPPHSPPSVLSSRGPPALGTAGSRAVHTDSS

SEQ ID NO: 806454 - protein, 480 aa, Homo sapiens
MSLLMSISPGDSLGARPGLPYGLSDDESGGGRALSAESEVEEPARGPGEARGERPGPACQLCGGPTGEGPCCGAGGPGGGPLLPPRLLYSCRLCTFVSHYSSHLKRHMQTHSGEKPFRCGRCPYASAQLVNLTRHTRTHTGEKPYRCPHCPFACSSLGNLRRHQRTHAGPPTPPCPTCGFRCCTPRPARPPSPTEQEGAVPRRPEDALLLPDLSLHVPPGGASFLPDCGQLRGEGEGLCGTGSEPLPELLFPWTCRGCGQELEEGEGSRLGAAMCGRCMRGEAGGGASGGPQGPSDKGFACSLCPFATHYPNHLARHMKTHSGEKPFRCARCPYASAHLDNLKRHQRVHTGEKPYKCPLCPYACGNLANLKRHGRIHSGDKPFRCSLCNYSCNQSMNLKRHMLRHTGEKPFRCATCAYTTGHWDNYKRHQKVHGHGGAGGPGLSASEGWAPPHSPPSVLSSRGPPALGTAGSRAVHTDSS

SEQ ID NO: 806455 - protein, 472 aa, Homo sapiens
GSAAAGRRRVGLEPVTMPRRKQSHPQPVKCEGVKVDTEDSLDEGPGALVLESDLLLGQDLEFEEEEEEEEGDGNSDQLMGFERDSEGDSLGARPGLPYGLSDDESGGGRALSAESEVEEPARGPGEARGERPGPACQLCGGPTCACSSLGNLRRHQRTHAGPPTPPCPTCGFRCCTPRPARPPSPTEQEGAVPRRPEDALLLPDLSLHVPPGGASFLPDCGQLRGEGEGLCGTGSEPLPELLFPWTCRGCGQELEEGEGSRLGAAMCGRCMRGEAGGGASGGPQGPSDKGFACSLCPFATHYPNHLARHMKTHSGEKPFRCARCPYASAHLDNLKRHQRVHTGEKPYKCPLCPYACGNLANLKRHGRIHSGDKPFRCSLCNYSCNQSMNLKRHMLRHTGEKPFRCATCAYTTGHWDNYKRHQKVHGHGGAGGPGLSASEGWAPPHSPPSVLSSRGPPALGTAGSRAVHTDSS

SEQ ID NO: 806456 - protein, 410 aa, Homo sapiens
GSAAAGRRRVGLEPVTMPRRKQSHPQPVKCEGVKVDTEDSLDEGPGALVLESDLLLGQLVNLTRHTRTHTGEKPYRCPHCPFACSSLGNLRRHQRTHAGPPTPPCPTCGFRCCTPRPARPPSPTEQEGAVPRRPEDALLLPDLSLHVPPGGASFLPDCGQLRGEGEGLCGTGSEPLPELLFPWTCRGCGQELEEGEGSRLGAAMCGRCMRGEAGGGASGGPQGPSDKGFACSLCPFATHYPNHLARHMKTHSGEKPFRCARCPYASAHLDNLKRHQRVHTGEKPYKCPLCPYACGNLANLKRHGRIHSGDKPFRCSLCNYSCNQSMNLKRHMLRHTGEKPFRCATCAYTTGHWDNYKRHQKVHGHGGAGGPGLSASEGWAPPHSPPSVLSSRGPPALGTAGSRAVHTDSS

SEQ ID NO: 806457 - protein, 362 aa, Homo sapiens
  misc_feature (27)..(27): Xaa can be any naturally occurring amino acid
PFLSGPAAPPCSGRPWAAPGLARRQGXRPFMEPPACSSLGNLRRHQRTHAGPPTPPCPTCGFRCCTPRPARPPSPTEQEGAVPRRPEDALLLPDLSLHVPPGGASFLPDCGQLRGEGEGLCGTGSEPLPELLFPWTCRGCGQELEEGEGSRLGAAMCGRCMRGEAGGGASGGPQGPSDKGFACSLCPFATHYPNHLARHMKTHSGEKPFRCARCPYASAHLDNLKRHQRVHTGEKPYKCPLCPYACGNLANLKRHGRIHSGDKPFRCSLCNYSCNQSMNLKRHMLRHTGEKPFRCATCAYTTGHWDNYKRHQKVHGHGGAGGPGLSASEGWAPPHSPPSVLSSRGPPALGTAGSRAVHTDSS

SEQ ID NO: 806458 - protein, 345 aa, Homo sapiens
GSAAAGRRRVGLEPVTMPRRKQSHPQPVKCEGVKVDTEDSLDEGPGALVLESDLLLGQDLEFEEEEEEEEGDGNSDQLMGFERDSEGDSLGARPGLPYGLSDDESGGGRALSAESEVEEPARGPGEARGERPGPACQLCGGPTGEGPCCGAGGPGGGPLLPPRLLYSCRLCTFVSHYSSHLKRHMQTHSGEKPFRCGRCPYASAQLVNLTRHTRTHTGEKPYRCPHCPFACSSLGNLRRHQRTHAGPPTPPCPTCGFRCCTPRPARPPSPTEQEGAVPRRPEDALLLPDLSLHVPPGGASFLPDCGQLRGEGEGLCGTGSEPLPELLFPWTCRGCGQELEEDTQW

SEQ ID NO: 806459 - protein, 163 aa, Homo sapiens
MKTHSGEKPFRCARCPYASAHLDNLKRHQRVHTGEKPYKCPLCPYACGNLANLKRHGRIHSGDKPFRCSLCNYSCNQSMNLKRHMLRHTGEKPFRCATCAYTTGHWDNYKRHQKVHGHGGAGGPGLSASEGWAPPHSPPSVLSSRGPPALGTAGSRAVHTDSS

SEQ ID NO: 806460 - protein, 557 aa, Homo sapiens; identical to SEQ ID NO: 806453

SEQ ID NO: 806461 - protein, 449 aa, Homo sapiens
GSAAAGRRRVGLEPVTMPRRKQSHPQPVKCEGVKVDTEDSLDEGPGALVLESDLLLGQDLEFEEEEEEEEGDGNSDQLMGFERDSEGDSLGARPGLPYGLSDDESGGGRALSAESEVEEPARGPGEARGERPGPACQLCGGPTGEGPCCGAGGPGGGPLLPPRLLYSCRLCTFVSHYSSHLKRHMQTHSGEKPFRCGRCPYASAQLVNLTRHTRTHTGEKPYRCPHCPFACSSLGNLRRHQRTHAGPPTPPCPTCGFRCCTPRPARPPSPTEQEGAVPRRPEDALLLPDLSLHVPPGGASFLPDCGQLRGEGEGLCGTGSEPLPELLFPWTCRGCGQELEEGEGSRLGAAMCGRCMRGEAGGGASGGPQGPSDKGFACSLCPFATHYPNHLARHMKTHSGEKPFRCARCPYASAHLDNLKRHQRVHTGEYTDGPEATFFSPAGQGLHTD

SEQ ID NO: 806462 - protein, 335 aa, Homo sapiens
GSAAAGRRRVGLEPVTMPRRKQSHPQPVKCEGVKVDTEDSLDEGPGALVLESDLLLGQDLEFEEEEEEEEGDGNSDQLMGFERDSEGDSLGARPGLPYGLSDDESGGGRALSAESEVEEPARGPGEARGERPGPACQLCGGPTGEGPCCGAGGPGGGPLLPPRLLYSCRLCTFVSHYSSHLKRHMQTHSGEKPFRCGRCPYASAQLVNLTRHTRTHTGEKPYRCPHCPFACSSLGNLRRHQRTHAGPPTPPCPTCGFRCCTPRPARPPSPTEQEGAVPRRPEDALLLPDFIQTDQKPPFSPPLARGSTQTNVGTIRTSPTPWAGGPIWTRGPCLD

SEQ ID NO: 806463 - protein, 166 aa, Homo sapiens
GSAAAGRRRVGLEPVTMPRRKQSHPQPVKCEGVKVDTEDSLDEGPGALVLESDLLLGQDLEFEEEEEEEEGDGNSDQLMGFERDSEGDSLGARPGLPYGLSDDESGGGRALSAESEVEEPARGPGEARGERPGPACQLCGGPTGVYRRTRSHLFLPRWPGAPHRLT

SEQ ID NO: 806464 - protein, 479 aa, Homo sapiens
MGFERDSEGDSLGARPGLPYGLSDDESGGGRALSAESEVEEPARGPGEARGERPGPACQLCGGPTGEGPCCGAGGPGGGPLLPPRLLYSCRLCTFVSHYSSHLKRHMQTHSGEKPFRCGRCPYASAQLVNLTRHTRTHTGEKPYRCPHCPFACSSLGNLRRHQRTHAGPPTPPCPTCGFRCCTPRPARPPSPTEQEGAVPRRPEDALLLPDLSLHVPPGGASFLPDCGQLRGEGEGLCGTGSEPLPELLFPWTCRGCGQELEEGEGSRLGAAMCGRCMRGEAGGGASGGPQGPSDKGFACSLCPFATHYPNHLARHMKTHSGEKPFRCARCPYASAHLDNLKRHQRVHTGEKPYKCPLCPYACGNLANLKRHGRIHSGDKPFRCSLCNYSCNQSMNLKRHMLRHTGEKPFRCATCAYTTGHWDNYKRHQKVHGHGGAGGPGLSASEGWAPPHSPPSVLSSRGPPALGTAGSRAVHTDSS

SEQ ID NO: 806465 - protein, 411 aa, Homo sapiens
GSAAAGRRRVGLEPVTMPRRKQSHPQPVKCEGVKVDTEDSLDEGPGALVLESDLLLGQDLEFEEEEEEEEGDGNSDQLMGFERDSEGDSLGARPGLPYGLSDDESGGGRALSAESEVEEPARGPGEARGERPGPACQLCGGPTGSLHVPPGGASFLPDCGQLRGEGEGLCGTGSEPLPELLFPWTCRGCGQELEEGEGSRLGAAMCGRCMRGEAGGGASGGPQGPSDKGFACSLCPFATHYPNHLARHMKTHSGEKPFRCARCPYASAHLDNLKRHQRVHTGEKPYKCPLCPYACGNLANLKRHGRIHSGDKPFRCSLCNYSCNQSMNLKRHMLRHTGEKPFRCATCAYTTGHWDNYKRHQKVHGHGGAGGPGLSASEGWAPPHSPPSVLSSRGPPALGTAGSRAVHTDSS

SEQ ID NO: 806466 - protein, 287 aa, Homo sapiens
MEVMWRCPELTEDALLLPDLSLHVPPGGASFLPDCGQLRGEGEGLCGTGSEPLPELLFPWTCRGCGQELEEGEGSRLGAAMCGRCMRGEAGGGASGGPQGPSDKGFACSLCPFATHYPNHLARHMKTHSGEKPFRCARCPYASAHLDNLKRHQRVHTGEKPYKCPLCPYACGNLANLKRHGRIHSGDKPFRCSLCNYSCNQSMNLKRHMLRHTGEKPFRCATCAYTTGHWDNYKRHQKVHGHGGAGGPGLSASEGWAPPHSPPSVLSSRGPPALGTAGSRAVHTDSS

SEQ ID NO: 806467 - protein, 557 aa, Homo sapiens; identical to SEQ ID NO: 806453

SEQ ID NO: 806468 - protein, 530 aa, Homo sapiens
GSAAAGRRRVGLEPVTMPRRKQSHPQPVKCEGVKVDTEDSLDEGPGALVLESDLLLGQDLEFEEEEEEEEGDGNSDQLMGFERDSEGDSLGARPGLPYGLSDDESGGGRALSAESEVEEPARGPGEARGERPGPACQLCGGPTGEGPCCGAGGPGGGPLLPPRLLYSCRLCTFVSHYSSHLKRHMQTHSGEKPFRCGRCPYASAQLVNLTRHTRTHTGEKPYRCPHCPFACSSLGNLRRHQRTHAGPPTPPCPTCGFRCCTPRPARPPSPTEQEGAVPRRPEDALLLPDLSLHVPPGGASFLPDCGQLRGEGEGLCGTGSEPLPELLFPWTCRGCGQELEEGEGSRLGAAMCGRCMRGEAGGGASGGPQGPSDKGFACSLCPFATHYPNHLARHMKTHSGEKPFRCARCPYASAHLDNLKRHQRVHTGEKPYKCPLCPYACGNLANLKRHGRIHSGDKPFRCSLCNYSCNQSMNLKRHMLRHTGEKPFRCATCAYTTGHWDNYKRHQKVHYTDGPEATFFSPAGQGLHTD

SEQ ID NO: 806469 - protein, 499 aa, Homo sapiens
GSAAAGRRRVGLEPVTMPRRKQSHPQPVKCEGVKVDTEDSLDEGPGALVLESDLLLGQDLEFEEEEEEEEGDGNSDQLMGFERDSEGDSLGARPGLPYGLSDDESGGGRALSAESEVEEPARGPGEARGERPGPACQLCGGPTGEGPCCGAGGPGGGPLLPPRLLYSCRLCTFVSHYSSHLKRHMQTHSGEKPFRCGRCPYASAQLVNLTRHTRTHTGEKPYRCPHCPFACSSLGNLRRHQRTHAGPPTPPCPTCGFRCCTPRPARPPSPTEQEGAVPRRPEDALLLPDLSLHVPPGGASFLPDCGQLRGEGEGLCGTGSEPLPELLFPWTCRGCGQELEEGEGSRLGAAMCGRCMRGEAGGGASGGPQGPSDKGFACSLCPFATHYPNHLARHMKTHSGEKPFRCARCPYASAHLDNLKRHQRVHTGEKPYKCPLCPYACGNLANLKRRRRRERPELGAGARAGGCPGPAPLHGGGPRALRGRADRRAEIGGAGSGGR

SEQ ID NO: 806470 - protein, 93 aa, Homo sapiens
GSAAAGRRRVGLEPVTMPRRKQSHPQPVKCEGVKVDTEDSLDEGPGALVLESDLLLGQDLEFEEEEEEEEGDGNSDQLMGFERDSEGGFSGLG

SEQ ID NO: 806471 - protein, 94 aa, Homo sapiens
QQQLGSLLSYTSGHWSNPTQNPSFPLACRTTGTVMMVTSAAAPSSPRRTFHGVCKPSRSSPIRGKRVAPVSVGGSGLLQRQQDLQEGRLYTENK

SEQ ID NO: 806472 - protein, 160 aa, Homo sapiens
MQKPKIKKSVSHERVSKMNFKLTGKGITFFSSESKKYERPKDDREEEFNTWVNNMYVFFVNTLFHAYKREEAIKEKIRADRLRSTAQAQQRKMEDDELEARLNIFILREEEAKRHDYEVDITVLKEPADVSSSHLILDPPKEDVTVSPSSKTITSKKKKK

SEQ ID NO: 806473 - protein, 229 aa, Homo sapiens
LKPIDYVFEEPSISLFALEHCEGRELHLEEAVNSVLNKDLHFYTQSVWVKSGLWIAYEGSNFLGRQILLRPNEIPNWTAFSRWKTIGSLRPMKQPAVYIRIKNRAQGEYLTVTGSLADTRATSVCISPYSGKHTQIWYYCRGLFKSKASDTCLDVIGGRDTPGAKVALWTEHGQFRQKWRLNKNGTISSYLSDQLVLDVKGGNYCDKTHVIVNQPLEGEETQKWDIEIL

SEQ ID NO: 806474 - protein, 300 aa, Homo sapiens
MAEPTVCSFLTKVLCAHGGRMFLKDLRGHVELSEARLRDVLQRAGPERFLLQEVETQEGLGDAEAEAAAGAVGGGGTSAWRVVAVSSVRLCARYQRGECQACDQLHFCRRHMLGKCPNRDCWSTCTLSHDIHTPVNMQVLKSHGLFGLNENQLRILLLQNDPCLLPEVCLLYNKGEALYGYCNLKDKCNKFHVCKSFVKGECKLQTCKRSHQLIHAASLKLLQDQGLNIPSVVNFQIISTYKHMKLHKMLENTDNSSPSTEHSQGLEKQGVHAAGAAEAGPLASVPAQSAKKPCPVSCEK

SEQ ID NO: 806475 - protein, 163 aa, Homo sapiens
MPQAPYPASTRRGRPSPGLPQAHPSPGPGPSPGCSLEIVDVTGRSLPAPARCAARTGPAPATMAEPTVCSFLTKVLCAHGGRMFLKDLRGHVELSEARLRDVLQRAGPERFLLQEVETQEGLGDAEAEAAAGAVGGGGTSAWRVVAVSTIGACHHTQLIFLGF

SEQ ID NO: 806476 - protein, 96 aa, Homo sapiens
AKKKRKTNISGVPSFLYQVCLLYNKGEALYGYCNLKDKCNKFHVCKSFVKGECKLQTCKRSHQLIHAASLKLLQDQGLNIPSVVNFQIISTYKHMK

SEQ ID NO: 806477 - protein, 107 aa, Homo sapiens
DRPSVWRAGPDEVSEHGAIDVPEEILVLTSAMDSRANIKAVRRNARRSDNCCTREFRGSLTIGSVAYQDVLQAMLDDAKVISPGLGHCTQPDVPSFISAIPSSYLTT

SEQ ID NO: 806478 - protein, 219 aa, Homo sapiens
MEAPGAPPRTLTWEAMEQIRYLHEEFPESWSVPRLAEGFDVSTDVIRRVLKSKFLPTLEQKLKQDQKVLKKAGLAHSLQHLRGSGNTSKLLPAGHSVSGSLLMPGHEASSKDPNHSTALKVIESDTHRTNTPRRRKGRNKEIQDLEESFVPVAAPLGHPRELQKYSSDSESPRGTGSGALPSGQKLEELKAEEPDNFSSKVVQRGREFFDSNGNFLYRI

SEQ ID NO: 806479 - protein, 219 aa, Homo sapiens; identical to SEQ ID NO: 806478

SEQ ID NO: 806480 - protein, 219 aa, Homo sapiens; identical to SEQ ID NO: 806478

SEQ ID NO: 806481 - protein, 219 aa, Homo sapiens; identical to SEQ ID NO: 806478

SEQ ID NO: 806482 - protein, 219 aa, Homo sapiens; identical to SEQ ID NO: 806478

SEQ ID NO: 806483 - protein, 117 aa, Homo sapiens
MPGHEASSKDPNHSTALKVIESDTHRTNTPRRRKGRNKEIQDLEESFVPVAAPLGHPRELQKYSSDSESPRGTGSGALPSGQKLEELKAEEPDNFSSKVVQRGREFFDSNGNFLYRI

SEQ ID NO: 806484 - protein, 219 aa, Homo sapiens; identical to SEQ ID NO: 806478

SEQ ID NO: 806485 - protein, 219 aa, Homo sapiens; identical to SEQ ID NO: 806478

SEQ ID NO: 806486 - protein, 219 aa, Homo sapiens; identical to SEQ ID NO: 806478

SEQ ID NO: 806487 - protein, 219 aa, Homo sapiens; identical to SEQ ID NO: 806478

SEQ ID NO: 806488 - protein, 219 aa, Homo sapiens; identical to SEQ ID NO: 806478

SEQ ID NO: 806489 - protein, 219 aa, Homo sapiens; identical to SEQ ID NO: 806478

SEQ ID NO: 806490 - protein, 219 aa, Homo sapiens; identical to SEQ ID NO: 806478

SEQ ID NO: 806491 - protein, 219 aa, Homo sapiens; identical to SEQ ID NO: 806478

SEQ ID NO: 806492 - protein, 254 aa, Homo sapiens
MAVTLSLLLGGRVCAAVTRCGFATRGVAGPGPIGREPDPDSDWEPEERELQEVERYLHEEFPESWSVPRLAEGFDVSTDVIRRVLKSKFLPTLEQKLKQDQKVLKKAGLAHSLQHLRGSGNTSKLLPAGHSVSGSLLMPGHEASSKDPNHSTALKVIESDTHRTNTPRRRKGRNKEIQDLEESFVPVAAPLGHPRELQKYSSDSESPRGTGSGALPSGQKLEELKAEEPDNFSSKVVQRGREFFDSNGNFLYRI

SEQ ID NO: 806493 - protein, 104 aa, Homo sapiens
PERNLQKILLTKPPAGVSNLKNEAYYTSRYEGWVALVCVDMAVTLSLLLGGRVCAAVTRCGFATRGVAGPGPIGREPDPDSDWEPEERELQEVERYRLLPGPSA

SEQ ID NO: 806494 - protein, 207 aa, Homo sapiens
MEAPGAPPRTLTWEAMEQIRYLHEEFPESWSVPRLAEGFDVSTDVIRRVLKSKFLPTLEQKLKQDQKVLKKAGLAHSLQHLRGSGNTSKLLPAGHSVSGSLLMPGHEASSKDPNHSTALKVIESDTHRTNTPRRRKGRNKEIQDLEESFVPVAAPLGHPRELQKYSSDSESPRGTGSGALPSGQKLEELKAEEPLQYSLFLLRLSVC

SEQ ID NO: 806495 - protein, 211 aa, Homo sapiens
MEAPGAPPRTLTWEAMEQIRYLHEEFPESWSVPRLAEGFDVSTDVIRRVLKSKFLPTLEQKLKQDQKVLKKAGLAHSLQHLRGSGNTSKLLPAGHSVSGSLLMPGHEASSKDPNHSTALKVIESDTHRTNTPRRRKGRNKEIQDLEESFVPVAAPLGHPRELQKYSSDSESPRGTGSGALPSGQKLEELKAEEPFFISSLPSPWCICPVSV

SEQ ID NO: 806496 - protein, 191 aa, Homo sapiens
MEAPGAPPRTLTWEAMEQIRYLHEEFPESWSVPRLAEGFDVSTDVIRRVLKSKFLPTLEQKLKQDQKVLKKAGLAHSLQHLRGSGNTSKLLPAGHSVSGSLLMPGHEASSKDPNHSTALKVIESDTHRTNTPRRRKGRNKEIQDLEESFVPVAAPLGHPRELQNQTSCGSAPSLTSVDLQYSLFLLRLSVC

SEQ ID NO: 806497 - protein, 146 aa, Homo sapiens
MEAPGAPPRTLTWEAMEQIRYLHEEFPESWSVPRLAEGFDVSTDVIRRVLKSKFLPTLEQKLKQDQKVLKKAGLAHSLQHLRGSGNTSKLLPAGHSVSGSLLMPGHEASSKDPNHSTALKVIESDTHRTNTPRRRKEGSGGYQRVR

SEQ ID NO: 806498 - protein, 114 aa, Homo sapiens
FSMHIALQPGQHERNSISNRKRKSERERELPGRNKEIQDLEESFVPVAAPLGHPRELQKYSSDSESPRGTGSGALPSGQKLEELKAEEPDNFSSKVVQRGREFFDSNGNFLYRI

SEQ ID NO: 806499 - protein, 68 aa, Homo sapiens
NRLVEAACYSVRGYSSDSESPRGTGSGALPSGQKLEELKAEEPDNFSSKVVQRGREFFDSNGNFLYRI

SEQ ID NO: 806500 - protein, 112 aa, Homo sapiens
MEAPGAPPRTLTWEAMEQIRYLHEEFPESWSVPRLAEGFDVSTDVIRRVLKSKFLPTLEQKLKQDQKVLKKAGLAHSLQPTWELTRTLEIPHVNTVCSMASHVRSWQLFSQS

SEQ ID NO: 806501 - protein, 148 aa, Homo sapiens
MEAPGAPPRTLTWEAMEQIRYLHEEFPESWSVPRLAEGFDVSTDVIRRVLKSKFLPTLEQKLKQDQKVLKKAGLAHSLQHLRGSGNTSKLLPAGHSVSGSLLMPGHEASSKDPNHSTALKVIEDNFSSKVVQRGREFFDSNGNFLYRI

SEQ ID NO: 806502 - protein, 104 aa, Homo sapiens; identical to SEQ ID NO: 806493

SEQ ID NO: 806503 - protein, 207 aa, Homo sapiens; identical to SEQ ID NO: 806494

SEQ ID NO: 806504 - protein, 72 aa, Homo sapiens
  misc_feature (7)..(7): Xaa can be any naturally occurring amino acid
SMELQEXFTRSLPRLAEGFDVSTDVIRRVLKSKFLPTLEQKLKQDQPPGLWKYLKAAPCRPLCIRLFAYARA

SEQ ID NO: 806505 - protein, 219 aa, Homo sapiens; identical to SEQ ID NO: 806478

SEQ ID NO: 806506 - protein, 219 aa, Homo sapiens; identical to SEQ ID NO: 806478

SEQ ID NO: 806507 - protein, 219 aa, Homo sapiens; identical to SEQ ID NO: 806478

SEQ ID NO: 806508 - protein, 148 aa, Homo sapiens; identical to SEQ ID NO: 806501

SEQ ID NO: 806509 - protein, 117 aa, Homo sapiens; identical to SEQ ID NO: 806483

SEQ ID NO: 806510 - protein, 117 aa, Homo sapiens; identical to SEQ ID NO: 806483

SEQ ID NO: 806511 - protein, 471 aa, Homo sapiens
MAKKVAVIGAGVSGLISLKCCVDEGLEPTCFERTEDIGGVWRFKENVEDGRASIYQSVVTNTSKEMSCFSDFPMPEDFPNFLHNSKLLEYFRIFAKKFDLLKYIQFQTTVLSVRKCPDFSSSGQWKVVTQSNGKEQSAVFDAVMVCSGHHILPHIPLKSFPGMERFKGQYFHSRQYKHPDGFEGKRILVIGMGNSGSDIAVELSKNAAQVFISTRHGTWVMSRISEDGYPWDSVFHTRFRSMLRNVLPRTAVKWMIEQQMNRWFNHENYGLEPQNKYIMKEPVLNDDVPSRLLCGAIKVKSTVKELTETSAIFEDGTVEENIDVIIFATGYSFSFPFLEDSLVKVENNMVSLYKYIFPAHLDKSTLACIGLIQPLGSIFPTAELQARWVTRVFKGLCSLPSERTMMMDIIKRNEKRIDLFGESQSQTLQTNYVDYLDELALEIGAKPDFCSLLFKDPKLAVRLYFGPCNSY

SEQ ID NO: 806512 - protein, 185 aa, Homo sapiens
MAKKVAVIGAGVSGLISLKCCVDEGLEPTCFERTEDIGGVWRFKENVEDGRASIYQSVVTNTSKEMSCFSDFPMPEDFPNFLHNSKLLEYFRIFAKKFDLLKYIQFQTTVLSVRKCPDFSSSGQWKVVTQSNGKEQSAVFDAVMVCSGHHILPHIPLKSFPGMERFKGQYFHSRQYKHPDGFEGA

SEQ ID NO: 806513 - protein, 308 aa, Homo sapiens
MSIIIVLSEGRLHKPLKTLVTNELEVQQLGKWNLGAGGDQCTRGLTCPGERGICIYTVSRISEDGYPWDSVFHTRFRSMLRNVLPRTAVKWMIEQQMNRWFNHENYGLEPQNKYIMKEPVLNDDVPSRLLCGAIKVKSTVKELTETSAIFEDGTVEENIDVIIFATGYSFSFPFLEDSLVKVENNMVSLYKYIFPAHLDKSTLACIGLIQPLGSIFPTAELQARWVTRVFKGLCSLPSERTMMMDIIKRNEKRIDLFGESQSQTLQTNYVDYLDELALEIGAKPDFCSLLFKDPKLAVRLYFGPCNSY

SEQ ID NO: 806514 - protein, 308 aa, Homo sapiens
RGEAAWAGPGRAGGARSASWMSRLRALLGLGLLVAGSRLPRIKSQTIACRSGPTWWGPQRLNSGGRWDSEVMASTVVKYLSQEEAQAVDQELFNEYQFSVDQLMELAGLSCATAIAKAYPPTSMSRSPPTVLVICGPGNNGGDGLVCARHLKLFGYEPTIYYPKRPNKPLFTALVTQCQKMDIPFLGEMPAEPMTIDELYELVVDAIFGFSFKGDVREPFHSILSVLKGLTVPIASIDIPSGWDVEKGNAGGIQPDLLISLTAPKKSATQFTGRYHYLGGRFVPPALEKKYQLNLPPYPDTECVYRLQ

SEQ ID NO: 806515 - protein, 308 aa, Homo sapiens; identical to SEQ ID NO: 806514

SEQ ID NO: 806516 - protein, 310 aa, Homo sapiens
FVLASRLVCIRATYGGARSASWMSRLRALLGLGLLVAGSRLPRIKSQTIACRSGPTWWGPQRLNSGGRWDSEVMASTVVKYLSQEEAQAVDQELFNEYQFSVDQLMELAGLSCATAIAKAYPPTSMSRSPPTVLVICGPGNNGGDGLVCARHLKLFGYEPTIYYPKRPNKPLFTALVTQCQKMDIPFLGEMPAEPMTIDELYELVVDAIFGFSFKGDVREPFHSILSVLKGLTVPIASIDIPSGWDVEKGNAGGIQPDLLISLTAPKKSATQFTGRYHYLGGRFVPPALEKKYQLNLPPYPDTECVYRLQ

SEQ ID NO: 806517 - protein, 174 aa, Homo sapiens
ALEKKYQLNLPPYPDTIKLFGYEPTIYYPKRPNKPLFTALVTQCQKMDIPFLGEMPAEPMTIDELYELVVDAIFGFSFKGDVREPFHSILSVLKGLTVPIASIDIPSGWDVEKGNAGGIQPDLLISLTAPKKSATQFTGRYHYLGGRFVPPALEKKYQLNLPPYPDTECVYRLQ

SEQ ID NO: 806518 - protein, 282 aa, Homo sapiens
FVLASRLVCIRATYGGARSASWMSRLRALLGLGLLVAGSRLPRIKSQTIACRSGPTWWGPQRLNSGGRWDSEVMASTVVKYLSQEEAQAVDQELFNEYQFSVDQLMELAGLSCATAIAKAYPPTSMSRSPPTVLVICGPGNNGGDGLVCARHLKLFGYEPTIYYPKRPNKPLFTALVTQCQKMDIPFLGEMPAELQGRCSGTVPQHPECPEGTHCAHCQHRHSLRMGRGEGKCWRDPARLAHLPHSPQKICNPVYRSLPLPGGSFCATCSGKEVPAEPATLP

SEQ ID NO: 806519 - protein, 259 aa, Homo sapiens
FVLASRLVCIRATYGGARSASWMSRLRALLGLGLLVAGSRLPRIKSQTIACRSGPTWWGPQRLNSGGRWDSEVMASTVVKYLSQEEAQAVDQELFNEYQFSVDQLMELAGLSCATAIAKAYPPTSMSRSPPTVLVICGPGNNGGDGLVCARHLKLFGYEPTIYYPKRPNKPLFTALVTQCQKMDIPFLGEMPAEPMTIDELYELVVDAIFGFSFKGDVREPFHSILSVLKGLTVPIASIDIPSGWDPEGGVGEIGALPS

SEQ ID NO: 806520 - protein, 199 aa, Homo sapiens
FVLASRLVCIRATYGGARSASWMSRLRALLGLGLLVAGSRLPRIKSQTIACRSGPTWWGPQRLNSGGRWDSEVMASTVVKYLSQEEAQAVDQELFNEYQFSVDQLMELAGLSCATAIAKAYPPTSMSRSPPTVLVICGPGNNGGDGLVCARHLKLFGYEPTIYYPKRPNKPLFTALVTQCQKMDIPFLGEMPAEVGGSS

SEQ ID NO: 806521 - protein, 115 aa, Homo sapiens
MTIDELYELVVDAIFGFSFKGDVREPFHSILSVLKGLTVPIASIDIPSGWDVEKGNAGGIQPDLLISLTAPKKSATQFTGRYHYLGGRFVPPALEKKYQLNLPPYPDTECVYRLQ

SEQ ID NO: 806522 - protein, 286 aa, Homo sapiens
RGEAAWAGPGRAGGARSASWMSRLRALLGLGLLVAGSRLPRIKSQTIACRSGPTWWGPQRLNSGGRWDSEVMASTVVKYLSQEEAQAVDQELFNEYQFSVDQLMELAGLSCATAIAKAYPPTSMSRSPPTVLVICGPGNNGGDGLVCARHLKLFGYEPTIYYPKRPNKPLFTALVTQCQKMDIPFLGEMPAEPMTIDELYELVVDAIFGFSFKGDVREPFHSILSVLKGLTVPIASIDIPSGWDVEKGNAGGIQPDLLISLTAPKKSATQFTGRYHYLSANSGGIL

SEQ ID NO: 806523 - protein, 265 aa, Homo sapiens
FVLASRLVCIRATYGGARSASWMSRLRALLGLGLLVAGSRLPRIKSQTIACRSGPTWWGPQRLNSGGRWDSEVMASTVVKYLSQEEAQAVDQELFNEYQFSVDQLMELAGLSCATAIAKPKRPNKPLFTALVTQCQKMDIPFLGEMPAEPMTIDELYELVVDAIFGFSFKGDVREPFHSILSVLKGLTVPIASIDIPSGWDVEKGNAGGIQPDLLISLTAPKKSATQFTGRYHYLGGRFVPPALEKKYQLNLPPYPDTECVYRLQ

SEQ ID NO: 806524 - protein, 259 aa, Homo sapiens; identical to SEQ ID NO: 806519

SEQ ID NO: 806525 - protein, 49 aa, Homo sapiens
MSRSPPTVLVICGPGNNGGDGLVCARHLKLFVSMWGGAVGEEGVRALGS

SEQ ID NO: 806526 - protein, 271 aa, Homo sapiens
MGSAGLSRLHGLFAVYKPPGLKWKHLRDTVELQLLKGLNARKPPAPKQRVRFLLGPMEGSEEKELTLTATSVPSFINHPLVCGPAFAHLKVGVGHRLDAQASGVLVLGVGHGCRLLTDMYNAHLTKDYTVRGLLGKATDDFREDGRLVEKTTYDHVTREKLDRILAVIQGSHQKALVMYSNLDLKTQEAYEMAVRGLIRPMNKSPMLITGIRCLYFAPPEFLLEGAAWWDTDKGAEWARKRRGKRPGCGPPGGHPRVYPKGPLAGAPTHGS

SEQ ID NO: 806527 - protein, 331 aa, Homo sapiens
MGSAGLSRLHGLFAVYKPPGLKWKHLRDTVELQLLKGLNARKPPAPKQRVRFLLGPMEGSEEKELTLTATSVPSFINHPLVCGPAFAHLKVGVGHRLDAQASGVLVLGVGHGCRLLTDMYNAHLTKDYTVRGLLGKATDDFREDGRLVEKTTYDHVTREKLDRILAVIQGSHQKALVMYSNLDLKTQEAYEMAVRGLIRPMNKSPMLITGIRCLYFAPPEFLLEVQCMHETQKELRKLVHEIGLELKTTAVCTQVRRTRDGFFTLDSALLRTQWDLTNIQDAIRAATPQVAAELEKSLSPGLDTKQLPSPGWSWDSQGPSSTLGLERGAGQ

SEQ ID NO: 806528 - protein, 306 aa, Homo sapiens
MGSAGLSRLHGLFAVYKPPGLKWKHLRDTVELQLLKGLNARKPPAPKQRVRFLLGPMEGSEEKELTLTATSVPSFINHPLVLGVGHGCRLLTDMYNAHLTKDYTVRGLLGKATDDFREDGRLVEKTTYDHVTREKLDRILAVIQGSHQKALVMYSNLDLKTQEAYEMAVRGLIRPMNKSPMLITGIRCLYFAPPEFLLEVQCMHETQKELRKLVHEIGLELKTTAVCTQVRRTRDGFFTLDSALLRTQWDLTNIQDAIRAATPQVAAELEKSLSPGLDTKQLPSPGWSWDSQGPSSTLGLERGAGQ

SEQ ID NO: 806529 - protein, 140 aa, Homo sapiens [sequence omitted]

SEQ ID NO: 806530 - protein, 331 aa, Homo sapiens; identical to SEQ ID NO: 806527

SEQ ID NO: 806531 - protein, 131 aa, Homo sapiens
AFRGETSLHGQKACRPSRRRKRTRTVYRLRPPIQDSRHVTSPQKVSAKDTQPRSLSAGPYFLLHSRFSPKTIKCEPLPAVEHGGARGKDHIWGRGLAVLPSRSSGCCDLQVWGLLACRGCMGFSRSISPRG

SEQ ID NO: 806532 - protein, 426 aa, Homo sapiens
AFRGETSLHGQKACRPSRRRKRTRTVYRLRPPIQDSRHVTSPQKVSAKDTQPRSLSAGPYFLLHSRFSPKTIKCEPLPAVEHGGARGKDHIWGRGLAVLPSRSSGCCDLQVWGLLACRGCMGFSRSISPRGCLNARKPPAPKQRVRFLLGPMEGSEEKELTLTATSVPSFINHPLVCGPAFAHLKVGVGHRLDAQASGVLVLGVGHGCRLLTDMYNAHLTKDYTVRGLLGKATDDFREDGRLVEKTTYDHVTREKLDRILAVIQGSHQKALVMYSNLDLKTQEAYEMAVRGLIRPMNKSPMLITGIRCLYFAPPEFLLEVQCMHETQKELRKLVHEIGLELKTTAVCTQVRRTRDGFFTLDSALLRTQWDLTNIQDAIRAATPQVAAELEKSLSPGLDTKQLPSPGWSWDSQGPSSTLGLERGAGQ

SEQ ID NO: 806533 - protein, 287 aa, Homo sapiens
MGSAGLSRLHGLFAVYKPPGLKWKHLRDTVELQLLKVCGPAFAHLKVGVGHRLDAQASGVLVLGVGHGCRLLTDMYNAHLTKDYTVRGLLGKATDDFREDGRLVEKTTYDHVTREKLDRILAVIQGSHQKALVMYSNLDLKTQEAYEMAVRGLIRPMNKSPMLITGIRCLYFAPPEFLLEVQCMHETQKELRKLVHEIGLELKTTAVCTQVRRTRDGFFTLDSALLRTQWDLTNIQDAIRAATPQVAAELEKSLSPGLDTKQLPSPGWSWDSQGPSSTLGLERGAGQ

SEQ ID NO: 806534 - protein, 356 aa, Homo sapiens
MGSAGLSRLHGLFAVYKPPGLKWKHLRDTVELQLLKGLNARKPPAPKQRVRFLLGPMEGSEEKELTLTATSVPSFINHPLVCGPAFAHLKVGVGHRLDAQASGVLGVRILWRAWQGSKAPSNHESDSVHMVLGVGHGCRLLTDMYNAHLTKDYTVRGLLGKATDDFREDGRLVEKTTYDHVTREKLDRILAVIQGSHQKALVMYSNLDLKTQEAYEMAVRGLIRPMNKSPMLITGIRCLYFAPPEFLLEVQCMHETQKELRKLVHEIGLELKTTAVCTQVRRTRDGFFTLDSALLRTQWDLTNIQDAIRAATPQVAAELEKSLSPGLDTKQLPSPGWSWDSQGPSSTLGLERGAGQ

SEQ ID NO: 806535 - protein, 118 aa, Homo sapiens [sequence omitted]

SEQ ID NO: 806536 - protein, 467 aa, Homo sapiens
RATAAAAARAGPGAPRAAATLAGAAVKLDPQAGVRGAGAAAAPQRCDSGRRPAGASALRGRGGRMFVASERKMRAHQVLTFLLLFVITSVASENASTSRGCGLDLLPQYVSLCDLDAIWGIVVEAVAGAGALITLLLMLILLVRLPFIKEKEKKSPVGLHFLFLLGTLGLFGLTFAFIIQEDETICSVRRFLWGVLFALCFSCLLSQAWRVRRLVRHGTGPAGWQLVGLALCLMLVQVIIAVEWLVLTVLRDTRPACAYEPMDFVMALIYDMVLLVVTLGLALFTLCGKFKRWKLNGAFLLITAFLSVLIWVAWMTMYLFGNVKLQQGDAWNDPTLAITLAASGWVFVIFHAIPEIHCTLLPALQENTPNYFDTSQPRMRETAFEEDVQLPRAYMENKAFSMDEHNAALRTAGFPNGSLGKRPSGSLGKRPSAPFRSNVYQPTEMAVVLNGGTIPTAPPSHTGRHLW

SEQ ID NO: 806537 - protein, 467 aa, Homo sapiens; identical to SEQ ID NO: 806536

SEQ ID NO: 806538 - protein, 467 aa, Homo sapiens; identical to SEQ ID NO: 806536

SEQ ID NO: 806539 - protein, 403 aa, Homo sapiens
MFVASERKMRAHQVLTFLLLFVITSVASENASTSRGCGLDLLPQYVSLCDLDAIWGIVVEAVAGAGALITLLLMLILLVRLPFIKEKEKKSPVGLHFLFLLGTLGLFGLTFAFIIQEDETICSVRRFLWGVLFALCFSCLLSQAWRVRRLVRHGTGPAGWQLVGLALCLMLVQVIIAVEWLVLTVLRDTRPACAYEPMDFVMALIYDMVLLVVTLGLALFTLCGKFKRWKLNGAFLLITAFLSVLIWVAWMTMYLFGNVKLQQGDAWNDPTLAITLAASGWVFVIFHAIPEIHCTLLPALQENTPNYFDTSQPRMRETAFEEDVQLPRAYMENKAFSMDEHNAALRTAGFPNGSLGKRPSGSLGKRPSAPFRSNVYQPTEMAVVLNGGTIPTAPPSHTGRHLW

SEQ ID NO: 806540 - protein, 467 aa, Homo sapiens; identical to SEQ ID NO: 806536

SEQ ID NO: 806541 - protein, 365 aa, Homo sapiens
TRPLSDGTCKEEFTVNGDPVKKVICTGPNDTSPGSPRHTVPQCCYGFCIDLLIKLARTMNFTYEVHLVADGKFGTQERVNNSNKKEWNGMMGELLSGQADMIVAPLTINNERGALYQGPAGWQLVGLALCLMLVQVIIAVEWLVLTVLRDTRPACAYEPMDFVMALIYDMVLLVVTLGLALFTLCGKFKRWKLNGAFLLITAFLSVLIWVAWMTMYLFGNVKLQQGDAWNDPTLAITLAASGWVFVIFHAIPEIHCTLLPALQENTPNYFDTSQPRMRETAFEEDVQLPRAYMENKAFSMDEHNAALRTAGFPNGSLGKRPSGSLGKRPSAPFRSNVYQPTEMAVVLNGGTIPTAPPSHTGRHLW

SEQ ID NO: 806542 - protein, 129 aa, Homo sapiens
RATAAAAARAGPGAPRAAATLAGAAVKLDPQAGVRGAGAAAAPQRCDSGRRPAGASALRGRGGRMFVASERKMRAHQVLTFLLLFVITSVASEHAQLLRHVAAQDAGDGLRGGRAAAAGLYGEQGLLHG

SEQ ID NO: 806543 - protein, 106 aa, Homo sapiens
LRQACKETLEGSLSQPRMRETAFEEDVQLPRAYMENKAFSMDEHNAALRTAGFPNGSLGKRPSGSLGKRPSAPFRSNVYQPTEMAVVLNGGTIPTAPPSHTGRHLW

SEQ ID NO: 806544 - protein, 467 aa, Homo sapiens; identical to SEQ ID NO: 806536

SEQ ID NO: 806545 - protein, 467 aa, Homo sapiens; identical to SEQ ID NO: 806536

SEQ ID NO: 806546 - protein, 403 aa, Homo sapiens; identical to SEQ ID NO: 806539

SEQ ID NO: 806547 - protein, 1181 aa, Homo sapiens
MVPKADSGAFLLLFLLVLTVTEPLRPELRCNPGQFACRSGTIQCIPLPWQCDGWATCEDESDEANCPEVTGEVRPHHGKEAVDPRQGRARGGDPSHFHAVNVAQPVRFSSFLGKCPTGWHHYEGTASCYRVYLSGENYWDAAQTCQRLNGSLATFSTDQELRFVLAQEWDQPERSFGWKDQRKLWVGYQYVITGRNRSLEGRWEVAFKGSSEVFLPPDPIFASAMSENDNVFCAQLQCFHFPTLRHHDLHSWHAESCYEKSSFLCKRSQTCVDIKDNVVDEGFYFTPKGDDPCLSCTCHGGEPEMCVAALCERPQGCQQYRKDPKECCKFMCLDPDGNSLFDSMASGMRLVVSCISSFLILSLLLFMVHRLRQRRRERIESLIGANLHHFNLGRRIPGFDYGPDGFGTGLTPLHLSDDGEGGTFHFHDPPPPYTAYKYPDIGQPDDPPPPYEASIHPDSVFYDPADDDAFEPVEVSLPAPGDGGSEGALLRRLEQPLPTAGASLADLEDSADSSSALLVPPDPAQSGSTPAAEALPGGGRHSRSSLNTVVRRPGLYPNGLGAPVCCRKHRSLGRLERPLSQPGRHALPHVTGGLACVHRDHSPPSAKRSDGLHRASLRASETCIALDHCLLLYKWQKSDKIHSDRTCQRQGMKKVLWAMATPDAFLVGLLGAVCCPERPADPVWEQAQWELPQCPLLAALRRGPLDRQCGVGSGSASGRQPLDFVTTVALKMAPTSPVVNIKVTLPLAGSSPGALEPEALRRRAWKEVELFTVSFHLGSAAQLCGRRPDPTPSVPLPALLCMAPSGRSSGVGPRPQMLCWGLGTELPPVSPLWSPGLLPPVELPLGLPPAPFDAIKGCFIAGGVAETTILGCIYLLKVHSLHHRHYCSSVPSGRMHTSRPLLSSSRGWGPFLAPFCLTDPVACSWAVVLLPDTGPLTFLRFGDEAGSVRFLAHPYLFYVEVSGSFLCMFVSLCVYVAKRLQVRVAHETSRVTGGPLFQGHRCILGCAEAVLSRSVFPDQRGSTWEACLKHAVLWCCSGMDSMHSPLLDTFSHCGWRPIFSIPCGMRILSCPQTDLTFVPELSRAVSFVTELPVPELGLLELMLEAVCGQACAPLGEGLLLNKEVLATRVPYWLQRTKQEACRGSHMHWGRAARFQSSRHVHYGCQVASEGPRTTQQSPPRA

SEQ ID NO: 806548 - protein, 109 aa, Homo sapiens
NPLPPRPSRGMVRLLQRWGGSFPDCFSCHNKISQTGWIKQQKFISHSSGGWEVQDQGVSKVKTLTVRKGKPQVQDKVVKSRRNSGCVVLVQGSLPPAWGHTGWLCSHDT

SEQ ID NO: 806549 - protein, 339 aa, Homo sapiens
IKQPNGFCDNYSAQKYGIIENVNKHNFQAKPQSGHYDPEEGPKHLDGLSQNTYQDLLESQGHSNSHRTRGGDNSRVNRTQVSCFSNNYMMGDLRHNQCFQQLGSNGFPLRSTHPFGHSVVPLLDSYDLLSYDDLSHLYPYFNMMYGDNSFSGLMPTFGFQRPIKTRSGPASELHIRLEECCEQWRALEKERKKTELALAKNYPGKKVSSTNNTPVPRLTSNPSRVDRLIVDELRELARVVTLLGKMERLRSSLLHASISTALDRHLESIHIVQSRRKDEIVNASNRQRQGVPRCQDDRDVFALASAIKEMCVATRKTRTALWCALQMTLPKTASTADVH

SEQ ID NO: 806550 - protein, 371 aa, Homo sapiens
IKQPNGFCDNYSAQKYGIIENVNKHNFQAKPQSGHYDPEEGPKHLDGLSQNTYQDLLESQGHSNSHRTRGGDNSRVNRTQVSCFSNNYMMGDLRHNQCFQQLGSNGFPLRSTHPFGHSVVPLLDSYDLLSYDDLSHLYPYFNMMYGDNSFSGLMPTFGFQRPIKTRSGPASELHIRLEECCEQWRALEKERKKTELALAKNYPGKKVSSTNNTPVPRLTSNPSRVDRLIVDELRELARVVTLLGKMERLRSSLLHASISTALDRHLESIHIVQSRRKDEIVNASNRQRQGVPRCQDDRDVFALASAIKEMCVATRKTRTALWCALQMTLPKTASTADVVKPLQDTVNCEDKVHESINSSNPMNQRGETNKH

SEQ ID NO: 806551 - protein, 68 aa, Homo sapiens
MWIFSRNFIPMLMADIRKEERNHLCRSSRRTWTILDRAEYSDHVVLQGAGVGWGTSRSPWRKVRNQEC

SEQ ID NO: 806552 - protein, 99 aa, Homo sapiens
MRNSRDIQNKLLRCVVICLKSDGKREIIKFNFIIHRAANHWCSGRICYTTLGRILWYNVSLKTLKYGNGLCMFSLHIILFSCLPPFCFFLFSFVLRVPA

SEQ ID NO: 806553 - protein, 366 aa, Homo sapiens
MASAVLSSVPTTASRFALLQVDSGSGSDSEPGKGKGRNTGKSQTLGSKSTTNEKKREKRRKKKEQQQSEANELRNLAFKKIPQKSSHAVCNAQHDLPLSNPVQKDSREENWQEWRQRDEQLTSEMFEADLEKALLLSKLEYEEHKKEYEDAENTSTQSKVMNKKDKRKNHQGKDRPLTVSLKDFHSEDHISKKTEELSSSQTLSHDGGFFNRLEDDVHKILIREKRREQLTEYNGTDNCTAHEHNQEVVLKDGRIERLKLELERKDAEIQKLKNVITQWEAKYKEVKARNAQLLKMLQEGEMKDKAEILLQVDESQSIKNELTIQVTSLHAALEQERSKVKVLQAELAKYQGGRKGKRNSESDQCR

SEQ ID NO: 806554 - protein, 203 aa, Homo sapiens
MASAVLSSVPTTASRFALLQVDSGSGSDSEPGKGKGRNTGKSQTLGSKSTTNEKKREKRRKKKEQQQSEANELRNLAFKKIPQKSSHAVCNAQHDLPLSNPVQKDSREENWQEWRQRDEQLTSEMFEADLEKALLLSKLEYEEHKKEYEDAENTSTQSKVMNKKDKRKNHQGKDRPLTVSLKDFHSEDHISKKTGSGSERWKN

SEQ ID NO: 806555 - protein, 136 aa, Homo sapiens
  misc_feature (13)..(13): Xaa can be any naturally occurring amino acid
SYLFCFFPTIQPXSFSEVVLKDGRIERLKLELERKDAEIQKLKNVITQWEAKYKEVKARNAQLLKMLQEGEMKDKAEILLQVDESQSIKNELTIQVTSLHAALEQERSKVKVLQAELAKYQGGRKGKRNSESDQCR

SEQ ID NO: 806556 - protein, 366 aa, Homo sapiens; identical to SEQ ID NO: 806553

SEQ ID NO: 806557 - protein, 366 aa, Homo sapiens; identical to SEQ ID NO: 806553

SEQ ID NO: 806558 - protein, 366 aa, Homo sapiens; identical to SEQ ID NO: 806553

SEQ ID NO: 806559 - protein, 366 aa, Homo sapiens; identical to SEQ ID NO: 806553

SEQ ID NO: 806560 - protein, 388 aa, Homo sapiens
MASAVLSSVPTTASRFALLQVDSGSGSDSEPGKGKGRNTGKSQTLGSKSTTNEKKREKRRKKKEQQQSEANELRNLAFKKIPQKSSHAVCNAQHDLPLSNPVQKDSREENWQEWRQRDEQMGSRRQCGSQEEGDLKYSILDTLTSEMFEADLEKALLLSKLEYEEHKKEYEDAENTSTQSKVMNKKDKRKNHQGKDRPLTVSLKDFHSEDHISKKTEELSSSQTLSHDGGFFNRLEDDVHKILIREKRREQLTEYNGTDNCTAHEHNQEVVLKDGRIERLKLELERKDAEIQKLKNVITQWEAKYKEVKARNAQLLKMLQEGEMKDKAEILLQVDESQSIKNELTIQVTSLHAALEQERSKVKVLQAELAKYQGGRKGKRNSESDQCR

SEQ ID NO: 806561 - protein, 366 aa, Homo sapiens; identical to SEQ ID NO: 806553

SEQ ID NO: 806562 - protein, 366 aa, Homo sapiens; identical to SEQ ID NO: 806553

SEQ ID NO: 806563 - protein, 328 aa, Homo sapiens
MPGSLKRDHILYHLILIWGIIFISHQDKIPGGGITCKVHTSPPMYSLDRIFAGFRTQSQMLLDHVEERDEVLHCQFSDNSDDEESEGQEKSGTRCKKSFMDSEARLCSLVELSDTQDETQKSDSENEDLKIDCLQESQELNLQKLKNSERILTEAKQKMRELTVNIKMKEDLIKELIKTGNDAKSVSKQYTLKVTKLEHDAEQAKVELTETQKQLQELENKDLSDVAMKVKLQKEFRKKVDAAKLRVQVLQKKQQDSKKLASLSIQNEKRANELEQSVDHMKYQKIQLQRKLQEENEKRKQLDAVIKRDQQKIKVILSYIPAKYNMKC

SEQ ID NO: 806564 - protein, 343 aa, Homo sapiens
MPGSLKRDHILYHLILIWGIIFISHQDKIPGGGITCKVHTSPPMYSLDRIFAGFRTQSQMLLDHVEERDEVLHCQFSDNSDDEESEGQEKSGTRCKKSFMDSEARLCSLVELSDTQDETQKSDSENEDLKIDCLQESQELNLQKLKNSERILTEAKQKMRELTVNIKMKEDLIKELIKTGNDAKSVSKQYTLKVTKLEHDAEQAKVELTETQKQLQELENKDLSDVAMKVKLQKEFRKKVDAAKLRVQVLQKKQQDSKKLASLSIQNEKRANELEQSVDHMKYQKIQLQRKLQEENEKRKQLDAVIKRDQQKIKQKECFQLLHLRESWPSTVAHACNRSTLGG

SEQ ID NO: 806565 - protein, 117 aa, Homo sapiens
REALTPPPPPGLPSTLRPPACSQPRSPRPSPQPAAALTSAVRPGAPGPVSAQPAGRPRPPPGASLPPALPTLDPDQSQRPVRPPGEPRERRRRGEEGEEGRAGGTGGPVLKPLLCPS

SEQ ID NO: 806566 - protein, 117 aa, Homo sapiens; identical to SEQ ID NO: 806565

SEQ ID NO: 806567 - protein, 441 aa, Homo sapiens
MSVLLRSGLGPLCAVARAAIPFIWRGKYFSSGNEPAENPVTPMLRHLMYKIKSTGPITVAEYMKEVLTNPAKGYYVYRDMLGEKGDFITSPEISQIFGELLGIWFISEWMATGKSTAFQLVELGPGRGTLVGDILRVFTQLGSVLKNCDISVHLVEVSQKLSEIQALTLTKEKVPLERNAGSPVYMKGVTKSGIPISWYRDLHDVPKGYSFYLAHEFFDVLPVHKFQKTPQGWREVFVDIDPQVSDKLRFVLAPSATPAEAFIQHDETRDHVEVCPDAGVIIEELSQRIALTGGAALVADYGHDGTKTDTFRGFCDHKLHDVLIAPGTADLTADVDFSYLRRMAQGKVASLGPIKQHTFLKNMGIDVRLKVLLDKSNEPSVRQQLLQGYDMLMNPKKMGERFNFFALLPHQRLQGGRYQRNARQSKPFASVVAGFSELAWQ

SEQ ID NO: 806568 - protein, 132 aa, Homo sapiens
MKGVTKSGIPISWYRDLHDVPKGYSFYLAHEFFDVLPVHKFQKTPQGWREVFVDIDPQVSDKLRFVLAPSATPAEAFIQHDETRDHVEVCPDAGVIIEELSQRIALTGGAALVADYGHDGTKTDTFRVCIIQ

SEQ ID NO: 806569 - protein, 114 aa, Homo sapiens
  misc_feature (102)..(102): Xaa can be any naturally occurring amino acid
  misc_feature (106)..(106): Xaa can be any naturally occurring amino acid
MSVLLRSGLGPLCAVARAAIPFIWRGKYFSSGNEPAENPVTPMLRHLMYKIKSTGPITVAEYMKEVLTNPAKGYYVYRDMLGEKGDFITSPEISQIFGECGXCVGXSTCVRSGT

SEQ ID NO: 806570 - protein, 441 aa, Homo sapiens; identical to SEQ ID NO: 806567

SEQ ID NO: 806571 - protein, 441 aa, Homo sapiens; identical to SEQ ID NO: 806567

SEQ ID NO: 806572 - protein, 196 aa, Homo sapiens
MSVLLRSGLGPLCAVARAAIPFIWRGKYFSSGNEPAENPVTPMLRHLMYKIKSTGPITVAEYMKEVLTNPAKGYYVYRDMLGEKGDFITSPEISQIFGELLGIWFISEWMATGKSTAFQLVELGPGRGTLVGDILRVFTQLGSVLKNCDISVHLVEGTAFILHMNFLMFFLCINFRKHHRDGEKYLLTLIHRFLIN

SEQ ID NO: 806573 - protein, 441 aa, Homo sapiens; identical to SEQ ID NO: 806567

SEQ ID NO: 806574 - protein, 441 aa, Homo sapiens; identical to SEQ ID NO: 806567

SEQ ID NO: 806575 - protein, 317 aa, Homo sapiens
MSVLLRSGLGPLCAVARAAIPFIWRGKYFSSGNEPAENPVTPMLRHLMYKIKSTGPITVAEYMKEVLTNPAKGYYVYRDMLGEKGDFITSPEISQIFGELLGIWFISEWMATGKSTAFQLVELGPGRGTLVGDILRVFTQLGSVLKNCDISVHLVEVSQKLSEIQALTLTKEKVPLERNAGSPVYMKGVTKSGIPISWYRDLHDVPKGYSFYLAHEFFDVLPVHKFQKTPQGWREVFVDIDPQVSDKLRFVLAPSATPAEAFIQHDETRDHVEVCPDAGVIIEELSQRIALTGGAALVADYGHDGTKTDTFRVCIIQ

SEQ ID NO: 806576 - protein, 399 aa, Homo sapiens
MLRHLMYKIKSTGPITVAEYMKEVLTNPAKGYYVYRDMLGEKGDFITSPEISQIFGELLGIWFISEWMATGKSTAFQLVELGPGRGTLVGDILRVFTQLGSVLKNCDISVHLVEVSQKLSEIQALTLTKEKVPLERNAGSPVYMKGVTKSGIPISWYRDLHDVPKGYSFYLAHEFFDVLPVHKFQKTPQGWREVFVDIDPQVSDKLRFVLAPSATPAEAFIQHDETRDHVEVCPDAGVIIEELSQRIALTGGAALVADYGHDGTKTDTFRGFCDHKLHDVLIAPGTADLTADVDFSYLRRMAQGKVASLGPIKQHTFLKNMGIDVRLKVLLDKSNEPSVRQQLLQGYDMLMNPKKMGERFNFFALLPHQRLQGGRYQRNARQSKPFASVVAGFSELAWQ

SEQ ID NO: 806577 - protein, 172 aa, Homo sapiens [sequence omitted]

SEQ ID NO: 806578 - protein, 370 aa, Homo sapiens
MSVLLRSGLGPLCAVARAAIPFIWRGKYFSSGNEPAENPVTPMLRHLMYKIKSTGPITVAEYMKEVLTNPAKGYYVYRDMLGEKGDFITSPEISQIFGELLGIWFISEWMATGKSTAFQLVELGPGRGTLVGDILRVFTQLGSVLKNCDISVHLVEKTPQGWREVFVDIDPQVSDKLRFVLAPSATPAEAFIQHDETRDHVEVCPDAGVIIEELSQRIALTGGAALVADYGHDGTKTDTFRGFCDHKLHDVLIAPGTADLTADVDFSYLRRMAQGKVASLGPIKQHTFLKNMGIDVRLKVLLDKSNEPSVRQQLLQGYDMLMNPKKMGERFNFFALLPHQRLQGGRYQRNARQSKPFASVVAGFSELAWQ

SEQ ID NO: 806579 - protein, 172 aa, Homo sapiens [sequence omitted]

SEQ ID NO: 806580 - protein, 172 aa, Homo sapiens [sequence omitted]

SEQ ID NO: 806581 - protein, 273 aa, Homo sapiens
MSVLLRSGLGPLCAVARAAIPFIWRGKYFSSGNEPAENPVTPMLRHLMYKIKSTGPITVAEYMKEVLTNPAKGYYVYRDMLGEKGDFITSPEISQIFGELLGIWFISEWMATGKSTAFQLVELGPGRGTLVGDILRVFTQLGSVLKNCDISVHLVEKTPQGWREVFVDIDPQVSDKLRFVLAPSATPAEAFIQHEESSRDGCGADSSKKEDLLSVAYKECDVELEEPPGEYQQLVLHQAGGPAPSTVCSSEEKKCKQERRIEESDDDMGGLCD

SEQ ID NO: 806582 - protein, 374 aa, Homo sapiens
MAIRKKSTKSPPVLSHEFVLQNHADIVSCVAMVFLLGLMFEITAKASIIFVTLQYNVTLPATEEQATESVSLYYYGIKDLATVFFYMLVAIIIHAVIQEYMLDKINRRMHFSKTKHSKFNESGQLSAFYLFACVWGTFILISENYISDPTILWRAYPHNLMTFQMKFFYISQLAYWLHAFPELYFQKTKKEDIPRQLVYIGLYLFHIAGAYLLNLNHLGLVLLVLHYFVEFLFHISRLFYFSNEKYQKGFSLWAVLFVLGRLLTLILSVLTVGFGLARAENQKLDFSTGNFNVLAVRIAVLASICVTQAFMMWKFINFQLRRWREHSAFQAPAVKKKPTVTKGRSSKKGTENGVNGTLTSNVADSPRNKKEKSS

SEQ ID NO: 806583 - protein, 374 aa, Homo sapiens; identical to SEQ ID NO: 806582

SEQ ID NO: 806584 - protein, 288 aa, Homo sapiens
MLVAIIIHAVIQEYMLDKINRRMHFSKTKHSKFNESGQLSAFYLFACVWGTFILISENYISDPTILWRAYPHNLMTFQMKFFYISQLAYWLHAFPELYFQKTKKEDIPRQLVYIGLYLFHIAGAYLLNLNHLGLVLLVLHYFVEFLFHISRLFYFSNEKYQKGFSLWAVLFVLGRLLTLILSVLTVGFGLARAENQKLDFSTGNFNVLAVRIAVLASICVTQAFMMWKFINFQLRRWREHSAFQAPAVKKKPTVTKGRSSKKGTENGVNGTLTSNVADSPRNKKEKSS

SEQ ID NO: 806585 - protein, 374 aa, Homo sapiens; identical to SEQ ID NO: 806582

SEQ ID NO: 806586 - protein, 374 aa, Homo sapiens; identical to SEQ ID NO: 806582

SEQ ID NO: 806587 - protein, 251 aa, Homo sapiens
AASEDPLSLTTLSRRPTISENYISDPTILWRAYPHNLMTFQMKFFYISQLAYWLHAFPELYFQKTKKEDIPRQLVYIGLYLFHIAGAYLLNLNHLGLVLLVLHYFVEFLFHISRLFYFSNEKYQKGFSLWAVLFVLGRLLTLILSVLTVGFGLARAENQKLDFSTGNFNVLAVRIAVLASICVTQAFMMWKFINFQLRRWREHSAFQAPAVKKKPTVTKGRSSKKGTENGVNGTLTSNVADSPRNKKEKSS

SEQ ID NO: 806588 - protein, 374 aa, Homo sapiens; identical to SEQ ID NO: 806582

SEQ ID NO: 806589 - protein, 111 aa, Homo sapiens
SIELGPLTVGFGLARAENQKLDFSTGNFNVLAVRIAVLASICVTQAFMMWKFINFQLRRWREHSAFQAPAVKKKPTVTKGRSSKKGTENGVNGTLTSNVADSPRNKKEKSS

SEQ ID NO: 806590 - protein, 250 aa, Homo sapiens
MAIRKKSTKSPPVLSHEFVLQNHADIVSCVAMVFLLGLMFEITAKASIIFVTLQYNVTLPATEEQATESVSLYYYGIKDLATVFFYMLVAIIIHAVIQEYMLDKINRRMHFSKTKHSKFNESGQLSAFYLFACVWGTFILISENYISDPTILWRAYPHNLMTFQMKFFYISQLAYWLHAFPELYFQKTKKVSWDFVVLKNVLSFFFLKNFSKIKYFLTCLPFLHSSYLNSYPIILPPTLFPQSLKSLSIS

SEQ ID NO: 806591 - protein, 684 aa, Homo sapiens
ENSTGLCEQNPAKRMAFPVDMLENCSHEELENSAEDYMSDLRCGDPENPECFSLLNITIPISLSNVGFVPLYGGDQTQKILALFAPEDSLTAVALYLADQWWAIDDIVKTSVPSREGLKQVSTLGERVVLYVLNRIIYRKQEMERNEIPFLCHSSTDYAKILWKKGEAIGFYSVKPTGSICASFLTQSYQLPVLDTMFLRKKYRGKDFGLHMLEDFVDSFTEDALGLRYPLSSLMYTACKQYFEKYPGDHELLWEVEGVGHWYQRIPVTRALQREALKILALSQNEPKRPMSGEYGPASVPEYEARTEDNQSSEMQLTIDSLKDAFASTSEGHDKTSVSTHTRSGNLKRPKIGKRFQDSEFSSSQGEDEKTSQTSLTASINKLESTARPSESSEEFLEEEPEQRGIEFEDESSDRDARPALETQPQQEKQDGEKESELEPMNGEIMDDSLKTSLITEEEDSTSEVLDEELKLQPFNSSEDSTNLVPLVVESSKPPEVDAPDKTPRIPDSEMLMDEGTSDEKGHMEEKLSLLPRKKAHLGSSDNVATMSNEERSDGGFPNSVIAEFSEEPVSENLSPNTTSSLEDQGEEGVSEPQETSTALPQSSLIEVELEDVPFSQNAGQKNQSEEQSEASSEQLDQFTQSAEKAVDSSSEEIEVEVPVVDRRNLRRKAKGHKGPAKKKAKLT

SEQ ID NO: 806592 - protein, 349 aa, Homo sapiens
  misc_feature (300)..(300): Xaa can be any naturally occurring amino acid
RDEEPGVRGEREAAALALAAASCAAWDRPEVASEQPPAPFIRAAPPPFPGSSSGSRGASERMAFPVDMLENCSHEELENSAEDYMSDLRCGDPENPECFSLLNITIPISLSNVGFVPLYGGDQTQKILALFAPEDSLTAVALYLADQWWAIDDIVKTSVPSREGLKQEAYVPLFLPKVTNCQFLIQMFLRKKYRGKDFGLHMLEDFVDSFTEDALGLRYPLSSLMYTACKQYFEKYPGDHELLWEVEGVGHWYQRIPVTRALQREALKILALSQMNSKTMSGNIGPAVLSRNTKAELEEXPGYVEKRVQMRLLKSGVDSRGRLNIVVPIAGGHGPQWYDVGDVIAHGRK

SEQ ID NO: 806593 - protein, 423 aa, Homo sapiens
MSSQVVGIEPLYIKAEPASPDSPKGSSETETEPPVALAPGPAPTRCLPGHKEEEDGEGAGPGEQGGGKLVLSSLPKRLCLVCGDVASGYHYGVASCEACKAFFKRTIQGSIEYSCPASNECEITKRRRKACQACRFTKCLRVGMLKEGVRLDRVRGGRQKYKRRPEVDPLPFPGPFPAGPLAVAGGPRKTAAPVNALVSHLLVVEPEKLYAMPDPAGPDGHLPAVATLCDLFDREIVVTISWAKSIPGFSSLSLSDQMSVLQSVWMEVLVLGVAQRSLPLQDELAFAEDLVLDEEGARAAGLGELGAALLQLVRRLQALRLEREEYVLLKALALANSDSVHIEDAEAVEQLREALHEALLEYEAGRAGPGGGAERRRAGRLLLTLPLLRQTAGKVLAHFYGVKLEGKVPMHKLFLEMLEAMMD

SEQ ID NO: 806594 - protein, 491 aa, Homo sapiens
MKRPRCPFVSYKQPAAPPSEGTRRGGAARPEEAAEEGPPAAPGSLRHSGPLGPHACPTALPEPQVTSAMSSQVVGIEPLYIKAEPASPDSPKGSSETETEPPVALAPGPAPTRCLPGHKEEEDGEGAGPGEQGGGKLVLSSLPKRLCLVCGDVASGYHYGVASCEACKAFFKRTIQGSIEYSCPASNECEITKRRRKACQACRFTKCLRVGMLKEGVRLDRVRGGRQKYKRRPEVDPLPFPGPFPAGPLAVAGGPRKTAAPVNALVSHLLVVEPEKLYAMPDPAGPDGHLPAVATLCDLFDREIVVTISWAKSIPGFSSLSLSDQMSVLQSVWMEVLVLGVAQRSLPLQDELAFAEDLVLDEEGARAAGLGELGAALLQLVRRLQALRLEREEYVLLKALALANSDSVHIEDAEAVEQLREALHEALLEYEAGRAGPGGGAERRRAGRLLLTLPLLRQTAGKVLAHFYGVKLEGKVPMHKLFLEMLEAMMD

SEQ ID NO: 806595 - protein, 423 aa, Homo sapiens; identical to SEQ ID NO: 806593

SEQ ID NO: 806596 - protein, 423 aa, Homo sapiens; identical to SEQ ID NO: 806593

SEQ ID NO: 806597 - protein, 423 aa, Homo sapiens; identical to SEQ ID NO: 806593

SEQ ID NO: 806598 - protein, 280 aa, Homo sapiens [sequence omitted]

SEQ ID NO: 806599 - protein, 393 aa, Homo sapiens
MRLGAEMQPRCLVQLLPHPGRAPPPSSHSPPCLLMAPCSPFPPHTPRPVLARGESGLSCQLGPLPAREAATGACLFLAGSIEYSCPASNECEITKRRRKACQACRFTKCLRVGMLKEGVRLDRVRGGRQKYKRRPEVDPLPFPGPFPAGPLAVAGGPRKTAAPVNALVSHLLVVEPEKLYAMPDPAGPDGHLPAVATLCDLFDREIVVTISWAKSIPGFSSLSLSDQMSVLQSVWMEVLVLGVAQRSLPLQDELAFAEDLVLDEEGARAAGLGELGAALLQLVRRLQALRLEREEYVLLKALALANSDSVHIEDAEAVEQLREALHEALLEYEAGRAGPGGGAERRRAGRLLLTLPLLRQTAGKVLAHFYGVKLEGKVPMHKLFLEMLEAMMD

SEQ ID NO: 806600 - protein, 127 aa, Homo sapiens
MGALPRGWAGGARGPCASAAGRRAGRAACGVRLWGQSGPRLGPSRGSDWSGFRRDPASESWWAGLGQDLALAAGPDSGQGWASDPARSGAGFNPAFAEVPGAGRGGRRGGLYVWEGALKTTWGRSKG

SEQ ID NO: 806601 - protein, 32 aa, Homo sapiens
MPDPAGPDGHLPAVATLCDLFDREIVVTISWA

SEQ ID NO: 806602 - protein, 434 aa, Homo sapiens
MKRPRCPFVSYKQPAAPPSEGTRRGGAARPEEAAEEGPPAAPGSLRHSGPLGPHACPTALPEPQVTSAMSSQVVGIEPLYIKAEPASPDSPKGSSETETEPPVALAPGPAPTRCLPGHKEEEDGEGAGPGEQGGGKLVLSSLPKRLCLVCGDVASGYHYGVASCEACKAFFKRTIQGSIEYSCPASNECEITKRRRKACQACRFTKCLRVGMLKEGVRLDRVRGGRQKYKRRPEVDPLPFPGPFPAGPLAVAGGPRKTGFSSLSLSDQMSVLQSVWMEVLVLGVAQRSLPLQDELAFAEDLVLDEEGARAAGLGELGAALLQLVRRLQALRLEREEYVLLKALALANSDSVHIEDAEAVEQLREALHEALLEYEAGRAGPGGGAERRRAGRLLLTLPLLRQTAGKVLAHFYGVKLEGKVPMHKLFLEMLEAMMD

SEQ ID NO: 806603 - protein, 212 aa, Homo sapiens
MPDPAGPDGHLPAVATLCDLFDREIVVTISWAKSIPGFSSLSLSDQMSVLQSVWMEVLVLGVAQRSLPLQDELAFAEDLVLDEEGARAAGLGELGAALLQLVRRLQALRLEREEYVLLKALALANSDSVHIEDAEAVEQLREALHEALLEYEAGRAGPGGGAERRRAGRLLLTLPLLRQTAGKVLAHFYGVKLEGKVPMHKLFLEMLEAMMD

SEQ ID NO: 806604 - protein, 212 aa, Homo sapiens
MKVFKFIGLMILLTSAFSAGSGQSPMTVLCSIDWFMVTVHPFMLNNDVCVHFHELHLGLGCPPNHVQPHAYQFTYRVTECGIRAKAVSQDMVIYSTEIHYSSKGTPSKFVIPVSCAAPQKSPWLTKPCSMRVASKSRATAQKDEKCYEVFSLSQSSQRPNCDCPPCVFSEEEHTQVPCHQAGAQEAQPLQPSHFLDISEDWSLHTDDMIGSM

SEQ ID NO: 806605 - protein, 212 aa, Homo sapiens; identical to SEQ ID NO: 806604

SEQ ID NO: 806606 - protein, 212 aa, Homo sapiens; identical to SEQ ID NO: 806604

SEQ ID NO: 806607 - protein, 212 aa, Homo sapiens; identical to SEQ ID NO: 806604

SEQ ID NO: 806608 - protein, 212 aa, Homo sapiens; identical to SEQ ID NO: 806604

SEQ ID NO: 806609 - protein, 212 aa, Homo sapiens; identical to SEQ ID NO: 806604

SEQ ID NO: 806610 - protein, 212 aa, Homo sapiens; identical to SEQ ID NO: 806604

SEQ ID NO: 806611 - protein, 534 aa, Homo sapiens
MTQAEIKLCSLLLQEHFGEIVEKIGVHLIRTGSQPLRVIAHDTGTSLDQVKKALCVLVQHNLVSYQVHKRGVVEYEAQCSRVLRMLRYPRYIYTTKTLYSDTGELIVEELLLNGKLTMSAVVKKVADRLTETMEDGKTMDYAEVSNTFVRLADTHFVQRCPSVPTTENSDPGPPPPAPTLVINEKDMYLVPKLSLIGKGKRRRSSDEDAAGEPKAKRPKYTTDNKEPIPDDGIYWQANLDRFHQHFRDQAIVSAVANRMDQTSSEIVRTMLRMSEITTSSSAPFTQPLSSNEIFRSLPVGYNISKQVLDQYLTLLADDPLEFVGKSGDSGGGMYVINLHKALASLATATLESVVQERFGSRCARIFRLVLQKKHIEQKQVEDFAMIPAKEAKDMLYKMLSENFMSLQEIPKTPDHAPSRTFYLYTVNILSAARMLLHRCYKSIANLIERRQFETKENKRLLEKSQRVEAIIASMQATGAEEAQLQEIEEMITAPERQQLETLKRNVNKLDASEIQVDETIFLLESYIECTMKRQ

SEQ ID NO: 806612 - protein, 534 aa, Homo sapiens; identical to SEQ ID NO: 806611

SEQ ID NO: 806613 - protein, 534 aa, Homo sapiens; identical to SEQ ID NO: 806611

SEQ ID NO: 806614 - protein, 534 aa, Homo sapiens; identical to SEQ ID NO: 806611

SEQ ID NO: 806615 - protein, 534 aa, Homo sapiens; identical to SEQ ID NO: 806611

SEQ ID NO: 806616 - protein, 534 aa, Homo sapiens; identical to SEQ ID NO: 806611

SEQ ID NO: 806617 - protein, 298 aa, Homo sapiens
MTQAEIKLCSLLLQEHFGEIVEKIGVHLIRTGSQPLRVIAHDTGTSLDQVKKALCVLVQHNLVSYQVHKRGVVEYEAQCSRVLRMLRYPRYIYTTKTLYSDTGELIVEELLLNGKLTMSAVVKKVADRLTETMEDGKTMDYAEVSNTFVRLADTHFVQRCPSVPTTENSDPGPPPPAPTLVINEKDMYLVPKLSLIGKGKRRRSSDEDAAGEPKAKRPKYTTDNKEPIPDDGIYWQANLDRFHQHFRDQAIVSAVANRMDQTSSEIVRTMLRMSEITTSSSAPFTQPLSSNEIWVSLC

SEQ ID NO: 806618 - protein, 325 aa, Homo sapiens
MTQAEIKLCSLLLQEHFGEIVEKIGVHLIRTGSQPLRVIAHDTGTSLDQVKKALCVLVQHNLVSYQVHKRGVVEYEAQCSRVLRMLRYPRYIYTTKTLYSDTGELIVEELLLNGKLTMSAVVKKVADRLTETMEDGKTMDYAEVSNTFVRLADTHFVQRCPSVPTTENSDPGPPPPAPTLVINEKDMYLVPKLSLIGKGKRRRSSDEDAAGEPKAKRPKYTTDNKEPIPDDGIYWQANLDRFHQHFRDQAIVSAVANRMDQTSSEIVRTMLRMSEITTSSSAPFTQPLSSNEIFRSLPVGYNISKQVLDQYLTLLADDPIWVSLC

SEQ ID NO: 806619 - protein, 417 aa, Homo sapiens
MSAVVKKVADRLTETMEDGKTMDYAEVSNTFVRLADTHFVQRCPSVPTTENSDPGPPPPAPTLVINEKDMYLVPKLSLIGKGKRRRSSDEDAAGEPKAKRPKYTTDNKEPIPDDGIYWQANLDRFHQHFRDQAIVSAVANRMDQTSSEIVRTMLRMSEITTSSSAPFTQPLSSNEIFRSLPVGYNISKQVLDQYLTLLADDPLEFVGKSGDSGGGMYVINLHKALASLATATLESVVQERFGSRCARIFRLVLQKKHIEQKQVEDFAMIPAKEAKDMLYKMLSENFMSLQEIPKTPDHAPSRTFYLYTVNILSAARMLLHRCYKSIANLIERRQFETKENKRLLEKSQRVEAIIASMQATGAEEAQLQEIEEMITAPERQQLETLKRNVNKLDASEIQVDETIFLLESYIECTMKRQ

SEQ ID NO: 806620 - protein, 382 aa, Homo sapiens
RFGSRCARDANALWRLMTYIPPPPAPTLVINEKDMYLVPKLSLIGKGKRRRSSDEDAAGEPKAKRPKYTTDNKEPIPDDGIYWQANLDRFHQHFRDQAIVSAVANRMDQTSSEIVRTMLRMSEITTSSSAPFTQPLSSNEIFRSLPVGYNISKQVLDQYLTLLADDPLEFVGKSGDSGGGMYVINLHKALASLATATLESVVQERFGSRCARIFRLVLQKKHIEQKQVEDFAMIPAKEAKDMLYKMLSENFMSLQEIPKTPDHAPSRTFYLYTVNILSAARMLLHRCYKSIANLIERRQFETKENKRLLEKSQRVEAIIASMQATGAEEAQLQEIEEMITAPERQQLETLKRNVNKLDASEIQVDETIFLLESYIECTMKRQ

SEQ ID NO: 806621 - protein, 290 aa, Homo sapiens
MTQAEIKLCSLLLQEHFGEIVEKIGVHLIRTGSQPLRVIAHDTGTSLDQVKKALCVLVQHNLVSYQVHKRGVVEYEAQCSRVLRMLRYPRYIYTTKTLYSDTGELIVEELLLNGKLTMSAVVKKVADRLTETMEDGKTMDYAEVSNTFVRLADTHFVQRCPSVPTTENSDPGPPPPAPTLVINEKDMYLVPKLSLIGKGKRRRSSDEDAAGEPKAKRPKYTTDNKEPIPDDGIYWQANLDRFHQHFRDQAIVSAVANRMDQTSSEIVRTMLRMSEITTSSSGSSASRVRY

SEQ ID NO: 806622 - protein, 286 aa, Homo sapiens
YKIIVSPANRMDQTSSEIVRTMLRMSEITTSSSAPFTQPLSSNEIFRSLPVGYNISKQVLDQYLTLLADDPLEFVGKSGDSGGGMYVINLHKALASLATATLESVVQERFGSRCARIFRLVLQKKHIEQKQVEDFAMIPAKEAKDMLYKMLSENFMSLQEIPKTPDHAPSRTFYLYTVNILSAARMLLHRCYKSIANLIERRQFETKENKRLLEKSQRVEAIIASMQATGAEEAQLQEIEEMITAPERQQLETLKRNVNKLDASEIQVDETIFLLESYIECTMKRQ

SEQ ID NO: 806623 - protein, 285 aa, Homo sapiens
LPQPPKVFGLQALATVPGLKHLYFIKVKSSKFPNPSEVSFAPEIFRSLPVGYNISKQVLDQYLTLLADDPLEFVGKSGDSGGGMYVINLHKALASLATATLESVVQERFGSRCARIFRLVLQKKHIEQKQVEDFAMIPAKEAKDMLYKMLSENFMSLQEIPKTPDHAPSRTFYLYTVNILSAARMLLHRCYKSIANLIERRQFETKENKRLLEKSQRVEAIIASMQATGAEEAQLQEIEEMITAPERQQLETLKRNVNKLDASEIQVDETIFLLESYIECTMKRQ

SEQ ID NO: 806624 - protein, 134 aa, Homo sapiens
MTRKQESEIPKTPDHAPSRTFYLYTVNILSAARMLLHRCYKSIANLIERRQFETKENKRLLEKSQRVEAIIASMQATGAEEAQLQEIEEMITAPERQQLETLKRNVNKLDASEIQVDETIFLLESYIECTMKRQ

SEQ ID NO: 806625 - protein, 534 aa, Homo sapiens; identical to SEQ ID NO: 806611

SEQ ID NO: 806626 - protein, 411 aa, Homo sapiens
MTQAEIKLCSLLLQEHFGEIVEKIGVHLIRTGSQPLRVIAHDTGTSLDQVKKALCVLVQHNLVSYQVHKRGVVEYEAQCSRVLRMLRYPRYIYTTKTLYSDTGELIVEELLLNGKLTMSAVVKKVADRLTETMEDGKTMDYAEVSNTFVRLADTHFVQRCPSVPTTENSDPGPPPPAPTLVINEKDMYLVPKLSLIGKGKRRRSSDEDAAGEPKAKRPKYTTDNKEPIPDDGIYWQANLDRFHQHFRDQAIVSAVANRMDQTSSEIVRTMLRMSEITTSSSAPFTQPLSSNEIFRSLPVGYNISKQVLDQYLTLLADDPLEFVGKSGDSGGGMYVINLHKALASLATATLESVVQERFGSRCARIFRLVLQKKHIEQKQVEDFAMIPAKEAKDMLYKMLSENFMSLQVGCQ

SEQ ID NO: 806627 - protein, 417 aa, Homo sapiens; identical to SEQ ID NO: 806619

SEQ ID NO: 806628 - protein, 467 aa, Homo sapiens
MTQAEIKLCSLLLQEHFGEIVEKIGVHLIRTGSQPLRVIAHDTGTSLDQVKKALCVLVQHNLVSYQVHKRGVVEYEAQCSRVLRMLRYPRYIYTTKTLYSDTGELIVEELLLNGKLTMSAVVKKVADRLTETMEDGKTMDYAEVSNTFVRLADTHFVQRCPSVPTTENSDPGPPPPAPTLVINEKDMYLVPKLSLIGKGKRRRSSDEDAAGEPKAKRPKYTTDNKEPIPDDGIYWQANLDRFHQHFRDQAIVSAVANRMDQTSSEIVRTMLRMSEITTSSSAPFTQPLSSNEIFRSLPVGYNISKQVLDQYLTLLADDPLEFVGKSGDSGGGMYVINLHKALASLATATLESVVQERFGSRCARIFRLVLQKKHIEQKQVEDFAMIPAKEAKDMLYKMLSENFMSLQEIPKTPDHAPSRTFYLYTVNILSAARMLLHRCYKVTQSGPSPHFLHTVKYPSCAHFALSC

SEQ ID NO: 806629 - protein, 421 aa, Homo sapiens
MTQAEIKLCSLLLQEHFGEIVEKIGVHLIRTGSQPLRVIAHDTGTSLDQVKKALCVLVQHNLVSYQVHKRGVVEYEAQCSRVLRMLRYPRYIYTTKTLYSDTGELIVEELLLNGKLTMSAVVKKVADRLTETMEDGKTMDYAEVSNTFVRLADTHFVQRCPSVPTTENSDPGPPPPAPTLVINEKDMYLVPKLSLIGKGKRRRSSDEDAAGEPKAKRPKYTTDNKEPIPDDGIYWQANLDRFHQHFRDQAIVSAVANRMDQTSSEIVRTMLRMSEITTSSSAPFTQPLSSNEIFRSLPVGYNISKQVLDQYLTLLADDPLEFVGKSGDSGGGMYVINLHKALASLATATLESVVQERFGSRCARIFRLVLQKKHIEQKQVEDFAMIPAKEAKDMLYKMLSENFMSLQKFSNTPDHAPSRSK

SEQ ID NO: 806630 - protein, 414 aa, Homo sapiens
MTQAEIKLCSLLLQEHFGEIVEKIGVHLIRTGSQPLRVIAHDTGTSLDQVKKALCVLVQHNLVSYQVHKRGVVEYEAQCSRVLRMLRYPRYIYTTKTLYSDTGELIVEELLLNGKLTMSAVVKKVADRLTETMEDGKTMDYAEVSNTFVRLADTHFVQRCPSVPTTENSDPGPPPPAPTLVINEKDMYLVPKLSLIGKGKRRRSSDEDAAGEPKAKRPKYTTDNKEPIPDDGIYWQANLDRFHQHFRDQAIVSAVANRMDQTSSEIVRTMLRMSEITTSSSAPFTQPLSSNEIFRSLPVGYNISKQVLDQYLTLLADDPLEFVGKSGDSGGGMYVINLHKALASLATATLESVVQERFGSRCARIFRLVLQKKHIEQKQVEDFAMIPAKEAKDMLYKMLSENFMSLQVTNQGRN

SEQ ID NO: 806631 - protein, 264 aa, Homo sapiens
PTLRDLASDCANHALSPLSSNEIFRSLPVGYNISKQVLDQYLTLLADDPLEFVGKSGDSGGGMYVINLHKALASLATATLESVVQERFGSRCARIFRLVLQKKHIEQKQVEDFAMIPAKEAKDMLYKMLSENFMSLQEIPKTPDHAPSRTFYLYTVNILSAARMLLHRCYKSIANLIERRQFETKENKRLLEKSQRVEAIIASMQATGAEEAQLQEIEEMITAPERQQLETLKRNVNKLDASEIQVDETIFLLESYIECTMKRQ

SEQ ID NO: 806632 - protein, 217 aa, Homo sapiens
MRALTLLTTTRYRSSDPYLLAITSLSKFLISISLCWQMIQFGSRCARIFRLVLQKKHIEQKQVEDFAMIPAKEAKDMLYKMLSENFMSLQEIPKTPDHAPSRTFYLYTVNILSAARMLLHRCYKSIANLIERRQFETKENKRLLEKSQRVEAIIASMQATGAEEAQLQEIEEMITAPERQQLETLKRNVNKLDASEIQVDETIFLLESYIECTMKRQ

SEQ ID NO: 806633 - protein, 168 aa, Homo sapiens
MTQAEIKLCSLLLQEHFGEIVEKIGVHLIRTGSQPLRVIAHDTGTSLDQVKKALCVLVQHNLVSYQVHKRGVVEYEAQCSRVLRMLRYPRYIYTTKTLYSDTGELIVEELLLNGKLTMSAVVKKVADRLTETMEDGREPIGPMLERIQTTFVATGKTTHFCTNACPFG

SEQ ID NO: 806634 - protein, 58 aa, Homo sapiens
MELCAGPQLRGQNGRDIDKESRSLEYFPGKASCSISATQPTKIYQAATTGPLNGPHHG

SEQ ID NO: 806635 - protein, 89 aa, Homo sapiens
HRVKKPRGRRLVEPWIASGGKGWKYDVMDIIMGHCVGTRPPACCLILLLFKLLATVSQGLPGTGPLGFHFTHSIYNATVYENSAARTYV

SEQ ID NO: 806636 - protein, 191 aa, Homo sapiens
HASFLVVDCGPPDDLPSGRVEYITGPGVTTYKAVIQYSCEETFYTMKVNDGKYVCEADGFWTSSKGEKSLPVCEPVCGLSARTTGGRIYGGQKAKPGDFPWQVLILGGTTAAGALLYDNWVLTAAHAVYEQKHDASALDIRMGTLKRLSPHYTQAWSEAVFIHEGYTHDAGFDNDIALIKLNNKVVINSNI

SEQ ID NO: 806637 - protein, 104 aa, Homo sapiens [sequence omitted]

SEQ ID NO: 806638 - protein, 74 aa, Homo sapiens
QVLQALACHGFGGPPQEAVSAAGAAAQQVVDQATEAGQKAMDQLAKTTQETIDKTANQASDTFSGIGKKFGLLK

SEQ ID NO: 806639 - protein, 206 aa, Homo sapiens
MLSKRPLLSLRSTPALSSCPGADPALTPRIRKGGLGLMSWEVVCALLLPPAPLWTPVLAPLRSLVRSAPFPPRPVLGQDVLPALRTLEQGPATPRSLYDGNRPAPSPLRGAGQPWGALKTGAGAWHRHSGQDPTSLQLLLTTPQIPRSHGKQGLAGPEATGGGDRPGSRVSGRSGSSASGGPGHRGGAESHGPAGQDHPGNHRQDC

SEQ ID NO: 806640 - protein, 206 aa, Homo sapiens; identical to SEQ ID NO: 806639

SEQ ID NO: 806641 - protein, 169 aa, Homo sapiens
MLSKRPLLSLRSTPALSSCPGADPALTPRIRKGGLGLMSWEVVCALLLPPAPLWTPVLAPLRSLVRSAPFPPRPVLGQDVLPALRTLEQGPATPRSLYDGNRPAPSPLRGAGQPWGALKTGAGAWHRHSGQDPTSLQLLLTTPQIPRSHGKQGLAGPEATGGGDRPGSR

SEQ ID NO: 806642 - protein, 206 aa, Homo sapiens; identical to SEQ ID NO: 806639

SEQ ID NO: 806643 - protein, 206 aa, Homo sapiens; identical to SEQ ID NO: 806639

SEQ ID NO: 806644 - protein, 206 aa, Homo sapiens; identical to SEQ ID NO: 806639

SEQ ID NO: 806645 - protein, 185 aa, Homo sapiens
MLSKRPLLSLRSTPALSSCPGADPALTPRIRKGGLGLMSWEVVCALLLPPAPLWTPVLAPLRSLVRSAPFPPRPVLGQDVLPALRTLEQGPATPRSLYDGNRPAPSPLRGAGQPWGALKTGAGAWHRHSGQDPTSLQLLLTTPQIPRSHGKQGLAGPEATGGGDRPGSRHGPAGQDHPGNHRQDC

SEQ ID NO: 806646 - protein, 147 aa, Homo sapiens
MASKGLQDLKQQVEGTAQEAVSAAGAAAQQVVDQATEAGQKGLVGLEGGGQPQHTSHSPPHPGWGPGTSSPLQSPLSTMPQAGPPGDPGQAKPTGTVVPGPCLTCPLSRPSPAMDQLAKTTQETIDKTANQASDTFSGIGKKFGLLK

SEQ ID NO: 806647 - protein, 185 aa, Homo sapiens; identical to SEQ ID NO: 806645

SEQ ID NO: 806648 - protein, 188 aa, Homo sapiens [sequence omitted]

SEQ ID NO: 806649 - protein, 81 aa, Homo sapiens
PTSPHPRTSRPPWEGGLTCDIHPSSRLRNFGPERGSDRPTATRPEWGAASSTMCIYIGWQWSNTDCFLTKISQVLEVSGKD

SEQ ID NO: 806650 - protein, 147 aa, Homo sapiens
MEPVEAPSLMSWDWSRKPLLQTQAFCSMEQAGAPPSWAGLQPPKLQLWIRASLLLGEPGTGRICPSRCSCSRAGRSQGQVGALPLPSWRGGSSQVQLWLPPQAQDEGISAACTIGHPRKDSPLHPPSLQVQGCLLPLPGLSPLQQLL

SEQ ID NO: 806651 - protein, 70 aa, Homo sapiens
QDAKEGGAGKAERHLGACEIPGKDRNIGVLLGGTGTPRPLQSGQGFRSYRRVERAPRSTAGTQSSRRGIA

SEQ ID NO: 806652 - protein, 783 aa, Homo sapiens
MLLGFRRGRRSHFKHIIHGLLPAASVAPKAAVPRTPPPRSPNPSPERPRSALAAAILATTLTGRTVAIPQPRQRSRSESDVSSVEQDSFIEPYATTSQLRPRPNWQSEMGRRSSLPSFETLDYGDEEDIETQLSSSGKELGDVSAREDRGGHSDDLYAVPHRNQVPLLHEVNSEDDENISHQDGFPGSPPAPQRTQQKDGKHPVLNLKDEKPPLCEKPPPSPDITGRARQRYTEITREKFEALKEENMDLNNMNQSLTLELNTMKQAMKELQLKLKGMEKEKRKLKEAEKASSQEVAAPELLYLRKQAQELVDENDGLKMTVHRLNVELSRYQTKFRHLSKEESLNIEGLPSKGPIPPWLLDIKYLSPLLLAYEDMMKEKDELNATLKEEMRMFRMRVQEVVKENEELHQELNKSSAVTSEEWRQLQTQAKLVLEENKLLLEQLEIQQRKAKDSHQERLQEVSKLTKQLMLLEAKTHGQEKELAENREQLEILRAKCQELKTHSDGKIAVEVHKSIVNELKSQLQKEEEKERAEMEELMEKLTVLQAQKKSLLLEKNSLTEQNKALEAELERAQKINRKSQKKIEVLKKQVEKAMGNEMSAHQYLANLVGLAENITQERDSLMCLAKCLESEKDGVLNKVIKSNIRLGKLEEKVKGYKKQAALKLGDISHRLLEQQEDFAGKTAQYRQEMRHLHQVLKDKQEVLDQALQQNREMEGELEVIWESTFRENRRIRELLQDTLTRTGVQDNPRALVAPSLNGVSQADLLDGCDVCSYDLKSHAPTC

SEQ ID NO: 806653 - protein, 76 aa, Homo sapiens
QDAKEGGAGKAERHLGACEIPGKDRNIGVLLGGTGTPRPLQSGQGFRSYRRVERAPRSTAGTQSSRRGFGQSLGGK

SEQ ID NO: 806654 - protein, 819 aa, Homo sapiens
MLLGFRRGRRSHFKHIIHGLLPAASVAPKAAVPRTPPPRSPNPSPERPRSALAAAILATTLTGRTVAIPQPRQRSRSESDVSSVEQDSFIEPYATTSQLRPRPNWQSEMGRRSSLPSFETLDYGDEEDIETQLSSSGKELGDVSAREDRGGHSDDLYAVPHRNQVPLLHEVNSEDDENISHQDGFPGSPPAPQRTQQKDGKHPVLNLKDEKPPLCEKPPPSPGPTLLQDLWGVAFLVGNVCGASVPLPEFLSCVQKEGDITGRARQRYTEITREKFEALKEENMDLNNMNQSLTLELNTMKQAMKELQLKLKGMEKEKRKLKEAEKASSQEVAAPELLYLRKQAQELVDENDGLKMTVHRLNVELSRYQTKFRHLSKEESLNIEGLPSKGPIPPWLLDIKYLSPLLLAYEDMMKEKDELNATLKEEMRMFRMRVQEVVKENEELHQELNKSSAVTSEEWRQLQTQAKLVLEENKLLLEQLEIQQRKAKDSHQERLQEVSKLTKQLMLLEAKTHGQEKELAENREQLEILRAKCQELKTHSDGKIAVEVHKSIVNELKSQLQKEEEKERAEMEELMEKLTVLQAQKKSLLLEKNSLTEQNKALEAELERAQKINRKSQKKIEVLKKQVEKAMGNEMSAHQYLANLVGLAENITQERDSLMCLAKCLESEKDGVLNKVIKSNIRLGKLEEKVKGYKKQAALKLGDISHRLLEQQEDFAGKTAQYRQEMRHLHQVLKDKQEVLDQALQQNREMEGELEVIWESTFRENRRIRELLQDTLTRTGVQDNPRALVAPSLNGVSQADLLDGCDVCSYDLKSHAPTC

SEQ ID NO: 806655 - protein, 356 aa, Homo sapiens
MLLGFRRGRRSHFKHIIHGLLPAASVAPKAAVPRTPPPRSPNPSPERPRSALAAAILATTLTGRTVAIPQPRQRSRSESDVSSVEQDSFIEPYATTSQLRPRPNWQSEMGRRSSLPSFETLDYGDEEDIETQLSSSGKELGDVSAREDRGGHSDDLYAVPHRNQVPLLHEVNSEDDENISHQDGFPGSPPAPQRTQQKDGKHPVLNLKDEKPPLCEKPPPSPDITGRARQRYTEITREKFEALKEENMDLNNMNQSLTLELNTMKQAMKELQLKLKGMEKEKRKLKEAEKASSQEVAAPELLYLRKQAQELVDENDGLKMTVHRLNVELSRYQTKFRHLSKEEVTFPIVKISFSDF

SEQ ID NO: 806656 - protein, 206 aa, Homo sapiens
MLLGFRRGRRSHFKHIIHGLLPAASVAPKAAVPRTPPPRSPNPSPERPRSALAAAILATTLTGRTVAIPQPRQRSRSESDVSSVEQDSFIEPYATTSQLRPRPNWQSEMGRRSSLPSFETLDYGDEEDIETQLSSSGKELGDVSAREDRGGHSDDLYAVPHRNQVPLLHEVNSEDDENISHQDGFPGSPPAPQRTQQKAGETLPQK

SEQ ID NO: 806657 - protein, 508 aa, Homo sapiens [sequence omitted]

SEQ ID NO: 806658 - protein, 508 aa, Homo sapiens [sequence omitted]

SEQ ID NO: 806659 - protein, 477 aa, Homo sapiens
MELDSALEAPSQEDSNLSEELSHSAFGQAFSKILHCLARPEARRGNVKDAVLKDLGDLIEATGFDRLFEGTGARLRGMPETLGQVAKALEKYAAPSKEEEGGGDGHSEAAEKAAQVGLLFLKLLGKVETAKNSLVGPAWQTGLHHLAGPVYIFAITHSLEQPWTTPRSREVAREVLTSLLQVTECGSVAGFLHGENEDEKGRLSVILGLLKPDLYKESWKNNPAIKHVFSWTLQQVTRPWLSQHLERVLPASLVISDDYQTENKILGVHCLHHIVLNVAVLLCLLDLFPILEKTLHWKGDGARPTTHCDEVLRLILTHMEPEHRLLLRRTYARNLPAFVNRLGILTVRHLKRLERVIIGYLEVYDGPEEEARLKILETLKLLMQHTWPRVSCRLVVLLKALLKLICDVARDPNLTPESVKSALLQEATDCLILLDRCSQGRVKGLLAKIPQSCEDRKVVNYIRKVQQVSEGAPYNGT

SEQ ID NO: 806660 - protein, 477 aa, Homo sapiens; identical to SEQ ID NO: 806659

SEQ ID NO: 806661 - protein, 508 aa, Homo sapiens [sequence omitted]

SEQ ID NO: 806662 - protein, 435 aa, Homo sapiens
MELDSALEAPSQEDSNLSEELSHSAFGQAFSKILHCLARPEARRGNVKDAVLKDLGDLIEATGFDRLFEGTGARLRGMPETLGQVAKALEKYAAPSKEEEGGGDGHSEAAEKAAQVGLLFLKLLGKVETAKNSLVGPAWQTGLHHLAGPVYIFAITHSLEQPWTTPRSREVAREVLTSLLQVTECGSVAGFLHGENEDEKGRLSVILGLLKPDLYKESWKNNPAIKHVFSWTLQQVTRPWLSQHLERVLPASLVISDDYQTENKILGVHCLHHIVLNVPAADLLQYNRAQVLYHAISNHLYTPEHHLIQAVLLCLLDLFPILEKTLHWKGDGARPTTHCDEVLRLILTHMEPEHRLLLRRTYARNLPAFVNRLGILTVRHLKRLERVIIGYLEVYDGPEEEARLKILETLKLLMQHTWPRVSWPKFPKAVKTEKW

SEQ ID NO: 806663 - protein, 126 aa, Homo sapiens
  misc_feature (104)..(104): Xaa can be any naturally occurring amino acid
MELDSALEAPSQEDSNLSEELSHSAFGQAFSKILHCLARPEARRGNVKDAVLKDLGDLIEATGFDRLFEGTGARLRGMPETLGQVAKALEKYAAPSKEEEGLGXPPFWLSPKNGGGRGGPPPFRGS

SEQ ID NO: 806664 - protein, 117 aa, Homo sapiens
MGLTPMHIPSITKHIYVYIRTQEHGITQVDNTYLLPKTQQRFKNNNGDMLTGMLIGMCPACLCAGLGTEYGNTNQTPKIYSCDLKHVSPCSKFVQFHVCVAFTDFILIVFLCQRSLC

SEQ ID NO: 806665 - protein, 75 aa, Homo sapiens
QRSHQTPGLPAPCSLEAPDPSPAPTVTREVQYGVVLPSIVRNHRSVNSLVLFGQLERRMSDGGVSMGSRRRDGYQ

SEQ ID NO: 806666 - protein, 587 aa, Homo sapiens
MHPLQCVLQVQRSLGWGPLASVSWLSLRMCRAHSSLSSTMCPSPERQEDGARKDFSSRLAAGPTFQHFLKSASAPQEKLSSEVEDPPPYLMMDELLGRQRKVYLETYGCQMNVNDTEIAWSILQKSGYLRTSNLQEADVILLVTCSIREKAEQTIWNRLHQLKALKTRRPRSRVPLRIGILGCMAERLKEEILNREKMVDILAGPDAYRDLPRLLAVAESGQQAANVLLSLDETYADVMPVQTSASATSAFVSIMRGCDNMCSYCIVPFTRGRERSRPIASILEEVKKLSEQGLKEVTLLGQNVNSFRDNSEVQFNSAVPTNLSRGFTTNYKTKQGGLRFAHLLDQVSRVDPEMRIRFTSPHPKDFPDEVLQLIHERDNICKQIHLPAQSGSSRVLEAMRRGYSREAYVELVHHIRESIPGVSLSSDFIAGFCGETEEDHVQTVSLLREVQYNMGFLFAYSMRQKTRAYHRLKDDVPEEVKLRRLEELITIFREEATKANQTSVGCTQLVLVEGLSKRSATDLCGRNDGNLKVIFPDAEMEDVNNPGLRVRAQPGDYVLVKITSASSQTLRGHVLCRTTLRDSSAYC

SEQ ID NO: 806667 - protein, 601 aa, Homo sapiens
MHPLQCVLQVQRSLGWGPLASVSWLSLRMCRAHSSLSSTMCPSPERQEDGARKDFSSRLAAGPTFQHFLKSASAPQEKLSSEVEDPPPYLMMDELLGRQRKVYLETYGCQMNVNDTEIAWSILQKSGYLRTSNLQEADVILLVTCSIREKAEQTIWNRLHQLKALKTRRPRSRVPLRIGILGCMAERLKEEILNREKMVDILAGPDAYRDLPRLLAVAESGQQAANVLLSLDETYADVMPVQTSASATSAFVSIMRGCDNMCSYCIVPFTRGRERSRPIASILEEVKKLSEQVFLPPRPPKVLGLQGLKEVTLLGQNVNSFRDNSEVQFNSAVPTNLSRGFTTNYKTKQGGLRFAHLLDQVSRVDPEMRIRFTSPHPKDFPDEVLQLIHERDNICKQIHLPAQSGSSRVLEAMRRGYSREAYVELVHHIRESIPGVSLSSDFIAGFCGETEEDHVQTVSLLREVQYNMGFLFAYSMRQKTRAYHRLKDDVPEEVKLRRLEELITIFREEATKANQTSVGCTQLVLVEGLSKRSATDLCGRNDGNLKVIFPDAEMEDVNNPGLRVRAQPGDYVLVKITSASSQTLRGHVLCRTTLRDSSAYC

SEQ ID NO: 806668 - protein, 510 aa, Homo sapiens
MHPLQCVLQVQRSLGWGPLASVSWLSLRMCRAHSSLSSTMCPSPERQEDGARKDFSSRLAAGPTFQHFLKSASAPQEKLSSEVEDPPPYLMMDELLGRQRKVYLETYGCQMNVNDTEIAWSILQKSGYLRTSNLQEADVILLVTCSIREKAEQTIWNRLHQLKALKTRRPRSRVPLRIGILGCMAERLKEEILNREKMVDILAGPDAYRDLPRLLAVAESGQQAANVLLSLDETYADVMPVQTSASATSAFVSIMRGCDNMCSYCIVPFTRGRERSRPIASILEEVKKLSEQVLQLIHERDNICKQIHLPAQSGSSRVLEAMRRGYSREAYVELVHHIRESIPGVSLSSDFIAGFCGETEEDHVQTVSLLREVQYNMGFLFAYSMRQKTRAYHRLKDDVPEEVKLRRLEELITIFREEATKANQTSVGCTQLVLVEGLSKRSATDLCGRNDGNLKVIFPDAEMEDVNNPGLRVRAQPGDYVLVKITSASSQTLRGHVLCRTTLRDSSAYC

SEQ ID NO: 806669 - protein, 580 aa, Homo sapiens
ERKSLVYERSGGPVRGSDLPAELTLRDPGHCCCCGSPERQEDGARKDFSSRLAAGPTFQHFLKSASAPQEKLSSEVEDPPPYLMMDELLGRQRKVYLETYGCQMNVNDTEIAWSILQKSGYLRTSNLQEADVILLVTCSIREKAEQTIWNRLHQLKALKTRRPRSRVPLRIGILGCMAERLKEEILNREKMVDILAGPDAYRDLPRLLAVAESGQQAANVLLSLDETYADVMPVQTSASATSAFVSIMRGCDNMCSYCIVPFTRGRERSRPIASILEEVKKLSEQGLKEVTLLGQNVNSFRDNSEVQFNSAVPTNLSRGFTTNYKTKQGGLRFAHLLDQVSRVDPEMRIRFTSPHPKDFPDEVLQLIHERDNICKQIHLPAQSGSSRVLEAMRRGYSREAYVELVHHIRESIPGVSLSSDFIAGFCGETEEDHVQTVSLLREVQYNMGFLFAYSMRQKTRAYHRLKDDVPEEVKLRRLEELITIFREEATKANQTSVGCTQLVLVEGLSKRSATDLCGRNDGNLKVIFPDAEMEDVNNPGLRVRAQPGDYVLVKITSASSQTLRGHVLCRTTLRDSSAYC

SEQ ID NO: 806670 - protein, 215 aa, Homo sapiens
MRGCDNMCSYCIVPFTRGRERSRPIASILEEVKKLSEQGLKEVTLLGQNVNSFRDNSEVQFNSAVPTNLSRGFTTNYKTKQGGLRFAHLLDQVSRVDPEMRIRFTSPHPKDFPDEVLQLIHERDNICKQIHLPAQSGSSRVLEAMRRGYSREAYVELVHHIRESIPGVSLSSDFIAGFCGETEEDHVQTVSLLREVQYNMGFLFAYSMRQKTRAS

SEQ ID NO: 806671 - protein, 587 aa, Homo sapiens; identical to SEQ ID NO: 806666

SEQ ID NO: 806672 - protein, 253 aa, Homo sapiens
MHPLQCVLQVQRSLGWGPLASVSWLSLRMCRAHSSLSSTMCPSPERQEDGARKDFSSRLAAGPTFQHFLKSASAPQEKLSSEVEDPPPYLMMDELLGRQRKVYLETYGCQMNVNDTEIAWSILQKSGYLRTSNLQEADVILLVTCSIREKAEQTIWNRLHQLKALKTRRPRSRVPLRIGILGCMAERLKEEILNREKMVDILAGPDAYRDLPRLLAVAESGQQAANVLLSLDETYADVMPVQTSASATSAFVG

SEQ ID NO: 806673 - protein, 569 aa, Homo sapiens
MHPLQCVLQVQRSLGWGPLASVSWLSLRMCRAHSSLSSTMCPSPERQEDGARKDFSSRLAAGPTFQHFLKSASAPQEKLSSEVEDPPPYLMMDELLGRQRKVYLETYGCQMNVNDTEIAWSILQKSGYLRTSNLQEADVILLVTCSIREKAEQTIWNRLHQLKALKTRRPRSRVPLRIGILGCMAERLKEEILNREKMVDILAGPDAYRDLPRLLAVAESGQQAANVLLSLDETYADVMPVQTSASATSAFVSIMRGCDNMCSYCIVPFTRGRERSRPIASILEEVKKLSEQGLKEVTLLGQNVNSFRDNSEVQFNSAVPTNLSRGFTTNYVDPEMRIRFTSPHPKDFPDEVLQLIHERDNICKQIHLPAQSGSSRVLEAMRRGYSREAYVELVHHIRESIPGVSLSSDFIAGFCGETEEDHVQTVSLLREVQYNMGFLFAYSMRQKTRAYHRLKDDVPEEVKLRRLEELITIFREEATKANQTSVGCTQLVLVEGLSKRSATDLCGRNDGNLKVIFPDAEMEDVNNPGLRVRAQPGDYVLVKITSASSQTLRGHVLCRTTLRDSSAYC

SEQ ID NO: 806674 - protein, 437 aa, Homo sapiens
MHPLQCVLQVQRSLGWGPLASVSWLSLRMCRAHSSLSSTMCPSPERQEDGARKDFSSRLAAGPTFQHFLKSASAPQEKLSSEVEDPPPYLMMDELLGRQRKVYLETYGCQMNVNDTEIAWSILQKSGYLRTSNLQEADVILLVTCSIREKAEQTIWNRLHQLKALKTRRPRSRVPLRIGILGCMAERLKEEILNREKMVDILAGPDAYRDLPRLLAVAESGQQAANVLLSLDETYADVMPVQTSASATSAFVYSREAYVELVHHIRESIPGVSLSSDFIAGFCGETEEDHVQTVSLLREVQYNMGFLFAYSMRQKTRAYHRLKDDVPEEVKLRRLEELITIFREEATKANQTSVGCTQLVLVEGLSKRSATDLCGRNDGNLKVIFPDAEMEDVNNPGLRVRAQPGDYVLVKITSASSQTLRGHVLCRTTLRDSSAYC

SEQ ID NO: 806675 - protein, 460 aa, Homo sapiens
MNFLEGREKADVILLVTCSIREKAEQTIWNRLHQLKALKTRRPRSRVPLRIGILGCMAERLKEEILNREKMVDILAGPDAYRDLPRLLAVAESGQQAANVLLSLDETYADVMPVQTSASATSAFVSIMRGCDNMCSYCIVPFTRGRERSRPIASILEEVKKLSEQGLKEVTLLGQNVNSFRDNSEVQFNSAVPTNLSRGFTTNYKTKQGGLRFAHLLDQVSRVDPEMRIRFTSPHPKDFPDEVLQLIHERDNICKQIHLPAQSGSSRVLEAMRRGYSREAYVELVHHIRESIPGVSLSSDFIAGFCGETEEDHVQTVSLLREVQYNMGFLFAYSMRQKTRAYHRLKDDVPEEVKLRRLEELITIFREEATKANQTSVGCTQLVLVEGLSKRSATDLCGRNDGNLKVIFPDAEMEDVNNPGLRVRAQPGDYVLVKITSASSQTLRGHVLCRTTLRDSSAYC

SEQ ID NO: 806676 - protein, 404 aa, Homo sapiens
MAERLKEEILNREKMVDILAGPDAYRDLPRLLAVAESGQQAANVLLSLDETYADVMPVQTSASATSAFVSIMRGCDNMCSYCIVPFTRGRERSRPIASILEEVKKLSEQGLKEVTLLGQNVNSFRDNSEVQFNSAVPTNLSRGFTTNYKTKQGGLRFAHLLDQVSRVDPEMRIRFTSPHPKDFPDEVLQLIHERDNICKQIHLPAQSGSSRVLEAMRRGYSREAYVELVHHIRESIPGVSLSSDFIAGFCGETEEDHVQTVSLLREVQYNMGFLFAYSMRQKTRAYHRLKDDVPEEVKLRRLEELITIFREEATKANQTSVGCTQLVLVEGLSKRSATDLCGRNDGNLKVIFPDAEMEDVNNPGLRVRAQPGDYVLVKITSASSQTLRGHVLCRTTLRDSSAYC

SEQ ID NO: 806677 - protein, 234 aa, Homo sapiens
MRIRFTSPHPKDFPDEVLQLIHERDNICKQIHLPAQSGSSRVLEAMRRGYSREAYVELVHHIRESIPGVSLSSDFIAGFCGETEEDHVQTVSLLREVQYNMGFLFAYSMRQKTRAYHRLKDDVPEEVKLRRLEELITIFREEATKANQTSVGCTQLVLVEGLSKRSATDLCGRNDGNLKVIFPDAEMEDVNNPGLRVRAQPGDYVLVKITSASSQTLRGHVLCRTTLRDSSAYC

SEQ ID NO: 806678 - protein, 475 aa, Homo sapiens
ERKSLVYERSGGPVRGSDLPAELTLRDPGHCCCCGREKAEQTIWNRLHQLKALKTRRPRSRVPLRIGILGCMAERLKEEILNREKMVDILAGPDAYRDLPRLLAVAESGQQAANVLLSLDETYADVMPVQTSASATSAFVSIMRGCDNMCSYCIVPFTRGRERSRPIASILEEVKKLSEQGLKEVTLLGQNVNSFRDNSEVQFNSAVPTNLSRGFTTNYKTKQGGLRFAHLLDQVSRVDPEMRIRFTSPHPKDFPDEVLQLIHERDNICKQIHLPAQSGSSRVLEAMRRGYSREAYVELVHHIRESIPGVSLSSDFIAGFCGETEEDHVQTVSLLREVQYNMGFLFAYSMRQKTRAYHRLKDDVPEEVKLRRLEELITIFREEATKANQTSVGCTQLVLVEGLSKRSATDLCGRNDGNLKVIFPDAEMEDVNNPGLRVRAQPGDYVLVKITSASSQTLRGHVLCRTTLRDSSAYC

SEQ ID NO: 806679 - protein, 333 aa, Homo sapiens
MRGCDNMCSYCIVPFTRGRERSRPIASILEEVKKLSEQGLKEVTLLGQNVNSFRDNSEVQFNSAVPTNLSRGFTTNYKTKQGGLRFAHLLDQVSRVDPEMRIRFTSPHPKDFPDEVLQLIHERDNICKQIHLPAQSGSSRVLEAMRRGYSREAYVELVHHIRESIPGVSLSSDFIAGFCGETEEDHVQTVSLLREVQYNMGFLFAYSMRQKTRAYHRLKDDVPEEVKLRRLEELITIFREEATKANQTSVGCTQLVLVEGLSKRSATDLCGRNDGNLKVIFPDAEMEDVNNPGLRVRAQPGDYVLVKITSASSQTLRGHVLCRTTLRDSSAYC

SEQ ID NO: 806680 - protein, 574 aa, Homo sapiens
MHPLQCVLQVQRSLGWGPLASVSWLSLRMCRAHSSLSSTMCPSPERQEDGARKDFSSRLAAGPTFQHFLKSASAPQEKLSSEVEDPPPYLMMDELLGRQRKVYLETYGCQMNVNDTEIAWSILQKSGYLRTSNLQEADVILLVTCSIREKAEQTIWNRLHQLKALKTRRPRSRVPLRIGILGCMAERLKEEILNREKMVDILAGPDAYRDLPRLLAVAESGQQAANVLLSLDETYADVMPVQTSASATSAFVSIMRGCDNMCSYCIVPFTRGRERSRPIASILEEVKKLSEQGLKEVTLLGQNVNSFRDNSEVQFNSAVPTNLSRGFTTNYKTKQGGLRFAHLLDQVSRVDPEMRIRFTSPHPKDFPDEVLQLIHERDNICKQIHLPAQSGSSRVLEAMRRGYSREAYVELVHHIRESIPGVSLSSDFIAGFCGETEEDHVQTVSLLREVQYNMGFLFAYSMRQKTRAYHRLKDDVPEEVKLRRLEELITIFREEATKANQTSVGCTQLVLVEGLSKRSATDLCGRNDGNLKVIFPDAEMEDVNNPGLRVRAQPGDYVLVKVRSPFGLLACTVK

SEQ ID NO: 806681 - protein, 540 aa, Homo sapiens
MHPLQCVLQVQRSLGWGPLASVSWLSLRMCRAHSSLSSTMCPSPERQEDGARKDFSSRLAAGPTFQHFLKSASAPQEKLSSEVEDPPPYLMMDELLGRQRKVYLETYGCQMNVNDTEIAWSILQKSGYLRTSNLQEADVILLVTCSIREKAEQTIWNRLHQLKALKTRRPRSRVPLRIGILGCMAERLKEEILNREKMVDILAGPDAYRDLPRLLAVAESGQQAANVLLSLDETYADVMPVQTSASATSAFVSIMRGCDNMCSYCIVPFTRGRERSRPIASILEEVKKLSEQGLKEVTLLGQNVNSFRDNSEVQFNSAVPTNLSRGFTTNYKTKQGGLRFAHLLDQVSRVDPEMRIRFTSPHPKDFPDEVLQLIHERDNICKQIHLPAQSGSSRVLEAMRRGYSREAYVELVHHIRESIPGVSLSSDFIAGFCGETEEDHVQTVSLLREVQYNMGFLFAYSMRQKTRAYHRLKDDVPEEVKLRRLEELITIFREEATKANQTSVGCTQLVLVEGITSASSQTLRGHVLCRTTLRDSSAYC

SEQ ID NO: 806682 - protein, 429 aa, Homo sapiens
MHPLQCVLQVQRSLGWGPLASVSWLSLRMCRAHSSLSSTMCPSPERQEDGARKDFSSRLAAGPTFQHFLKSASAPQEKLSSEVEDPPPYLMMDELLGRQRKVYLETYGCQMNVNDTEIAWSILQKSGYLRTSNLQEADVILLVTCSIREKAEQTIWNRLHQLKALKTRRPRSRVPLRIGILGCMAERLKEEILNREKMVDILAGPDAYRDLPRLLAVAESGQQAANVLLSLDETYADVMPVQTSASATSAFVSIMRGCDNMCSYCIVPFTRGRERSRPIASILEEVKKLSEQGLKEVTLLGQNVNSFRDNSEVQFNSAVPTNLSRGFTTNYKTKQGGLRFAHLLDQVSRVDPEMRIRFTSPHPKDFPDEVLQLIHERDNICKQIHLPAQSGSSRVLEAMRRGSGLLGEGASLTFPCFLNDQTVSLLPRT

SEQ ID NO: 806683 - protein, 374 aa, Homo sapiens
MHPLQCVLQVQRSLGWGPLASVSWLSLRMCRAHSSLSSTMCPSPERQEDGARKDFSSRLAAGPTFQHFLKSASAPQEKLSSEVEDPPPYLMMDELLGRQRKVYLETYGCQMNVNDTEIAWSILQKSGYLRTSNLQEADVILLVTCSIREKAEQTIWNRLHQLKALKTRRPRSRVPLRIGILGCMAERLKEEILNREKMVDILAGPDAYRDLPRLLAVAESGQQAANVLLSLDETYADVMPVQTSASATSAFVSIMRGCDNMCSYCIVPFTRGRERSRPIASILEEVKKLSEQGLKEVTLLGQNVNSFRDNSEVQFNSAVPTNLSRGFTTNYKTKQGGLRFAHLLDQVSRVDPEMRIRFTSPHPKDFPDESAGPL

SEQ ID NO: 806684 - protein, 378 aa, Homo sapiens
MHPLQCVLQVQRSLGWGPLASVSWLSLRMCRAHSSLSSTMCPSPERQEDGARKDFSSRLAAGPTFQHFLKSASAPQEKLSSEVEDPPPYLMMDELLGRQRKVYLETYGCQMNVNDTEIAWSILQKSGYLRTSNLQEADVILLVTCSIREKAEQTIWNRLHQLKALKTRRPRSRVPLRIGILGCMAERLKEEILNREKMVDILAGPDAYRDLPRLLAVAESGQQAANVLLSLDETYADVMPVQTSASATSAFVSIMRGCDNMCSYCIVPFTRGRERSRPIASILEEVKKLSEQGLKEVTLLGQNVNSFRDNSEVQFNSAVPTNLSRGFTTNYKTKQGGLRFAHLLDQVSRVDPEMRIRFTSPHPKDFPDEVSVRLAVTN

SEQ ID NO: 806685 - protein, 189 aa, Homo sapiens [sequence omitted]

SEQ ID NO: 806686 - protein, 221 aa, Homo sapiens
ERKSLVYERSGGPVRGSDLPAELTLRDPGHCCCCGRYSREAYVELVHHIRESIPGVSLSSDFIAGFCGETEEDHVQTVSLLREVQYNMGFLFAYSMRQKTRAYHRLKDDVPEEVKLRRLEELITIFREEATKANQTSVGCTQLVLVEGLSKRSATDLCGRNDGNLKVIFPDAEMEDVNNPGLRVRAQPGDYVLVKITSASSQTLRGHVLCRTTLRDSSAYC

SEQ ID NO: 806687 - protein, 189 aa, Homo sapiens [sequence omitted]

SEQ ID NO: 806688 - protein, 134 aa, Homo sapiens
MGFLFAYSMRQKTRAYHRLKDDVPEEVKLRRLEELITIFREEATKANQTSVGCTQLVLVEGLSKRSATDLCGRNDGNLKVIFPDAEMEDVNNPGLRVRAQPGDYVLVKITSASSQTLRGHVLCRTTLRDSSAYC

SEQ ID NO: 806689 - protein, 128 aa, Homo sapiens
KPRRVCVGGKRRRDDISVDSLDFTKKILHTAWHPAENIIAIAATNNLYPVGAVEGLSKRSATDLCGRNDGNLKVIFPDAEMEDVNNPGLRVRAQPGDYVLVKITSASSQTLRGHVLCRTTLRDSSAYC

SEQ ID NO: 806690 - protein, 89 aa, Homo sapiens
MDSRGNGCSNIQFPESAAPAAVSCADGVGREMDTGYVSMIFRNLAPYCHPTTRTLKTVKILSPDMDPTVAQDVGSNFIAVCYLIKFTKG

SEQ ID NO: 806691 - protein, 84 aa, Homo sapiens
VPGARPRAPRFEPLGHETASPSTMQLSAHQKTPLQSTHRPQKEYPEEPEHTPPYLFSEIQSNESLYFSGSRKRLEVFLQVSSSM

SEQ ID NO: 806692 - protein, 146 aa, Homo sapiens
VPGARPRAPRFEPLGHETASPSTMQLSAHQKTPLQSTHRPQKEYPEEPEHTPPYLFSEIQSNESLYFSGSRKRLEVFLQQQTARQTLRQELLSRSSSHQILCAGNPPLLSTLCAPLPVTVHVKQWYGKIVCRRMKRLYCQTLKVFC

SEQ ID NO: 806693 - protein, 124 aa, Homo sapiens [sequence omitted]

SEQ ID NO: 806694 - protein, 144 aa, Homo sapiens
MPFLELDTNLPANRVPAGLEKRLCAAAASILGKPADRVNVTVRPGLAMALSGSTEPCAQLSISSIGVVGTAEDNRSHSAHFFEFLTKELALGQDRFPTVLSTSPAAHGGPRCPGEIIEGPHSAKRSLWKKQPVHRCPGSLRAQS

SEQ ID NO: 806695 - protein, 118 aa, Homo sapiens
MPFLELDTNLPANRVPAGLEKRLCAAAASILGKPADRVNVTVRPGLAMALSGSTEPCAQLSISSIGVVGTAEDNRSHSAHFFEFLTKELALGQDRILIRFFPLESWQIGKIGTVMTFL

SEQ ID NO: 806696 - protein, 112 aa, Homo sapiens
MPFLELDTNLPANRVPAGLEKRLCAAAASILGKPADRVNVTVRPGLAMALSGSTEPCAQLSISSIGVVGTAEDNRSHSAHFFEFLTKELALGQDRCVGVVGDPCGTAADWSH

SEQ ID NO: 806697 - protein, 128 aa, Homo sapiens
MCTAWSWLSAGRGDAHGGGGEPVQTLGPCTCSLMVLIPSGPSRDTACFTRSVRPQFSIRKPRSCLNLASMATASSFRDAQKQSSALRKGRDIMRVQRLPRGAQEQTPQEAPWDIAFAFHVNCLFLGSN

SEQ ID NO: 806698 - protein, 110 aa, Homo sapiens
NCLLDRSDTDGNVSQSSAIDLRKRCSQLEGHSGTRVGSSLRQTFSFLSGMTGKAKTREKEEMKEAKDARYTNGHLFTTISVSGMTMCYACNKSITAKEALICPTCNVTIH

SEQ ID NO: 806699 - protein, 98 aa, Homo sapiens
VRRLRAPGRREEAAKAQGRGPARGKEPQRQPPGARDGAGDGAAGTRPVTSKGPSERPTAETRGADSVLNRGQRQPQQRHGPVLPPRTDSAADSSHLQW

SEQ ID NO: 806700 - protein, 170 aa, Homo sapiens
GRWLIDCKVLPPNHRVVWPSAVVFDLAQALRDGVLLCQLLHNLSPGSIDLKDINFRPQMSQFLCLKNIRTFLKVCHDKFGLRNSELFDPFDLFDVRDFGKVISAVSRLSLHSIAQNKGIRPFPSEETTENDDDVYRSLEELADEHDLGEDIYDCVPCEDGGDDIYEDIIK

SEQ ID NO: 806701 - protein, 120 aa, Homo sapiens
GRWLIDCKVLPPNHRVVWPSAVVFDLAQALRDGVLLCQLLHNLSPGSIDLKDINFRPQMSQFLCLKNIRTFLKVCHDKFGLRNSELFDPFDLFDVRDFGKVISAVSRLSLHSIAQNKGIR

SEQ ID NO: 806702 - protein, 146 aa, Homo sapiens
HHGHVDGPQEAVMHLDQVLQVNEDSCHVRRAQHQPQGAHVVLLNVLQGAVVLGLGLLDLHELFDPFDLFDVRDFGKVISAVSRLSLHSIAQNKGIRPFPSEETTENDDDVYRSLEELADEHDLGEDIYDCVPCEDGGDDIYEDIIK

SEQ ID NO: 806703 - protein, 118 aa, Homo sapiens
MSAIWRLLAAKGDEQAKVARPACRPRAAAVSCHQPSPDTQDACLTQKHSYVRPLRGSASCHCYQKKKPSKQKGQCHTRQPGAQQNKWPPKALWGPHPATDPSTVWFPGLQDPPGDLSA

SEQ ID NO: 806704 - protein, 118 aa, Homo sapiens; identical to SEQ ID NO: 806703

SEQ ID NO: 806705 - protein, 487 aa, Homo sapiens
MAAPTLGRLVLTHLLVALFGMGSWAAVNGIWVELPVVVKDLPEGEWEGGTGKRGAGMPRKVACGSSLSLSHCAPDMASSFPAGWSLPSYLSVVVALGNLGLLVVTLWRRLAPGKGEQVPIQVVQVLSVVGTALLAPLWHHVAPVAGQLHSVAFLTLALVLAMACCTSNVTFLPFLSHLPPPFLRSFFLGQGLSALLPCVLALVQGVGRLECPPAPTNGTSGPPLDFPERFPASTFFWALTALLVTSAAAFRGLLLLLPSLPSVTTGGSGPELQLGSPGAEEEEKEEEEALPLQEPPSQAAGTIPGPDPEAHQLFSAHGAFLLGLMAFTSAVTNGVLPSVQSFSCLPYGRLAYHLAVVLGSAANPLACFLAMGVLCRSLAGLVGLSLLGMLFGAYLMALAILSPCPPLVGTTAGVVLVVLSWVLCLCVFSYVKVAASSLLHGGGRPALLAAGVAIQVGSLLGAGAMFPPTSIYHVFQSRKDCVDPCGP

SEQ ID NO: 806706 - protein, 448 aa, Homo sapiens
MAAPTLGRLVLTHLLVALFGMGSWAAVNGIWVELPVVVKDLPEGWSLPSYLSVVVALGNLGLLVVTLWRRLAPGKGEQVPIQVVQVLSVVGTALLAPLWHHVAPVAGQLHSVAFLTLALVLAMACCTSNVTFLPFLSHLPPPFLRSFFLGQGLSALLPCVLALVQGVGRLECPPAPTNGTSGPPLDFPERFPASTFFWALTALLVTSAAAFRGLLLLLPSLPSVTTGGSGPELQLGSPGAEEEEKEEEEALPLQEPPSQAAGTIPGPDPEAHQLFSAHGAFLLGLMAFTSAVTNGVLPSVQSFSCLPYGRLAYHLAVVLGSAANPLACFLAMGVLCRSLAGLVGLSLLGMLFGAYLMALAILSPCPPLVGTTAGVVLVVLSWVLCLCVFSYVKVAASSLLHGGGRPALLAAGVAIQVGSLLGAGAMFPPTSIYHVFQSRKDCVDPCGP

SEQ ID NO: 806707 - protein, 448 aa, Homo sapiens; identical to SEQ ID NO: 806706

SEQ ID NO: 806708 - protein, 111 aa, Homo sapiens
VRLELSRACPVLGHPAKHPRPQRWCKVNFSYSPEQADELKLQAGEIVEMIKEALVTQTCLQSARVPSGLPRPQRIRAGGKESVKDEEEFFQTTLYSHHPQLRMLNLYFFSA

SEQ ID NO: 806709 - protein, 586 aa, Homo sapiens
MDTSRILQKLHHPEVYRVLFDYQPEAPDELALRRGDVVKVLSKTTEDKGWWEGECQGRRGVFPDNFVLPPPPIKKLVPRKVVSRESAPIKEPKKLMPKTSLPTVKKLATATTGPSKAKTSRTPSRDSQKLTSRDSGPNGGFQSGGSYHPGRKRSKTQTPQQRSVSSQEEEHSSPVKAPSVKRTPMPDKTATPERPPAPENAPSSKKIPAPDKVPSPEKTLTLGDKASIPGNSTSGKIPAPDKVPTPEKMVTPEDKASIPENSIIPEETLTVDKPSTPERVFSVEESPALEAPPMDKVPNPKMAPLGDEAPTLEKVLTPELSEEEVSTRDDIQFHHFSSEEALQKVKYFVAKEDPSSQEEAHTPEAPPPQPPSSERCLGEMKCTLVRGDSSPRQAELKSGPASRPALEKPHPHEEATTLPEEAPSNDERTPEEEAPPNEQRPLREEVLPKEGVASKEEVTLKEELPPKEEVAPKEEVPPIERAFAQKTRPIKPPPDSQETLALPSLVPQNYTENKNEGVDVTSLRGEVESLRRALELMEVQLERKLTDIWEELKSEKEQRRRLEVQVMQGTQKSQTPRVIHTQTQTY

SEQ ID NO: 806710 - protein, 755 aa, Homo sapiens
MEVLVLAGYRAQKEDELSLAPGDVVRQVRWVPARGWLRGEFGGRYGLFPERLVQEIPETLRGSGEARRPRCARRRGHPAKHPRPQRWCKVNFSYSPEQADELKLQAGEIVEMIKEIEDGWWLGKKNGQLGAFPSNFVELLDSGPPSLGNPDMPSVSPGPQRPPKLSSLAYDSPPDYLQTATLQVYRVLFDYQPEAPDELALRRGDVVKVLSKTTEDKGWWEGECQGRRGVFPDNFVLPPPPIKKLVPRKVVSRESAPIKEPKKLMPKTSLPTVKKLATATTGPSKAKTSRTPSRDSQKLTSRDSGPNGGFQSGGSYHPGRKRSKTQTPQQRSVSSQEEEHSSPVKAPSVKRTPMPDKTATPERPPAPENAPSSKKIPAPDKVPSPEKTLTLGDKASIPGNSTSGKIPAPDKVPTPEKMVTPEDKASIPENSIIPEETLTVDKPSTPERVFSVEESPALEAPPMDKVPNPKMAPLGDEAPTLEKVLTPELSEEEVSTRDDIQFHHFSSEEALQKVKYFVAKEDPSSQEEAHTPEAPPPQPPSSERCLGEMKCTLVRGDSSPRQAELKSGPASRPALEKPHPHEEATTLPEEAPSNDERTPEEEAPPNEQRPLREEVLPKEGVASKEEVTLKEELPPKEEVAPKEEVPPIERAFAQKTRPIKPPPDSQETLALPSLVPQNYTENKNEGVDVTSLRGEVESLRRALELMEVQLERKLTDIWEELKSEKEQRRRLEVQVMQGTQKSQTPRVIHTQTQTY

SEQ ID NO: 806711 - protein, 548 aa, Homo sapiens
ALEGAPETMEVLVLAGYRAQKEDELSLAPGDVVRQVRWVPARGWLRGEFGGRYGLFPERLVQEIPETLRGSGEARRPRCARRRGHPAKHPRPQRWCKVNFSYSPEQADELKLQAGEIVEMIKEIEDGWWLGKKNGQLGAFPSNFVELLDSGPPSLGNPDMPSVSPGPQRPPKLSSLAYDSPPDYLQTATLQVYRVLFDYQPEAPDELALRRGDVVKVLSKTTEDKGWWEGECQGRRGVFPDNFVLPPPPIKKLVPRKVVSRESAPIKEPKKLMPKTSLPTVKKLATATTGPSKAKTSRTPSRDSQKLTSRDSGPNGGFQSGGSYHPGRKRSKTQTPQQRSVSSQEEEHSSPVKAPSVKRTPMPDKTATPERPPAPENAPSSKKIPAPDKVPSPEKTLTLGDKASIPGNSTSGKIPAPDKVPTPEKMVTPEDKASIPENSIIPEETLTVDKPSTPERVFSVEESPALEAPPMDKVPNPKMAPLGDEAPTLEKVLTPELSEEEVSTRDDIQFHHFSSEEALQKVKYFVAKEDPSSQEEAHTPEAPPPQRH

SEQ ID NO: 806712 - protein, 142 aa, Homo sapiens
ALEGAPETMEVLVLAGYRAQKEDELSLAPGDVVRQVRWVPARGWLRGEFGGRYGLFPERLVQEIPETLRGSGEARRPRCARRRGHPAKHPRPQRWCKVNFSYSPEQADELKLQAGEIVEMIKEALVTQTCLQSARVPSGLPS

SEQ ID NO: 806713 - protein, 755 aa, Homo sapiens; identical to SEQ ID NO: 806710

SEQ ID NO: 806714 - protein, 444 aa, Homo sapiens
CTGEVSQAKGNQTQPQLRLHLPSRQEEEHSSPVKAPSVKRTPMPDKTATPERPPAPENAPSSKKIPAPDKVPSPEKTLTLGDKASIPGNSTSGKIPAPDKVPTPEKMVTPEDKASIPENSIIPEETLTVDKPSTPERVFSVEESPALEAPPMDKVPNPKMAPLGDEAPTLEKVLTPELSEEEVSTRDDIQFHHFSSEEALQKVKYFVAKEDPSSQEEAHTPEAPPPQPPSSERCLGEMKCTLVRGDSSPRQAELKSGPASRPALEKPHPHEEATTLPEEAPSNDERTPEEEAPPNEQRPLREEVLPKEGVASKEEVTLKEELPPKEEVAPKEEVPPIERAFAQKTRPIKPPPDSQETLALPSLVPQNYTENKNEGVDVTSLRGEVESLRRALELMEVQLERKLTDIWEELKSEKEQRRRLEVQVMQGTQKSQTPRVIHTQTQTY

SEQ ID NO: 806715 - protein, 585 aa, Homo sapiens
ALEGAPETMEVLVLAGYRAQKEDELSLAPGDVVRQVRWVPARGWLRGEFGGRYGLFPERLVQEIPETLRGSGEARRPRCARRRGHPAKHPRPQRWCKVNFSYSPEQADELKLQAGEIVEMIKEIEDGWWLGKKNGQLGAFPSNFVELLDSGPPSLGNPDMPSVSPGPQRPPKLSSLAYDSPPDYLQTATLQVYRVLFDYQPEAPDELALRRGDVVKVLSKTTEDKGWWEGECQGRRGVFPDNFVLPPPPIKKLVPRKVVSRESAPIKEPKKLMPKTSLPTVKKLATATTGPSKAKTSRTPSRDSQKLTSRDSGPNGGFQSGGSYHPGRKRSKTQTPQQRSVSSQEEEHSSPVKAPSVKRTPMPDKTATPERPPAPENAPSSKKIPAPDKVPSPEKTLTLGDKASIPGNSTSGKIPAPDKVPTPEKMVTPEDKASIPENSIIPEETLTVDKPSTPERVFSVEESPALEAPPMDKVPNPKMAPLGDEAPTLEKVLTPELSEEEVSTRDDIQFHHFSSEEALQKVKYFVAKEDPSSQEEAHTPEAPPPQPSSLGWGLCQELGSSRVEFLDELVPTERASGSSRSPQHT

SEQ ID NO: 806716 - protein, 63 aa, Homo sapiens
MLGRGWFPAVVCTGEVSQAKGNQTQPQLRLHLPSRQEEEHSSPVKAPSVKRTPMPDKTATPER

SEQ ID NO: 806717 - protein, 160 aa, Homo sapiens
EGNTDVPGAGSLRLLWAYVAQLGARLVLEGAALGLQYHLYGFQMPSSFACRREPCLGSITCNLSRPSEKTIFLKTMFGVSGFCLLFTFLELVLLGLGRWWRTWKHKSSSSKYFLTSESTRRHKKATDSLPVVETKEQFQEAVPGRSLAQEKQRPVGPRDA

SEQ ID NO: 806718 - protein, 331 aa, Homo sapiens
ADAKRRDWKRKQGPYFEQPLQWKVTEDCQVQLTCKVTNTKKETRFQWFFQRAEMPDGQYDPETGTGLLCIEELSKKDKGIYRAMVSDDRGEDDTILDLTGDALDAIFTELGRIGALSATPLKIQGTEEGIRIFSKVKYYNVEYMKTTWFHKDKRLESGDRIRTGTTLDEIWLHILDPKDSDKGKYTLEIAAGKEVRQLSTDLSGQAFEDAMAEHQRLKTLAIIEKNRAKVVRGLPDVATIMEDKTLCLTCIVSGDPTPEISWLKNDQPVTFLDRYRMEVRGTEVTITIEKVNSEDSGRYGVFVKNKYGSETGQVTISVFKHGDEPKELKSM

SEQ ID NO: 806719 - protein, 115 aa, Homo sapiens
MPKWPQGRFILLLCLPSPLCNSTENPGDRGRDPDLQQGQVLQRGVHENHLVPQVSPPCPRTPARLERIQHLTHGGLPPFSLPGPPSRVSGPPSRAWSQGLAETESLPGLAVHRRS

SEQ ID NO: 806720 - protein, 131 aa, Homo sapiens
QALSVLPPYAEYLQVVNYGIGGHYEPHFDHATSPSSPLYRMKSGNRVATFMIYLSSVEAGGATAFIYANLSVPVVRNAALFWWNLHRSGEGDSDTLHAGCPVLVGDKWVANKWIHEYGQEFRRPCSSSPED

SEQ ID NO: 806721 - protein, 86 aa, Homo sapiens
AGPSCFRMQHCFGGTCTGVVKGTVTHFMLAVLSWWEISGWPTSGYMSMDRNSADPAAPALKTELLAERSWWSPVAFQRSQEPKAGS

SEQ ID NO: 806722 - protein, 131 aa, Homo sapiens; identical to SEQ ID NO: 806720

SEQ ID NO: 806723 - protein, 188 aa, Homo sapiens
MAHLLGSQACMESLRTDLTDLQGAIVDVFSRAGPVRFPSWKFPDRMACDLDMVALLEHYDHVPGDPEFTQLSHAVLLELVIDRLLLLLQSCMSYLENLGSEQMMPPAQAAGPCMSVGLTVRRFWDSLLRLGTLHQQPLPQKGANQRETPTSKPTTKGEPARSPEYLTTKLIKPSSPVLGLPQTCQEPE

SEQ ID NO: 806724 - protein, 85 aa, Homo sapiens
VPCRAAGAGHRQVRALTKPGHLRMPAPAPETSGSYGSPSRGRGDVGTTVTIEYLSGPHQLRTFKVVLPFIMCLVLCAVLSCVRLS

SEQ ID NO: 806725 - protein, 4344 aa, Homo sapiens
MMKLYIDNAAPDKLKGLCIFFVRCRNDVAINVKTIQEEALFTVLDASKGLLNGIRDMLANIFLPAVLATNNWGALNQSKQGESEKHIFTETINRYLSFLDGARISIEGTVKLKTIDNVNFSKLHTFEEVTAAASNSETVHQLEEVLMVWYKQIEQVLIESEQMRKEAGDSGPLTELEHWKRMSAKFNYIIEQIKGPSCKAVINVLNVAHSKLLKNWRDLDARITDTANESKDNVRYLYTLEKVCQPLYNHDLVSMAHGIQNLINAIRMIHGVSRYYNTSERMTSLFIKVTNQMVTACKAYITDGGLNHVWDQETPVVLKKIQDCIFLFKEYQASFHKTRKLISESSGEKSFEVSEMYIFGKFEAFCKRLEKITEMITVVQTYSTLSNSTIEGIDIMAIKFRNIYQGVKKKQYDILDPRRTEFDTDFLDFMTKINGLEVQIQAFMNSSFGKILSSQQALQLLQRFQKLNIPCLGLEINHTIERILQYYVAELDATKKLYHSQKDDPPLARNMPPIAGKILWVRQLYRRISEPINYFFKNSDILSSPDGKAVIRQYNKISYVLVEFEVVYHTAWVREISQLHYALQATLFVRHPETGKLLVNFDPKILEVVRETKCMIKMKLDVPEQAKRLLKLESKLKADKLYLQGLLQYYDELCQEVPSVFVNLMTPKMKKVESVLRQGLTVLTWSSLTLESFFQEVELVLDMFNQLLKKISDLCEMHIDTVLKEIAKTVLISLPESGATKVEDMLTLNETYTKEWADILNHKSKHVEEAVRELISIFEQIYEVKYTGKVGKQSEQRKHVVFGSETEEGENNDYEANIVNEFDTHDKEDEFKKECKEVFAFFSHQLLDSLQKATRLSLDTMKRRIFVASLYGRKQSEDIISFIKSEVHLAIPNVVMIPSLDDIQQAINRMIQLTLEVSRGVAHWGQQQIRPIKSVIPSPTTTDVTHQNTGKLLKKEERSFEEAIPARKLKNFYPGVAEHKDISKLVLLLSSSVNSLRKAAHEALQDFQKYKTLWTEDRDVKVKEFLANNPSLTEIRSEILHYATFEQEIDELKPIIVVGALELHTEPMKLALSIEAKAWKMLLCRYLNEEYKKKMSYMIAFINEYLKKLSRPIRDLDDVRFAMEALSCIRDNEIQMDMTLGPIEEAYAILNRFEVEVTKEESEAVDTLRYSFNKLQSKAVSVQEDLVQVQPKFKSNLLESVKVFREDVINFAEAYELEGPMVPNIPPQEASNRLQIFQASFDDLWRKFVTYSSGEQLFGLPVTDYEVLHKTRKELNLLQKLYGLYDTVMSSISGYYEILWGDVDIEKINAELLEFQNRCRKLPKGLKDWQAFLDLKKRIDDFSESCPLLEMMTNKAMKQRHWDRISELTGTPFDVESDSFCLRNIMEAPLLKHKDDIEDICISAIKEKDIEAKLTQVIENWTNQNLSFAAFKGKGELLLKGTESGEIITLMEDSLMVLGSLLSNRYNAPFKKNIQNWVYKLSTSSDIIEEWLVVQNLWVYLEAVFVGGDIAKQLPQEAKRFQNIDKSWIKIMQRAHENPNVINCCVGDETMGQLLPHLHEQLEVCQKSLTGYLEKKRLLFPRFFFVSDPVLLEILGQASDSHTIQPHLPAVSDNINEVTFHTKDYDRIMAVISREGEKIVLDNSVMAKGPVEIWLLDLLKMQMSSLHNIIRSAFYQISDSGFQLLPFLSHFPAQVGLLGIQMLWTHDSEEALRNAKDDRKIMQVTNQKFLDILNTLISQTTHDLSKFDRVKFETLITIHVHQRDIFDDLVKMHIKSPTDFEWLKQSRFYFKEDLDQTVVSITDVDFIYQNEFLGCTDRLVITPLTDRCYITLAQALGMNMGGAPAGPAGTGKTETTKDMGRCLGKYVVVFNCSDQMDFRGLGRIFKGLAQSGSWGCFDEFNRIELPVLSVAAQQIYIVLTARKERKKQFIFSDGDCVDLNPEFGIFLTMNPGYAGRQELPENLKIQFRTVAMMVPDRQVHYDFGLRNILSVLRTLGSQKRARPEDSELSIVMRGLRDMNLSKLVDEDEPLFLSLINDLFPGLQLDSNTYAELQNAVAHQVQIEGLINHPPWNLKLVQLYETSLVRHGLMTLGPSGSGKTTVITILMKAQTECGRPHREMRMNPKAITAPQMFGRLDTATNDWTDGIFSTLWRKTLKAKKGENIFLILDGPVDAIWIENLNSVLDDNKTLTLANGDRIPMAPSCKLLFEVHNIENASPATVSRMGMVYISSSALSWRPILQAWLKKRTAQEAAVFLTLYEKVFEDTYTYMKLNLNPKMQLLECNYIVQSLNLLEGLIPSKEEGGVSCVEHLHKLFVFGLMWSLGALLELESREKLEAFLRQHESKLDLPEIPKGSNQTMYEFYVTDYGDWEHWNKKLQPYYYPTDSIPEYSSILVPNVDNIRTNFLIDTIAKQHKAVLLTGEQGTAKTVMVKAYLKKYDPEVQLSKSLNFSSATEPMMFQRTIESYVDKRIGSTYGPPGGRKMTVFIDDINMPVINEWGDQITNEIVRQMMEMEGMYSLDKPGDFTTIVDVQLIAAMIHPGGGRNDIPQRLKRQFTVFNCTLPSNASIDKIFGIIGCGYFDPCRSFKPQICEMIVNLVSVGRVLWQWTKVKMLPTPSKFHYIFNLRDLSRIWQGMLTIKAEECASIPTLLSLFKHECSRVIADRFITPEDEQWFNAHLTRAVEENIGSDAASCILPEPYFVDFLREMPEPTGDEPEDSVFEVPKIYELMPSFDFLAEKLQFYQRQFNEIIRGTSLDLVFFKDAMTHLIKISRIIRTSCGNALLVGVGGSGKQSLSRLASFIAGYQIFQITLTRSYNVTNLTDDLKALYKVAGADGKGITFIFTDSEIKDEAFLEYLNNLLSSGEISNLFARDEMDEITQGLISVMKRELPRHPPTFDNLYEYFISRSRKNLHVVLCFSPVGEKFRARSLKFPGLISGCTMDWFSRWPREALIAVASYFLSDYNIVCSSEIKRQVVETMGLFHDMVSESCESYFQRYRRRAHVTPKSYLSFINGYKNIYAEKVKFINEQAERMNIGLDKLMEASESVAKLSQDLAVKEKELAVASIKADEVLAEVTVSAQASAKIKNEVQEVKDKAQKIVDEIDSEKVKAESKLEAAKPALEEAEAALNTIKPNDIATVRKLAKPPHLIMRIMDCVLLLFQKKIDPVTMDPEKSCCKPSWGESLKLMSATGFLWSLQQFPKDTINEETVELLQPYFNMDDYTFESAKKVCGNVAGLLSWTLAMAIFYGINREVLPLKANLAKQEGRLAVANAELGKAQALLDEKQAELDKVQAKFDAAMNEKMDLLNDADTCRKKMQAASTLIDGLSGEKIRWTQQSKEFKAQINRLVGDILLCTGFLSYLGPFNQIFRNYLLKDQWEMELRARKIPFTENLNLISMLVDPPTIGEWGLQGLPGDDLSIQNGIIVTKATRYPLLIDPQTQGKTWIKSKEKENDLQVTSLNHKYFRTHLEDSLSLGRPLLIEDIHEELDPALDNVLEKNFIKSGTTFKVKVGDKECDIMDTFKLYITTKLPNPAFTPEINAKTSVIDFTVTMKGLENQLLRRVILTEKQELEAERVKLLEDVTFNKRKMKELEDNLLYKLSATKGSLVDDESLIGVLRTTKQTAAEVSEKLHVAAETEIKINAAQEEFRPAATRGSILYFLITEMSMVNIMYQTSLAQFLKLFDQSMARSEKSPLPQKRITNIIEYLTYEVFTYSVRGLYENHKFLFVLLMTLKIDLQRGTVKHREFQALIKGGAALDLKACPPKPYRWILDMTWLNLVELSKLPQFAEIMNQISRNEKGWKSWFDKDAPEEEIIPDGYNDSLDTCHKLLLIRSWCPDRTVFQARKYIADSLEEKYTEPVILNLEKTWEESDTRTPLICFLSMGSDPTNQIDALAKKLKLECRTISMGQGQEVHARKLIQMSMQQGGWVLLQNCHLGLEFMEELLETLITTEASDDSFRVWITTEPHDRFPITLLQTSLKFTNEPPQGVRAGLKRTFAGINQDLLDISNLPMWKPMLYTVAFLHSTVQERRKFGPLGWNIPYEFNSADFSASVQFIQNHLDECDIKKGVSWNTVRYMIGEVQYGGRVTDDFDKRLLNCFARVWFSEKMFEPSFCFYTGYKIPLCKTLDQYFEYIQSLPSLDNPEVFGLHPNADITYQSNTASAVLETITNIQPKESGGGVGETREAIVYRLSEDMLSKLPPDYIPHEVKSRLIKMGHLNSMNIFLRQEIDRMQRVISVLRSSLSDLKLAIEGTIIMSENLRDALDNMYDARIPQLWKRVSWDSSTLGFWFTELLERNAQFSTWIFEGRPNVFWMTGFFNPQGFLTAMRQEVTRAHKGWALDTVTIQQ

SEQ ID NO: 806726 - protein, 3351 aa, Homo sapiens
MMKLYIDNAAPDKLKGLCIFFVRCRNDVAINVKTIQEEALFTVLDASKGLLNGIRDMLANIFLPAVLATNNWGALNQSKQGESEKHIFTETINRYLSFLDGARISIEGTVKLKTIDNVNFSKLHTFEEVTAAASNSETVHQLEEVLMVWYKQIEQVLIESEQMRKEAGDSGPLTELEHWKRMSAKFNYIIEQIKGPSCKAVINVLNVAHSKLLKNWRDLDARITDTANESKDNVRYLYTLEKVCQPLYNHDLVSMAHGIQNLINAIRMIHGVSRYYNTSERMTSLFIKVTNQMVTACKAYITDGGLNHVWDQETPVVLKKIQDCIFLFKEYQASFHKTRKLISESSGEKSFEVSEMYIFGKFEAFCKRLEKITEMITVVQTYSTLSNSTIEGIDIMAIKFRNIYQGVKKKQYDILDPRRTEFDTDFLDFMTKINGLEVQIQAFMNSSFGKILSSQQALQLLQRFQKLNIPCLGLEINHTIERILQYYVAELDATKKLYHSQKDDPPLARNMPPIAGKILWVRQLYRRISEPINYFFKNSDILSSPDGKAVIRQYNKISYVLVEFEVVYHTAWVREISQLHYALQATLFVRHPETGKLLVNFDPKILEVVRETKCMIKMKLDVPEQAKRLLKLESKLKADKLYLQGLLQYYDELCQEVPSVFVNLMTPKMKKVESVLRQGLTVLTWSSLTLESFFQEVELVLDMFNQLLKKISDLCEMHIDTVLKEIAKTVLISLPESGATKVEDMLTLNETYTKEWADILNHKSKHVEEAVRELISIFEQIYEVKYTGKVGKQSEQRKHVVFGSETEEGENNDYEANIVNEFDTHDKEDEFKKECKEVFAFFSHQLLDSLQKATRLSLDTMKRRIFVASLYGRKQSEDIISFIKSEVHLAIPNVVMIPSLDDIQQAINRMIQLTLEVSRGVAHWGQQQIRPIKSVIPSPTTTDVTHQNTGKLLKKEERSFEEAIPARKLKNFYPGVAEHKDISKLVLLLSSSVNSLRKAAHEALQDFQKYKTLWTEDRDVKVKEFLANNPSLTEIRSEILHYATFEQEIDELKPIIVVGALELHTEPMKLALSIEAKAWKMLLCRYLNEEYKKKMSYMIAFINEYLKKLSRPIRDLDDVRFAMEALSCIRDNEIQMDMTLGPIEEAYAILNRFEVEVTKEESEAVDTLRYSFNKLQSKAVSVQEDLVQVQPKFKSNLLESVKVFREDVINFAEAYELEGPMVPNIPPQEASNRLQIFQASFDDLWRKFVTYSSGEQLFGLPVTDYEVLHKTRKELNLLQKLYGLYDTVMSSISGYYEILWGDVDIEKINAELLEFQNRCRKLPKGLKDWQAFLDLKKRIDDFSESCPLLEMMTNKAMKQRHWDRISELTGTPFDVESDSFCLRNIMEAPLLKHKDDIEDICISAIKEKDIEAKLTQVIENWTNQNLSFAAFKGKGELLLKGTESGEIITLMEDSLMVLGSLLSNRYNAPFKKNIQNWVYKLSTSSDIIEEWLVVQNLWVYLEAVFVGGDIAKQLPQEAKRFQNIDKSWIKIMQRAHENPNVINCCVGDETMGQLLPHLHEQLEVCQKSLTGYLEKKRLLFPRFFFVSDPVLLEILGQASDSHTIQPHLPAVSDNINEVTFHTKDYDRIMAVISREGEKIVLDNSVMAKGPVEIWLLDLLKMQMSSLHNIIRSAFYQISDSGFQLLPFLSHFPAQVGLLGIQMLWTHDSEEALRNAKDDRKIMQVTNQKFLDILNTLISQTTHDLSKFDRVKFETLITIHVHQRDIFDDLVKMHIKSPTDFEWLKQSRFYFKEDLDQTVVSITDVDFIYQNEFLGCTDRLVITPLTDRCYITLAQALGMNMGGAPAGPAGTGKTETTKDMGRCLGKYVVVFNCSDQMDFRGLGRIFKGLAQSGSWGCFDEFNRIELPVLSVAAQQIYIVLTARKERKKQFIFSDGDCVDLNPEFGIFLTMNPGYAGRQELPENLKIQFRTVAMMVPDRQVHYDFGLRNILSVLRTLGSQKRARPEDSELSIVMRGLRDMNLSKLVDEDEPLFLSLINDLFPGLQLDSNTYAELQNAVAHQVQIEGLINHPPWNLKLVQLYETSLVRHGLMTLGPSGSGKTTVITILMKAQTECGRPHREMRMNPKAITAPQMFGRLDTATNDWTDGIFSTLWRKTLKAKKGENIFLILDGPVDAIWIENLNSVLDDNKTLTLANGDRIPMAPSCKLLFEVHNIENASPATVSRMGMVYISSSALSWRPILQAWLKKRTAQEAAVFLTLYEKVFEDTYTYMKLNLNPKMQLLECNYIVQSLNLLEGLIPSKEEGGVSCVEHLHKLFVFGLMWSLGALLELESREKLEAFLRQHESKLDLPEIPKGSNQTMYEFYVTDYGDWEHWNKKLQPYYYPTDSIPEYSSILVPNVDNIRTNFLIDTIAKQHKAVLLTGEQGTAKTVMVKAYLKKYDPEVQLSKSLNFSSATEPMMFQRTIESYVDKRIGSTYGPPGGRKMTVFIDDINMPVINEWGDQITNEIVRQMMEMEGMYSLDKPGDFTTIVDVQLIAAMIHPGGGRNDIPQRLKRQFTVFNCTLPSNASIDKIFGIIGCGYFDPCRSFKPQICEMIVNLVSVGRVLWQWTKVKMLPTPSKFHYIFNLRDLSRIWQGMLTIKAEECASIPTLLSLFKHECSRVIADRFITPEDEQWFNAHLTRAVEENIGSDAASCILPEPYFVDFLREMPEPTGDEPEDSVFEVPKIYELMPSFDFLAEKLQFYQRQFNEIIRGTSLDLVFFKDAMTHLIKISRIIRTSCGNALLVGVGGSGKQSLSRLASFIAGYQIFQITLTRSYNVTNLTDDLKALYKVAGADGKGITFIFTDSEIKDEAFLEYLNNLLSSGEISNLFARDEMDEITQGLISVMKRELPRHPPTFDNLYEYFISRSRKNLHVVLCFSPVGEKFRARSLKFPGLISGCTMDWFSRWPREALIAVASYFLSDYNIVCSSEIKRQVVETMGLFHDMVSESCESYFQRYRRRAHVTPKSYLSFINGYKNIYAEKVKFINEQAERMNIGLDKLMEASESVAKLSQDLAVKEKELAVASIKADEVLAEVTVSAQASAKIKNEVQEVKDKAQKIVDEIDSEKVKAESKLEAAKPALEEAEAALNTIKPNDIATVRKLAKPPHLIMRIMDCVLLLFQKKIDPVTMDPEKSCCKPSWGESLKLMSATGFLWSLQQFPKDTINEETVELLQPYFNMDDYTFESAKKVCGNVAGLLSWTLAMAIFYGINREVLPLKANLAKQEGRLAVANAELGKAQALLDEKQAELDKVQAKFDAAMNEKMDLLNDADTCRKKMQAASTLIDGLSGEKIRWTQQSKEFKAQINRWESGSSS

SEQ ID NO: 806727 - protein, 2299 aa, Homo sapiens
MMKLYIDNAAPDKLKGLCIFFVRCRNDVAINVKTIQEEALFTVLDASKGLLNGIRDMLANIFLPAVLATNNWGALNQSKQGESEKHIFTETINRYLSFLDGARISIEGTVKLKTIDNVNFSKLHTFEEVTAAASNSETVHQLEEVLMVWYKQIEQVLIESEQMRKEAGDSGPLTELEHWKRMSAKFNYIIEQIKGPSCKAVINVLNVAHSKLLKNWRDLDARITDTANESKDNVRYLYTLEKVCQPLYNHDLVSMAHGIQNLINAIRMIHGVSRYYNTSERMTSLFIKVTNQMVTACKAYITDGGLNHVWDQETPVVLKKIQDCIFLFKEYQASFHKTRKLISESSGEKSFEVSEMYIFGKFEAFCKRLEKITEMITVVQTYSTLSNSTIEGIDIMAIKFRNIYQGVKKKQYDILDPRRTEFDTDFLDFMTKINGLEVQIQAFMNSSFGKILSSQQALQLLQRFQKLNIPCLGLEINHTIERILQYYVAELDATKKLYHSQKDDPPLARNMPPIAGKILWVRQLYRRISEPINYFFKNSDILSSPDGKAVIRQYNKISYVLVEFEVVYHTAWVREISQLHYALQATLFVRHPETGKLLVNFDPKILEVVRETKCMIKMKLDVPEQAKRLLKLESKLKADKLYLQGLLQYYDELCQEVPSVFVNLMTPKMKKVESVLRQGLTVLTWSSLTLESFFQEVELVLDMFNQLLKKISDLCEMHIDTVLKEIAKTVLISLPESGATKVEDMLTLNETYTKEWADILNHKSKHVEEAVRELISIFEQIYEVKYTGKVGKQSEQRKHVVFGSETEEGENNDYEANIVNEFDTHDKEDEFKKECKEVFAFFSHQLLDSLQKATRLSLDTMKRRIFVASLYGRKQSEDIISFIKSEVHLAIPNVVMIPSLDDIQQAINRMIQLTLEVSRGVAHWGQQQIRPIKSVIPSPTTTDVTHQNTGKLLKKEERSFEEAIPARKLKNFYPGVAEHKDISKLVLLLSSSVNSLRKAAHEALQDFQKYKTLWTEDRDVKVKEFLANNPSLTEIRSEILHYATFEQEIDELKPIIVVGALELHTEPMKLALSIEAKAWKMLLCRYLNEEYKKKMSYMIAFINEYLKKLSRPIRDLDDVRFAMEALSCIRDNEIQMDMTLGPIEEAYAILNRFEVEVTKEESEAVDTLRYSFNKLQSKAVSVQEDLVQVQPKFKSNLLESVKVFREDVINFAEAYELEGPMVPNIPPQEASNRLQIFQASFDDLWRKFVTYSSGEQLFGLPVTDYEVLHKTRKELNLLQKLYGLYDTVMSSISGYYEILWGDVDIEKINAELLEFQNRCRKLPKGLKDWQAFLDLKKRIDDFSESCPLLEMMTNKAMKQRHWDRISELTGTPFDVESDSFCLRNIMEAPLLKHKDDIEDICISAIKEKDIEAKLTQVIENWTNQNLSFAAFKGKGELLLKGTESGEIITLMEDSLMVLGSLLSNRYNAPFKKNIQNWVYKLSTSSDIIEEWLVVQNLWVYLEAVFVGGDIAKQLPQEAKRFQNIDKSWIKIMQRAHENPNVINCCVGDETMGQLLPHLHEQLEVCQKSLTGYLEKKRLLFPRFFFVSDPVLLEILGQASDSHTIQPHLPAVSDNINEVTFHTKDYDRIMAVISREGEKIVLDNSVMAKGPVEIWLLDLLKMQMSSLHNIIRSAFYQISDSGFQLLPFLSHFPAQVGLLGIQMLWTHDSEEALRNAKDDRKIMQVTNQKFLDILNTLISQTTHDLSKFDRVKFETLITIHVHQRDIFDDLVKMHIKSPTDFEWLKQSRFYFKEDLDQTVVSITDVDFIYQNEFLGCTDRLVITPLTDRCYITLAQALGMNMGGAPAGPAGTGKTETTKDMGRCLGKYVVVFNCSDQMDFRGLGRIFKGLAQSGSWGCFDEFNRIELPVLSVAAQQIYIVLTARKERKKQFIFSDGDCVDLNPEFGIFLTMNPGYAGRQELPENLKIQFRTVAMMVPDRQVHYDFGLRNILSVLRTLGSQKRARPEDSELSIVMRGLRDMNLSKLVDEDEPLFLSLINDLFPGLQLDSNTYAELQNAVAHQVQIEGLINHPPWNLKLVQLYETSLVRHGLMTLGPSGSGKTTVITILMKAQTECGRPHREMRMNPKAITAPQMFGRLDTATNDWTDGIFSTLWRKTLKAKKGENIFLILDGPVDAIWIENLNSVLDDNKTLTLANGDRIPMAPSCKLLFEVHNIENASPATVSRMGMVYISSSALSWRPILQAWLKKRTAQEAAVFLTLYEKVFEDTYTYMKLNLNPKMQLLECNYIVQVRFFFVHLLLRF

SEQ ID NO: 806728 - protein, 4368 aa, Homo sapiens
MMKLYIDNAAPDKLKGLCIFFVRCRNDVAINVKTIQEEALFTVLDASKGLLNGIRDMLANIFLPAVLATNNWGALNQSKQGESEKHIFTETINRYLSFLDGARISIEGTVKLKTIDNVNFSKLHTFEEVTAAASNSETVHQLEEVLMVWYKQIEQVLIESEQMRKEAGDSGPLTELEHWKRMSAKFNYIIEQIKGPSCKAVINVLNVAHSKLLKNWRDLDARITDTANESKDNVRYLYTLEKVCQPLYNHDLVSMAHGIQNLINAIRMIHGVSRYYNTSERMTSLFIKVTNQMVTACKAYITDGGLNHVWDQETPVVLKKIQDCIFLFKEYQASFHKTRKLISESSGEKSFEVSEMYIFGKFEAFCKRLEKITEMITVVQTYSTLSNSTIEGIDIMAIKFRNIYQGVKKKQYDILDPRRTEFDTDFLDFMTKINGLEVQIQAFMNSSFGKILSSQQALQLLQRFQKLNIPCLGLEINHTIERILQYYVAELDATKKLYHSQKDDPPLARNMPPIAGKILWVRQLYRRISEPINYFFKNSDILSSPDGKAVIRQYNKISYVLVEFEVVYHTAWVREISQLHYALQATLFVRHPETGKLLVNFDPKILEVVRETKCMIKMKLDVPEQAKRLLKLESKLKADKLYLQGLLQYYDELCQEVPSVFVNLMTPKMKKVESVLRQGLTVLTWSSLTLESFFQEVELVLDMFNQLLKKISDLCEMHIDTVLKEIAKTVLISLPESGATKVEDMLTLNETYTKEWADILNHKSKHVEEAVRELISIFEQIYEVKYTGKVGKQSEQRKHVVFGSETEEGENNDYEANIVNEFDTHDKEDEFKKECKEVFAFFSHQLLDSLQKATRLSLDTMKRRIFVASLYGRKQSEDIISFIKSEVHLAIPNVVMIPSLDDIQQAINRMIQLTLEVSRGVAHWGQQQIRPIKSVIPSPTTTDVTHQNTGKLLKKEERSFEEAIPARKLKNFYPGVAEHKDISKLVLLLSSSVNSLRKAAHEALQDFQKYKTLWTEDRDVKVKEFLANNPSLTEIRSEILHYATFEQEIDELKPIIVVGALELHTEPMKLALSIEAKAWKMLLCRYLNEEYKKKMSYMIAFINEYLKKLSRPIRDLDDVRFAMEALSCIRDNEIQMDMTLGPIEEAYAILNRFEVEVTKEESEAVDTLRYSFNKLQSKAVSVQEDLVQVQPKFKSNLLESVKVFREDVINFAEAYELEGPMVPNIPPQEASNRLQIFQASFDDLWRKFVTYSSGEQLFGLPVTDYEVLHKTRKELNLLQKLYGLYDTVMSSISGYYEILWGDVDIEKINAELLEFQNRCRKLPKGLKDWQAFLDLKKRIDDFSESCPLLEMMTNKAMKQRHWDRISELTGTPFDVESDSFCLRNIMEAPLLKHKDDIEDICISAIKEKDIEAKLTQVIENWTNQNLSFAAFKGKGELLLKGTESGEIITLMEDSLMVLGSLLSNRYNAPFKKNIQNWVYKLSTSSDIIEEWLVVQNLWVYLEAVFVGGDIAKQLPQEAKRFQNIDKSWIKIMQRAHENPNVINCCVGDETMGQLLPHLHEQLEVCQKSLTGYLEKKRLLFPRFFFVSDPVLLEILGQASDSHTIQPHLPAVSDNINEVTFHTKDYDRIMAVISREGEKIVLDNSVMAKGPVEIWLLDLLKMQMSSLHNIIRSAFYQISDSGFQLLPFLSHFPAQVGLLGIQMLWTHDSEEALRNAKDDRKIMQVTNQKFLDILNTLISQTTHDLSKFDRVKFETLITIHVHQRDIFDDLVKMHIKSPTDFEWLKQSRFYFKEDLDQTVVSITDVDFIYQNEFLGCTDRLVITPLTDRCYITLAQALGMNMGGAPAGPAGTGKTETTKDMGRCLGKYVVVFNCSDQMDFRGLGRIFKGLAQSGSWGCFDEFNRIELPVLSVAAQQIYIVLTARKERKKQFIFSDGDCVDLNPEFGIFLTMNPGYAGRQELPENLKIQFRTVAMMVPDRQIIMRVKLASCGFLENVILAQKFYVLYKLCEEQLTKQVHYDFGLRNILSVLRTLGSQKRARPEDSELSIVMRGLRDMNLSKLVDEDEPLFLSLINDLFPGLQLDSNTYAELQNAVAHQVQIEGLINHPPWNLKLVQLYETSLVRHGLMTLGPSGSGKTTVITILMKAQTECGRPHREMRMNPKAITAPQMFGRLDTATNDWTDGIFSTLWRKTLKAKKGENIFLILDGPVDAIWIENLNSVLDDNKTLTLANGDRIPMAPSCKLLFEVHNIENASPATVSRMGMVYISSSALSWRPILQAWLKKRTAQEAAVFLTLYEKVFEDTYTYMKLNLNPKMQLLECNYIVQSLNLLEGLIPSKEEGGVSCVEHLHKLFVFGLMWSLGALLELESREKLEAFLRQHESKLDLPEIPKGSNQTMYEFYVTDYGDWEHWNKKLQPYYYPTDSIPEYSSILVPNVDNIRTNFLIDTIAKQHKAVLLTGEQGTAKTVMVKAYLKKYDPEVQLSKSLNFSSATEPMMFQRTIESYVDKRIGSTYGPPGGRKMTVFIDDINMPVINEWGDQITNEIVRQMMEMEGMYSLDKPGDFTTIVDVQLIAAMIHPGGGRNDIPQRLKRQFTVFNCTLPSNASIDKIFGIIGCGYFDPCRSFKPQICEMIVNLVSVGRVLWQWTKVKMLPTPSKFHYIFNLRDLSRIWQGMLTIKAEECASIPTLLSLFKHECSRVIADRFITPEDEQWFNAHLTRAVEENIGSDAASCILPEPYFVDFLREMPEPTGDEPEDSVFEVPKIYELMPSFDFLAEKLQFYQRQFNEIIRGTSLDLVFFKDAMTHLIKISRIIRTSCGNALLVGVGGSGKQSLSRLASFIAGYQIFQITLTRSYNVTNLTDDLKALYKVAGADGKGITFIFTDSEIKDEAFLEYLNNLLSSGEISNLFARDEMDEITQGLISVMKRELPRHPPTFDNLYEYFISRSRKNLHVVLCFSPVGEKFRARSLKFPGLISGCTMDWFSRWPREALIAVASYFLSDYNIVCSSEIKRQVVETMGLFHDMVSESCESYFQRYRRRAHVTPKSYLSFINGYKNIYAEKVKFINEQAERMNIGLDKLMEASESVAKLSQDLAVKEKELAVASIKADEVLAEVTVSAQASAKIKNEVQEVKDKAQKIVDEIDSEKVKAESKLEAAKPALEEAEAALNTIKPNDIATVRKLAKPPHLIMRIMDCVLLLFQKKIDPVTMDPEKSCCKPSWGESLKLMSATGFLWSLQQFPKDTINEETVELLQPYFNMDDYTFESAKKVCGNVAGLLSWTLAMAIFYGINREVLPLKANLAKQEGRLAVANAELGKAQALLDEKQAELDKVQAKFDAAMNEKMDLLNDADTCRKKMQAASTLIDGLSGEKIRWTQQSKEFKAQINRLVGDILLCTGFLSYLGPFNQIFRNYLLKDQWEMELRARKIPFTENLNLISMLVDPPTIGEWGLQGLPGDDLSIQNGIIVTKATRYPLLIDPQTQGKTWIKSKEKENDLQVTSLNHKYFRTHLEDSLSLGRPLLIEDIHEELDPALDNVLEKNFIKSGTTFKVKVGDKECDIMDTFKLYITTKLPNPAFTPEINAKTSVIDFTVTMKGLENQLLRRVILTEKQELEAERVKLLEDVTFNKRKMKELEDNLLYKLSATKGSLVDDESLIGVLRTTKQTAAEVSEKLHVAAETEIKINAAQEEFRPAATRGSILYFLITEMSMVNIMYQTSLAQFLKLFDQSMARSEKSPLPQKRITNIIEYLTYEVFTYSVRGLYENHKFLFVLLMTLKIDLQRGTVKHREFQALIKGGAALDLKACPPKPYRWILDMTWLNLVELSKLPQFAEIMNQISRNEKGWKSWFDKDAPEEEIIPDGYNDSLDTCHKLLLIRSWCPDRTVFQARKYIADSLEEKYTEPVILNLEKTWEESDTRTPLICFLSMGSDPTNQIDALAKKLKLECRTISMGQGQEVHARKLIQMSMQQGGWVLLQNCHLGLEFMEELLETLITTEASDDSFRVWITTEPHDRFPITLLQTSLKFTNEPPQGVRAGLKRTFAGINQDLLDISNLPMWKPMLYTVAFLHSTVQERRKFGPLGWNIPYEFNSADFSASVQFIQNHLDECDIKKGVSWNTVRYMIGEVQYGGRVTDDFDKRLLNCFARVWFSEKMFEPSFCFYTGYKIPLCKTLDQYFEYIQSLPSLDNPEVFGLHPNADITYQSNTASAVLETITNIQPKESGGGVGETREAIVYRLSEDMLSKLPPDYIPHEVKSRLIKMGHLNSMNIFLRQEIDRMQRVISVLRSSLSDLKLAIEGTIIMSENLRDALDNMYDARIPQLWKRVSWDSSTLGFWFTELLERNAQFSTWIFEGRPNVFWMTGFFNPQGFLTAMRQEVTRAH

SEQ ID NO: 806729 - protein, 1141 aa, Homo sapiens
MQAASTLIDGLSGEKIRWTQQSKEFKAQINRLVGDILLCTGFLSYLGPFNQIFRNYLLKDQWEMELRARKIPFTENLNLISMLVDPPTIGEWGLQGLPGDDLSIQNGIIVTKATRYPLLIDPQTQGKTWIKSKEKENDLQVTSLNHKYFRTHLEDSLSLGRPLLIEDIHEELDPALDNVLEKNFIKSGTTFKVKVGDKECDIMDTFKLYITTKLPNPAFTPEINAKTSVIDFTVTMKGLENQLLRRVILTEKQELEAERVKLLEDVTFNKRKMKELEDNLLYKLSATKGSLVDDESLIGVLRTTKQTAAEVSEKLHVAAETEIKINAAQEEFRPAATRGSILYFLITEMSMVNIMYQTSLAQFLKLFDQSMARSEKSPLPQKRITNIIEYLTYEVFTYSVRGLYENHKFLFVLLMTLKIDLQRGTVKHREFQALIKGGAALDLKACPPKPYRWILDMTWLNLVELSKLPQFAEIMNQISRNEKGWKSWFDKDAPEEEIIPDGYNDSLDTCHKLLLIRSWCPDRTVFQARKYIADSLEEKYTEPVILNLEKTWEESDTRTPLICFLSMGSDPTNQIDALAKKLKLECRTISMGQGQEVHARKLIQMSMQQGGWVLLQNCHLGLEFMEELLETLITTEASDDSFRVWITTEPHDRFPITLLQTSLKFTNEPPQGVRAGLKRTFAGINQDLLDISNLPMWKPMLYTVAFLHSTVQERRKFGPLGWNIPYEFNSADFSASVQFIQNHLDECDIKKGVSWNTVRYMIGEVQYGGRVTDDFDKRLLNCFARVWFSEKMFEPSFCFYTGYKIPLCKTLDQYFEYIQSLPSLDNPEVFGLHPNADITYQSNTASAVLETITNIQPKESGGGVGETREAIVYRLSEDMLSKLPPDYIPHEVKSRLIKMGHLNSMNIFLRQEIDRMQRVISVLRSSLSDLKLAIEGTIIMSENLRDALDNMYDARIPQLWKRVSWDSSTLGFWFTELLERNAQFSTWIFEGRPNVFWMTGFFNPQGFLTAMRQEVTRAHKGWALDTVTIHNEVLRQTKEEITSPPGEGVYIYGLYMDGAAWDRRNGKLMESTPKVLFTQLPVLHIFAINSTAPKDPKLYVCPIYKKPRRTDLTFITVVYLRTVLSPDHWILRGVALLCDIK

SEQ ID NO: 806730 - protein, 196 aa, Homo sapiens
WQRDAAPGWRAGACVGELEMESIYLQKHLGACLTQGLAEVARVRPVDPIEYLALWIYKYKENVTMEQLRQKEMAKLERERELALMEQEMMERLKAEELLLQQQQLALQLELEMQEKERQRIQELQRAQEQLGKEMRMNMENLVRNEDILHSEEATLDSGKTLAEISDRYGAPNLSRVEELDEPMFSDIALNIDQDL

SEQ ID NO: 806731 - protein, 177 aa, Homo sapiens
MESIYLQKHLGACLTQGLAEVARVRPVDPIEYLALWIYKYKENVTMEQLRQKEMAKLERERELALMEQEMMERLKAEELLLQQQQLALQLELEMQEKERQRIQELQRAQEQLGKEMRMNMENLVRNEDILHSEEATLDSGKTLAEISDRYGAPNLSRVEELDEPMFSDIALNIDQDL

SEQ ID NO: 806732 - protein, 177 aa, Homo sapiens; identical to SEQ ID NO: 806731

SEQ ID NO: 806733 - protein, 177 aa, Homo sapiens; identical to SEQ ID NO: 806731

SEQ ID NO: 806734 - protein, 363 aa, Homo sapiens
MPVRSGSGTVSSWDRNALRTQPGAEPPESGELNEIRRDHQPDPNLASLPASWSPKRQGLERTGSQNSGPGRTTAESLFLVLKRSVLEERGRLPAWYRAAAAAGNCPVLKTDAARPAELRPKPAAPSGARTELLEALTQSAGRAGAASSKPGMDLQRPDSYQGGAGPDFNDHVLHKTILVGDSGVGKTSLLVQFDQGKFIPGSFSATVGIGFTNKVVTVDGRESEAAILGHRWAGTVRRRPHAYYRDAQPASAGVTSPTNLLSTNIRGWLTENHEYCPRDVVNQCMAKENQAGELEQRKGVDTDPKESGKTLWPRRIRGALPGDTNAQKEGGMWGEPSWDTTTEKEITAAQQEREATDRYTENY

SEQ ID NO: 806735 - protein, 261 aa, Homo sapiens
MPVRSGSGTVSSWDRNALRTQPGAEPPESGELNEIRRDHQPDPNLASLPASWSPKRQGLERTGSQNSGPGRTTAESLFLVLKRSVLEERGRLPAWYRAAAAAGNCPVLKTDAARPAELRPKPAAPSGARTELLEALTQSAGRAGAASSKPGMDLQRPDSYQGGAGPDFNDHVLHKVNISCIPQPNVGRGASTRSFLHSPDFALGLNEKLACICESGEPFLSDPVSCSKQRCVSSWGRAAARGSDGQKLHSFTYIICVPFSP

SEQ ID NO: 806736 - protein, 304 aa, Homo sapiens
MQPLSKLMAISKPRNLSLREQREVLRADMSWQQETNPVVETHDSEASRQKFRHFQYLKVSGPHEALSQLWELCLQWLRPEIHTKKQIIELLVLEQFLAILPEEVRTWVNLQHPNNSKDMVTLIEDVIEMLEDEDMPCKDSALQMGSIKEKMKAGSRTGKPQEPVTFKDVVVEFSKEEWGQLDSAVKNLYRNVMLENFRNLNSLRKAHLLSKPFESLKLESKKKRWIMEKEIPRKTIFDMKSISGEESSHGVIMTRLTESGHPSSDAWKDGVSLLLPRLEYNDAVSAHCNLHLWVQVILLPQPPE

SEQ ID NO: 806737 - protein, 272 aa, Homo sapiens
MQPLSKLMAISKPRNLSLREQREVLRADMSWQQETNPVVETHDSEASRQKFRHFQYLKVSGPHEALSQLWELCLQWLRPEIHTKKQIIELLVLEQFLAILPEEVRTWVNLQHPNNSKDMVTLIEDVIEMLEDEDMPCKDSALQMGSIKEKMKAGSRTGKPQEPVTFKDVVVEFSKEEWGQLDSAVKNLYRNVMLENFRNLNSLRKAHLLSKPFESLKLESKKKRWIMEKEIPRKTIFDMKSISGEESSHGVIMTRLTESGHPSSDAWKGRTH

SEQ ID NO: 806738 - protein, 517 aa, Homo sapiens
MQPLSKLMAISKPRNLSLREQREVLRADMSWQQETNPVVETHDSEASRQKFRHFQYLKVSGPHEALSQLWELCLQWLRPEIHTKKQIIELLVLEQFLAILPEEVRTWVNLQHPNNSKDMVTLIEDVIEMLEDEDMPCKDSALQMGSIKEKMKAGSRTGKPQEPVTFKDVVVEFSKEEWGQLDSAVKNLYRNVMLENFRNLNSLRKAHLLSKPFESLKLESKKKRWIMEKEIPRKTIFDMKSISGEESSHGVIMTRLTESGHPSSDAWKGENWLYRNQKKWDINLPQEAFIPETIYTEEEDFECSENKKSFDINSVSSICAIQLGIPSRKGSPKCDKFKTYFKFNLDSVGKQHSEYEYGNDLSLSTDIRHQKSHTTMNSYECYQCGKAFCRSSSLIRHQIIHTGEKPYKCSECGRFFNRRTNLTKHQKLHAEAKACTSNKCGKAFSKSEDSNNPTLHFGNNFYQCVNCGKSFNRSSSLIRHQMIHTGEKPFKCKECSKAFNRSSNLVKHQKLHTRDKS

SEQ ID NO: 806739 - protein, 277 aa, Homo sapiens
MQPLSKLMAISKPRNLSLREQREVLRADMSWQQETNPVVETHDSEASRQKFRHFQYLKVSGPHEALSQLWELCLQWLRPEIHTKKQIIELLVLEQFLAILPEEVRTWVNLQHPNNSKDMVTLIEDVIEMLEDEDMPCKDSALQMGSIKEKMKAGSRTGKPQEPVTFKDVVVEFSKEEWGQLDSAVKNLYRNVMLENFRNLNSLRKAHLLSKPFESLKLESKKKRWIMEKEIPRKTIFDMKSISGEESSHGVIMTRLTESGHPSSDAWKDHSHRRETL

SEQ ID NO: 806740 - protein, 272 aa, Homo sapiens; identical to SEQ ID NO: 806737

SEQ ID NO: 806741 - protein, 1111 aa, Homo sapiens
SSLLEKMTSSDKDFRFMATSDLMSELQKDSIQLDEDSERKVVKMLLRLLEDKNGEVQNLAVKWLGVPLGAFHASLLHCLLPQLSSPRLAVRKRAVGALGHLAAACSTDLFVELADHLLDRLPGPRVPTSPTAIRTLIQCLGSVGRQAGHRLGAHLDRLVPLVEDFCNLDDDELRESCLQAFEAFLRKCPKEMGPHVPNVTSLCLQYIKHDPNYNYDSDEDEEQMETEDSEFSEQESEDEYSDDDDMSWKVRRAAAKCIAALISSRPDLLPDFHCTLAPVLIRRFKEREENVKADVFTAYIVLLRQTRPPKGWLEAMEEPTQTGSNLHMLRGQVPLVVKALQRQLKDRSVRARQGCFSLLTELAGVLPGSLAEHMPVLVSGIIFSLADRSSSSTIRMDALAFLQGLLGTEPAEAFHPHLPILLPPVMACVADSFYKIAAEALVVLQELVRALWPLHRPRMLDPEPYVGEMSAVTLARLRATDLDQEVKERAISCMGHLVGHLGDRLGDDLEPTLLLLLDRLRNEITRLPAIKALTLVAVSPLQLDLQPILAEALHILASFLRKNQRALRLATLAALDALAQSQGLSLPPSAVQAVLAELPALVNESDMHVAQLAVDFLATVTQAQPASLVEVSGPVLSELLRLLRSPLLPAGVLAAAEGFLQALVGTRPPCVDYAKLISLLTAPVYEQAVDGGPGLHKQVFHSLARCVAALSAACPQEAASTASRLVCDARSPHSSTGVKVLAFLSLAEVGQVAGPGHQRELKAVLLEALGSPSEDVRAAASYALGRVGAGSLPDFLPFLLEQIEAEPRRQYLLLHSLREALGAAQPDSLKPYAEDIWALLFQRCEGAEEGTRGVVAECIGKLVLVNPSFLLPRLRKQLAAGRPHTRSTVITAVKFLISDQPHPIDPLLKSFIAVHNKPSLVRDLLDDILPLLYQETKIRRDLIREVEMGPFKHTVDDGLDVRKAAFECMYSLLESCLGQLDICEFLNHVEDGLKDHYDIRMLTFIMVARLATLCPAPVLQRVDRLIEPLRATCTAKVKAGSVKQEFEKQDELKRSAMRAVAALLTIPEVGKSPIMADFSSQIRSNPELAALFESIQKDSASAPSTDSMELS

SEQ ID NO: 806742 - protein, 145 aa, Homo sapiens
SSGPKLHVCTPTWPHSARAAPAAPFTHPQHLPDWWASELENDSLPGAFLILLGSSKCSWQRKCHHLRKQTQRGRDSGRTSRWSELGLQVSVVGPLLFPRAGCCSCSCTISLRTISFLWADADLHHGCPAGHPVSCTCPAEGGPTH

SEQ ID NO: 806743 - protein, 944 aa, Homo sapiens
MGPHVPNVTSLCLQYIKHDPNYNYDSDEDEEQMETEDSEFSEQESEDEYSDDDDMSWKVRRAAAKCIAALISSRPDLLPDFHCTLAPVLIRRFKEREENVKADVFTAYIVLLRQTRPPKGWLEAMEEPTQTGSNLHMLRGQVPLVVKALQRQLKDRSVRARQGCFSLLTELAGVLPGSLAEHMPVLVSGIIFSLADRSSSSTIRMDALAFLQGLLGTEPAEAFHPHLPILLPPVMACVADSFYKIAAEALVVLQELVRALWPLHRPRMLDPEPYVGEMSAVTLARLRATDLDQEVKERAISCMGHLVGHLGDRLGDDLEPTLLLLLDRLRNEITRLPAIKALTLVAVSPLQLDLQPILAEALHILASFLRKNQRALRLATLAALDALAQSQGLSLPPSAVQAVLAELPALVNESDMHVAQLAVDFLATVTQAQPASLVEVSGPVLSELLRLLRSPLLPAGVLAAAEGFLQALVGTRPPCVDYAKLISLLTAPVYEQAVDGGPGLHKQVFHSLARCVAALSAACPQEAASTASRLVCDARSPHSSTGVKVLAFLSLAEVGQVAGPGHQRELKAVLLEALGSPSEDVRAAASYALGRVGAGSLPDFLPFLLEQIEAEPRRQYLLLHSLREALGAAQPDSLKPYAEDIWALLFQRCEGAEEGTRGVVAECIGKLVLVNPSFLLPRLRKQLAAGRPHTRSTVITAVKFLISDQPHPIDPLLKSFIGEFMESLQDPDLNVRRATLAFFNSAVHNKPSLVRDLLDDILPLLYQETKIRRDLIREVEMGPFKHTVDDGLDVRKAAFECMYSLLESCLGQLDICEFLNHVEDGLKDHYDIRMLTFIMVARLATLCPAPVLQRVDRLIEPLRATCTAKVKAGSVKQEFEKQDELKRSAMRAVAALLTIPEVGKSPIMADFSSQIRSNPELAALFESIQKDSASAPSTDSMELS

SEQ ID NO: 806744 - protein, 1142 aa, Homo sapiens
MRSDKEQLRDIAGIGLKTVLSELPPAATGSGLATNVCRKITGQLTSAIAQQEDVAVQLEALDILSDMLSRLGVPLGAFHASLLHCLLPQLSSPRLAVRKRAVGALGHLAAACSTDLFVELADHLLDRLPGPRVPTSPTAIRTLIQCLGSVGRQAGHRLGAHLDRLVPLVEDFCNLDDDELRESCLQAFEAFLRKCPKEMGPHVPNVTSLCLQYIKHDPNYNYDSDEDEEQMETEDSEFSEQESEDEYSDDDDMSWKVRRAAAKCIAALISSRPDLLPDFHCTLAPVLIRRFKEREENVKADVFTAYIVLLRQTRPPKGWLEAMEEPTQTGSNLHMLRGQVPLVVKALQRQLKDRSVRARQGCFSLLTELAGVLPGSLAEHMPVLVSGIIFSLADRSSSSTIRMDALAFLQGLLGTEPAEAFHPHLPILLPPVMACVADSFYKIAAEALVVLQELVRALWPLHRPRMLDPEPYVGEMSAVTLARLRATDLDQEVKERAISCMGHLVGHLGDRLGDDLEPTLLLLLDRLRNEITRLPAIKALTLVAVSPLQLDLQPILAEALHILASFLRKNQRALRLATLAALDALAQSQGLSLPPSAVQAVLAELPALVNESDMHVAQLAVDFLATVTQAQPASLVEVSGPVLSELLRLLRSPLLPAGVLAAAEGFLQALVGTRPPCVDYAKLISLLTAPVYEQAVDGGPGLHKQVFHSLARCVAALSAACPQEAASTASRLVCDARSPHSSTGVKVLAFLSLAEVGQVAGPGHQRELKAVLLEALGSPSEDVRAAASYALGRVGAGSLPDFLPFLLEQIEAEPRRQYLLLHSLREALGAAQPDSLKPYAEDIWALLFQRCEGAEEGTRGVVAECIGKLVLVNPSFLLPRLRKQLAAGRPHTRSTVITAVKFLISDQPHPIDPLLKSFIGEFMESLQDPDLNVRRATLAFFNSAVHNKPSLVRDLLDDILPLLYQETKIRRDLIREVEMGPFKHTVDDGLDVRKAAFECMYSLLESCLGQLDICEFLNHVEDGLKDHYDIRMLTFIMVARLATLCPAPVLQRVDRLIEPLRATCTAKVKAGSVKQEFEKQDELKRSAMRAVAALLTIPEVGKSPIMADFSSQIRSNPELAALFESIQKDSASAPSTDSMELS

SEQ ID NO: 806745 - protein, 944 aa, Homo sapiens; identical to SEQ ID NO: 806743

SEQ ID NO: 806746 - protein, 948 aa, Homo sapiens
MGPHVPNVTSLCLQYIKHDPNYNYDSDEDEEQMETEDSEFSEQESEDEYSDDDDMSWKVRRAAAKCIAALISSRPDLLPDFHCTLAPVLIRRFKEREENVKADVFTAYIVLLRQTRPPKGWLEAMEEPTQTGSNLHMLRGQVPLVVKALQRQLKDRSVRARQGCFSLLTELAGVLPGSLAEHMPVLVSGIIFSLADRSSSSTIRMDALAFLQGLLGTEPAEAFHPHLPILLPPVMACVADSFYKIAAEALVVLQELVRALWPLHRPRMLDPEPYVGEMSAVTLARLRATDLDQEVKERAISCMGHLVGHLGDRLGDDLEPTLLLLLDRLRNEITRLPAIKALTLVAVSPLQLDLQPILAEALHILASFLRKNQRALRLATLAALDALAQSQGLSLPPSAVQAVLAELPALVNESDMHVAQLAVDFLATVTQAQPASLVEVSGPVLSELLRLLRSPLLPAGVLAAAEGFLQALVGTRPPCVDYAKLISLLTAPVYEQAVDGGPGLHKQVFHSLARCVAALSAACPQEAASTASRLVCDARSPHSSTGVKVLAFLSLAEVGQVAGPGHQRELKAVLLEALGSPSEDVRAAASYALGRVGAGSLPDFLPFLLEQIEAEPRRQYLLLHSLREALGAAQPDSLKPYAEDIWALLFQRCEGAEEGTRGVVAECIGKLVLVNPSFLLPRLRKQLAAGRPHTRSTVITAVKFLISDQPHPIDPLLKSFIGEFMESLQDPDLNVRRATLAFFNSAVHNKPSLVRDLLDDILPLLYQETKIRRDLIREVEMGPFKHTVDDGLDVRKAAFECMYSLLESCLGQLDICEFLNHVEDGLKDHYDIRMLTFIMVARLATLCPAPVLQRVDRLIEPLRATCTAKEPNANSVAWNTQCEDMLLCFSGGGYLNIKASTFPMHRQKLQGFVVGYNGSKIFCLHVFSISAVEVPQIGEDEGPEVQEH

SEQ ID NO: 806747 - protein, 36 aa, Homo sapiens
MESLQDPDLNVRRATLAFFNSAVHNKPSLVRDLLDD

SEQ ID NO: 806748 - protein, 80 aa, Homo sapiens
MSWKVRRAAAKCIAALISSRPDLLPDFHCTLAPVLIRRFKEREENVKADVFTAYIVLLRQTRPPKGWLEAMEEPTQTGSN

SEQ ID NO: 806749 - protein, 238 aa, Homo sapiens
EGRTLLGQKEHILRRRGPCLPHQALGHQEDPHLQASLAFQGERGPCSSFIMNWHMIISGLIVVVLKVVGMTLFLLYFPQIFNKSNDGFTTTRSYGTVSQIFGSSSPSPNGFITTRSYGTVCPKDWEFYQARCFFLSTSESSWNESRDFCKGKGSTLAIVNTPEKLKFLQDITDAEKYFIGLIYHREEKRWRWINNSVFNGNVTNQNQNFNCATIGLTKTFDAASCDISYRRICEKNAK

SEQ ID NO: 806750 - protein, 205 aa, Homo sapiens
EGRTLLGQKEHILRRRGPCLPHQALGHQEDPHLQASLAFQGERGPCSSFIMNWHMIISGLIVVVLKVVGMTLFLLYFPQIFNKSNDGFTTTRSYGTVCPKDWEFYQARCFFLSTSESSWNESRDFCKGKGSTLAIVNTPEKLKFLQDITDAEKYFIGLIYHREEKRWRWINNSVFNGKYVNMPQFPGDLGLLQKTKPEIAGFTLE

SEQ ID NO: 806751 - protein, 185 aa, Homo sapiens
EGRTLLGQKEHILRRRGPCLPHQALGHQEDPHLQASLAFQGERGPCSSFIMNWHMIISGLIVVVLKVVGMTLFLLYFCPKDWEFYQARCFFLSTSESSWNESRDFCKGKGSTLAIVNTPEKLKFLQDITDAEKYFIGLIYHREEKRWRWINNSVFNGKYVNMPQFPGDLGLLQKTKPEIAGFTLE

SEQ ID NO: 806752 - protein, 88 aa, Homo sapiens
CWGRSRGYTHTQQAEGIDIRRGTGVSTDVSEFMRGRELAAGPVPPAGSPTPSLHYDHGKMPEAQRSGVFEADRLFSPSAWGRNTPGGH

SEQ ID NO: 806753 - protein, 134 aa, Homo sapiens
MGHLQAAAETLHRAPAGGHRVAQQEHRDAPLLNQSPLHRLRSRSGPATEGNGTRVSVWTLHLPALLRSPFLARSQKASSTSRASPKLKRKKISLEPLSTYLFSNRLLQLCFLQTTQPERAKREKRNKSEALPLK

SEQ ID NO: 806754 - protein, 187 aa, Homo sapiens
CVRVSSRQQGEPEAAGARTMSSPGPSQPPAEDPPWPARLLRAPLGLLRLDPSGGALLLCGLVALLGWSWLRRRRARGIPPGPTPWPLVGNFGHVLLPPFLRRRSWLSSRTRAAGIDPSVIGPQVLLAHLARVYGSIFSFFIGHYLVVVLSDFHSVREALVQQAEVFSDRPRVPLISIVTKEKELFQE

SEQ ID NO: 806755 - protein, 71 aa, Homo sapiens
PWLQEFGTRTSPLRGDGAKSRKEVRKLKSRERQWQGQVAKCTQPSQQGVCHSRLKDVFEELLSQWDAALKS

SEQ ID NO: 806756 - protein, 70 aa, Homo sapiens
WNSEMSTSLSVVPRQLNFCISSGSRSTSMPSMAGTGHPLPRLFTTKPPPRRRARGPGGGPLLASFATPLL

SEQ ID NO: 806757 - protein, 385 aa, Homo sapiens
AQTPQPPTAPKGASDAKLCALYKEAELRLKGSSNTTECVPVPTSEHVAEIVGRQGCKIKALRAKTNTYIKTPVRGEEPVFMVTGRREDVATARREIISAAEHFSMIRASRNKSGAAFGVAPALPGQPDRDPVFEITGAPGNVERAREEIETHIAVRTGKILEYNNENDFLAGSPDAAIDSRYSDAWRVHQPGCKPLSTFRQNSLGCIGECGVDSGFEAPRLGEQGGDFGYGGYLFPGYGVGKQDVYYGVAETSPPLWAGQENATPTSVLFSSSSSSSSSAKARAGPPGAHRSPATSAGPELAGLPRRPPGEPLQGFSKLGGGGLRSPAAGGRDCMVCFESEVTAALVPCGHNLFCMECAVRICERTDPECPVCHITATQAIRIFS

SEQ ID NO: 806758 - protein, 423 aa, Homo sapiens
AQTPQPPTAPKGASDAKLCALYKEAELRLKGSSNTTECVPVPTSEHVAEIVGRQGCKIKALRAKTNTYIKTPVRGEEPVFMVTGRREDVATARREIISAAEHFSMIRASRNKSGAAFGVAPALPGQVTIRVRVPYRVVGLVVGPKGATIKRIQQQTNTYIITPSRDRDPVFEITGAPGNVERAREEIETHIAVRTGKILEYNNENDFLAGSPDAAIDSRYSDAWRVHQPGCKPLSTFRQNSLGCIGECGVDSGFEAPRLGEQGGDFGYGGYLFPGYGVGKQDVYYGVAETSPPLWAGQENATPTSVLFSSSSSSSSSAKARAGPPGAHRSPATSAGPELAGLPRRPPGEPLQGFSKLGGGGLRSPAAGGRDCMVCFESEVTAALVPCGHNLFCMECAVRICERTDPECPVCHITATQAIRIFS

SEQ ID NO: 806759 - protein, 423 aa, Homo sapiens; identical to SEQ ID NO: 806758

SEQ ID NO: 806760 - protein, 113 aa, Homo sapiens
CFVSGGCSSGMSLCGIVVPTVSRFPPGGFFYMCVGIPSPLFSLSPFFPGYPSYVPLFPLCRSWWPARRSHNHVFLLRDSFRGGRGAAPHTCCVFFFFFFLLVFGVQYSGFNHR

SEQ ID NO: 806761 - protein, 105 aa, Homo sapiens
ATITSLRLAAKVNEEEEFIPQVKDFTKHYGSDYSPNELLRMELAILDRLHWDLYIGTPLDFLTIVSKEVFTESTLNSFVPLEQLFTTWDGKAQACTRPCTCTTVR

SEQ ID NO: 806762 - protein, 70 aa, Homo sapiens
ATITSLRLAAKVNEEEEFIPQVKDFTKHYGSDYSPNELLRMELAILDRLHWDLYIGTPLDFLTINGNIVI

SEQ ID NO: 806763 - protein, 105 aa, Homo sapiens [sequence omitted]

SEQ ID NO: 806764 - protein, 224 aa, Homo sapiens
WDLLPAAGGGAMAALLRAVRRFRGKAVWERPLHGLWCCSGQEDPKRWVGSSSPISKEKLPNAETEKFWMFYRFDAIRTFGFLSRLKLAQTALTVVALPPGYYLYSQGLLTLNTVCLMSGISGFALTMLCWMSYFLRRLVGILYLNESGTMLRVAHLNFWGWRQDTYCPMADVIPLTETKDRPQEMFVRIQRYSGKQTFYVTLRYGRILDRERFTQVFGVHQMLK

SEQ ID NO: 806765 - protein, 173 aa, Homo sapiens
VRGSPRRGTNAETEKFWMFYRFDAIRTFGFLSRLKLAQTALTVVALPPGYYLYSQGLLTLNTVCLMSGISGFALTMLCWMSYFLRRLVGILYLNESGTMLRVAHLNFWGWRQDTYCPMADVIPLTETKDRPQEMFVRIQRYSGKQTFYVTLRYGRILDRERFTQVFGVHQMLK

SEQ ID NO: 806766 - protein, 224 aa, Homo sapiens; identical to SEQ ID NO: 806764

SEQ ID NO: 806767 - protein, 224 aa, Homo sapiens; identical to SEQ ID NO: 806764

SEQ ID NO: 806768 - protein, 582 aa, Homo sapiens
MESVKQRILAPGKEGLKNFAGKSLGQIYRVLEKKQDTGETIELTEDGKPLEVPERKAPLCDCTCFGLPRRYIIAIMSGLGFCISFGIRCNLGVAIVDMVNNSTIHRGGKVIKEKAKFNWDPETVGMIHGSFFWGYIITQIPGGYIASRLAANRVFGAAILLTSTLNMLIPSAARVHYGCVIFVRILQGLVEGVTYPACHGIWSKWAPPLERSRLATTSFCGSYAGAVIAMPLAGILVQYTGWSSVFYVYGSFGMVWYMFWLLVSYESPAKHPTITDEERRYIEESIGESANLLGAMEKFKTPWRKFFTSMPVYAIIVANFCRSWTFYLLLISQPAYFEEVFGFEISKVGMLSAVPHLVMTIIVPIGGQIADFLRSKQILSTTTVRKIMNCGGFGMEATLLLVVGYSHTRGVAISFLVLAVGFSGFAISGFNVNHLDIAPRYASILMGISNGVGTLSGMVCPIIVGAMTKNKSREEWQYVFLIAALVHYGGVIFYAIFASGEKQPWADPEETSEEKCGFIHEDELDEETGDITQNYINYGTTKSYGATTQANGGWPSGWEKKEEFVQGEVQDSHSYKDRVDYS

SEQ ID NO: 806769 - protein, 71 aa, Homo sapiens
RVSVGSPHVSAASRSSPPLAGFCFHLLISQSLILTQSKILNINTTTEAYYVLLSLLLLPPKCWRRGLVEGD

SEQ ID NO: 806770 - protein, 68 aa, Homo sapiens
RVSVGSPHVSAASRSSPPLAGFCFHLLISQSLILTQSKILNINTTTEAYYVLLSLLLLPPKHCKLFGI

SEQ ID NO: 806771 - protein, 588 aa, Homo sapiens
MALYQRWRCLRLQGLQACRLHTAVVSTPPRWLAERLGLFEELWAAQVKRLASMAQKEPRTIKISLPGGQKIDAVAWNTTPYQLARQISSTLADTAVAAQVNGEPYDLERPLETDSDLRFLTFDSPEGKAVFWHSSTHVLGAAAEQFLGAVLCRGPSTEYGFYHDFFLGKERTIRGSELPVLERICQELTAAARPFRRLEASRDQLRQLFKAEYAHRGFSEVKTPTLFSTKLWEQSGHWEHYQEDMFAVQPPGSDRPPSSQSDDSTRHITDTLALKPMNCPAHCLMFAHRPRSWRELPLRLADFGALHRAEASGGLGGLTRLRCFQQDDAHIFCTTDQLEAEIQSCLDFLRSVYAVLGFSFRLALSTRPSGFLGDPCLWDQAEQVLKQALKEFGEPWDLNSGDGAFYGPKIDVHLHDALGRPHQCGTIQLDFQLPLRFDLQYKGQAGALERPVLIHRAVLGSVERLLGVLAESCGGKWPLWLSPFQVVVIPVGSEQEEYAKEAQQSLRAAGLVSDLDADSGLTLSRRIRRAQLAHYNFQFVVGQKEQSKRTVNIRTRDNRRLGEWDLPEAVQRLVELQNTRVPNAEEIF

SEQ ID NO: 806772 - protein, 684 aa, Homo sapiens
MALYQRWRCLRLQGLQACRLHTAVVSTPPRWLAERLGLFEELWAAQVKRLASMAQKEPRTIKISLPGGQKIDAVAWNTTPYQLARQISSTLADTAVAAQVNGEPYDLERPLETDSDLRFLTFDSPEGKAVFWHSSTHVLGAAAEQFLGAVLCRGPSTEYGFYHDFFLGKERTIRGSELPVLERICQELTAAARPFRRLEASRDQLRQLFKDNPFKLHLIEEKVTGPTATVYGCGTLVDLCQGPHLRHTGQIGGLKLLSNSSSLWRSSGAPETLQRVSGISFPTTELLRVWEAWREEAELRDHRRIGKEQELFFFHELSPGSCFFLPRGTRVYNALVAFIRAEYAHRGFSEVKTPTLFSTKLWEQSGHWEHYQEDMFAVQPPGSDRPPSSQSDDSTRHITDTLALKPMNCPAHCLMFAHRPRSWRELPLRLADFGALHRAEASGGLGGLTRLRCFQQDDAHIFCTTDQLEAEIQSCLDFLRSVYAVLGFSFRLALSTRPSGFLGDPCLWDQAEQVLKQALKEFGEPWDLNSGDGAFYGPKIDVHLHDALGRPHQCGTIQLDFQLPLRFDLQYKGPLWLSPFQVVVIPVGSEQEEYAKEAQQSLRAAGLVSDLDADSGLTLSRRIRRAQLAHYNFQFVVGQKEQSKRTVNIRTRDNRRLGEWDLPEAVQRLVELQNTRVPNAEEIF

SEQ ID NO: 806773 - protein, 344 aa, Homo sapiens
MFAVQPPGSDRPPSSQSDDSTRHITDTLALKPMNCPAHCLMFAHRPRSWRELPLRLADFGALHRAEASGGLGGLTRLRCFQQDDAHIFCTTDQLEAEIQSCLDFLRSVYAVLGFSFRLALSTRPSGFLGDPCLWDQAEQVLKQALKEFGEPWDLNSGDGAFYGPKIDVHLHDALGRPHQCGTIQLDFQLPLRFDLQYKGQAGALERPVLIHRAVLGSVERLLGVLAESCGGKWPLWLSPFQVVVIPVGSEQEEYAKEAQQSLRAAGLVSDLDADSGLTLSRRIRRAQLAHYNFQFVVGQKEQSKRTVNIRTRDNRRLGEWDLPEAVQRLVELQNTRVPNAEEIF

SEQ ID NO: 806774 - protein, 691 aa, Homo sapiens
MALYQRWRCLRLQGLQACRLHTAVVSTPPRWLAERLGLFEELWAAQVKRLASMAQKEPRTIKISLPGGQKIDAVAWNTTPYQLARQISSTLADTAVAAQVNGEPYDLERPLETDSDLRFLTFDSPEGKAVFWHSSTHVLGAAAEQFLGAVLCRGPSTEYGFYHDFFLGKERTIRGSELPVLERICQELTAAARPFRRLEASRDQLRQLFKDNPFKLHLIEEKVTGPTATVYGCGTLVDLCQGPHLRHTGQIGGLKLLSNSSSLWRSSGAPETLQRVSGISFPTTELLRVWEAWREEAELRDHRRIGKEQELFFFHELSPGSCFFLPRGTRVYNALVAFIRAEYAHRGFSEVKTPTLFSTKLWEQSGHWEHYQEDMFAVQPPGSDRPPSSQSDDSTRHITDTLALKPMNCPAHCLMFAHRPRSWRELPLRLADFGALHRAEASGGLGGLTRLRCFQQDDAHIFCTTDQLEAEIQSCLDFLRSVYAVLGFSFRLALSTRPSGFLGDPCLWDQAEQVLKQALKEFGEPWDLNSGDGAFYGPKIDVHLHDALGRPHQCGTIQLDFQLPLRFDLQYKGQAGALERPVLIHRAVLGSVERLLGVLAESCGGKWPLWLSPFQVVVIPVGSEQEEYAKEAQQSLRAAGLVSDLDADSGLTLSRRIRRAQLAHYNFQFVVGQKEQSKRTVMPKWPEARGT

SEQ ID NO: 806775 - protein, 603 aa, Homo sapiens
MALYQRWRCLRLQGLQACRLHTAVVSTPPRWLAERLGLFEELWAAQVKRLASMAQKEPRTIKISLPGGQKIDAVAWNTTPYQLARQISSTLADTAVAAQVNGEPYDLERPLETDSDLRFLTFDSPEGKAVFWHSSTHVLGAAAEQFLGAVLCRGPSTEYGFYHDFFLGKERTIRGSELPVLERICQELTAAARPFRRLEASRDQLRQLFKDNPFKLHLIEEKVTGPTATVYGCGTLVDLCQGPHLRHTGQIGGLKLLSNSSSLWRSSGAPETLQRVSGISFPTTELLRVWEAWREEAELRDHRRIGKEQELFFFHELSPGSCFFLPRGTRVYNALVAFIRAEYAHRGFSEVKTPTLFSTKLWEQSGHWEHYQEDMFAVQPPGSDRPPSSQSDDSTRHITDTLALKPMNCPAHCLMFAHRPRSWRELPLRLADFGALHRAEASGGLGGLTRLRCFQQDDAHIFCTTDQLEAEIQSCLDFLRSVYAVLGFSFRLALSTRPSGFLGDPCLWDQAEQVLKQALKEFGEPWDLNSGDGAFYGPKIDVHLHDALGRPHQCGTIQLDFQLPLRFDLQYKGQAGALERPVLIHRAVLGSVERLSGDQDHPG

SEQ ID NO: 806776 - protein, 231 aa, Homo sapiens
AAWLIKYEGGHMALMGDPCLCHHSEQVLKQALKEFGEPWDLNSGDGAFYGPKIDVHLHDALGRPHQCGTIQLDFQLPLRFDLQYKGQAGALERPVLIHRAVLGSVERLLGVLAESCGGKWPLWLSPFQVVVIPVGSEQEEYAKEAQQSLRAAGLVSDLDADSGLTLSRRIRRAQLAHYNFQFVVGQKEQSKRTVNIRTRDNRRLGEWDLPEAVQRLVELQNTRVPNAEEIF

SEQ ID NO: 806777 - protein, 718 aa, Homo sapiens
MALYQRWRCLRLQGLQACRLHTAVVSTPPRWLAERLGLFEELWAAQVKRLASMAQKEPRTIKISLPGGQKIDAVAWNTTPYQLARQISSTLADTAVAAQVNGEPYDLERPLETDSDLRFLTFDSPEGKAVFWHSSTHVLGAAAEQFLGAVLCRGPSTEYGFYHDFFLGKERTIRGSELPVLERICQELTAAARPFRRLEASRDQLRQLFKDNPFKLHLIEEKVTGPTATVYGCGTLVDLCQGPHLRHTGQIGGLKLLSNSSSLWRSSGAPETLQRVSGISFPTTELLRVWEAWREEAELRDHRRIGKEQELFFFHELSPGSCFFLPRGTRVYNALVAFIRAEYAHRGFSEVKTPTLFSTKLWEQSGHWEHYQEDMFAVQPPGSDRPPSSQSDDSTRHITDTLALKPMNCPAHCLMFAHRPRSWRELPLRLADFGALHRAEASGGLGGLTRLRCFQQDDAHIFCTTDQLEAEIQSCLDFLRSVYAVLGFSFRLALSTRPSGFLGDPCLWDQAEQVLKQALKEFGEPWDLNSGDGAFYGPKIDVHLHDALGRPHQCGTIQLDFQLPLRFDLQYKGQAGALERPVLIHRAVLGSVERLLGVLAESCGGKWPLWLSPFQVVVIPVGSEQEEYAKEAQQSLRAAGLVSDLDADSGLTLSRRIRRAQLAHYNFQFVVGQKEQSKRTVNIRTRDNRRLGEWDLPEAVQRLVELQNTRVPNAEEIF

SEQ ID NO: 806778 - protein, 636 aa, Homo sapiens
MALYQRWRCLRLQGLQACRLHTAVVSTPPRWLAERLGLFEELWAAQVKRLASMAQKEPRTIKISLPGGQKIDAVAWNTTPYQLARQISSTLADTAVAAQVNGEPYDLERPLETDSDLRFLTFDSPEGKAVFWHSSTHVLGAAAEQFLGAVLCRGPSTEYGFYHDFFLGKERTIRGSELPVLERICQELTAAARPFRRLEASRDQLRQLFKDNPFKLHLIEEKVTGPTATVYGCGTLVDLCQGPHLRHTGQIGGLKLLSAEYAHRGFSEVKTPTLFSTKLWEQSGHWEHYQEDMFAVQPPGSDRPPSSQSDDSTRHITDTLALKPMNCPAHCLMFAHRPRSWRELPLRLADFGALHRAEASGGLGGLTRLRCFQQDDAHIFCTTDQLEAEIQSCLDFLRSVYAVLGFSFRLALSTRPSGFLGDPCLWDQAEQVLKQALKEFGEPWDLNSGDGAFYGPKIDVHLHDALGRPHQCGTIQLDFQLPLRFDLQYKGQAGALERPVLIHRAVLGSVERLLGVLAESCGGKWPLWLSPFQVVVIPVGSEQEEYAKEAQQSLRAAGLVSDLDADSGLTLSRRIRRAQLAHYNFQFVVGQKEQSKRTVNIRTRDNRRLGEWDLPEAVQRLVELQNTRVPNAEEIF

SEQ ID NO: 806779 - protein, 344 aa, Homo sapiens; identical to SEQ ID NO: 806773

SEQ ID NO: 806780 - protein, 702 aa, Homo sapiens
MALYQRWRCLRLQGLQACRLHTAVVSTPPRWLAERLGLFEELWAAQVKRLASMAQKEPRTIKISLPGGQKIDAVAWNTTPYQLARQISSTLADTAVAAQVNGEPYDLERPLETDSDLRFLTFDSPEGKAVFWHSSTHVLGAAAEQFLGAVLCRGPSTEYGFYHDFFLGKERTIRGSELPVLERICQELTAAARPFRRLEASRDQLRQLFKDNPFKLHLIEEKVTGPTATVYGCGTLVDLCQGPHLRHTGQIGGLKLLSNSSSLWRSSGAPETLQRVSGISFPTTELLRVWEAWREEAELRDHRRIGKEQELFFFHELSPGSCFFLPRGTRVYNALVAFIRAEYAHRGFSEVKTPTLFSTKLWEQSGHWEHYQEDMFAVQPPGSDRPPSSQSDDSTRHITDTLALKPMNCPAHCLMFAHRPRSWRELPLRLADFGALHRAEASGGLGGLTRLRCFQQDDAHIFCTTDQLEAEIQSCLDFLRSVYAVLGFSFRLALSTRPSGFLGDPCLWDQAEQVLKQALKEFGEPWDLNSGDGAFYGPKIDVHLHDALGRPHQCGTIQLDFQLPLRFDLQYKGQAGALERPVLIHRAVLGSVERLLGVLAESCGGKWPLWLSPFQVVVIPVGSEQEEYAKEAQQSLRAAGLVSDLDADSGLTLSRRIRRAQLAHYNFQFVVGQKEQSKRTVNIRTRDNRRLGEWDLPESLNF

SEQ ID NO: 806781 - protein, 473 aa, Homo sapiens
MALYQRWRCLRLQGLQACRLHTAVVSTPPRWLAERLGLFEELWAAQVKRLASMAQKEPRTIKISLPGGQKIDAVAWNTTPYQLARQISSTLADTAVAAQVNGEPYDLERPLETDSDLRFLTFDSPEGKAVFWHSSTHVLGAAAEQFLGAVLCRGPSTEYGFYHDFFLGKERTIRGSELPVLERICQELTAAARPFRRLEASRDQLRQLFKDNPFKLHLIEEKVTGPTATVYGCGTLVDLCQGPHLRHTGQIGGLKLLSNSSSLWRSSGAPETLQRVSGISFPTTELLRVWEAWREEAELRDHRRIGKEQELFFFHELSPGSCFFLPRGTRVYNALVAFIRAEYAHRGFSEVKTPTLFSTKLWEQSGHWEHYQEDMFAVQPPGSDRPPSSQSDDSTRHITDTLALKPMNCPAHCLMFAHRPRSWRELPLRLADFGALHRAEASGGLGGLTRLRCFQQDDAHIFCTTDQAEADGS

SEQ ID NO: 806782 - protein, 169 aa, Homo sapiens
MALYQRWRCLRLQGLQACRLHTAVVSTPPRWLAERLGLFEELWAAQVKRLASMAQKEPRTIKISLPGGQKIDAVAWNTTPYQLARQISSTLADTAVAAQVNGEPYDLERPLETDSDLRFLTFDSPEGKADNPGLRAACFGADLPGTYSCCSTLPEARGFTGSASPVVQG

SEQ ID NO: 806783 - protein, 105 aa, Homo sapiens
GATRFEVQTRRRGRERVCLWGCCGTVCARRAAENPAWSACSPPSGVAPAAGLRRDRHAGAHGRAPVSLEPRAPRRATALQVAQTAGASATPRPAASCEVSQTRFD

SEQ ID NO: 806784 - protein, 335 aa, Homo sapiens
ACALVVFSVDCMLTSPCLLVRFFSIFVVYSGAGYACVGRICLWLCFFCSAAVRVVELCVLLFSLLLGSYFAWVAAACASSLWCVLCACRIRRLVVCCVYQLDLVLRRSPRLCWRLVVVFSACYFLFVAAAASRAVSRVAVLMAFSTFVWCVVVCWRGCASLFMFPRGALCCRPRFVGRLWFAVPSHSSVLFSLRGTIARGGFAGPRLSGLPRYARPVVCSLSPLRLVLACAWFAWRCPMVLVLLDSVFGGLWSFLVCAALWQSLRDPLVARPRGSTVTRASCAALVSSIACRGTCSHLSPSRPLLASVGCAGGAGPGLTTCVMVPSSGTGCRLRY

SEQ ID NO: 806785 - protein, 104 aa, Homo sapiens
LEQVPPLSNEASPVRPAQKLGNLLVSAFSVSGTHCCLGNPLSGPVISHLQIQGISEVRERREASSEILTSIQVLHSWNQPTLDGKDLENNKNNTTIKIPIKIQY

SEQ ID NO: 806786 - protein, 433 aa, Homo sapiens
QKKWLDQEMEKVLQQRRALEELGEELHKREAILAKKEALMQEKTGLESKRLRSSQALNEDIVRVSSRLEHLEKELSEKSGQLRQGSAQSQQQIRGEIDSLRQEKDSLLKQRLEIDGKLRQGSLLSPEEERTLFQLDEAIEALDAAIEYKNEAITCRQRVLRASASLLSQCEMNLMAKLSYLSSSETRALLCKYFDKVVTLREEQHQQQIAFSELEMQLEEQQRLVYWLEVALERQRLEMDRQLTLQQKEHEQNMQLLLQQSRDHLGEGLADSRRQYEARIQALEKELGRYMWINQELKQKLGGVNAVGHSRGGEKRSLCSEGRQAPGNEDELHLAPELLWLSPLTEGAPRTREETRDLVHAPLPLTWKRSSLCGEEQGSPEELRQREAAEPLVGRVLPVGEAGLPWNFGPLSKPRRELRRASPGMIDVRKNPL

SEQ ID NO: 806787 - protein, 124 aa, Homo sapiens [sequence omitted]

SEQ ID NO: 806788 - protein, 403 aa, Homo sapiens
QKKWLDQEMEKVLQQRRALEELGEELHKREAILAKKEALMQEKTGLESKRLRSSQALNEDIVRVSSRLEHLEKELSEKSGQLRQGSAQSQQQIRGEIDSLRQEKDSLLKQRLEIDGKLRQGSLLSPEEERTLFQLDEAIEALDAAIEYKNEAITCRQRVLRASASLLSQCEMNLMAKLSYLSSSETRALLCKYFDKVVTLREEQHQQQIAFSELEMQLEEQQRLVYWLEVALERQRLEMDRQLTLQQKEHEQNMQLLLQQSRDHLGEGLADSRRQYEARIQALEKELGRYMWINQELKQKLGGVNAVGHSRGGEKRSLCSEGRQAPGNEDELHLAPELLWLSPLTEGAPRTREETRDLVHAPLPLTWKRSSLCGDSSTTPISGPGSEDLEEPHAQGLLHTTCN

SEQ ID NO: 806789 - protein, 269 aa, Homo sapiens
MNSSSSSSVPKSMALRASAMCSKSKVKKSMFSKPCSVFPSWQPLEASTMLLMSCLAVKRKVAPPGSSRDWMAVSTSFVDLSSCSWYCWMRASMKLSFSSCSCVIRCSNSLFFSSRMAYNVSNFWLSSSFYLVTVLLGHSTGILQLSDDGLHTVIPRHQHGDTVIQFSLLSLEDTLQWGHLAGLVDPKHLAHGAGGHLTRETVDVDFLIFVLLAHGVTALLQRPTGALLFVDVDDVLHQQVPLQAVHSVTIHDHLVAAGGAAETASRHGH

SEQ ID NO: 806790 - protein, 269 aa, Homo sapiens; identical to SEQ ID NO: 806789

SEQ ID NO: 806791 - protein, 147 aa, Homo sapiens [sequence omitted]

SEQ ID NO: 806792 - protein, 668 aa, Homo sapiens
RKNDRLAVSKMLNKFTKSGLKSQFAYCMLIRIASRLLKETEDGHESPLFDFIESCLRNKHEMVIYEAASAIIHLPNCTARELAPAVSVLQLFCSSPKPALRYAAVRTLNKVAMKHPSAVTACNLDLENLITDSNRSIATLAITTLLKTGSESSVDRLMKQISSFVSEISDEFKVVVVQAISALCQKYPRKHSVMMTFLSNMLRDDGGFEYKRAIVDCIISIVEENPESKEAGLAHLCEFIEDCEHTVLATKILHLLGKEGPRTPVPSKYIRFIFNRVVLENEAVRAAAVSALAKFGAQNESLLPSILVLLQRCMMDTDDEVRDRATFYLNVLQQRQMALNATYIFNGLTVSVPGMEKALHQYTLEPSEKPFDMKSIPLAMAPVFEQKAEITLVATKPEKLAPSRQDIFQEQLAAIPEFLNIGPLFKSSEPVQLTEAETEYFVRCIKHMFTNHIVFQFDCTNTLNDQLLEKVTVQMEPSDSYEVLSCIPAPSLPYNQPGICYTLVRLPDDDPTAVAGSFSCTMKFTVRDCDPNTGVPDEDGYDDEYVLEDLEVTVSDHIQKVLKPNFAAAWEEVGDTFEKEETFALSSTKTLEEAVNNIITFLGMQPCERSDKVPENKNSHSLYLAGIFRGGYDLLVRSRLALADGVTMQVTVRSKERTPVDVILASVG

SEQ ID NO: 806793 - protein, 668 aa, Homo sapiens; identical to SEQ ID NO: 806792

SEQ ID NO: 806794 - protein, 847 aa, Homo sapiens
MHLLGPWLLLLVLEYLAFSDSSKWVFEHPETLYAWEGACVWIPCTYRALDGDLESFILFHNPEYNKNTSKFDGTRLYESTKDGKVPSEQKRVQFLGDKNKNCTLSIHPVHLNDSGQLGLRMESKTEKWMERIHLNVSERPFPPHIQLPPEIQESQEVTLTCLLNFSCYGYPIQLQWLLEGVPMRQAAVTSTSLTIKSVFTRSELKFSPQWSHHGKIVTCQLQDADGKFLSNDTVQLNVKHTPKLEIKVTPSDAIVREGDSVTMTCEVSSSNPEYTTVSWLKDGTSLKKQNTFTLNLREVTKDQSGKYCCQVSNDVGPGRSEEVFLQVQYAPEPSTVQILHSPAVEGSQVEFLCMSLANPLPTNYTWYHNGKEMQGRTEEKVHIPKILPWHAGTYSCVAENILGTGQRGPGAELDVQYPPKKVTTVIQNPMPIREGDTVTLSCNYNSSNPSVTRYEWKPHGAWEEPSLGVLKIQNVGWDNTTIACAACNSWCSWASPVALNVQYAPRDVRVRKIKPLSEIHSGNSVSLQCDFSSSHPKEVQFFWEKNGRLLGKESQLNFDSISPEDAGSYSCWVNNSIGQTASKAWTLEVLYAPRRLRVSMSPGDQVMEGKSATLTCESDANPPVSHYTWFDWNNQSLPYHSQKLRLEPVKVQHSGAYWCQGTNSVGKGRSPLSTLTVYYSPETIGRRVAVGLGSCLAILILAICGLKLQRRWKRTQSQQGLQENSSGQSFFVRNKKVRRAPLSEGPHSLGCYNPMMEDGISYTTLRFPEMNIPRTGDAESSEMQRPPPDCDDTVTYSALHKRQVGDYENVIPDFPEDEGIHYSELIQFGVGERPQAQENVDYVILKH

SEQ ID NO: 806795 - protein, 248 aa, Homo sapiens
CTSAFCSQMLPGSLKREDTRKQVKIILLLFCIQQASYYGTAVMGQAYLPELGTQWGPPWLSLTGVTTGCRQTPVLSILLARPAESSESRVGYWMPRREEGAREVSPKVLQGPQQAWTEEVWTAWPCPEPLCIITAVPNLHPTLSLPIPGPGALLLCSRDSWSSLRQHTVLLWRRPSPTHAGMLQPVPEQVVAGGCWQRRDNGPAPGGKCWLQGTESSPCHSPCYPLGNLKGISKNSGSATLLSFLWNM

SEQ ID NO: 806796 - protein, 280 aa, Homo sapiens
MHLLGPWLLLLVLEYLAFSDSSKWVFEHPETLYAWEGACVWIPCTYRALDGDLESFILFHNPEYNKNTSKFDGTRLYESTKDGKVPSEQKRVQFLGDKNKNCTLSIHPVHLNDSGQLGLRMESKTEKWMERIHLNVSERPFPPHIQLPPEIQESQEVTLTCLLNFSCYGYPIQLQWLLEGVPMRQAAVTSTSLTIKSVFTRSELKFSPQWSHHGKIVTCQLQDADGKFLSNDTVQLNVKHTPKLGIRAFPGKPQEGGARGQTAVGHRGNRAGAQGAQNKK

SEQ ID NO: 806797 - protein, 350 aa, Homo sapiens
YFCLLLSDAARVPEEGRHAETGLHPDTTPCISSAPGSCSWHPETLYAWEGACVWIPCTYRALDGDLESFILFHNPEYNKNTSKFDGTRLYESTKDGKVPSEQKRVQFLGDKNKNCTLSIHPVHLNDSGQLGLRMESKTEKWMERIHLNVSERPFPPHIQLPPEIQESQEVTLTCLLNFSCYGYPIQLQWLLEGVPMRQAAVTSTSLTIKSVFTRSELKFSPQWSHHGKIVTCQLQDADGKFLSNDTVQLNVKHTRKWDHVTPVMHSGGGTWEHDREVTAQNPEQQKGPGKVDQLKTKIQQLAMPGKGEGGQTGRRREMPRTAHRTPREKHKRDPQEHERGEHRAKTEAQA

SEQ ID NO: 806798 - protein, 670 aa, Homo sapiens
MHLLGPWLLLLVLEYLAFSDSSKWVFEHPETLYAWEGACVWIPCTYRALDGDLESFILFHNPEYNKNTSKFDGTRLYESTKDGKVPSEQKRVQFLGDKNKNCTLSIHPVHLNDSGQLGLRMESKTEKWMERIHLNVSERPFPPHIQLPPEIQESQEVTLTCLLNFSCYGYPIQLQWLLEGVPMRQAAVTSTSLTIKSVFTRSELKFSPQWSHHGKIVTCQLQDADGKFLSNDTVQLNVKHPPKKVTTVIQNPMPIREGDTVTLSCNYNSSNPSVTRYEWKPHGAWEEPSLGVLKIQNVGWDNTTIACAACNSWCSWASPVALNVQYAPRDVRVRKIKPLSEIHSGNSVSLQCDFSSSHPKEVQFFWEKNGRLLGKESQLNFDSISPEDAGSYSCWVNNSIGQTASKAWTLEVLYAPRRLRVSMSPGDQVMEGKSATLTCESDANPPVSHYTWFDWNNQSLPYHSQKLRLEPVKVQHSGAYWCQGTNSVGKGRSPLSTLTVYYSPETIGRRVAVGLGSCLAILILAICGLKLQRRWKRTQSQQGLQENSSGQSFFVRNKKVRRAPLSEGPHSLGCYNPMMEDGISYTTLRFPEMNIPRTGDAESSEMQRPPPDCDDTVTYSALHKRQVGDYENVIPDFPEDEGIHYSELIQFGVGERPQAQENVDYVILKH

SEQ ID NO: 806799 - protein, 670 aa, Homo sapiens; identical to SEQ ID NO: 806798

SEQ ID NO: 806800 - protein, 839 aa, Homo sapiens
MVSFLEYLAFSDSSKWVFEHPETLYAWEGACVWIPCTYRALDGDLESFILFHNPEYNKNTSKFDGTRLYESTKDGKVPSEQKRVQFLGDKNKNCTLSIHPVHLNDSGQLGLRMESKTEKWMERIHLNVSERPFPPHIQLPPEIQESQEVTLTCLLNFSCYGYPIQLQWLLEGVPMRQAAVTSTSLTIKSVFTRSELKFSPQWSHHGKIVTCQLQDADGKFLSNDTVQLNVKHTPKLEIKVTPSDAIVREGDSVTMTCEVSSSNPEYTTVSWLKDGTSLKKQNTFTLNLREVTKDQSGKYCCQVSNDVGPGRSEEVFLQVQYAPEPSTVQILHSPAVEGSQVEFLCMSLANPLPTNYTWYHNGKEMQGRTEEKVHIPKILPWHAGTYSCVAENILGTGQRGPGAELDVQYPPKKVTTVIQNPMPIREGDTVTLSCNYNSSNPSVTRYEWKPHGAWEEPSLGVLKIQNVGWDNTTIACAACNSWCSWASPVALNVQYAPRDVRVRKIKPLSEIHSGNSVSLQCDFSSSHPKEVQFFWEKNGRLLGKESQLNFDSISPEDAGSYSCWVNNSIGQTASKAWTLEVLYAPRRLRVSMSPGDQVMEGKSATLTCESDANPPVSHYTWFDWNNQSLPYHSQKLRLEPVKVQHSGAYWCQGTNSVGKGRSPLSTLTVYYSPETIGRRVAVGLGSCLAILILAICGLKLQRRWKRTQSQQGLQENSSGQSFFVRNKKVRRAPLSEGPHSLGCYNPMMEDGISYTTLRFPEMNIPRTGDAESSEMQRPPPDCDDTVTYSALHKRQVGDYENVIPDFPEDEGIHYSELIQFGVGERPQAQENVDYVILKH

SEQ ID NO: 806801 - protein, 843 aa, Homo sapiens
TRRHAETVLEYLAFSDSSKWVFEHPETLYAWEGACVWIPCTYRALDGDLESFILFHNPEYNKNTSKFDGTRLYESTKDGKVPSEQKRVQFLGDKNKNCTLSIHPVHLNDSGQLGLRMESKTEKWMERIHLNVSERPFPPHIQLPPEIQESQEVTLTCLLNFSCYGYPIQLQWLLEGVPMRQAAVTSTSLTIKSVFTRSELKFSPQWSHHGKIVTCQLQDADGKFLSNDTVQLNVKHTPKLEIKVTPSDAIVREGDSVTMTCEVSSSNPEYTTVSWLKDGTSLKKQNTFTLNLREVTKDQSGKYCCQVSNDVGPGRSEEVFLQVQYAPEPSTVQILHSPAVEGSQVEFLCMSLANPLPTNYTWYHNGKEMQGRTEEKVHIPKILPWHAGTYSCVAENILGTGQRGPGAELDVQYPPKKVTTVIQNPMPIREGDTVTLSCNYNSSNPSVTRYEWKPHGAWEEPSLGVLKIQNVGWDNTTIACAACNSWCSWASPVALNVQYAPRDVRVRKIKPLSEIHSGNSVSLQCDFSSSHPKEVQFFWEKNGRLLGKESQLNFDSISPEDAGSYSCWVNNSIGQTASKAWTLEVLYAPRRLRVSMSPGDQVMEGKSATLTCESDANPPVSHYTWFDWNNQSLPYHSQKLRLEPVKVQHSGAYWCQGTNSVGKGRSPLSTLTVYYSPETIGRRVAVGLGSCLAILILAICGLKLQRRWKRTQSQQGLQENSSGQSFFVRNKKVRRAPLSEGPHSLGCYNPMMEDGISYTTLRFPEMNIPRTGDAESSEMQRPPPDCDDTVTYSALHKRQVGDYENVIPDFPEDEGIHYSELIQFGVGERPQAQENVDYVILKH

SEQ ID NO: 806802 - protein, 857 aa, Homo sapiens
YFCLLLSDAARVPEEGRHAETVLEYLAFSDSSKWVFEHPETLYAWEGACVWIPCTYRALDGDLESFILFHNPEYNKNTSKFDGTRLYESTKDGKVPSEQKRVQFLGDKNKNCTLSIHPVHLNDSGQLGLRMESKTEKWMERIHLNVSERPFPPHIQLPPEIQESQEVTLTCLLNFSCYGYPIQLQWLLEGVPMRQAAVTSTSLTIKSVFTRSELKFSPQWSHHGKIVTCQLQDADGKFLSNDTVQLNVKHTPKLEIKVTPSDAIVREGDSVTMTCEVSSSNPEYTTVSWLKDGTSLKKQNTFTLNLREVTKDQSGKYCCQVSNDVGPGRSEEVFLQVQYAPEPSTVQILHSPAVEGSQVEFLCMSLANPLPTNYTWYHNGKEMQGRTEEKVHIPKILPWHAGTYSCVAENILGTGQRGPGAELDVQYPPKKVTTVIQNPMPIREGDTVTLSCNYNSSNPSVTRYEWKPHGAWEEPSLGVLKIQNVGWDNTTIACAACNSWCSWASPVALNVQYAPRDVRVRKIKPLSEIHSGNSVSLQCDFSSSHPKEVQFFWEKNGRLLGKESQLNFDSISPEDAGSYSCWVNNSIGQTASKAWTLEVLYAPRRLRVSMSPGDQVMEGKSATLTCESDANPPVSHYTWFDWNNQSLPYHSQKLRLEPVKVQHSGAYWCQGTNSVGKGRSPLSTLTVYYSPETIGRRVAVGLGSCLAILILAICGLKLQRRWKRTQSQQGLQENSSGQSFFVRNKKVRRAPLSEGPHSLGCYNPMMEDGISYTTLRFPEMNIPRTGDAESSEMQRPPPDCDDTVTYSALHKRQVGDYENVIPDFPEDEGIHYSELIQFGVGERPQAQENVDYVILKH

SEQ ID NO: 806803 - protein, 670 aa, Homo sapiens; identical to SEQ ID NO: 806798

SEQ ID NO: 806804 - protein, 835 aa, Homo sapiens
CTPIRDVLKREDTRKQACTQTRHHASPRPLAPAPGALDGDLESFILFHNPEYNKNTSKFDGTRLYESTKDGKVPSEQKRVQFLGDKNKNCTLSIHPVHLNDSGQLGLRMESKTEKWMERIHLNVSERPFPPHIQLPPEIQESQEVTLTCLLNFSCYGYPIQLQWLLEGVPMRQAAVTSTSLTIKSVFTRSELKFSPQWSHHGKIVTCQLQDADGKFLSNDTVQLNVKHTPKLEIKVTPSDAIVREGDSVTMTCEVSSSNPEYTTVSWLKDGTSLKKQNTFTLNLREVTKDQSGKYCCQVSNDVGPGRSEEVFLQVQYAPEPSTVQILHSPAVEGSQVEFLCMSLANPLPTNYTWYHNGKEMQGRTEEKVHIPKILPWHAGTYSCVAENILGTGQRGPGAELDVQYPPKKVTTVIQNPMPIREGDTVTLSCNYNSSNPSVTRYEWKPHGAWEEPSLGVLKIQNVGWDNTTIACAACNSWCSWASPVALNVQYAPRDVRVRKIKPLSEIHSGNSVSLQCDFSSSHPKEVQFFWEKNGRLLGKESQLNFDSISPEDAGSYSCWVNNSIGQTASKAWTLEVLYAPRRLRVSMSPGDQVMEGKSATLTCESDANPPVSHYTWFDWNNQSLPYHSQKLRLEPVKVQHSGAYWCQGTNSVGKGRSPLSTLTVYYSPETIGRRVAVGLGSCLAILILAICGLKLQRRWKRTQSQQGLQENSSGQSFFVRNKKVRRAPLSEGPHSLGCYNPMMEDGISYTTLRFPEMNIPRTGDAESSEMQRPPPDCDDTVTYSALHKRQVGDYENVIPDFPEDEGIHYSELIQFGVGERPQAQENVDYVILKH

SEQ ID NO: 806805 - protein, 860 aa, Homo sapiens
YFCLLLSDAARVPEEGRHAETGLHPDTTPCISSAPGSCSWHPETLYAWEGACVWIPCTYRALDGDLESFILFHNPEYNKNTSKFDGTRLYESTKDGKVPSEQKRVQFLGDKNKNCTLSIHPVHLNDSGQLGLRMESKTEKWMERIHLNVSERPFPPHIQLPPEIQESQEVTLTCLLNFSCYGYPIQLQWLLEGVPMRQAAVTSTSLTIKSVFTRSELKFSPQWSHHGKIVTCQLQDADGKFLSNDTVQLNVKHTPKLEIKVTPSDAIVREGDSVTMTCEVSSSNPEYTTVSWLKDGTSLKKQNTFTLNLREVTKDQSGKYCCQVSNDVGPGRSEEVFLQVQYAPEPSTVQILHSPAVEGSQVEFLCMSLANPLPTNYTWYHNGKEMQGRTEEKVHIPKILPWHAGTYSCVAENILGTGQRGPGAELDVQYPPKKVTTVIQNPMPIREGDTVTLSCNYNSSNPSVTRYEWKPHGAWEEPSLGVLKIQNVGWDNTTIACAACNSWCSWASPVALNVQYAPRDVRVRKIKPLSEIHSGNSVSLQCDFSSSHPKEVQFFWEKNGRLLGKESQLNFDSISPEDAGSYSCWVNNSIGQTASKAWTLEVLYAPRRLRVSMSPGDQVMEGKSATLTCESDANPPVSHYTWFDWNNQSLPYHSQKLRLEPVKVQHSGAYWCQGTNSVGKGRSPLSTLTVYYSPETIGRRVAVGLGSCLAILILAICGLKLQRRWKRTQSQQGLQENSSGQSFFVRNKKVRRAPLSEGPHSLGCYNPMMEDGISYTTLRFPEMNIPRTGDAESSEMQRPPPDCDDTVTYSALHKRQVGDYENVIPDFPEDEGIHYSELIQFGVGERPQAQENVDYVILKH

SEQ ID NO: 806806 - protein, 641 aa, Homo sapiens
MSLWSHHGKIVTCQLQDADGKFLSNDTVQLNVKHTPKLEIKVTPSDAIVREGDSVTMTCEVSSSNPEYTTVSWLKDGTSLKKQNTFTLNLREVTKDQSGKYCCQVSNDVGPGRSEEVFLQVQYAPEPSTVQILHSPAVEGSQVEFLCMSLANPLPTNYTWYHNGKEMQGRTEEKVHIPKILPWHAGTYSCVAENILGTGQRGPGAELDVQYPPKKVTTVIQNPMPIREGDTVTLSCNYNSSNPSVTRYEWKPHGAWEEPSLGVLKIQNVGWDNTTIACAACNSWCSWASPVALNVQYAPRDVRVRKIKPLSEIHSGNSVSLQCDFSSSHPKEVQFFWEKNGRLLGKESQLNFDSISPEDAGSYSCWVNNSIGQTASKAWTLEVLYAPRRLRVSMSPGDQVMEGKSATLTCESDANPPVSHYTWFDWNNQSLPYHSQKLRLEPVKVQHSGAYWCQGTNSVGKGRSPLSTLTVYYSPETIGRRVAVGLGSCLAILILAICGLKLQRRWKRTQSQQGLQENSSGQSFFVRNKKVRRAPLSEGPHSLGCYNPMMEDGISYTTLRFPEMNIPRTGDAESSEMQRPPPDCDDTVTYSALHKRQVGDYENVIPDFPEDEGIHYSELIQFGVGERPQAQENVDYVILKH

SEQ ID NO: 806807 - protein, 665 aa, Homo sapiens
MRQAAVTSTSLTIKSVFTRSELKFSPQWSHHGKIVTCQLQDADGKFLSNDTVQLNVKHTPKLEIKVTPSDAIVREGDSVTMTCEVSSSNPEYTTVSWLKDGTSLKKQNTFTLNLREVTKDQSGKYCCQVSNDVGPGRSEEVFLQVQYAPEPSTVQILHSPAVEGSQVEFLCMSLANPLPTNYTWYHNGKEMQGRTEEKVHIPKILPWHAGTYSCVAENILGTGQRGPGAELDVQYPPKKVTTVIQNPMPIREGDTVTLSCNYNSSNPSVTRYEWKPHGAWEEPSLGVLKIQNVGWDNTTIACAACNSWCSWASPVALNVQYAPRDVRVRKIKPLSEIHSGNSVSLQCDFSSSHPKEVQFFWEKNGRLLGKESQLNFDSISPEDAGSYSCWVNNSIGQTASKAWTLEVLYAPRRLRVSMSPGDQVMEGKSATLTCESDANPPVSHYTWFDWNNQSLPYHSQKLRLEPVKVQHSGAYWCQGTNSVGKGRSPLSTLTVYYSPETIGRRVAVGLGSCLAILILAICGLKLQRRWKRTQSQQGLQENSSGQSFFVRNKKVRRAPLSEGPHSLGCYNPMMEDGISYTTLRFPEMNIPRTGDAESSEMQRPPPDCDDTVTYSALHKRQVGDYENVIPDFPEDEGIHYSELIQFGVGERPQAQENVDYVILKH

SEQ ID NO: 806808 - protein, 720 aa, Homo sapiens
MVGQEAGDGAGLWIPRAEVRVWDSMQSTEPARGFQQDWRGLVDGVRNPACCWWRPRSRGSGRGKLRAELGGCDHHLGEGTGRPWLCQNKSTFHTLHPLRIPRPLPDCPSAPPDTPKLEIKVTPSDAIVREGDSVTMTCEVSSSNPEYTTVSWLKDGTSLKKQNTFTLNLREVTKDQSGKYCCQVSNDVGPGRSEEVFLQVQYAPEPSTVQILHSPAVEGSQVEFLCMSLANPLPTNYTWYHNGKEMQGRTEEKVHIPKILPWHAGTYSCVAENILGTGQRGPGAELDVQYPPKKVTTVIQNPMPIREGDTVTLSCNYNSSNPSVTRYEWKPHGAWEEPSLGVLKIQNVGWDNTTIACAACNSWCSWASPVALNVQYAPRDVRVRKIKPLSEIHSGNSVSLQCDFSSSHPKEVQFFWEKNGRLLGKESQLNFDSISPEDAGSYSCWVNNSIGQTASKAWTLEVLYAPRRLRVSMSPGDQVMEGKSATLTCESDANPPVSHYTWFDWNNQSLPYHSQKLRLEPVKVQHSGAYWCQGTNSVGKGRSPLSTLTVYYSPETIGRRVAVGLGSCLAILILAICGLKLQRRWKRTQSQQGLQENSSGQSFFVRNKKVRRAPLSEGPHSLGCYNPMMEDGISYTTLRFPEMNIPRTGDAESSEMQRPPPDCDDTVTYSALHKRQVGDYENVIPDFPEDEGIHYSELIQFGVGERPQAQENVDYVILKH

SEQ ID NO: 806809 - protein, 680 aa, Homo sapiens
YFCLLLSDAARVPEEGRHAETVLEYLAFSDSSKWVFEHPETLYAWEGACVWIPCTYRALDGDLESFILFHNPEYNKNTSKFDGTRLYESTKDGKVPSEQKRVQFLGDKNKNCTLSIHPVHLNDSGQLGLRMESKTEKWMERIHLNVSERPFPPHIQLPPEIQESQEVTLTCLLNFSCYGYPIQLQWLLEGVPMRQAAVTSTSLTIKSVFTRSELKFSPQWSHHGKIVTCQLQDADGKFLSNDTVQLNVKHPPKKVTTVIQNPMPIREGDTVTLSCNYNSSNPSVTRYEWKPHGAWEEPSLGVLKIQNVGWDNTTIACAACNSWCSWASPVALNVQYAPRDVRVRKIKPLSEIHSGNSVSLQCDFSSSHPKEVQFFWEKNGRLLGKESQLNFDSISPEDAGSYSCWVNNSIGQTASKAWTLEVLYAPRRLRVSMSPGDQVMEGKSATLTCESDANPPVSHYTWFDWNNQSLPYHSQKLRLEPVKVQHSGAYWCQGTNSVGKGRSPLSTLTVYYSPETIGRRVAVGLGSCLAILILAICGLKLQRRWKRTQSQQGLQENSSGQSFFVRNKKVRRAPLSEGPHSLGCYNPMMEDGISYTTLRFPEMNIPRTGDAESSEMQRPPPDCDDTVTYSALHKRQVGDYENVIPDFPEDEGIHYSELIQFGVGERPQAQENVDYVILKH

SEQ ID NO: 806810 - protein, 499 aa, Homo sapiens
TGQSSVLPCISVRHCGTTCNLLEEMQGRTEEKVHIPKILPWHAGTYSCVAENILGTGQRGPGAELDVQYPPKKVTTVIQNPMPIREGDTVTLSCNYNSSNPSVTRYEWKPHGAWEEPSLGVLKIQNVGWDNTTIACAACNSWCSWASPVALNVQYAPRDVRVRKIKPLSEIHSGNSVSLQCDFSSSHPKEVQFFWEKNGRLLGKESQLNFDSISPEDAGSYSCWVNNSIGQTASKAWTLEVLYAPRRLRVSMSPGDQVMEGKSATLTCESDANPPVSHYTWFDWNNQSLPYHSQKLRLEPVKVQHSGAYWCQGTNSVGKGRSPLSTLTVYYSPETIGRRVAVGLGSCLAILILAICGLKLQRRWKRTQSQQGLQENSSGQSFFVRNKKVRRAPLSEGPHSLGCYNPMMEDGISYTTLRFPEMNIPRTGDAESSEMQRPPPDCDDTVTYSALHKRQVGDYENVIPDFPEDEGIHYSELIQFGVGERPQAQENVDYVILKH

SEQ ID NO: 806811 - protein, 670 aa, Homo sapiens; identical to SEQ ID NO: 806798

SEQ ID NO: 806812 - protein, 847 aa, Homo sapiens; identical to SEQ ID NO: 806794

SEQ ID NO: 806813 - protein, 442 aa, Homo sapiens
PTSPTAELDVQYPPKKVTTVIQNPMPIREGDTVTLSCNYNSSNPSVTRYEWKPHGAWEEPSLGVLKIQNVGWDNTTIACAACNSWCSWASPVALNVQYAPRDVRVRKIKPLSEIHSGNSVSLQCDFSSSHPKEVQFFWEKNGRLLGKESQLNFDSISPEDAGSYSCWVNNSIGQTASKAWTLEVLYAPRRLRVSMSPGDQVMEGKSATLTCESDANPPVSHYTWFDWNNQSLPYHSQKLRLEPVKVQHSGAYWCQGTNSVGKGRSPLSTLTVYYSPETIGRRVAVGLGSCLAILILAICGLKLQRRWKRTQSQQGLQENSSGQSFFVRNKKVRRAPLSEGPHSLGCYNPMMEDGISYTTLRFPEMNIPRTGDAESSEMQRPPPDCDDTVTYSALHKRQVGDYENVIPDFPEDEGIHYSELIQFGVGERPQAQENVDYVILKH

SEQ ID NO: 806814 - protein, 448 aa, Homo sapiens
GTGPESLGSEEGRHAETDPPKKVTTVIQNPMPIREGDTVTLSCNYNSSNPSVTRYEWKPHGAWEEPSLGVLKIQNVGWDNTTIACAACNSWCSWASPVALNVQYAPRDVRVRKIKPLSEIHSGNSVSLQCDFSSSHPKEVQFFWEKNGRLLGKESQLNFDSISPEDAGSYSCWVNNSIGQTASKAWTLEVLYAPRRLRVSMSPGDQVMEGKSATLTCESDANPPVSHYTWFDWNNQSLPYHSQKLRLEPVKVQHSGAYWCQGTNSVGKGRSPLSTLTVYYSPETIGRRVAVGLGSCLAILILAICGLKLQRRWKRTQSQQGLQENSSGQSFFVRNKKVRRAPLSEGPHSLGCYNPMMEDGISYTTLRFPEMNIPRTGDAESSEMQRPPPDCDDTVTYSALHKRQVGDYENVIPDFPEDEGIHYSELIQFGVGERPQAQENVDYVILKH

SEQ ID NO: 806815 - protein, 390 aa, Homo sapiens
YFCLLLSDAARVPEEGRHAETDPPKKVTTVIQNPMPIREGDTVTLSCNYNSSNPSVTRYEWKPHGAWEEPSLGVLKIQNVGWDNTTIACAACNSWCSWASPVALNVQYAGSYSCWVNNSIGQTASKAWTLEVLYAPRRLRVSMSPGDQVMEGKSATLTCESDANPPVSHYTWFDWNNQSLPYHSQKLRLEPVKVQHSGAYWCQGTNSVGKGRSPLSTLTVYYSPETIGRRVAVGLGSCLAILILAICGLKLQRRWKRTQSQQGLQENSSGQSFFVRNKKVRRAPLSEGPHSLGCYNPMMEDGISYTTLRFPEMNIPRTGDAESSEMQRPPPDCDDTVTYSALHKRQVGDYENVIPDFPEDEGIHYSELIQFGVGERPQAQENVDYVILKH

SEQ ID NO: 806816 - protein, 548 aa, Homo sapiens
GTGPESLGSEEGRHAETDPPKKVTTVIQNPMPIREGDTVTLSCNYNSSNPSVTRYEWKPHGAWEEPSLGVLKIQNVGWDNTTIACAACNSWCSWASPVALNVQCESLGKAGGSGRWPGWDEGMKATRPEPGPVSSTELRDRSLASGPRGGEAWGQQKGQGAERSAWDPCPPDAPRDVRVRKIKPLSEIHSGNSVSLQCDFSSSHPKEVQFFWEKNGRLLGKESQLNFDSISPEDAGSYSCWVNNSIGQTASKAWTLEVLCELRAGGWEWSREGTSGLPGSDFAPPPPARHADAPRRLRVSMSPGDQVMEGKSATLTCESDANPPVSHYTWFDWNNQSLPYHSQKLRLEPVKVQHSGAYWCQGTNSVGKGRSPLSTLTVYYSPETIGRRVAVGLGSCLAILILAICGLKLQRRWKRTQSQQGLQENSSGQSFFVRNKKVRRAPLSEGPHSLGCYNPMMEDGISYTTLRFPEMNIPRTGDAESSEMQRPPPDCDDTVTYSALHKRQVGDYENVIPDFPEDEGIHYSELIQFGVGERPQAQENVDYVILKH

SEQ ID NO: 806817 - protein, 185 aa, Homo sapiens
GSLNALAEGPVVGLTIYSPETIGRRVAVGLGSCLAILILAICGLKLQRRWKRTQSQQGLQENSSGQSFFVRNKKVRRAPLSEGPHSLGCYNPMMEDGISYTTLRFPEMNIPRTGDAESSEMQRPPPDCDDTVTYSALHKRQVGDYENVIPDFPEDEGIHYSELIQFGVGERPQAQENVDYVILKH

SEQ ID NO: 806818 - protein, 516 aa, Homo sapiens
MHLLGPWLLLLVLEYLAFSDSSKWVFEHPETLYAWEGACVWIPCTYRALDGDLESFILFHNPEYNKNTSKFDGTRLYESTKDGKVPSEQKRVQFLGDKNKNCTLSIHPVHLNDSGQLGLRMESKTEKWMERIHLNVSERPFPPHIQLPPEIQESQEVTLTCLLNFSCYGYPIQLQWLLEGVPMRQAAVTSTSLTIKSVFTRSELKFSPQWSHHGKIVTCQLQDADGKFLSNDTVQLNVKHTPKLEIKVTPSDAIVREGDSVTMTCEVSSSNPEYTTVSWLKDGTSLKKQNTFTLNLREVTKDQSGKYCCQVSNDVGPGRSEEVFLQVQYAPEPSTVQILHSPAVEGSQVEFLCMSLANPLPTNYTWYHNGKEMQGRTEEKVHIPKILPWHAGTYSCVAENILGTGQRGPGAELDVQYPPKKVTTVIQNPMPIREGDTVTLSCNYNSSNPSVTRYEWKPHGAWEEPSLGVLKIQNVGWDNTTIACAACNSCCLCPSWDLLVIIFPSLLHLSGPLPLI

SEQ ID NO: 806819 - protein, 466 aa, Homo sapiens
MHLLGPWLLLLVLEYLAFSDSSKWVFEHPETLYAWEGACVWIPCTYRALDGDLESFILFHNPEYNKNTSKFDGTRLYESTKDGKVPSEQKRVQFLGDKNKNCTLSIHPVHLNDSGQLGLRMESKTEKWMERIHLNVSERPFPPHIQLPPEIQESQEVTLTCLLNFSCYGYPIQLQWLLEGVPMRQAAVTSTSLTIKSVFTRSELKFSPQWSHHGKIVTCQLQDADGKFLSNDTVQLNVKHTPKLEIKVTPSDAIVREGDSVTMTCEVSSSNPEYTTVSWLKDGTSLKKQNTFTLNLREVTKDQSGKYCCQVSNDVGPGRSEEVFLQVQYAPEPSTVQILHSPAVEGSQVEFLCMSVRRAPLSEGPHSLGCYNPMMEDGISYTTLRFPEMNIPRTGDAESSEMQRPPPDCDDTVTYSALHKRQVGDYENVIPDFPEDEGIHYSELIQFGVGERPQAQENVDYVILKH

SEQ ID NO: 806820 - protein, 1753 aa, Homo sapiens
MAAAAGGPCVRSSRELWTILLGRSALRELSQIEAELNKHWRRLLEGLSYYKPPSPSSAEKVKANKDVASPLKELGLRISKFLGLDEEQSVQLLQCYLQEDYRGTRDSVKTVLQDERQSQALILKIADYYYEERTCILRCVLHLLTYFQDERHPYRVEYADCVDKLEKELVSKYRQQFEELYKTEAPTWETHGNLMTERQVSRWFVQCLREQSMLLEIIFLYYAYFEMAPSDLLVLTKMFKEQGFGSRQTNRHLVDETMDPFVDRIGYFSALILVEGMDIESLHKCALDDRRELHQFAQDGLICQDMDCLMLTFGDIPHHAPVLLAWALLRHTLNPEETSSVVRKIGGTAIQLNVFQYLTRLLQSLASGGNDCTTSTACMCVYGLLSFVLTSLELHTLGNQQDIIDTACEVLADPSLPELFWGTEPTSGLGIILDSVCGMFPHLLSPLLQLLRALVSGKSTAKKVYSFLDKMSFYNELYKHKPHDVISHEDGTLWRRQTPKLLYPLGGQTNLRIPQGTVGQVMLDDRAYLVRWEYSYSSWTLFTCEIEMLLHVVSTADVIQHCQRVKPIIDLVHKVISTDLSIADCLLPITSRIYMLLQRLTTVISPPVDVIASCVNCLTVLAARNPAKVWTDLRHTGFLPFVAHPVSSLSQMISAEGMNAGGYGNLLMNSEQPQGEYGVTIAFLRLITTLVKGQLGSTQSQGLVPCVMFVLKEMLPSYHKWRYNSHGVREQIGCLILELIHAILNLCHETDLHSSHTPSLQFLCICSLAYTEAGQTVINIMGIGVDTIDMVMAAQPRSDGAEGQGQGQLLIKTVKLAFSVTNNVIRLKPPSNVVSPLEQALSQHGAHGNNLIAVLAKYIYHKHDPALPRLAIQLLKRLATVAPMSVYACLGNDAAAIRDAFLTRLQSKIEDMRIKVMILEFLTVAVETQPGLIELFLNLEVKDGSDGSKEFSLGMWSCLHAVLELIDSQQQDRYWCPPLLHRAAIAFLHALWQDRRDSAMLVLRTKPKFWENLTSPLFGTLSPPSETSEPSILETCALIMKIICLEIYYVVKGSLDQSLKDTLKKFSIEKRFAYWSGYVKSLAVHVAETEGSSCTSLLEYQMLVSAWRMLLIIATTHADIMHLTDSVVRRQLFLDVLDGTKALLLVPASVNCLRLGSMKCTLLLILLRQWKSILSRELGSVDEILGPLTEILEGVLQADQQLMEKTKAKVFSAFITVLQMKEMKVSDIPQYSQLVLNVCETLQEEVIALFDQTRHSLALGSATEDKDSMETDDCSRSRHRDQRDGVCVLGLHLAKELCEVDEDGDSWLQVTRRLPILPTLLTTLEVSLRMKQNLHFTEATLHLLLTLARTQQGATAVAGAGITQSICLPLLSVYQLSTNGTAQTPSASRKSLDAPSWPGVYRLSMSLMEQLLKTLRYNFLPEALDFVGVHQERTLQCLNAVRTVQSLACLEEADHTVGFILQLSNFMKEWHFHLPQLMRDIQVNLGYLCQACTSLLHSRKMLQHYLQNKNGDGLPSAVAQRVQRPPSAASAAPSSSKQPAADTEASEQQALHTVQYGLLKILSKTLAALRHFTPDVCQILLDQSLDLAEYNFLFALSFTTPTFDSEVAPSFGTLLATVNVALNMLGELDKKKEPLTQAVGLSTQAEGTRTLKSLLMFTMENCFYLLISQAMRYLRDPAVHPRDKQRMKQELSSELSTLLSSLSRYFRRGAPSSPATGVLPSPQGKSTSLSKASPESQEPLIQLVQAFVRHMQR

SEQ ID NO: 806821 - protein, 88 aa, Homo sapiens
MAAAAGGPCVRCGAGRMDRGGCEARCQSRAEAGRELEAGCGDSGRANPGWMDGHRDGRRLRPNGPRARGSEESSSGGGPALHPFPPRS

SEQ ID NO: 806822 - protein, 1742 aa, Homo sapiens
MAAAAGGPCVRSSRELWTILLGRSALRELSQIEAELNKHWRRLLEGLSYYKPPSPSSAEKVKANKDVASPLKELGLRISKFLGLDEEQSVQLLQCYLQEDYRGTRDSVKTVLQDERQSQALILKIADYYYEERTCILRCVLHLLTYFQDERHPYRVEYADCVDKLEKELVSKYRQQFEELYKTEAPTWETHGNLMTERQVSRWFVQCLREQSMLLEIIFLYYAYFEMAPSDLLVLTKMFKEQGFGSRQTNRHLVDETMDPFVDRIGYFSALILVEGMDIESLHKCALDDRRELHQFAQDGLICQDMDCLMLTFGDIPHHAPVLLAWALLRHTLNPEETSSVVRKIGGTAIQLNVFQYLTRLLQSLASGGNDCTTSTACMCVYGLLSFVLTSLELHTLGNQQDIIDTACEVLADPSLPELFWGTEPTSGLGIILDSVCGMFPHLLSPLLQLLRALVSGKSTAKKVYSFLDKMSFYNELYKHKPHDVISHEDGTLWRRQTPKLLYPLGGQTNLRIPQGTVGQVMLDDRAYLVRWEYSYSSWTLFTCEIEMLLHVVSTADVIQHCQRVKPIIDLVHKVISTDLSIADCLLPITSRIYMLLQRLTTVISPPVDVIASCVNCLTVLAARNPAKVWTDLRHTGFLPFVAHPVSSLSQMISAEGMNAGGYGNLLMNSEQPQGEYGVTIAFLRLITTLVKGQLGSTQSQGLVPCVMFVLKEMLPSYHKWRYNSHGVREQIGCLILELIHAILNLCHETDLHSSHTPSLQFLCICSLAYTEAGQTVINIMGIGVDTIDMVMAAQPRSDGAEGQGQGQLLIKTVKLAFSVTNNVIRLKPPSNVVSPLEQALSQHAKYIYHKHDPALPRLAIQLLKRLATVAPMSVYACLGNDAAAIRDAFLTRLQSKIEDMRIKVMILEFLTVAVETQPGLIELFLNLEVKDGSDGSKEFSLGMWSCLHAVLELIDSQQQDRYWCPPLLHRAAIAFLHALWQDRRDSAMLVLRTKPKFWENLTSPLFGTLSPPSETSEPSILETCALIMKIICLEIYYVVKGSLDQSLKDTLKKFSIEKRFAYWSGYVKSLAVHVAETEGSSCTSLLEYQMLVSAWRMLLIIATTHADIMHLTDSVVRRQLFLDVLDGTKALLLVPASVNCLRLGSMKCTLLLILLRQWKSILSRELGSVDEILGPLTEILEGVLQADQQLMEKTKAKVFSAFITVLQMKEMKVSDIPQYSQLVLNVCETLQEEVIALFDQTRHSLALGSATEDKDSMETDDCSRSRHRDQRDGVCVLGLHLAKELCEVDEDGDSWLQVTRRLPILPTLLTTLEVSLRMKQNLHFTEATLHLLLTLARTQQGATAVAGAGITQSICLPLLSVYQLSTNGTAQTPSASRKSLDAPSWPGVYRLSMSLMEQLLKTLRYNFLPEALDFVGVHQERTLQCLNAVRTVQSLACLEEADHTVGFILQLSNFMKEWHFHLPQLMRDIQVNLGYLCQACTSLLHSRKMLQHYLQNKNGDGLPSAVAQRVQRPPSAASAAPSSSKQPAADTEASEQQALHTVQYGLLKILSKTLAALRHFTPDVCQILLDQSLDLAEYNFLFALSFTTPTFDSEVAPSFGTLLATVNVALNMLGELDKKKEPLTQAVGLSTQAEGTRTLKSLLMFTMENCFYLLISQAMRYLRDPAVHPRDKQRMKQELSSELSTLLSSLSRYFRRGAPSSPATGVLPSPQGKSTSLSKASPESQEPLIQLVQAFVRHMQR

SEQ ID NO: 806823 - protein, 870 aa, Homo sapiens
MSVYACLGNDAAAIRDAFLTRLQSKIEDMRIKVMILEFLTVAVETQPGLIELFLNLEVKDGSDGSKEFSLGMWSCLHAVLELIDSQQQDRYWCPPLLHRAAIAFLHALWQDRRDSAMLVLRTKPKFWENLTSPLFGTLSPPSETSEPSILETCALIMKIICLEIYYVVKGSLDQSLKDTLKKFSIEKRFAYWSGYVKSLAVHVAETEGSSCTSLLEYQMLVSAWRMLLIIATTHADIMHLTDSVVRRQLFLDVLDGTKALLLVPASVNCLRLGSMKCTLLLILLRQWKSILSRELGSVDEILGPLTEILEGVLQADQQLMEKTKAKVFSAFITVLQMKEMKVSDIPQYSQLVLNVCETLQEEVIALFDQTRHSLALGSATEDKDSMETDDCSRSRHRDQRDGVCVLGLHLAKELCEVDEDGDSWLQVTRRLPILPTLLTTLEVSLRMKQNLHFTEATLHLLLTLARTQQGATAVAGAGITQSICLPLLSVYQLSTNGTAQTPSASRKSLDAPSWPGVYRLSMSLMEQLLKTLRYNFLPEALDFVGVHQERTLQCLNAVRTVQSLACLEEADHTVGFILQLSNFMKEWHFHLPQLMRDIQVNLGYLCQACTSLLHSRKMLQHYLQNKNGDGLPSAVAQRVQRPPSAASAAPSSSKQPAADTEASEQQALHTVQYGLLKILSKTLAALRHFTPDVCQILLDQSLDLAEYNFLFALSFTTPTFDSEVAPSFGTLLATVNVALNMLGELDKKKEPLTQAVGLSTQAEGTRTLKSLLMFTMENCFYLLISQAMRYLRDPAVHPRDKQRMKQELSSELSTLLSSLSRYFRRGAPSSPATGVLPSPQGKSTSLSKASPESQEPLIQLVQAFVRHMQR

SEQ ID NO: 806824 - protein, 799 aa, Homo sapiens
MWSCLHAVLELIDSQQQDRYWCPPLLHRAAIAFLHALWQDRRDSAMLVLRTKPKFWENLTSPLFGTLSPPSETSEPSILETCALIMKIICLEIYYVVKGSLDQSLKDTLKKFSIEKRFAYWSGYVKSLAVHVAETEGSSCTSLLEYQMLVSAWRMLLIIATTHADIMHLTDSVVRRQLFLDVLDGTKALLLVPASVNCLRLGSMKCTLLLILLRQWKSILSRELGSVDEILGPLTEILEGVLQADQQLMEKTKAKVFSAFITVLQMKEMKVSDIPQYSQLVLNVCETLQEEVIALFDQTRHSLALGSATEDKDSMETDDCSRSRHRDQRDGVCVLGLHLAKELCEVDEDGDSWLQVTRRLPILPTLLTTLEVSLRMKQNLHFTEATLHLLLTLARTQQGATAVAGAGITQSICLPLLSVYQLSTNGTAQTPSASRKSLDAPSWPGVYRLSMSLMEQLLKTLRYNFLPEALDFVGVHQERTLQCLNAVRTVQSLACLEEADHTVGFILQLSNFMKEWHFHLPQLMRDIQVNLGYLCQACTSLLHSRKMLQHYLQNKNGDGLPSAVAQRVQRPPSAASAAPSSSKQPAADTEASEQQALHTVQYGLLKILSKTLAALRHFTPDVCQILLDQSLDLAEYNFLFALSFTTPTFDSEVAPSFGTLLATVNVALNMLGELDKKKEPLTQAVGLSTQAEGTRTLKSLLMFTMENCFYLLISQAMRYLRDPAVHPRDKQRMKQELSSELSTLLSSLSRYFRRGAPSSPATGVLPSPQGKSTSLSKASPESQEPLIQLVQAFVRHMQR

SEQ ID NO: 806825 - protein, 757 aa, Homo sapiens
MISNIYFLFRPKFWENLTSPLFGTLSPPSETSEPSILETCALIMKIICLEIYYVVKGSLDQSLKDTLKKFSIEKRFAYWSGYVKSLAVHVAETEGSSCTSLLEYQMLVSAWRMLLIIATTHADIMHLTDSVVRRQLFLDVLDGTKALLLVPASVNCLRLGSMKCTLLLILLRQWKSILSRELGSVDEILGPLTEILEGVLQADQQLMEKTKAKVFSAFITVLQMKEMKVSDIPQYSQLVLNVCETLQEEVIALFDQTRHSLALGSATEDKDSMETDDCSRSRHRDQRDGVCVLGLHLAKELCEVDEDGDSWLQVTRRLPILPTLLTTLEVSLRMKQNLHFTEATLHLLLTLARTQQGATAVAGAGITQSICLPLLSVYQLSTNGTAQTPSASRKSLDAPSWPGVYRLSMSLMEQLLKTLRYNFLPEALDFVGVHQERTLQCLNAVRTVQSLACLEEADHTVGFILQLSNFMKEWHFHLPQLMRDIQVNLGYLCQACTSLLHSRKMLQHYLQNKNGDGLPSAVAQRVQRPPSAASAAPSSSKQPAADTEASEQQALHTVQYGLLKILSKTLAALRHFTPDVCQILLDQSLDLAEYNFLFALSFTTPTFDSEVAPSFGTLLATVNVALNMLGELDKKKEPLTQAVGLSTQAEGTRTLKSLLMFTMENCFYLLISQAMRYLRDPAVHPRDKQRMKQELSSELSTLLSSLSRYFRRGAPSSPATGVLPSPQGKSTSLSKASPESQEPLIQLVQAFVRHMQR

SEQ ID NO: 806826 - protein, 1753 aa, Homo sapiens; identical to SEQ ID NO: 806820

SEQ ID NO: 806827 - protein, 1573 aa, Homo sapiens
MAAAAGGPCVRSSRELWTILLGRSALRELSQIEAELNKHWRRLLEGLSYYKPPSPSSAEKVKANKDVASPLKELGLRISKFLGLDEEQSVQLLQCYLQEDYRGTRDSVKTVLQDERQSQALILKIADYYYEERTCILRCVLHLLTYFQDERHPYRVEYADCVDKLEKELVSKYRQQFEELYKTEAPTWETHGNLMTERQVSRWFVQCLREQSMLLEIIFLYYAYFEMAPSDLLVLTKMFKEQGFGSRQTNRHLVDETMDPFVDRIGYFSALILVEGMDIESLHKCALDDRRELHQFAQDGLICQDMDCLMLTFGDIPHHAPVLLAWALLRHTLNPEETSSVVRKIGGTAIQLNVFQYLTRLLQSLASGGNDCTTSTACMCVYGLLSFVLTSLELHTLGNQQDIIDTACEVLADPSLPELFWGTEPTSGLGIILDSVCGMFPHLLSPLLQLLRALVSGKSTAKKVYSFLDKMSFYNELYKHKPHDVISHEDGTLWRRQTPKLLYPLGGQTNLRIPQGTVGQVMLDDRAYLVRWEYSYSSWTLFTCEIEMLLHVVSTADVIQHCQRVKPIIDLVHKVISTDLSIADCLLPITSRIYMLLQRLTTVISPPVDVIASCVNCLTVLAARNPAKVWTDLRHTGFLPFVAHPVSSLSQMISAEGMNAGGYGNLLMNSEQPQGEYGVTIAFLRLITTLVKGQLGSTQSQGLVPCVMFVLKEMLPSYHKWRYNSHGVREQIGCLILELIHAILNLCHETDLHSSHTPSLQFLCICSLAYTEAGQTVINIMGIGVDTIDMVMAAQPRSDGAEGQGQGQLLIKTVKLAFSVTNNVIRLKPPSNVVSPLEQALSQHGAHGNNLIAVLAKYIYHKHDPALPRLAIQLLKRLATVAPMSVYACLGNDAAAIRDAFLTRLQSKIEDMRIKVMILEFLTVAVETQPGLIELFLNLEVKDGSDGSKEFSLGMWSCLHAVLELIDSQQQDRYWCPPLLHRAAIAFLHALWQDRRDSAMLVLRTKPKFWENLTSPLFGTLSPPSETSEPSILETCALIMKIICLEIYYVVKGSLDQSLKDTLKKFSIEKRFAYWSGYVKSLAVHVAETEGSSCTSLLEYQMLVSAWRMLLIIATTHADIMHLTDSVVRRQLFLDVLDGTKALLLVPASVNCLRLGSMKCTLLLILLRQWKSILSRELGSVDEILGPLTEILEGVLQADQQLMEKTKAKVFSAFITVLQMKEMKVSDIPQYSQLVLNVCETLQEEVIALFDQTRHSLALGSATEDKDSMETDDCSRSRHRDQRDGVCVLGLHLAKELCEVDEDGDSWLQVTRRLPILPTLLTTLEVSLRMKQNLHFTEATLHLLLTLARTQQGATAVAGAGITQSICLPLLSVYQLSTNGTAQTPSASRKSLDAPSWPGVYRLSMSLMEQLLKTLRYNFLPEALDFVGVHQERTLQCLNAVRTVQSLACLEEADHTVGFILQLSNFMKEWHFHLPQLMRDIQVNLGYLCQACTSLLHSRKMLQHYLQNKNGDGLPSAVAQRVQRPPSAASAAPSSFSRSSARRWQPCATSPQMSARFCWISPWTLLNTTSCLP

SEQ ID NO: 806828 - protein, 1753 aa, Homo sapiens; identical to SEQ ID NO: 806820

SEQ ID NO: 806829 - protein, 1804 aa, Homo sapiens
MAAAAGGPCVRSSRELWTILLGRSALRELSQIEAELNKHWRRLLEGLSYYKPPSPSSAEKVKANKDVASPLKELGLRISKFLGLDEEQSVQLLQCYLQEDYRGTRDSVKTVLQDERQSQALILKIADYYYEERTCILRCVLHLLTYFQDERHPYRVEYADCVDKLEKELVSKYRQQFEELYKTEAPTWETHGNLMTERQVSRWFVQCLREQSMLLEIIFLYYAYFEMAPSDLLVLTKMFKEQGFGSRQTNRHLVDETMDPFVDRIGYFSALILVEGMDIESLHKCALDDRRELHQFAQDGLICQDMDCLMLTFGDIPHHAPVLLAWALLRHTLNPEETSSVVRKIGGTAIQLNVFQYLTRLLQSLASGGNDCTTSTACMCVYGLLSFVLTSLELHTLGNQQDIIDTACEVLADPSLPELFWGTEPTSGLGIILDSVCGMFPHLLSPLLQLLRALVSGKSTAKKVYSFLDKMSFYNELYKHKPHDVISHEDGTLWRRQTPKLLYPLGGQTNLRIPQGTVGQVMLDDRAYLVRWEYSYSSWTLFTCEIEMLLHVVSTADVIQHCQRVKPIIDLVHKVISTDLSIADCLLPITSRIYMLLQRLTTVISPPVDVIASCVNCLTVLAARNPAKVWTDLRHTGFLPFVAHPVSSLSQMISAEGMNAGGYGNLLMNSEQPQGEYGVTIAFLRLITTLVKGQLGSTQSQGLVPCVMFVLKEMLPSYHKWRYNSHGVREQIGCLILELIHAILNLCHETDLHSSHTPSLQFLCICSLAYTEAGQTVINIMGIGVDTIDMVMAAQPRSDGAEGQGQGQLLIKTVKLAFSVTNNVIRLKPPSNVVSPLEQALSQHGAHGNNLIAVLAKYIYHKHDPALPRLAIQLLKRLATVAPMSVYACLGNDAAAIRDAFLTRLQSKIEDMRIKVMILEFLTVAVETQPGLIELFLNLEVKDGSDGSKEFSLGMWSCLHAVLELIDSQQQDRYWCPPLLHRAAIAFLHALWQDRRDSAMLVLRTKPKFWENLTSPLFGTLSPPSETSEPSILETCALIMKIICLEIYYVVKGSLDQSLKDTLKKFSIEKRFAYWSGYVKSLAVHVAETEGSSCTSLLEYQMLVSAWRMLLIIATTHADIMHLTDSVVRRQLFLDVLDGTKALLLVPASVNCLRLGSMKCTLLLILLRQWKSILSRELGSVDEILGPLTEILEGVLQADQQLMEKTKAKVFSAFITVLQMKEMKVSDIPQYSQLVLNVCETLQEEVIALFDQTRHSLALGSATEDKDSMETDDCSRSRHRDQRDGVCVLGLHLAKELCEVDEDGDSWLQVTRRLPILPTLLTTLEVSLRMKQNLHFTEATLHLLLTLARTQQVGGQPEGRRERPCLPGWVLTIPEAVICLRALPTLGRAGAGSISFPVFPSSQGATAVAGAGITQSICLPLLSVYQLSTNGTAQTPSASRKSLDAPSWPGVYRLSMSLMEQLLKTLRYNFLPEALDFVGVHQERTLQCLNAVRTVQSLACLEEADHTVGFILQLSNFMKEWHFHLPQLMRDIQVNLGYLCQACTSLLHSRKMLQHYLQNKNGDGLPSAVAQRVQRPPSAASAAPSSSKQPAADTEASEQQALHTVQYGLLKILSKTLAALRHFTPDVCQILLDQSLDLAEYNFLFALSFTTPTFDSEVAPSFGTLLATVNVALNMLGELDKKKEPLTQAVGLSTQAEGTRTLKSLLMFTMENCFYLLISQAMRYLRDPAVHPRDKQRMKQELSSELSTLLSSLSRYFRRGAPSSPATGVLPSPQGKSTSLSKASPESQEPLIQLVQAFVRHMQR

SEQ ID NO: 806830 - protein, 1535 aa, Homo sapiens
MAAAAGGPCVRSSRELWTILLGRSALRELSQIEAELNKHWRRLLEGLSYYKPPSPSSAEKVKANKDVASPLKELGLRISKFLGLDEEQSVQLLQCYLQEDYRGTRDSVKTVLQDERQSQALILKIADYYYEERTCILRCVLHLLTYFQDERHPYRVEYADCVDKLEKELVSKYRQQFEELYKTEAPTWETHGNLMTERQVSRWFVQCLREQSMLLEIIFLYYAYFEMAPSDLLVLTKMFKEQGFGSRQTNRHLVDETMDPFVDRIGYFSALILVEGMDIESLHKCALDDRRELHQFAQDGLICQDMDCLMLTFGDIPHHAPVLLAWALLRHTLNPEETSSVVRKIGGTAIQLNVFQYLTRLLQSLASGGNDCTTSTACMCVYGLLSFVLTSLELHTLGNQQDIIDTACEVLADPSLPELFWGTEPTSGLGIILDSVCGMFPHLLSPLLQLLRALVSGKSTAKKVYSFLDKMSFYNELYKHKPHDVISHEDGTLWRRQTPKLLYPLGGQTNLRIPQGTVGQVMLDDRAYLVRWEYSYSSWTLFTCEIEMLLHVVSTADVIQHCQRVKPIIDLVHKVISTDLSIADCLLPITSRIYMLLQRLTTVISPPVDVIASCVNCLTVLAARNPAKVWTDLRHTGFLPFVAHPVSSLSQMISAEGMNAGGYGNLLMNSEQPQGEYGVTIAFLRLITTLVKGQLGSTQSQGLVPCVMFVLKEMLPSYHKWRYNSHGVREQIGCLILELIHAILNLCHETDLHSSHTPSLQFLCICSLAYTEAGQTVINIMGIGVDTIDMVMAAQPRSDGAEGQGQGQLLIKTVKLAFSVTNNVIRLKPPSNVVSPLEQALSQHGAHGNNLIAVLAKYIYHKHDPALPRLAIQLLKRLATVAPMSVYACLGNDAAAIRDAFLTRLQSKIEDMRIKVMILEFLTVAVETQPGLIELFLNLEVKDGSDGSKEFSLGMWSCLHAVLELIDSQQQDRYWCPPLLHRAAIAFLHALWQDRRDSAMLVLRTKPKFWENLTSPLFGTLSPPSETSEPSILETCALIMKIICLEIYYVVKGSLDQSLKDTLKKFSIEKRFAYWSGYVKSLAVHVAETEGSSCTSLLEYQMLVSAWRMLLIIATTHADIMHLTDSVVRRQLFLDVLDGTKALLLVPASVNCLRLGSMKCTLLLILLRQWKSILSRELGSVDEILGPLTEILEGVLQADQQLMEKTKAKVFSAFITVLQMKEMKVSDIPQYSQLVLNVCETLQEEVIALFDQTRHSLALGSATEDKDSMETDDCSRSRHRDQRDGVCVLGLHLAKELCEVDEDGDSWLQVTRRLPILPTLLTTLEVSLRMKQNLHFTEATLHLLLTLARTQQGATAVAGAGITQSICLPLLSVYQLSTNGTAQTPSASRKSLDAPSWPGVYRLSMSLMEQLLKTLRYNFLPEALDFVGVHQERTLQCLNAVRTVQSLACLEEADHTVGFILQLSNFMKEWHFHLPQLMRDIQVGAQDGVLESGVMLGDREAVRSHWGTPSELQDVPERGLFPWGAQGLLSCAYSG

SEQ ID NO: 806831 - protein, 419 aa, Homo sapiens
HEDLLLPPYTHVASRLMQGATAVAGAGITQSICLPLLSVYQLSTNGTAQTPSASRKSLDAPSWPGVYRLSMSLMEQLLKTLRYNFLPEALDFVGVHQERTLQCLNAVRTVQSLACLEEADHTVGFILQLSNFMKEWHFHLPQLMRDIQVNLGYLCQACTSLLHSRKMLQHYLQNKNGDGLPSAVAQRVQRPPSAASAAPSSSKQPAADTEASEQQALHTVQYGLLKILSKTLAALRHFTPDVCQILLDQSLDLAEYNFLFALSFTTPTFDSEVAPSFGTLLATVNVALNMLGELDKKKEPLTQAVGLSTQAEGTRTLKSLLMFTMENCFYLLISQAMRYLRDPAVHPRDKQRMKQELSSELSTLLSSLSRYFRRGAPSSPATGVLPSPQGKSTSLSKASPESQEPLIQLVQAFVRHMQR

SEQ ID NO: 806832 - protein, 247 aa, Homo sapiens
MVRGWVVLPSAVAQRVQRPPSAASAAPSSSKQPAADTEASEQQALHTVQYGLLKILSKTLAALRHFTPDVCQILLDQSLDLAEYNFLFALSFTTPTFDSEVAPSFGTLLATVNVALNMLGELDKKKEPLTQAVGLSTQAEGTRTLKSLLMFTMENCFYLLISQAMRYLRDPAVHPRDKQRMKQELSSELSTLLSSLSRYFRRGAPSSPATGVLPSPQGKSTSLSKASPESQEPLIQLVQAFVRHMQR

SEQ ID NO: 806833 - protein, 197 aa, Homo sapiens
RPPKREPRSLAALRHFTPDVCQILLDQSLDLAEYNFLFALSFTTPTFDSEVAPSFGTLLATVNVALNMLGELDKKKEPLTQAVGLSTQAEGTRTLKSLLMFTMENCFYLLISQAMRYLRDPAVHPRDKQRMKQELSSELSTLLSSLSRYFRRGAPSSPATGVLPSPQGKSTSLSKASPESQEPLIQLVQAFVRHMQR

SEQ ID NO: 806834 - protein, 1288 aa, Homo sapiens
RASGRAKMAAAAGGPCVRSSRELWTILLGRSALRELSQIEAELNKHWRRLLEGLSYYKPPSPSSAEKVKANKDVASPLKELGLRISKFLGLDEEQSVQLLQCYLQEDYRGTRDSVKTVLQDERQSQALILKIADYYYEERTCILRCVLHLLTYFQDERHPYRVEYADCVDKLEKELVSKYRQQFEELYKTEAPTWETHGNLMTERQVSRWFVQCLREQSMLLEIIFLYYAYFEMAPSDLLVLTKMFKEQGFGSRQTNRHLVDETMDPFVDRIGYFSALILVEGMDIESLHKCALDDRRELHQFAQDGLICQDMDCLMLTFGDIPHHAPVLLAWALLRHTLNPEETSSVVRKIGGTAIQLNVFQYLTRLLQSLASGGNDCTTSTACMCVYGLLSFVLTSLELHTLGNQQDIIDTACEVLADPSLPELFWGTEPTSGLGIILDSVCGMFPHLLSPLLQLLRALVSGKSTAKKVYSFLDKMSFYNELYKHKPHDVISHEDGTLWRRQTPKLLYPLGGQTNLRIPQGTVGQVMLDDRAYLVRWEYSYSSWTLFTCEIEMLLHVVSTADVIQHCQRVKPIIDLVHKVISTDLSIADCLLPITSRIYMLLQRLTTVISPPVDVIASCVNCLTVLAARNPAKVWTDLRHTGFLPFVAHPVSSLSQMISAEGMNAGGYGNLLMNSEQPQGEYGVTIAFLRLITTLVKGQLGSTQSQGLVPCVMFVLKEMLPSYHKWRYNSHGVREQIGCLILELIHAILNLCHETDLHSSHTPSLQFLCICSLAYTEAGQTVINIMGIGVDTIDMVMAAQPRSDGAEGQGQGQLLIKTVKLAFSVTNNVIRLKPPSNVVSPLEQALSQHGAHGNNLIAVLAKYIYHKHDPALPRLAIQLLKRLATVAPMSVYACLGNDAAAIRDAFLTRLQSKIEDMRIKVMILEFLTVAVETQPGLIELFLNLEVKDGSDGSKEFSLGMWSCLHAVLELIDSQQQDRYWCPPLLHRAAIAFLHALWQDRRDSAMLVLRTKPKFWENLTSPLFGTLSPPSETSEPSILETCALIMKIICLEIYYVVKGSLDQSLKDTLKKFSIEKRFAYWSGYVKSLAVHVAETEGSSCTSLLEYQMLVSAWRMLLIIATTHADIMHLTDSVVRRQLFLDVLDGTKALLLVPASVNCLRLGSMKCTLLLILLRQWKSILSRELGSVDEILGPLTEILEGVLQADQQLMEKTKAKVFSAFITVLQMKEMKVSDIPQYSQLVLNVCETLQEEVIALFDQTRHSLALGSATEDKDSMETDDCPHAADAP

SEQ ID NO: 806835 - protein, 1288 aa, Homo sapiens; identical to SEQ ID NO: 806834

SEQ ID NO: 806836 - protein, 1203 aa, Homo sapiens
  misc_feature (1154)..(1154): Xaa can be any naturally occurring amino acid
  misc_feature (1168)..(1168): Xaa can be any naturally occurring amino acid
  misc_feature (1171)..(1171): Xaa can be any naturally occurring amino acid
  misc_feature (1180)..(1180): Xaa can be any naturally occurring amino acid
  misc_feature (1184)..(1184): Xaa can be any naturally occurring amino acid
  misc_feature (1201)..(1201): Xaa can be any naturally occurring amino acid
RASGRAKMAAAAGGPCVRSSRELWTILLGRSALRELSQIEAELNKHWRRLLEGLSYYKPPSPSSAEKVKANKDVASPLKELGLRISKFLGLDEEQSVQLLQCYLQEDYRGTRDSVKTVLQDERQSQALILKIADYYYEERTCILRCVLHLLTYFQDERHPYRVEYADCVDKLEKELVSKYRQQFEELYKTEAPTWETHGNLMTERQVSRWFVQCLREQSMLLEIIFLYYAYFEMAPSDLLVLTKMFKEQGFGSRQTNRHLVDETMDPFVDRIGYFSALILVEGMDIESLHKCALDDRRELHQFAQDGLICQDMDCLMLTFGDIPHHAPVLLAWALLRHTLNPEETSSVVRKIGGTAIQLNVFQYLTRLLQSLASGGNDCTTSTACMCVYGLLSFVLTSLELHTLGNQQDIIDTACEVLADPSLPELFWGTEPTSGLGIILDSVCGMFPHLLSPLLQLLRALVSGKSTAKKVYSFLDKMSFYNELYKHKPHDVISHEDGTLWRRQTPKLLYPLGGQTNLRIPQGTVGQVMLDDRAYLVRWEYSYSSWTLFTCEIEMLLHVVSTADVIQHCQRVKPIIDLVHKVISTDLSIADCLLPITSRIYMLLQRLTTVISPPVDVIASCVNCLTVLAARNPAKVWTDLRHTGFLPFVAHPVSSLSQMISAEGMNAGGYGNLLMNSEQPQGEYGVTIAFLRLITTLVKGQLGSTQSQGLVPCVMFVLKEMLPSYHKWRYNSHGVREQIGCLILELIHAILNLCHETDLHSSHTPSLQFLCICSLAYTEAGQTVINIMGIGVDTIDMVMAAQPRSDGAEGQGQGQLLIKTVKLAFSVTNNVIRLKPPSNVVSPLEQALSQHGAHGNNLIAVLAKYIYHKHDPALPRLAIQLLKRLATVAPMSVYACLGNDAAAIRDAFLTRLQSKIEDMRIKVMILEFLTVAVETQPGLIELFLNLEVKDGSDGSKEFSLGMWSCLHAVLELIDSQQQDRYWCPPLLHRAAIAFLHALWQDRRDSAMLVLRTKPKFWENLTSPLFGTLSPPSETSEPSILETCALIMKIICLEIYYVVKGSLDQSLKDTLKKFSIEKRFAYWSGYVKSLAVHVAETEGSSCTSLLEYQMLVSAWRMLLIIATTHADIMHLTDSVVRRQLFLDVLDGTKALLLVXSLNELAFAFGFMKXHSXGLSFLPGKXEKKXVKGSWGIEIPLDPFGRXNP

SEQ ID NO: 806837 - protein, 1123 aa, Homo sapiens
RASGRAKMAAAAGGPCVRSSRELWTILLGRSALRELSQIEAELNKHWRRLLEGLSYYKPPSPSSAEKVKANKDVASPLKELGLRISKFLGLDEEQSVQLLQCYLQEDYRGTRDSVKTVLQDERQSQALILKIADYYYEERTCILRCVLHLLTYFQDERHPYRVEYADCVDKLEKELVSKYRQQFEELYKTEAPTWETHGNLMTERQVSRWFVQCLREQSMLLEIIFLYYAYFEMAPSDLLVLTKMFKEQGFGSRQTNRHLVDETMDPFVDRIGYFSALILVEGMDIESLHKCALDDRRELHQFAQDGLICQDMDCLMLTFGDIPHHAPVLLAWALLRHTLNPEETSSVVRKIGGTAIQLNVFQYLTRLLQSLASGGNDCTTSTACMCVYGLLSFVLTSLELHTLGNQQDIIDTACEVLADPSLPELFWGTEPTSGLGIILDSVCGMFPHLLSPLLQLLRALVSGKSTAKKVYSFLDKMSFYNELYKHKPHDVISHEDGTLWRRQTPKLLYPLGGQTNLRIPQGTVGQVMLDDRAYLVRWEYSYSSWTLFTCEIEMLLHVVSTADVIQHCQRVKPIIDLVHKVISTDLSIADCLLPITSRIYMLLQRLTTVISPPVDVIASCVNCLTVLAARNPAKVWTDLRHTGFLPFVAHPVSSLSQMISAEGMNAGGYGNLLMNSEQPQGEYGVTIAFLRLITTLVKGQLGSTQSQGLVPCVMFVLKEMLPSYHKWRYNSHGVREQIGCLILELIHAILNLCHETDLHSSHTPSLQFLCICSLAYTEAGQTVINIMGIGVDTIDMVMAAQPRSDGAEGQGQGQLLIKTVKLAFSVTNNVIRLKPPSNVVSPLEQALSQHGAHGNNLIAVLAKYIYHKHDPALPRLAIQLLKRLATVAPMSVYACLGNDAAAIRDAFLTRLQSKIEDMRIKVMILEFLTVAVETQPGLIELFLNLEVKDGSDGSKEFSLGMWSCLHAVLELIDSQQQDRYWCPPLLHRAAIAFLHALWQDRRDSAMLVLRTKPKFWENLTSPLFGTLSPPSETSEPSILETCALIMKIICLEIYYVVKRVLSPLEILTEGWGSGSWWPIHWVHGWKSQGRGENWFGTIHGRPVSCVPGQSTDGIYDCQKELL

SEQ ID NO: 806838 - protein, 1006 aa, Homo sapiens
MAAAAGGPCVRSSRELWTILLGRSALRELSQIEAELNKHWRRLLEGLSYYKPPSPSSAEKVKANKDVASPLKELGLRISKFLGLDEEQSVQLLQCYLQEDYRGTRDSVKTVLQDERQSQALILKIADYYYEERTCILRCVLHLLTYFQDERHPYRVEYADCVDKLEKELVSKYRQQFEELYKTEAPTWETHGNLMTERQVSRWFVQCLREQSMLLEIIFLYYAYFEMAPSDLLVLTKMFKEQGFGSRQTNRHLVDETMDPFVDRIGYFSALILVEGMDIESLHKCALDDRRELHQFAQDGLICQDMDCLMLTFGDIPHHAPVLLAWALLRHTLNPEETSSVVRKIGGTAIQLNVFQYLTRLLQSLASGGNDCTTSTACMCVYGLLSFVLTSLELHTLGNQQDIIDTACEVLADPSLPELFWGTEPTSGLGIILDSVCGMFPHLLSPLLQLLRALVSGKSTAKKVYSFLDKMSFYNELYKHKPHDVISHEDGTLWRRQTPKLLYPLGGQTNLRIPQGTVGQVMLDDRAYLVRWEYSYSSWTLFTCEIEMLLHVVSTADVIQHCQRVKPIIDLVHKVISTDLSIADCLLPITSRIYMLLQRLTTVISPPVDVIASCVNCLTVLAARNPAKVWTDLRHTGFLPFVAHPVSSLSQMISAEGMNAGGYGNLLMNSEQPQGEYGVTIAFLRLITTLVKGQLGSTQSQGLVPCVMFVLKEMLPSYHKWRYNSHGVREQIGCLILELIHAILNLCHETDLHSSHTPSLQFLCICSLAYTEAGQTVINIMGIGVDTIDMVMAAQPRSDGAEGQGQGQLLIKTVKLAFSVTNNVIRLKPPSNVVSPLEQALSQHGAHGNNLIAVLAKYIYHKHDPALPRLAIQLLKRLATVAPMSVYACLGNDAAAIRDAFLTRLQSKIEDMRIKVMILEFLTVAVETQPGLIELFLNLEVKDGSDGSKEFSLGMWSCLHAVLELIDSQQQDRYWCPPLLHRAAIAFLHALWQDRRDSAMLVLRTK

SEQ ID NO: 806839 - protein, 718 aa, Homo sapiens
RASGRAKMAAAAGGPCVRSSRELWTILLGRSALRELSQIEAELNKHWRRLLEGLSYYKPPSPSSAEKVKANKDVASPLKELGLRISKFLGLDEEQSVQLLQCYLQEDYRGTRDSVKTVLQDERQSQALILKIADYYYEERTCILRCVLHLLTYFQDERHPYRVEYADCVDKLEKELVSKYRQQFEELYKTEAPTWETHGNLMTERQVSRWFVQCLREQSMLLEIIFLYYAYFEMAPSDLLVLTKMFKEQGFGSRQTNRHLVDETMDPFVDRIGYFSALILVEGMDIESLHKCALDDRRELHQFAQDGLICQDMDCLMLTFGDIPHHAPVLLAWALLRHTLNPEETSSVVRKIGGTAIQLNVFQYLTRLLQSLASGGNDCTTSTACMCVYGLLSFVLTSLELHTLGNQQDIIDTACEVLADPSLPELFWGTEPTSGLGIILDSVCGMFPHLLSPLLQLLRALVSGKSTAKKVYSFLDKMSFYNELYKHKPHDVISHEDGTLWRRQTPKLLYPLGGQTNLRIPQGTVGQVMLDDRAYLVRWEYSYSSWTLFTCEIEMLLHVVSTADVIQHCQRVKPIIDLVHKVISTDLSIADCLLPITSRIYMLLQRLTTVISPPVDVIASCVNCLTVLAARNPAKVWTDLRHTGFLPFVAHPVSSLSQMISAEGMNAGGYGNLLMNSEQPQGEYGVTIAFLRLITTLVKVQSDFVHKGQKKKRSSLVR

SEQ ID NO: 806840 - protein, 579 aa, Homo sapiens
RASGRAKMAAAAGGPCVRSSRELWTILLGRSALRELSQIEAELNKHWRRLLEGLSYYKPPSPSSAEKVKANKDVASPLKELGLRISKFLGLDEEQSVQLLQCYLQEDYRGTRDSVKTVLQDERQSQALILKIADYYYEERTCILRCVLHLLTYFQDERHPYRVEYADCVDKLEKELVSKYRQQFEELYKTEAPTWETHGNLMTERQVSRWFVQCLREQSMLLEIIFLYYAYFEMAPSDLLVLTKMFKEQGFGSRQTNRHLVDETMDPFVDRIGYFSALILVEGMDIESLHKCALDDRRELHQFAQDGLICQDMDCLMLTFGDIPHHAPVLLAWALLRHTLNPEETSSVVRKIGGTAIQLNVFQYLTRLLQSLASGGNDCTTSTACMCVYGLLSFVLTSLELHTLGNQQDIIDTACEVLADPSLPELFWGTEPTSGLGIILDSVCGMFPHLLSPLLQLLRALVSGKSTAKKVYSFLDKMSFYNELYKHKPHDVISHEDGTLWRRQTPKLLYPLGGQTNLRIPQGTVGQVMLDDRAYLVRWEYSYSSWTLFTCEIEMLLHVVSTADVIQHCQRVFGKKGIL

SEQ ID NO: 806841 - protein, 105 aa, Homo sapiens
REGGREGEHEGRRERRAAASEERMGVTWRAIGLVWLGDWAADKRIRSSLLCLSQVNLGYLCQACTSLLHSRKMLQHYLQVSVLCHEVLEYLTLASQAPPSFLDSP

SEQ ID NO: 806842 - protein, 43 aa, Homo sapiens
ALHTVQYGLLKILSKTLAALRHFTPDVCQILLDQVLPIICSAP

SEQ ID NO: 806843 - protein, 177 aa, Homo sapiens
METNYLKRCFGNCLAQALAEVAKVRPSDPIEYLAHWLYHYRKTAKAKEENREKKIHLQEEYDSSLKEMEMTEMLKQEEYQIQQNCEKCHKELTSETVSTKKTIFMQEDTNPLEKEALKQEFLPGTSSLIPGMPQQVPPSESAGQIDQNFKMPQEINYKEAFQHEVAHEMPPGSKSPF

SEQ ID NO: 806844 - protein, 177 aa, Homo sapiens; identical to SEQ ID NO: 806843

SEQ ID NO: 806845 - protein, 177 aa, Homo sapiens; identical to SEQ ID NO: 806843

SEQ ID NO: 806846 - protein, 150 aa, Homo sapiens
METNYLKRCFGNCLAQALAEVAKVRPSDPIEYLAHWLYHYRKTAKAKEENREKKIHLQEEYDSSLKEMEMTEMLKQEEYQIQQNCEKCHKELTSETVSTKKTIFMQEDTNPLEKEALKQEFLPAPGNHHSFCLCDLDYSESSYDHRENHP

SEQ ID NO: 806847 - protein, 822 aa, Homo sapiens
RPGPRKEKWEEGGARRPAPSAAHGDDSRHIRDPPAVAAEAPAARAPAPAAVVTPPRLAVAPVPPAAPAAPAAGDMSNPGGRRNGPVKLRLTVLCAKNLVKKDFFRLPDPFAKVVVDGSGQCHSTDTVKNTLDPKWNQHYDLYIGKSDSVTISVWNHKKIHKKQGAGFLGCVRLLSNAINRLKDTGYQRLDLCKLGPNDNDTVRGQIVVSLQSRDRIGTGGQVVDCSRLFDNDLPDGWEERRTASGRIQYLNHITRTTQWERPTRPASEYSSPGRPLSCFVDENTPISGTNGATCGQSSDPRLAERRVRSQRHRNYMSRTHLHTPPDLPEGYEQRTTQQGQVYFLHTQTGVSTWHDPRVPRDLSNINCEELGPLPPGWEIRNTATGRVYFVDHNNRTTQFTDPRLSANLHLVLNRQNQLKDQQQQQVVSLCPDDTECLTVPRYKRDLVQKLKILRQELSQQQPQAGHCRIEVSREEIFEESYRQVMKMRPKDLWKRLMIKFRGEEGLDYGGVAREWLYLLSHEMLNPYYGLFQYSRDDIYTLQINPDSAVNPEHLSYFHFVGRIMGMAVFHGHYIDGGFTLPFYKQLLGKSITLDDMELVDPDLHNSLVWILENDITGVLDHTFCVEHNAYGEIIQHELKPNGKSIPVNEENKKEYVRLYVNWRFLRGIEAQFLALQKGFNEVIPQHLLKTFDEKELELIICGLGKIDVNDWKVNTRLKHCTPDSNIVKWFWKAVEFFDEERRARLLQFVTGSSRVPLQGFKALQGAAGPRLFTIHQIDACTNNLPKAHTCFNRIDIPPYESYEKLYEKLLTAIEETCGFAVE

SEQ ID NO: 806848 - protein, 822 aa, Homo sapiens; identical to SEQ ID NO: 806847

SEQ ID NO: 806849 - protein, 502 aa, Homo sapiens
MFLLSVFINFTEQRTTQQGQVYFLHTQTGVSTWHDPRVPRDLSNINCEELGPLPPGWEIRNTATGRVYFVDHNNRTTQFTDPRLSANLHLVLNRQNQLKDQQQQQVVSLCPDDTECLTVPRYKRDLVQKLKILRQELSQQQPQAGHCRIEVSREEIFEESYRQVMKMRPKDLWKRLMIKFRGEEGLDYGGVAREWLYLLSHEMLNPYYGLFQYSRDDIYTLQINPDSAVNPEHLSYFHFVGRIMGMAVFHGHYIDGGFTLPFYKQLLGKSITLDDMELVDPDLHNSLVWILENDITGVLDHTFCVEHNAYGEIIQHELKPNGKSIPVNEENKKEYVRLYVNWRFLRGIEAQFLALQKGFNEVIPQHLLKTFDEKELELIICGLGKIDVNDWKVNTRLKHCTPDSNIVKWFWKAVEFFDEERRARLLQFVTGSSRVPLQGFKALQGAAGPRLFTIHQIDACTNNLPKAHTCFNRIDIPPYESYEKLYEKLLTAIEETCGFAVE

SEQ ID NO: 806850 - protein, 300 aa, Homo sapiens [sequence omitted]

SEQ ID NO: 806851 - protein, 187 aa, Homo sapiens
RPGPRKEKWEEGGARRPAPSAAHGDDSRHIRDPPAVAAEAPAARAPAPAAVVTPPRLAVAPVPPAAPAAPAAGDMSNPGGRRNGPVKLRLTVLCAKNLVKKDFFRLPDPFAKVVVDGSGQCHSTDTVKNTLDPKWNQHYDLYIGKSDSVTISVWNHKKIHKKQGAGFLGCVRLLSNAINRLKDTGCE

SEQ ID NO: 806852 - protein, 212 aa, Homo sapiens
RPGPRKEKWEEGGARRPAPSAAHGDDSRHIRDPPAVAAEAPAARAPAPAAVVTPPRLAVAPVPPAAPAAPAAGDMSNPGGRRNGPVKLRLTVLCAKNLVKKDFFRLPDPFAKVVVDGSGQCHSTDTVKNTLDPKWNQHYDLYIGKSDSVTISVWNHKKIHKKQGAGFLGCVRLLSNAINRLKDTGYQRLDLCKLGPNDNDTVRGQIVGKCGI

SEQ ID NO: 806853 - protein, 167 aa, Homo sapiens
AYQKCILIFIGKHEGFSPKKSASQESTLSDDSTPPSSSPKIPSGPWQEAKCSYPYHTLSQSSDEFLDEPLPPVHHWTSQQVGQWLQSLNLEQYAAEFAARQVDGPQLLQLDGSKLKSLGLSNSHDRALVKRKLKEMAAAAEKERKAQEKAARQREKLRRREQEAKKS

SEQ ID NO: 806854 - protein, 378 aa, Homo sapiens
PSGPAVYRVKVSQLLREGRRRVLGERLPPLQVTDGCGSPLHRLRSPLHSGPGSPAGGSFCLDPPGLRRSLDEDEPPPSPLTRYRPLHNAASHEGLAAASCSPPRSAPSSDSSPSFVRRHPRAEPHSEDDSRDASPPEPASPTIGLDKKTRRKFLDLGVTLRRASTGKSRKEKGSNRLSMGSRESVEGSGRSGGSPFLPFSWFTDSGKGSASSGSTTSPTCSPKHEGFSPKKSASQESTLSDDSTPPSSSPKIPSGPWQEAKCSYPYHTLSQSSDEFLDEPLPPVHHWTSQQVGQWLQSLNLEQYAAEFAARQVDGPQLLQLDGSKLKSLGLSNSHDRALVKRKLKEMAAAAEKERKAQEKAARQREKLRRREQEAKKS

SEQ ID NO: 806855 - protein, 473 aa, Homo sapiens
GQAGPPCLKTTKPLRSPLAPQPLQDLDLAVPETARLDSSLHKARAQLLAKGRRHRPSRSRLRDSASSAEDGEGSDGPGGKVTDGCGSPLHRLRSPLHSGPGSPAGGSFCLDPPGLRRSLDEDEPPPSPLTRYRPLHNAASHEGLAAASCSPPRSAPSSDSSPSFVRRHPRAEPHSEGHPASEGHQSQDAMILSQENFYHPTLAAEGGRQGSKQAVPSFSPWKDDSRDASPPEPASPTIGLDKKTRRKFLDLGVTLRRASTGKSRKEKGSNRLSMGSRESVEGSGRSGGSPFLPFSWFTDSGKGSASSGSTTSPTCSPKHEGFSPKKSASQESTLSDDSTPPSSSPKIPSGPWQEAKCSYPYHTLSQSSDEFLDEPLPPVHHWTSQQVGQWLQSLNLEQYAAEFAARQVDGPQLLQLDGSKLKSLGLSNSHDRALVKRKLKEMAAAAEKERKAQEKAARQREKLRRREQEAKKS

SEQ ID NO: 806856 - protein, 429 aa, Homo sapiens
SRFPSGIPVEESGGVLSKGTWRNEGEDLDLAVPETARLDSSLHKARAQLLAKGRRHRPSRSRLRDSASSAEDGEGSDGPGGKVTDGCGSPLHRLRSPLHSGPGSPAGGSFCLDPPGLRRSLDEDEPPPSPLTRYRPLHNAASHEGLAAASCSPPRSAPSSDSSPSFVRRHPRAEPHSEDDSRDASPPEPASPTIGLDKKTRRKFLDLGVTLRRASTGKSRKEKGSNRLSMGSRESVEGSGRSGGSPFLPFSWFTDSGKGSASSGSTTSPTCSPKHEGFSPKKSASQESTLSDDSTPPSSSPKIPSGPWQEAKCSYPYHTLSQSSDEFLDEPLPPVHHWTSQQVGQWLQSLNLEQYAAEFAARQVDGPQLLQLDGSKLKSLGLSNSHDRALVKRKLKEMAAAAEKERKAQEKAARQREKLRRREQEAKKS

SEQ ID NO: 806857 - protein, 200 aa, Homo sapiens
MGSRESVEGSGRSGGSPFLPFSWFTDSGKGSASSGSTTSPTCSPKHEGFSPKKSASQESTLSDDSTPPSSSPKIPSGPWQEAKCSYPYHTLSQSSDEFLDEPLPPVHHWTSQQVGQWLQSLNLEQYAAEFAARQVDGPQLLQLDGSKLKSLGLSNSHDRALVKRKLKEMAAAAEKERKAQEKAARQREKLRRREQEAKKS

SEQ ID NO: 806858 - protein, 364 aa, Homo sapiens
GQAGPPCLKTTKPLRSPLAPQPLQDLDLAVPETARLDSSLHKARAQLLAKGRRHRPSRSRLRDSASSAEDGEGSDGPGGKVTDGCGSPLHRLRSPLHSGPGSPAGGSFCLDPPGLRRSLDEDEPPPSPLTRYRPLHNAASHEGLAAASCSPPRSAPSSDSSPSFVRRHPRAEPHSEGHPASEGHQSQDAMILSQENFYHPTLAAEGGRQGSKQAVPSFSPWKDDSRDASPPEPASPTIGLDKKTRRKFLDLGVTLRRASTGKSRKEKGSNRLSMGSRESVEGSGRSGGSPFLPFSWFTDSGKGSASSGSTTSPTCSPKHEGFSPKKSASQESTLSDDSTPPSSSHWLRGHRPHQGGWTWALHLG

SEQ ID NO: 806859 - protein, 378 aa, Homo sapiens; identical to SEQ ID NO: 806854

SEQ ID NO: 806860 - protein, 80 aa, Homo sapiens
GRVGRPTRPETPRHDNMEASPRITVSDYYEMEYRLPPPSLTLLLLVNHKKIGILVVSPAHHRRSGNQKTATQRDRDAPLV

SEQ ID NO: 806861 - protein, 323 aa, Homo sapiens
MYHNSSQKRHWTFSSEEQLARLRADANRKFRCKAVANGKVLPNDPVFLEPHEEMTLCKYYEKRLLEFCSVFKPAMPRSVVGTACMYFKRFYLNNSVMEYHPRIIMLTCAFLACKVDEFNVSSPQFVGNLRESPLGQEKALEQILEYELLLIQQLNFHLIVHNPYRPFEGFLIDLKTRYPILENPEILRKTADDFLNRIALTDAYLLYTPSQIALTAILSSASRAGITMESYLSESLMLKENRTCLSQLLDIMKSMRNLVKKYEPPRSEEVAVLKQKLERCHSAELALNVITKKRKGYEDDDYVSKKSKHEEEEWTDDDLVESL

SEQ ID NO: 806862 - protein, 323 aa, Homo sapiens; identical to SEQ ID NO: 806861

SEQ ID NO: 806863 - protein, 329 aa, Homo sapiens
MYHNSSQKRHWTFSSEEQLARLRADANRKFRCKAVANGKVLPNDPVFLEPHEEMTLCKYYEKRLLEFCSVFKPAMPRSVVGTACMYFKRFYLNNSVMEYHPRIIMLTCAFLACKVDEFNVSSPQFVGNLRESPLGQEKALEQILEYELLLIQQLNFHLIVHNPYRPFEGFLIDLKTRYPILENPEILRKTADDFLNRIALTDAYLLYTPSQIALTAILSSASRAGITMESYLSESLMLKENRTCLSQLLDIMKSMRNLVKKYEPPRSEEVAVLKQKLERCHSAELALNVITKKRKGYEDDDYVSKKSKHEEVCFTPKMNSKLFLLYILV

SEQ ID NO: 806864 - protein, 329 aa, Homo sapiens; identical to SEQ ID NO: 806863

SEQ ID NO: 806865 - protein, 325 aa, Homo sapiens
MYHNSSQKRHWTFSSEEQLARLRADANRKFRCKAVANGKVLPNDPVFLEPHEEMTLCKYYEKRLLEFCSVFKPAMPRSVVGTACMYFKRFYLNNSVMEYHPRIIMLTCAFLACKVDEFNVSSPQFVGNLRESPLGQEKALEQILEYELLLIQQLNFHLIVHNPYRPFEGFLIDLKTRYPILENPEILRKTADDFLNRIALTDAYLLYTPSQIALTAILSSASRAGITMESYLSESLMLKENRTCLSQLLDIMKSMRNLVKKYEPPRSEEVAVLKQKLERCHSAELALNVITKKRKGYEDDDYVSKKSKHEEIAKLWHQSKVHTYH

SEQ ID NO: 806866 - protein, 144 aa, Homo sapiens
MYHNSSQKRHWTFSSEEQLARLRADANRKFRCKAVANGKVLPNDPVFLEPHEEMTLCKYYEKRLLEFCSVFKPAMPRSVVGTACMYFKRFYLNNSVMEYHPRIIMLTCAFLACKVDEFNVSSPQFVGNLRESPLGQEKALEQTI

SEQ ID NO: 806867 - protein, 207 aa, Homo sapiens
MYHNSSQKRHWTFSSEEQLARLRADANRKFRCKAVANGKVLPNDPVFLEPHEEMTLCKYYEKRLLEFCSVFKPAMPRSVVGTACMYFKRFYLNNSVMEYHPRIIMLTCAFLACKVDEFNVSSPQFVGNLRESPLGQEKALEQILEYELLLIQQLNFHLIVHNPYRPFEGFLIDLKLFIRESDAEREQNLPVTVTRYNEKHEKLSKEV

SEQ ID NO: 806868 - protein, 270 aa, Homo sapiens
MTLCKYYEKRLLEFCSVFKPAMPRSVVGTACMYFKRFYLNNSVMEYHPRIIMLTCAFLACKVDEFNVSSPQFVGNLRESPLGQEKALEQILEYELLLIQQLNFHLIVHNPYRPFEGFLIDLKTRYPILENPEILRKTADDFLNRIALTDAYLLYTPSQIALTAILSSASRAGITMESYLSESLMLKENRTCLSQLLDIMKSMRNLVKKYEPPRSEEVAVLKQKLERCHSAELALNVITKKRKGYEDDDYVSKKSKHEEEEWTDDDLVESL

SEQ ID NO: 806869 - protein, 263 aa, Homo sapiens
MYHNSSQKRHWTFSSEEQLARLRADANRKFRCKAVANGKVLPNDPVFLEPHEEMTLCKYYEKRLLEFCSVFKPAMPRSVVGTACMYFKRFYLNNSVMEYHPRIIIPFEGFLIDLKTRYPILENPEILRKTADDFLNRIALTDAYLLYTPSQIALTAILSSASRAGITMESYLSESLMLKENRTCLSQLLDIMKSMRNLVKKYEPPRSEEVAVLKQKLERCHSAELALNVITKKRKGYEDDDYVSKKSKHEEEEWTDDDLVESL

SEQ ID NO: 806870 - protein, 394 aa, Homo sapiens
  misc_feature (55)..(55): Xaa can be any naturally occurring amino acid
  misc_feature (71)..(71): Xaa can be any naturally occurring amino acid
GDISGGGTGVCTPRIARCSYVVAPIRAILHLGNRGSIESAITMLAQPDDVEFQNXRDNWRTISTNDAERHXCDYTYLQGLTVQTDIHFKNAEKSAMVHSRREVLPNDPVFLEPHEEMTLCKYYEKRLLEFCSVFKPAMPRSVVDGYDMLISKRWLYVNNESIMSMGDSHPDVMDEMLTCAFLACKVDEFNVSSPQFVGNLRESPLGQEKALEQILEYELLLIQQLNFHLIVHNPYRPFEGFLIDLKTRYPILENPEILRKTADDFLNRIALTDAYLLYTPSQIALTAILSSASRAGITMESYLSESLMLKENRTCLSQLLDIMKSMRNLVKKYEPPRSEEVAVLKQKLERCHSAELALNVITKKRKGYEDDDYVSKKSKHEEEEWTDDDLVESL

SEQ ID NO: 806871 - protein, 46 aa, Homo sapiens
ITRILGEERGHGAERVWRRRKEERRDEVRGERCDAGPRTGVDIAAG

SEQ ID NO: 806872 - protein, 78 aa, Homo sapiens
ALICEQLCRNTLSTRQSDVVINKKKDEEGWGVMSARVSAAHGEDDDRSPCKDCQGQGLYHQSRYNPTLGLALVPVQRS

SEQ ID NO: 806873 - protein, 220 aa, Homo sapiens
QYSSYLSSCCKGMVTAMALSKSTNSHKNATEDLYEVDKLKEAVKEFIEPEIDESFKEDEEESKEDRKLQEENKERAEEQPSTSTEKEKLIRFIGEDENVHSKPLFETDVLSSWRESAKQGTLAQKYLEAMAVIEHMQEKLLEVENRARQAEEKFEDAYEKLHHTLIKNKDLEELVMTSRKESKEEKENQDEREVKEEEEQQEEEEVRSAENSSKSPKKGH

SEQ ID NO: 806874 - protein, 102 aa, Homo sapiens [sequence omitted]

SEQ ID NO: 806875 - protein, 907 aa, Homo sapiens
MDTSRLGVLLSLPVLLQLATGGSSPRSGVLLRGCPTHCHCEPDGRMLLRVDCSDLGLSELPSNLSVFTSYLDLSMNNISQLLPNPLPSLRFLEELRLAGNALTYIPKGAFTGLYSLKVLMLQNNQLRHVPTEALQNLRSLQSLRLDANHISYVPPSCFSGLHSLRHLWLDDNALTEIPVQAFRSLSALQAMTLALNKIHHIPDYAFGNLSSLVVLHLHNNRIHSLGKKCFDGLHSLETLDLNYNNLDEFPTAIRTLSNLKELGFHSNNIRSIPEKAFVGNPSLITIHFYDNPIQFVGRSAFQHLPELRTLTLNGASQITEFPDLTGTANLESLTLTGAQISSLPQTVCNQLPNLQVLDLSYNLLEDLPSFSVCQKLQKIDLRHNEIYEIKVDTFQQLLSLRSLNLAWNKIAIIHPNAFSTLPSLIKLDLSSNLLSSFPITGLHGLTHLKLTGNHALQSLISSENFPELKVIEMPYAYQCCAFGVCENAYKISNQWNKGDNSSMDDLHKKDAGMFQAQDERDLEDFLLDFEEDLKALHSVQCSPSPGPFKPCEHLLDGWLIRIGVWTIAVLALTCNALVTSTVFRSPLYISPIKLLIGVIAAVNMLTGVSSAVLAGVDAFTFGSFARHGAWWENGVGCHVIGFLSIFASESSVFLLTLAALERGFSVKYSAKFETKAPFSSLKVIILLCALLALTMAAVPLLGGSKYGASPLCLPLPFGEPSTMGYMVALILLNSLCFLMMTIAYTKLYCNLDKGDLENIWDCSMVKHIALLLFTNCILNCPVAFLSFSSLINLTFISPEVIKFILLVVVPLPACLNPLLYILFNPHFKEDLVSLRKQTYVWTRSKHPSLMSINSDDVEKQSCDSTQALVTFTSSSITYDLPPSSVPSPAYPVTESCHLSSVAFVPCL

SEQ ID NO: 806876 - protein, 248 aa, Homo sapiens
MEGDCLSCMKYLMFVFNFFIFLGGACLLAIGIWVMVDPTGFREIVAANPLLLTGAYILLAMGGLLFLLGFLGCCGAVRENKCLLLFFFLFILIIFLAELSAAILAFIFRENLTREFFTKELTKHYQGNNDTDVFSATWNSVMITFGCCGVNGPEDFKFASVFRLLTLDSEEVPEACCRREPQSRDGVLLSREECLLGRSLFLNKQGCYTVILNTFETYVYLAGALAIGVLAIELFAMIFAMCLFRGIQ

SEQ ID NO: 806877 - protein, 258 aa, Homo sapiens
MPEELPRWSTMEGDCLSCMKYLMFVFNFFIFLGGACLLAIGIWVMVDPTGFREIVAANPLLLTGAYILLAMGGLLFLLGFLGCCGAVRENKCLLLFFFLFILIIFLAELSAAILAFIFRENLTREFFTKELTKHYQGNNDTDVFSATWNSVMITFGCCGVNGPEDFKFASVFRLLTLDSEEVPEACCRREPQSRDGVLLSREECLLGRSLFLNKQGCYTVILNTFETYVYLAGALAIGVLAIELFAMIFAMCLFRGIQ

SEQ ID NO: 806878 - protein, 128 aa, Homo sapiens
MSFSVPAPVSSSCPPEPSLGSPPEFGCCGVNGPEDFKFASVFRLLTLDSEEVPEACCRREPQSRDGVLLSREECLLGRSLFLNKQGCYTVILNTFETYVYLAGALAIGVLAIELFAMIFAMCLFRGIQ

SEQ ID NO: 806879 - protein, 112 aa, Homo sapiens
MCMCMDFLSPLGIRRLPQVGGLGESQGTWHQDAEPLALIPPTPKQVDGETMEGGGCTQLPGLKPIFSLCPQLTREFFTKELTKHYQGNNDTDVFSATWNSVMITVSDAPEML

SEQ ID NO: 806880 - protein, 83 aa, Homo sapiens
VSLAHGPLHSLGELEKQQGTKTLSFKPCGAQGDPQSKQGSPTAKREAALRERPAESTVEVLINASPARLTILPISRDTIKSYC

SEQ ID NO: 806881 - protein, 914 aa, Homo sapiens
SPGRQQPALATALCPHAPAASDYELSLDLKNKQIEMLEHKYGGHLVSRRAACTIQTAFRQYQLSKNFEKIRNSLLESRLPRRISLRKVRSPTAESLAAEKALMEGYGLVGLPLVRSPSLPPTFAGTLTELEDSFTEQVQSLAKSIDDALSTWSLKTMCSLRESGAYQLHQALQAAAGPPGLEAEGRAPESAGPGPGDDAAETPGLPPAHSGTLMMAFRDVTVQIANQNISVSSSTALSVANCLGAQTVQAPAEPAAGKAEQGETSGREAPEAPAVGREDASAEDSCAEAGASGAADGATAPKTEEEEEEEETAEVGRGAEAEAGDLEQLSSSSTSTKSAKSGSEASASASKDALQAMILSLPRYHCENPASCKSPTLSTDTLRKRLYRIGLNLFNINPDKGIQFLISRGFIPDTPIGVAHFLLQRKGLSRQMIGEFLGNSKKQFNRDVLDCVVDEMDFSSMELDEALRKFQAHIRVQGEAQKVERLIEAFSQRYCMCNPEVVQQFHNPDTIFILAFAIILLNTDMYSPNIKPDRKMMLEDFIRNLRGVDDGADIPRELVVGIYERIQQKELKSNEDHVTYVTKVEKSIVGMKTVLSVPHRRLVCCSRLFEVTDVNKLQKQAAHQREVFLFNDLLVILKLCPKKKSSSTYTFCKSVGLLGMQFQLFENEYYSHGITLVTPLSGSEKKQVLHFCALGSDEMQKFVEDLKESIAEVTELEQIRIEWELEKQQGTKTLSFKPCGAQGDPQSKQGSPTAKREAALRERPAESTVEVSIHNRLQTSQHNSGLGAERGAPVPPPDLQPSPPRQQTPPLPPPPPTPPGTLVQCQQIVKVIVLDKPCLARMEPLLSQALSCYTSSSSDSCGSTPLGGPGSPVKVTHQPPLPPPPPPYNHPHQFCPPGSLLHGHRYSSGSRSLV

SEQ ID NO: 806882 - protein, 914 aa, Homo sapiens; identical to SEQ ID NO: 806881

SEQ ID NO: 806883 - protein, 914 aa, Homo sapiens; identical to SEQ ID NO: 806881

SEQ ID NO: 806884 - protein, 914 aa, Homo sapiens; identical to SEQ ID NO: 806881

SEQ ID NO: 806885 - protein, 884 aa, Homo sapiens
SPGRQQPALATALCPHAPAASDYELSLDLKNKQIEMLEHKYGGHLVSRRAACTIQTAFRQYQLSKNFEKIRNSLLESRLPRRISLRKVRSPTAESLAAEKALMEGYGLVGLPLVRSPSLPPTFAGTLTELEDSFTEQVQSLAKSIDDALSTWSLKTMCSLRESGAYQLHQALQAAAGPPGLEAEGRAPESAGPGPGDDAAETPGLPPAHSGTLMMAFRDVTVQIANQNISVSSSTALSVANCLGAQTVQAPAEPAAGKAEQGETSGREAPEAPAVGREDASAEDSCAEAGASGAADGATAPKTEEEEEEEETAEVGRGAEAEAGDLEQLSSSSTSTKSAKSGSEASASASKDALQAMILSLPRYHCENPASCKSPTLSTDTLRKRLYRIGLNLFNINPDKGIQFLISRGFIPDTPIGVAHFLLQRKGLSRQMIGEFLGNSKKQFNRDVLDCVVDEMDFSSMELDEALRKFQAHIRVQGEAQKVERLIEAFSQRYCMCNPEVVQQFHNPDTIFILAFAIILLNTDMYSPNIKPDRKMMLEDFIRNLRGVDDGADIPRELVVGIYERIQQKELKSNEDHVTYVTKVEKSIVGMKTVLSVPHRRLVCCSRLFEVTDVNKLQKQAAHQREVFLFNDLLVILKLCPKKKSSSTYTFCKSVGLLGMQFQLFENEYYSHGITLVTPLSGSEKKQVLHFCALGSDEMQKFVEDLKESIAEVTELEQIRIEWELEKQQGTKTLSFKPCGAQGDPQSKQGSPTAKREAALRERPAESTVEVSIHNRLQTSQHNSGLGAERGAPVPPPDLQPSPPRQQTPPLPPPPPTPPGTLVQCQQIVKVIVLDKPCLARMEPLLSQALSCYTRLHRCLDPALRLRAPVPPVPTARQESLCTH

SEQ ID NO: 806886 - protein, 914 aa, Homo sapiens; identical to SEQ ID NO: 806881

SEQ ID NO: 806887 - protein, 794 aa, Homo sapiens
SPGRQQPALATALCPHAPAASDYELSLDLKNKQIEMLEHKYGGHLVSRRAACTIQTAFRQYQLSKNFEKIRNSLLESRLPRRISLRKVRSPTAESLAAEKALMEGYGLVGLPLVRSPSLPPTFAGTLTELEDSFTEQVQSLAKSIDDALSTWSLKTMCSLRESGAYQLHQALQAAAGPPGLEAEGRAPESAGPGPGDDAAETPGLPPAHSGTLMMAFRDVTVQIANQNISVSSSTALSVANCLGAQTVQAPAEPAAGKAEQGETSGREAPEAPAVGREDASAEDSCAEAGASGAADGATAPKTEEEEEEEETAEVGRGAEAEAGDLEQLSSSSTSTKSAKSGSEASASASKDALQAMILSLPRYHCENPASCKSPTLSTDTLRKRLYRIGLNLFNINPDKGIQFLISRGFIPDTPIGVAHFLLQRKGLSRQMIGEFLGNSKKQFNRDVLDCVVDEMDFSSMELDEALRKFQAHIRVQGEAQKVERLIEAFSQRYCMCNPEVVQQFHNPDTIFILAFAIILLNTDMYSPNIKPDRKMMLEDFIRNLRGVDDGADIPRELVVGIYERIQQKELKSNEDHVTYVTKVEKSIVGMKTVLSVPHRRLVCCSRLFEVTDVNKLQKQAAHQREVFLFNDLLVILKLCPKKKSSSTYTFCKSVGLLGMQFQLFENEYYSHGITLVTPLSGSEKKQVLHFCALGSDEMQKFVEDLKESIAEVTELEQIRIEWELEKQQGTKTLSFKPCGAQGDPQSKQGSPTAKREAALRERPAESTVEVLINASPARLTILPISRDTIKSYC

SEQ ID NO: 806888 - protein, 1035 aa, Homo sapiens
MVVFVGRRLPALLGLFKKKGSAKAENDKHLSVGPGQGPGSAVDEHQDNVFFPSGRPPHLEELHTQAQEGLRSLQHQEKQKLNKGGWDHGDTQSIQSSRTGPDEDNISFCSQTTSYVAESSTAEDALSIRSEMIQRKGSTFRPHDSFPKSGKSGRRRRERRSTVLGLPQHVQKELGLRNEREAPGTPRAPGARDAVRIPTVDGRPRGTSGMGARVSLQALEAEAEAGAETEAMLQRHIDRVYRDDTFVGRSTGTRAPPLTRPMSLAVPGLTGGAGPAEPLSPAMSISPQATYLSKLIPHAVLPPTVDVVALGRCSLRTLSRCSLHSASPASVRSLGRFSSVSSPQPRSRHPSSSSDTWSHSQSSDTIVSDGSTLSSKGGSEGQPESSTASNSVVPPPQGGSGRGSPSGGSTAEASDTLSIRSSGQLSGRSVSLRKLKRPPPPPRRTHSLHQRGLAVPDGPLGLPPKPERKQQPQLPRPPTTGGSEGAGAAPCPPNPANSWVPGLSPGGSRRPPRSPERTLSPSSGYSSQSGTPTLPPKGLAGPPASPGKAQPPKPERVTSLRSPGASVSSSLTSLCSSSSDPAPSDRSGPQILTPLGDRFVIPPHPKVPAPFSPPPSKPRSPNPAAPALAAPAVVPGPVSTTDASPQSPPTPQTTLTPLQESPVISKDQSPPPSPPPSYHPPPPPTKKPEVVVEAPSASETAEEPLQDPNWPPPPPPAPEEQDLSMADFPPPEEAFFSVASPEPAGPSGSPELVSSPAASSSSATALQIQPPGSPDPPPAPPAPAPASSAPGHVAKLPQKEPVGCSKGGGPPREDVGAPLVTPSLLQMVRLRSVGAPGGAPTPALGPSAPQKPLRRALSGRASPVPAPSSGLHAAVRLKACSLAASEGLSSAQPNGPPEAEPRPPQSPASTASFIFSKGSRKLQLERPVSPETQADLQRNLVAELRSISEQRPPQAPKKSPKAPPPVARKPSVGVPPPASPSYPRAEPLTAPPTNGLPHTQDRTKRELAENGGVLQLVGPEEKMGLPGSDSQKELA

SEQ ID NO: 806889 - protein, 1094 aa, Homo sapiens
MAARAPPAAPAAEEPGNPGGPPRRKKSRSGASGLRRAFSWLRGKRRKKKAAGAEGAEPAAPRAKKAEDKAKRAKGKGRGSAKAENDKHLSVGPGQGPGSAVDEHQDNVFFPSGRPPHLEELHTQAQEGLRSLQHQEKQKLNKGGWDHGDTQSIQSSRTGPDEDNISFCSQTTSYVAESSTAEDALSIRSEMIQRKGSTFRPHDSFPKSGKSGRRRRERRSTVLGLPQHVQKELGLRNEREAPGTPRAPGARDAVRIPTVDGRPRGTSGMGARVSLQALEAEAEAGAETEAMLQRHIDRVYRDDTFVGRSTGTRAPPLTRPMSLAVPGLTGGAGPAEPLSPAMSISPQATYLSKLIPHAVLPPTVDVVALGRCSLRTLSRCSLHSASPASVRSLGRFSSVSSPQPRSRHPSSSSDTWSHSQSSDTIVSDGSTLSSKGGSEGQPESSTASNSVVPPPQGGSGRGSPSGGSTAEASDTLSIRSSGQLSGRSVSLRKLKRPPPPPRRTHSLHQRGLAVPDGPLGLPPKPERKQQPQLPRPPTTGGSEGAGAAPCPPNPANSWVPGLSPGGSRRPPRSPERTLSPSSGYSSQSGTPTLPPKGLAGPPASPGKAQPPKPERVTSLRSPGASVSSSLTSLCSSSSDPAPSDRSGPQILTPLGDRFVIPPHPKVPAPFSPPPSKPRSPNPAAPALAAPAVVPGPVSTTDASPQSPPTPQTTLTPLQESPVISKDQSPPPSPPPSYHPPPPPTKKPEVVVEAPSASETAEEPLQDPNWPPPPPPAPEEQDLSMADFPPPEEAFFSVASPEPAGPSGSPELVSSPAASSSSATALQIQPPGSPDPPPAPPAPAPASSAPGHVAKLPQKEPVGCSKGGGPPREDVGAPLVTPSLLQMVRLRSVGAPGGAPTPALGPSAPQKPLRRALSGRASPVPAPSSGLHAAVRLKACSLAASEGLSSAQPNGPPEAEPRPPQSPASTASFIFSKGSRKLQLERPVSPETQADLQRNLVAELRSISEQRPPQAPKKSPKAPPPVARKPSVGVPPPASPSYPRAEPLTAPPTNGLPHTQDRTKRELAENGGVLQLVGPEEKMGLPGSDSQKELA

SEQ ID NO: 806890 - protein, 1046 aa, Homo sapiens
MGNSHHKRKAPSGPRVRSFWRFGRSAKRPAGSAKAENDKHLSVGPGQGPGSAVDEHQDNVFFPSGRPPHLEELHTQAQEGLRSLQHQEKQKLNKGGWDHGDTQSIQSSRTGPDEDNISFCSQTTSYVAESSTAEDALSIRSEMIQRKGSTFRPHDSFPKSGKSGRRRRERRSTVLGLPQHVQKELGLRNEREAPGTPRAPGARDAVRIPTVDGRPRGTSGMGARVSLQALEAEAEAGAETEAMLQRHIDRVYRDDTFVGRSTGTRAPPLTRPMSLAVPGLTGGAGPAEPLSPAMSISPQATYLSKLIPHAVLPPTVDVVALGRCSLRTLSRCSLHSASPASVRSLGRFSSVSSPQPRSRHPSSSSDTWSHSQSSDTIVSDGSTLSSKGGSEGQPESSTASNSVVPPPQGGSGRGSPSGGSTAEASDTLSIRSSGQLSGRSVSLRKLKRPPPPPRRTHSLHQRGLAVPDGPLGLPPKPERKQQPQLPRPPTTGGSEGAGAAPCPPNPANSWVPGLSPGGSRRPPRSPERTLSPSSGYSSQSGTPTLPPKGLAGPPASPGKAQPPKPERVTSLRSPGASVSSSLTSLCSSSSDPAPSDRSGPQILTPLGDRFVIPPHPKVPAPFSPPPSKPRSPNPAAPALAAPAVVPGPVSTTDASPQSPPTPQTTLTPLQESPVISKDQSPPPSPPPSYHPPPPPTKKPEVVVEAPSASETAEEPLQDPNWPPPPPPAPEEQDLSMADFPPPEEAFFSVASPEPAGPSGSPELVSSPAASSSSATALQIQPPGSPDPPPAPPAPAPASSAPGHVAKLPQKEPVGCSKGGGPPREDVGAPLVTPSLLQMVRLRSVGAPGGAPTPALGPSAPQKPLRRALSGRASPVPAPSSGLHAAVRLKACSLAASEGLSSAQPNGPPEAEPRPPQSPASTASFIFSKGSRKLQLERPVSPETQADLQRNLVAELRSISEQRPPQAPKKSPKAPPPVARKPSVGVPPPASPSYPRAEPLTAPPTNGLPHTQDRTKRELAENGGVLQLVGPEEKMGLPGSDSQKELA

SEQ ID NO: 806891 - protein, 169 aa, Homo sapiens
GRATASPVPCLKACSLAASEGLSSAQPNGPPEAEPRPPQSPASTASFIFSKGSRKLQLERPVSPETQADLQRNLVAELRSISEQRPPQAPKKSPKAPPPVARKPSVGVPPPASPSYPRAEPLTAPPTNGLPHTQDRTKRELAENGGVLQLVGPEEKMGLPGSDSQKELA

SEQ ID NO: 806892 - protein, 1094 aa, Homo sapiens; identical to SEQ ID NO: 806889

SEQ ID NO: 806893 - protein, 1094 aa, Homo sapiens; identical to SEQ ID NO: 806889

SEQ ID NO: 806894 - protein, 61 aa, Homo sapiens
QDGFSHRRSLPSSLGVDGSHGRICLTQGSRPLFPEIISPGPLERSFPPQLPRSRGNPADRA

SEQ ID NO: 806895 - protein, 67 aa, Homo sapiens
FQGFLIPVHNKFTSLLTNTEKSPDLSQYGSNQSSDLEGEEGYQILISFNTSMLRIRMIETVSFYETI

SEQ ID NO: 806896 - protein, 1004 aa, Homo sapiens
MGELCRRDSALTALDEETLWEMMESHRHRIVRCICPSRLTPYLRQAKVLCQLDEEEVLHSPRLTNSAMRAGHLLDLLKTRGKNGAIAFLESLKFHNPDVYTLVTGLQPDVDFSNFSGLMETSKLTECLAGAIGSLQEELNQEKGQKEVLLRRCQQLQEHLGLAETRAEGLHQLEADHSRMKREVSAHFHEVLRLKDEMLSLSLHYSNALQEKELAASRCRSLQEELYLLKQELQRANMVSSCELELQEQSLRTASDQESGDEELNRLKEENEKLRSLTFSLAEKDILEQSLDEARGSRQELVERIHSLRERAVAAERQREQYWEEKEQTLLQFQKSKMACQLYREKVNALQAQVCELQKERDQAYSARDSAQREISQSLVEKDSLRRQVFELTDQVCELRTQLRQLQAEPPGVLKQEARTREPCPREKQRLVRMHAICPRDDSDCSLVSSTESQLLSDLSATSSRELVDSFRSSSPAPPSQQSLYKRVAEDFGEEPWSFSSCLEIPEGDPGALPGAKAGDPHLDYELLDTADLPQLESSLQPVSPGRLDVSESGVLMRRRPARRILSQVTMLAFQGDALLEQISVIGGNLTGIFIHRVTPGSAADQMALRPGTQIVMVDYEASEPLFKAVLEDTTLEEAVGLLRRVDGFCCLSVKVNTDGYKRLLQDLEAKVATSGDSFYIRVNLAMEGRAKGELQVHCNEVLHVTDTMFQGCGCWHAHRVNSYTMKDTAAHGTIPNYSRAQQQLIALIQDMTQQCTVTRKPSSGGPQKLVRIVSMDKAKASPLRLSFDRGQLDPSRMEGSSTCFWAESCLTLVPYTLVWPHRPARPRPVLLVPRAVGKILSEKLCLLQGFKKCLAEYLSQEEYEAWSQRGDIIQEGEVSGGRCWVTRHAVESLMEKNTHALLDVQLDSVCTLHRMDIFPIVIHVSVNEKMAKKLKKGLQRLGTSEEQLLEAARQEEGDLDRAPCLYSSLAPDGWSDLDGLLSCVRQAIADEQKKVVWTEQSPR

SEQ ID NO: 806897 - protein, 434 aa, Homo sapiens
MVSSCELELQEQSLRTASDQESGDEELNRLKEENEKLRSLTFSLAEKDILEQSLDEARGSRQELVERIHSLRERAVAAERQREQYWEEKEQTLLQFQKSKMACQLYREKVNALQAQVCELQKERDQAYSARDSAQREISQSLVEKDSLRRQVFELTDQVCELRTQLRQLQAEPPGVLKQEARTREPCPREKQRLVRMHAICPRDDSDCSLVSSTESQLLSDLSATSSRELVDSFRSSSPAPPSQQSLYKRVAEDFGEEPWSFSSCLEIPEGDPGALPGAKAGDPHLDYELLDTADLPQLESSLQPVSPGRLDVSESGVLMRRRPARRILSQVTMLAFQGDALLEQISVIGGNLTGIFIHRVTPGSAADQMALRPGTQIVMVSRARPLLSPGLLMGTVAAGGVTQADFTSPRRCRSTLGWASALSWADVKRSAHL

SEQ ID NO: 806898 - protein, 1004 aa, Homo sapiens; identical to SEQ ID NO: 806896

SEQ ID NO: 806899 - protein, 236 aa, Homo sapiens
MEGRAKGELQVHCNEVLHVTDTMFQGCGCWHAHRVNSYTMKDTAAHGTIPNYSRAQQQLIALIQDMTQQCTVTRKPSSGGPQKLVRIVSMDKAKASPLRLSFDRGQLDPSRMEGSSTCFWAESCLTLVPYTLVWPHRPARPRPVLLVPRAVGKILSEKLCLLQGFKKCLAEYLSQEEYEAWSQRGDIIQEGEVSGGRCWVTRHAVESLMEKVRSKGGVGRGAVLGRVSGMQRRGMR

SEQ ID NO: 806900 - protein, 720 aa, Homo sapiens
MPPAPDQGRSCFHRPSCRLPTAQLYLLKQELQRANMVSSCELELQEQSLRTASDQESGDEELNRLKEENEKLRSLTFSLAEKDILEQSLDEARGSRQELVERIHSLRERAVAAERQREQYWEEKEQTLLQFQKSKMACQLYREKVNALQAQVCELQKERDQAYSARDSAQREISQSLVEKDSLRRQVFELTDQVCELRTQLRQLQAEPPGVLKQEARTREPCPREKQRLVRMHAICPRDDSDCSLVSSTESQLLSDLSATSSRELVDSFRSSSPAPPSQQSLYKRVAEDFGEEPWSFSSCLEIPEGDPGALPGAKAGDPHLDYELLDTADLPQLESSLQPVSPGRLDVSESGVLMRRRPARRILSQVTMLAFQGDALLEQISVIGGNLTGIFIHRVTPGSAADQMALRPGTQIVMVDYEASEPLFKAVLEDTTLEEAVGLLRRVDGFCCLSVKVNTDGYKRLLQDLEAKVATSGDSFYIRVNLAMEGRAKGELQVHCNEVLHVTDTMFQGCGCWHAHRVNSYTMKDTAAHGTIPNYSRAQQQLIALIQDMTQQCTVTRKPSSGGPQKLVRIVSMDKAKASPLRLSFDRGQLDPSRMEGSSTCFWAESCLTLVPYTLVWPHRPARPRPVLLVPRAVGKILSEKLCLLQGFKKCLAEYLSQEEYEAWSQRGDIIQEGEVSGGRCWVTRHAVESLMEKVRSKGGVGRGAVLGRVSGMQRRGMR

SEQ ID NO: 806901 - protein, 250 aa, Homo sapiens
MEGRAKGELQVHCNEVLHVTDTMFQGCGCWHAHRVNSYTMKDTAAHGTIPNYSRAQQQLIALIQDMTQQCTVTRKPSSGGPQKLVRIVSMDKAKASPLRLSFDRGQLDPSRMEGSSTCFWAESCLTLVPYTLVWPHRPARPRPVLLVPRAVGKILSEKLCLLQGFKKCLAEYLSQEEYEAWSQRGDIIQEGEVSGGRCWVTRHAVESLMEKNTHALLDVQLDSVCTLHRMDIFPIVIHVSVNEKMAKKLK

SEQ ID NO: 806902 - protein, 105 aa, Homo sapiens
EGNPTCLSSAPLQTRAGSAAPAQPAGSCTSADTPQAVLRASAPLHHSQVALVPIISPEFPFLLMASTAPPHPFSVPPLAIFWGTTEAGPHRQYGQSQGQPSAFVL

SEQ ID NO: 806903 - protein, 145 aa, Homo sapiens
ERLSSELEDMKQLSKEKDAHGNHLAEELGASKVREAHLEARMQAEIKKLSAEVESLKEAYHMEMISHQENHAKWKISADSQKSSVQQLNEQLEKAKLELEEAQDTVSNLHQQVQDRNEVIEAANEALLTKVSKHIKVIKHIYENI

SEQ ID NO: 806904 - protein, 63 aa, Homo sapiens
MKEQEQYIATQYKEAIDLGQELRLTREQVQNSHTELAEARHQQVQAQREIERLSSELEDMKQL

SEQ ID NO: 806905 - protein, 97 aa, Homo sapiens
FINFTDTAYLFKIQIESLNDKLQNAKEQLREKEFIMLQNEQEISQLKKEIERTQQRMKEMESVMKEQEQYIATQYKEAIDLGQELRLTREQVQNSHT

SEQ ID NO: 806906 - protein, 74 aa, Homo sapiens
EKSGEYRASPRVPSTWERGRPVPPGTWLFPQSEAFPGSVKAAQVSSSKLPTIKYADPSFEEESEIIWRSVGVSF

SEQ ID NO: 806907 - protein, 214 aa, Homo sapiens
ERPSWGRSSAWRGCPTYRRPRSRRLALLYPPDQLHQHLCHLRNLLGLLLGLLAPLGRPALGRVARVLEVVEGALLRGLHLRFDLDEHIVHLPQLAPVPQRSHGQATYAQSNGEQNGVPAVNQRSARCGPFHDTAGPLYGQGGELRARARLEREAPAAASRPHGRARRHAQVKGHITVLTTAELRIQRNGFILLPRLECSSMITAYCSLDLPRFR

SEQ ID NO: 806908 - protein, 180 aa, Homo sapiens
SGQAGAAPRPGAGARLTADRAHDDSLFSIRRTSSTSISAIFAISLAFSSAFSHLLAARPSAASPGFWRWLRALSSEASTCVLIWMSILSISHSLLRFRRYARPCSRVSDAMSSRISLMTGSRNCSKSSSGSSTSTSSGSASSTMSRGRISSHCLGTAIAMSVGERKPTLAMLSNREPEYS

SEQ ID NO: 806909 - protein, 114 aa, Homo sapiens
GDPTGFGPLRMDSAACAAAATPVPALALALAPDLAQAPLALPGLLSPSCLLSSGQEVNGSERLFWPKSRSFDYLYSAGEILLQNFPVQATINLYEDSDSEEEEEDEEQEDEEEK

SEQ ID NO: 806910 - protein, 161 aa, Homo sapiens
GDPTGFGPLRMDSAACAAAATPVPALALALAPDLAQAPLALPGLLSPSCLLSSGQEVNGSERGTCLWRPWLSSTNDSPRQMRKLVDLAAGGATAAEVTKAESKFHHPVRLFWPKSRSFDYLYSAGEILLQNFPVQATINLYEDSDSEEEEEDEEQEDEEEK

SEQ ID NO: 806911 - protein, 67 aa, Homo sapiens
SSLSSTRAPPAAPWEEGDSLDQAEAQPQKSAFSRPGIRSVSDAGTSLFGSEVSARRTHGSFWSYAWL

SEQ ID NO: 806912 - protein, 239 aa, Homo sapiens
EAGCSPPACSVWAGVGASFQLGRSWFVVRLWGLLCPGLAWLCVREFLFRSAALFPGRSREARRRQRGPRPGASAPGRSRAAVGRKATKKTDKPRQEDKDDLDVTELTNEDLLDQLVKYGVNPGPIVGTTRKLYEKKLLKLREQGTESRSSTPLPTISSSAENTRQNGSNDSDRYSDNEEDSKIELKLEKREPLKGRAKTPVTLKQRRVEHNQVSLVLLPPCTGINNLLTTLIHVLAFNG

SEQ ID NO: 806913 - protein, 454 aa, Homo sapiens
MPEFLEDPSVLTKDKLKSELVANNVTLPAGEQRKDVYVQLYLQHLTARNRPPLPAGTNSKGPPDFSSDEEREPTPVLGSGAAAAGRSRAAVGRKATKKTDKPRQEDKDDLDVTELTNEDLLDQLVKYGVNPGPIVGTTRKLYEKKLLKLREQGTESRSSTPLPTISSSAENTRQNGSNDSDRYSDNEEDSKIELKLEKREPLKGRAKTPVTLKQRRVEHNQSYSQAGITETEWTSGSSKGGPLQALTRESTRGSRRTPRKRVETSEHFRIDGPVISESTPIAETIMASSNESLVVNRVTGNFKHASPILPITEFSDIPRRAPKKPLTRAEVGEKTEERRVERDILKEMFPYEASTPTGISASCRRPIKGAAGRPLELSDFRMEESFSSKYVPKYVPLADVKSEKTKKGRSIPVWIKILLFVVVAVFLFLVYQAMETNQVNPFSNFLHVDPRKSN

SEQ ID NO: 806914 - protein, 454 aa, Homo sapiens; identical to SEQ ID NO: 806913

SEQ ID NO: 806915 - protein, 345 aa, Homo sapiens
MPEFLEDPSVLTKDKLKSELVANNVTLPAGEQRKDVYVQLYLQHLTARNRPPLPAGTNSKGPPDFSSDEEREPTPVLGSGAAAAGRSRAAVGRKATKKTDKPRQEDKDDLDVTELTNEDLLDQLVKYGVNPGPIVGTTRKLYEKKLLKLREQGTESRSSTPLPTISSSAENTRQNGSNDSDRYSDNEEDSKIELKLEKREPLKGRAKTPVTLKQRRVEHNQVGEKTEERRVERDILKEMFPYEASTPTGISASCRRPIKGAAGRPLELSDFRMEESFSSKYVPKYVPLADVKSEKTKKGRSIPVWIKILLFVVVAVFLFLVYQAMETNQVNPFSNFLHVDPRKSN

SEQ ID NO: 806916 - protein, 454 aa, Homo sapiens; identical to SEQ ID NO: 806913

SEQ ID NO: 806917 - protein, 454 aa, Homo sapiens; identical to SEQ ID NO: 806913

SEQ ID NO: 806918 - protein, 494 aa, Homo sapiens
MPEFLEDPSVLTKDKLKSELVANNVTLPAGEQRKDVYVQLYLQHLTARNRPPLPAGTNSKGPPDFSSDEEREPTPVLGSGAAAAGRSRAAVGRKATKKTDKPRQEDKDDLDVTELTNEDLLDQLVKYGVNPGPIVGTTRKLYEKKLLKLREQGTESRSSTPLPTISSSAENTRQNGSNDSDRYSDNEEDSKIELKLEKREPLKGRAKTPVTLKQRRVEHNQSYSQAGITETEWTSGSSKGGPLQALTRESTRGSRRTPRKRVETSEHFRIDGPVISESTPIAETIMASSNESLVVNRVTGNFKHASPILPITEFSDIPRRAPKKPLTRAEVGEKTEERRVERDILKEMFPYEASTPTGISASCRRPIKGAAGRPLELSDFRMEESFSSKYVPKYVPLADVKSEKTKKGRSIPVWIKILLFVVVAVFLFLVYQAMETNQVNPFLPGSSNFPASAETGFHHVGQAGLEPLTSSDQPTSASQSAGITGVIHCTRPAL

SEQ ID NO: 806919 - protein, 107 aa, Homo sapiens
QLGTSATPQTGISASCRRPIKGAAGRPLELSDFRMEESFSSKYVPKYVPLADVKSEKTKKGRSIPVWIKILLFVVVAVFLFLVYQAMETNQVNPFSNFLHVDPRKSN

SEQ ID NO: 806920 - protein, 454 aa, Homo sapiens; identical to SEQ ID NO: 806913

SEQ ID NO: 806921 - protein, 454 aa, Homo sapiens; identical to SEQ ID NO: 806913

SEQ ID NO: 806922 - protein, 181 aa, Homo sapiens
MPEFLEDPSVLTKDKLKSELVANNVTLPAGEQRKDVYVQLYLQHLTARNRPPLPAGTNSKGPPDFSSDEEREPTPVLGSGAAAAGRSRAAVGRKATKKTDKPRQEDKDDLDVTELTNEDLLDQLVKYGVNPGPIVGTTRKLYEKKLLKLREQGTESRSSTPLPTISSSAEKEERTQESEVH

SEQ ID NO: 806923 - protein, 167 aa, Homo sapiens
MYEAGCEIGDDEILGFISEATPLGGIQAASTESCNQQLDLALCRAYEAAASALQIATHTAFVAKAMQADISQAAQILSSDPSRTHQALGILSKTYDAASYICEAAFDEVKMAAHTMGNATVGRRYLWLKDCKINLASKNKLASTPFKGGTLFGGEVCKVIKKRGNKH

SEQ ID NO: 806924 - protein, 454 aa, Homo sapiens; identical to SEQ ID NO: 806913

SEQ ID NO: 806925 - protein, 215 aa, Homo sapiens
MPEFLEDPSVLTKDKLKSELVANNVTLPAGEQRKDVYVQLYLQHLTARNRPPLPAGTNSKGPPDFSSDEEREPTPVLGSGAAAAGRSRAAVGRKATKKTDKPRQEDKDDLDVTELTNEDLLDQLVKYGVNPGPIVGTTRKLYEKKLLKLREQGTESRSSTPLPTISSSAENTRQNGSNDSDRYSDNEEGKILNDVNQMYVIFSHSKFSDHEESKI

SEQ ID NO: 806926 - protein, 228 aa, Homo sapiens
  misc_feature (138)..(138): Xaa can be any naturally occurring amino acid
  misc_feature (140)..(140): Xaa can be any naturally occurring amino acid
  misc_feature (142)..(145): Xaa can be any naturally occurring amino acid
  misc_feature (148)..(148): Xaa can be any naturally occurring amino acid
  misc_feature (150)..(150): Xaa can be any naturally occurring amino acid
  misc_feature (164)..(164): Xaa can be any naturally occurring amino acid
  misc_feature (175)..(175): Xaa can be any naturally occurring amino acid
MPEFLEDPSVLTKDKLKSELVANNVTLPAGEQRKDVYVQLYLQHLTARNRPPLPAGTNSKGPPDFSSDEEREPTPVLGSGAAAAGRSRAAVGRKATKKTDKPRQEDKDDLDVTELTNEDLLDQLVKYGVNPGPIVGTXRXLXXXXLLXKXAPRPRLHSSFPSVXHLCCCSTPPRXPGQSCFCTLPDSPCQPTLSPRSYTGCSRSALIPGQRPAWRPPPTPPRCNPYAL

SEQ ID NO: 806927 - protein, 345 aa, Homo sapiens; identical to SEQ ID NO: 806915

SEQ ID NO: 806928 - protein, 694 aa, Homo sapiens
MPEFLEDPSVLTKDKLKSELVANNVTLPAGEQRKDVYVQLYLQHLTARNRPPLPAGTNSKGPPDFSSDEEREPTPVLGSGAAAAGRSRAAVGRKATKKTDKPRQEDKDDLDVTELTNEDLLDQLVKYGVNPGPIVGTTRKLYEKKLLKLREQGTESRSSTPLPTISSSAENTRQNGSNDSDRYSDNEEGKKKEHKKVKSTRDIVPFSELGTTPSGGGFFQGISFPEISTRPPLGSTELQAAKKVHTSKGDLPREPLVATNLPGRGQLQKLASERNLFISCKSSHDRCLEKSSSSSSQPEHSAMLVSTAASPSLIKETTTGYYKDIVENICGREKSGIQPLCPERSHISDQSPLSSKRKALEESESSQLISPPLAQAIRDYVNSLLVQGGVGSLPGTSNSMPPLDVENIQKRIDQSKFQETEFLSPPRKVPRLSEKSVEERDSGSFVAFQNIPGSELMSSFAKTVVSHSLTTLGLEVAKQSQHDKIDASELSFPFHESILKVIEEEWQQVDRQLPSLACKYPVSSREATQILSVPKVDDEILGFISEATPLGGIQAASTESCNQQLDLALCRAYEAAASALQIATHTAFVAKAMQADISQAAQILSSDPSRTHQALGILSKTYDAASYICEAAFDEVKMAAHTMGNATVGRRYLWLKDCKINLASKNKLASTPFKGGTLFGGEVCKVIKKRGNKH

SEQ ID NO: 806929 - protein, 454 aa, Homo sapiens; identical to SEQ ID NO: 806913

SEQ ID NO: 806930 - protein, 454 aa, Homo sapiens; identical to SEQ ID NO: 806913

SEQ ID NO: 806931 - protein, 454 aa, Homo sapiens; identical to SEQ ID NO: 806913

SEQ ID NO: 806932 - protein, 169 aa, Homo sapiens [sequence omitted]

SEQ ID NO: 806933 - protein, 337 aa, Homo sapiens
MPEFLEDPSVLTKDKLKSELVANNVTLPAGEQRKDVYVQLYLQHLTARNRPPLPAGTNSKGPPDFSSDEEREPTPVLGSGAAAAGRSRAAVGRKATKKTDKPRQEDKDDLDVTELTNEDLLDQLVKYGVNPGPIVGTTRKLYEKKLLKLREQGTESRSSTPLPTISSSAENTRQNGSNDSDRYSDNEEDSKIELKLEKREPLKGRAKTPVTLKQRRVEHNQSYSQAGITETEWTSGSSKGGPLQALTRESTRGSRRTPRKRVETSEHFRIDGPVISESTPIAETIMASSNESLVVNRVTGNFKHASPIPPGFKQFSCLGRDGVSPCWPGWSRTPDLK

SEQ ID NO: 806934 - protein, 423 aa, Homo sapiens
MPEFLEDPSVLTKDKLKSELVANNVTLPAGEQRKDVYVQLYLQHLTARNRPPLPAGTNSKGPPDFSSDEEREPTPVLGSGAAAAGRSRAAVGRKATKKTDKPRQEDKDDLDVTELTNEDLLDQLVKYGVNPGPIVGTTRKLYEKKLLKLREQGTESRSSTPLPTISSSAENTRQNGSNDSDRYSDNEEDSKIELKLEKREPLKGRAKTPVTLKQRRVEHNQSYSQAGITETEWTSGSSKGGPLQALTRESTRGSRRTPRKRVETSEHFRIDGPVISESTPIAETIMASSNESLVVNRVTGNFKHASPILPITEFSDIPRRAPKKPLTRAEVGEKTEERRVERDILKEMFPYEASTPTGISASCRRPIKGAAGRPLELSDFRMEESFSSKYVPKYVPLADVKSEKTKKGRSIPVWIKILLGLQV

SEQ ID NO: 806935 - protein, 440 aa, Homo sapiens
VRHEKTYRRELISLSFKKLNSCLLQEKSSHDRCLEKSSSSSSQPEHSAMLVSTAASPSLIKETTTGYYKDIVENICGREKSGIQPLCPERSHISDQSPLSSKRKALEESESSQLISPPLAQAIRDYVNSLLVQGGVGSLPGTSNSMPPLDVENIQKRIDQSKFQETEFLSPPRKVPRLSEKSVEERDSGSFVAFQNIPGSELMSSFAKTVVSHSLTTLGLEVAKQSQHDKIDASELSFPFHESILKVIEEEWQQVDRQLPSLACKYPVSSREATQILSVPKVDDEILGFISEATPLGGIQAASTESCNQQLDLALCRAYEAAASALQIATHTAFVAKAMQADISQAAQILSSDPSRTHQALGILSKTYDAASYICEAAFDEVKMAAHTMGNATVGRRYLWLKDCKINLASKNKLASTPFKGGTLFGGEVCKVIKKRGNKH

SEQ ID NO: 806936 - protein, 454 aa, Homo sapiens; identical to SEQ ID NO: 806913

SEQ ID NO: 806937 - protein, 248 aa, Homo sapiens
MPEFLEDPSVLTKDKLKSELVANNVTLPAGEQRKDVYVQLYLQHLTARNRPPLPAGTNSKGPPDFSSDEEREPTPVLGSGAAAAGRSRAAVGRKATKKTDKPRQEDKDDLDVTELTNEDLLDQLVKYGVNPGPIVGTTRKLYEKKLLKLREQGTESRSSTPLPTISSSAENTRQNGSNDSDRYSDNEEDSKIELKLEKREPLKGRAKTPVTLKQRRVEHNQVSLVLLPPCTGINNLLTTLIHVLAFNG

SEQ ID NO: 806938 - protein, 127 aa, Homo sapiens
LQCCLPAGWYCYLVGLGDLRNRRRSHNGLGPDCATASRETWALGTFLVPDSGPQAVPRQQDHRTSGWTLPGKLCYFAAAGPCSSLTSVCPLSHHIISLWWQGLSSEFCIEKAPGSQSFNGFKTTRSA

SEQ ID NO: 806939 - protein, 114 aa, Homo sapiens
MSLPIGIYRRAVSYDDTLEDPAPMTPPPSDMGSVPWKPVIPERKYQHLASLSKVSGVSIAEGGGCQLLQVENEELSRFFLFVSKDHYLNLGSSGPQGVVLGPAASVTPGNLLER

SEQ ID NO: 806940 - protein, 305 aa, Homo sapiens
MASRQPEVPALEASAPLGKMSLPIGIYRRAVSYDDTLEDPAPMTPPPSDMGSVPWKPVIPERKYQHLAKVEEGEASLPSPAMTLSSAIDSVDKVPVVKAKATHVIMNSLITKQTQESIQHFERQAGLRDAGYTPHKGLTTEETKYLRVAEALHKLKLQSGEVTKEERQPASAQSTPSTTPHSSPKQRPRGWFTSGSSTALPGPNPSTMDSGSGDKDRNLSDKWSLFGPRSLQKYDSGSFATQAYRGAQKPSPLELIRAQANRMAEDPAALKPPKMDIPVMEGKKQPPRAHNLKPRDLNVLTPTGF

SEQ ID NO: 806941 - protein, 244 aa, Homo sapiens
AAVLPARWVVLLPSGSWGPSKSPPLSQWLGSRLRHSLSGDVGPRNLFSAGLRAAGSPAAAGSQVAGTQLGILYRKSTWIPVFQWLQDNQKCLKLKLQSGEVTKEERQPASAQSTPSTTPHSSPKQRPRGWFTSGSSTALPGPNPSTMDSGSGDKDRNLSDKWSLFGPRSLQKYDSGSFATQAYRGAQKPSPLELIRAQANRMAEDPAALKPPKMDIPVMEGKKQPPRAHNLKPRDLNVLTPTGF

SEQ ID NO: 806942 - protein, 179 aa, Homo sapiens
HSNSVTLVVECFGHSKVLGLLGGEALHKLKLQSGEVTKEERQPASAQSTPSTTPHSSPKQRPRGWFTSGSSTALPGPNPSTMDSGSGDKDRNLSDKWSLFGPRSLQKYDSGSFATQAYRGAQKPSPLELIRAQANRMAEDPAALKPPKMDIPVMEGKKQPPRAHNLKPRDLNVLTPTGF

SEQ ID NO: 806943 - protein, 286 aa, Homo sapiens
MSLPIGIYRRAVSYDDTLEDPAPMTPPPSDMGSVPWKPVIPERKYQHLAKVEEGEASLPSPAMTLSSAIDSVDKVPVVKAKATHVIMNSLITKQTQESIQHFERQAGLRDAGYTPHKGLTTEETKYLRVAEALHKLKLQSGEVTKEERQPASAQSTPSTTPHSSPKQRPRGWFTSGSSTALPGPNPSTMDSGSGDKDRNLSDKWSLFGPRSLQKYDSGSFATQAYRGAQKPSPLELIRAQANRMAEDPAALKPPKMDIPVMEGKKQPPRAHNLKPRDLNVLTPTGF

SEQ ID NO: 806944 - protein, 286 aa, Homo sapiens; identical to SEQ ID NO: 806943

SEQ ID NO: 806945 - protein, 286 aa, Homo sapiens; identical to SEQ ID NO: 806943

SEQ ID NO: 806946 - protein, 286 aa, Homo sapiens; identical to SEQ ID NO: 806943

SEQ ID NO: 806947 - protein, 286 aa, Homo sapiens; identical to SEQ ID NO: 806943

SEQ ID NO: 806948 - protein, 156 aa, Homo sapiens
MASRQPEVPALEASAPLGKMSLPIGIYRRAVSYDDTLEDPAPMTPPPSDMGSVPWKPVIPERKYQHLAKVEEGEASLPSPAMTLSSAIDSVDKVPVVKAKATHVIMNSLITKQTQESIQHFERQAGLRDAGYTPHKGLTTEETKYLRVAEALHVSS

SEQ ID NO: 806949 - protein, 286 aa, Homo sapiens; identical to SEQ ID NO: 806943

SEQ ID NO: 806950 - protein, 91 aa, Homo sapiens
AAVLPARWVVLLPSGSWGPSKSPPLSQWLGSRLRHSLSGDVGPRNLFSAGLRAAGSPAAAGSQNLWMDSSWEALLLCSSWTMFLINICLSA

SEQ ID NO: 806951 - protein, 305 aa, Homo sapiens; identical to SEQ ID NO: 806940

SEQ ID NO: 806952 - protein, 286 aa, Homo sapiens; identical to SEQ ID NO: 806943

SEQ ID NO: 806953 - protein, 286 aa, Homo sapiens; identical to SEQ ID NO: 806943

SEQ ID NO: 806954 - protein, 224 aa, Homo sapiens
MTLSSAIDSVDKVPVVKAKATHVIMNSLITKQTQESIQHFERQAGLRDAGYTPHKGLTTEETKYLRVAEALHKLKLQSGEVTKEERQPASAQSTPSTTPHSSPKQRPRGWFTSGSSTALPGPNPSTMDSGSGDKDRNLSDKWSLFGPRSLQKYDSGSFATQAYRGAQKPSPLELIRAQANRMAEDPAALKPPKMDIPVMEGKKQPPRAHNLKPRDLNVLTPTGF

SEQ ID NO: 806955 - protein, 215 aa, Homo sapiens
AAVLPARWVVLLPSGSWGPSKSPPLSQWLGSRLRHSLSGDVGPRNLFSAGLRAAGSPAAAGSQKLKLQSGEVTKEERQPASAQSTPSTTPHSSPKQRPRGWFTSGSSTALPGPNPSTMDSGSGDKDRNLSDKWSLFGPRSLQKYDSGSFATQAYRGAQKPSPLELIRAQANRMAEDPAALKPPKMDIPVMEGKKQPPRAHNLKPRDLNVLTPTGF

SEQ ID NO: 806956 - protein, 124 aa, Homo sapiens
MFCSFFPRGWFTSGSSTALPGPNPSTMDSGSGDKDRNLSDKWSLFGPRSLQKYDSGSFATQAYRGAQKPSPLELIRAQANRMAEDPAALKPPKMDIPVMEGKKQPPRAHNLKPRDLNVLTPTGF

SEQ ID NO: 806957 - protein, 286 aa, Homo sapiens; identical to SEQ ID NO: 806943

SEQ ID NO: 806958 - protein, 286 aa, Homo sapiens; identical to SEQ ID NO: 806943

SEQ ID NO: 806959 - protein, 66 aa, Homo sapiens
VTAAGLPKCWECRPEPDLTSVSQCYTSFNLISTHGLPCSPYSSHQCPFRRSLNNIAVHFFLQDIFS

SEQ ID NO: 806960 - protein, 286 aa, Homo sapiens; identical to SEQ ID NO: 806943

SEQ ID NO: 806961 - protein, 766 aa, Homo sapiens
MKTPWKVLLGLLGAAALVTIITVPVVLLNKGTDDATADSRKTYTLTDYLKNTYRLKLYSLRWISDHEYLYKQENNILVFNAEYGNSSVFLENSTFDEFGHSINDYSISPDGQFILLEYNYVKQWRHSYTASYDIYDLNKRQLITEERIPNNTQWVTWSPVGHKLAYVWNNDIYVKIEPNLPSYRITWTGKEDIIYNGITDWVYEEEVFSAYSALWWSPNGTFLAYAQFNDTEVPLIEYSFYSDESLQYPKTVRVPYPKAGAVNPTVKFFVVNTDSLSSVTNATSIQITAPASMLIGDHYLCDVTWATQERISLQWLRRIQNYSVMDICDYDESSGRWNCLVARQHIEMSTTGWVGRFRPSEPHFTLDGNSFYKIISNEEGYRHICYFQIDKKDCTFITKGTWEVIGIEALTSDYLYYISNEYKGMPGGRNLYKIQLSDYTKVTCLSCELNPERCQYYSVSFSKEAKYYQLRCSGPGLPLYTLHSSVNDKGLRVLEDNSALDKMLQNVQMPSKKLDFIILNETKFWYQMILPPHFDKSKKYPLLLDVYAGPCSQKADTVFRLNWATYLASTENIIVASFDGRGSGYQGDKIMHAINRRLGTFEVEDQIEAARQFSKMGFVDNKRIAIWGWSYGGYVTSMVLGSGSGVFKCGIAVAPVSRWEYYDSVYTERYMGLPTPEDNLDHYRNSTVMSRAENFKQVEYLLIHGTADDNVHFQQSAQISKALVDVGVDFQAMWYTDEDHGIASSTAHQHIYTHMSHFIKQCFSLP

SEQ ID NO: 806962 - protein, 766 aa, Homo sapiens; identical to SEQ ID NO: 806961

SEQ ID NO: 806963 - protein, 766 aa, Homo sapiens; identical to SEQ ID NO: 806961

SEQ ID NO: 806964 - protein, 766 aa, Homo sapiens; identical to SEQ ID NO: 806961

SEQ ID NO: 806965 - protein, 83 aa, Homo sapiens
FGGNGINPAEDLQHVEYLLIYGTADDNVHFQQSAQISKALVDVGVDFQAMWYTDEDHGIASSTAHQHIYTHMSHFIKQCFSLP

SEQ ID NO: 806966 - protein, 766 aa, Homo sapiens; identical to SEQ ID NO: 806961

SEQ ID NO: 806967 - protein, 766 aa, Homo sapiens; identical to SEQ ID NO: 806961

SEQ ID NO: 806968 - protein, 673 aa, Homo sapiens
AGIILICLKRKWKLRKKLASCYTVKACIQQWRHSYTASYDIYDLNKRQLITEERIPNNTQWVTWSPVGHKLAYVWNNDIYVKIEPNLPSYRITWTGKEDIIYNGITDWVYEEEVFSAYSALWWSPNGTFLAYAQFNDTEVPLIEYSFYSDESLQYPKTVRVPYPKAGAVNPTVKFFVVNTDSLSSVTNATSIQITAPASMLIGDHYLCDVTWATQERISLQWLRRIQNYSVMDICDYDESSGRWNCLVARQHIEMSTTGWVGRFRPSEPHFTLDGNSFYKIISNEEGYRHICYFQIDKKDCTFITKGTWEVIGIEALTSDYLYYISNEYKGMPGGRNLYKIQLSDYTKVTCLSCELNPERCQYYSVSFSKEAKYYQLRCSGPGLPLYTLHSSVNDKGLRVLEDNSALDKMLQNVQMPSKKLDFIILNETKFWYQMILPPHFDKSKKYPLLLDVYAGPCSQKADTVFRLNWATYLASTENIIVASFDGRGSGYQGDKIMHAINRRLGTFEVEDQIEAARQFSKMGFVDNKRIAIWGWSYGGYVTSMVLGSGSGVFKCGIAVAPVSRWEYYDSVYTERYMGLPTPEDNLDHYRNSTVMSRAENFKQVEYLLIHGTADDNVHFQQSAQISKALVDVGVDFQAMWYTDEDHGIASSTAHQHIYTHMSHFIKQCFSLP

SEQ ID NO: 806969 - protein, 717 aa, Homo sapiens
MKTPWKVLLGLLGAAALVTIITVPVVLLNKGTDDATADSRKTYTLTDYLKNTYRLKLYSLRWISDHEYLYKQENNILVFNAEYGNSSVFLENSTFDEFGHSINDYSISPDGQFILLEYNYVKQWRHSYTASYDIYDLNKRQLITEERIPNNTQWVTWSPVGHKLAYVWNNDIYVKIEPNLPSYRITWTGKEDIIYNGITDWVYEEEVFSAYSALWWSPNGTFLAYAQFNDTEVPLIEYSFYSDESLQYPKTVRVPYPKAGAVNPTVKFFVVNTDSLSSVTNATSIQITAPASMLIGDHYLCDVTWATQERISLQWLRRIQNYSVMDICDYDESSGRWNCLVARQHIEMSTTGWVGRFRPSEPHFTLDGNSFYKIISNEEGYRHICYFQIDKKDCTFITKGTWEVIGIEALTSDYLYYISNEYKGMPGGRNLYKIQLSDYTKVTCLSCELNPERCQYYSVSFSKEAKYYQLRCSGPGLPLYTLHSSVNDKGLRVLEDNSALDKMLQNVQMPSKKLDFIILNETKFWYQMILPPHFDKSKKYPLLLDVYAGPCSQKADTVFRLNWATYLASTENIIVASFDGRGSGYQGDKIMHAINRRLGTFEVEDQIEAARQFSKMGFVDNKRIAIWGWSYGGYVTSMVLGSGSGVFKCGIAVAPVSRWEYYDSVYTERYMGLPTPEDNLDHYRVRDEDLYLFYNLFISGLRTFLIVSILENTYFYF

SEQ ID NO: 806970 - protein, 380 aa, Homo sapiens
MEDGGQREEETRRNATCGAAAKSENRGKRHASAGKKGAGGTSPTAPSTKRPLPGLSAPLGAGSASSPPLRAPVPRSECPGRRRPVLAARSDALESSPISLPATPVRRPLLSYSAPTHLGTPGGARGHLQGEGLRGQGKPPVWRVRRALPPGWTQQAEAQEQGSATRAGLGARRGVGTASWGWTWATCGRKGARNRKRSDERPRPPKAPPQPSASHSHACKPLPEGPRRSPELKPRRQRRQPPRSTPPRSPRSTASPALSKLRLSLQVGATPGWGRALPGPALLPRPRLGGFGAVGADPGTCVRPGRSAPAARSHPQDPVGVLTMVVLMSPMMLGASLSTWCMRRISLRPCACSADSPISVFCSPREYKLASSSEKMNSLV

SEQ ID NO: 806971 - protein, 420 aa, Homo sapiens
MGTQALQGFLFLLFLPLLQPRGASAGSLHSPGLSECFQVNGADYRGHQNRTGPRGAGRPCLFWDQTQQHSYSSASDPHGRWGLGAHNFCRNPDGDVQPWCYVAETEEGIYWRYCDIPSCHMPGYLGCFVDSGAPPALSGPSGTSTKLTVQVCLRFCRMKGYQLAGVEAGYACFCGSESDLARGRLAPATDCDQICFGHPGQLCGGDGRLGVYEVSVGSCQGNWTAPQGVIYSPDFPDEYGPDRNCSWALGPPGAALELTFRLFELADPRDRLELRDAASGSLLRAFDGARPPPSGPLRLGTAALLLTFRSDARGHAQGFALTYRGLQDAAEDPEAPEGSAQTPAAPLDGANVSCSPRPGAPPAAIGGAVCWLREKGPRRWGLPGAPGEAGLCGTNSPEGWPCPAPPGTPRLRVLPRATGL

SEQ ID NO: 806972 - protein, 446 aa, Homo sapiens
MGTQALQGFLFLLFLPLLQPRGASAGSLHSPGLSECFQVNGADYRGHQNRTGPRGAGRPCLFWDQTQQHSYSSASDPHGRWGLGAHNFCRNPDGDVQPWCYVAETEEGIYWRYCDIPSCHMPGYLGCFVDSGAPPALSGPSGTSTKLTVQVCLRFCRMKGYQLAGVEAGYACFCGSESDLARGRLAPATDCDQICFGHPGQLCGGDGRLGVYEVSVGSCQGNWTAPQGVIYSPDFPDEYGPDRNCSWALGPPGAALELTFRLFELADPRDRLELRDAASGSLLRAFDGARPPPSGPLRLGTAALLLTFRSDARGHAQGFALTYRGLQDAAEDPEAPEGSAQTPAAPLDGANVSCSPRPGAPPAAIGARVFSTVTAVSVLLLLLLGLLRPCADGAVCWLREKGPRRWGLPGAPGEAGLCGTNSPEGWPCPAPPGTPRLRVLPRATGL

SEQ ID NO: 806973 - protein, 347 aa, Homo sapiens
MGTQALQGFLFLLFLPLLQPRGASAGSLHSPGLSECFQVNGADYRGHQNRTGPRGAGRPCLFWDQTQQHSYSSASDPHGRWGLGAHNFCRNPDGDVQPWCYVAETEEGIYWRYCDIPSCHMPGYLGCFVDSGAPPALSGPSGTSTKLTVQVCLRFCRMKGYQLAGVEAGYACFCGSESDLARGRLAPATDCDQICFGHPGQLCGGDGRLGVYEVSVGSCQGNWTAPQGVIYSPDFPDEYGPDRNCSWALGPPGAALELTFRLFELADPRDRLELRDAASGSLLRAFDGARPPPSGPLRLGTAALLLTFRSDARGHAQGFALTYRAEEGVRTRGPEVGQTRGPRGHVR

SEQ ID NO: 806974 - protein, 67 aa, Homo sapiens
RPQRHLHEAHGPGVPTLLPHEGVPGTAHGPRPVTPDLDLKTTLNSQHSVAKPRHRFLNLQPDSHPDP

SEQ ID NO: 806975 - protein, 399 aa, Homo sapiens
MGTQALQGFLFLLFLPLLQPRGASAGSLHSPGLSECFQVNGADYRGHQNRTGPRGAGRPCLFWDQTQQHSYSSASDPHGRWGLGAHNFCRNPDGDVQPWCYVAETEEGIYWRYCDIPSCHMPGYLGCFVDSGAPPALSGPSGTSTKLTVQVCLRFCRMKGYQLAGVEAGYACFCGSESDLARGRLAPATDCDQICFGHPGQLCGGDGRLGVYEVSVGSCQGNWTAPQGVIYSPDFPDEYGPDRNCSWALGPPGAALELTFRLFELADPRDRLELRDAASGSLLRAFDGARPPPSGPLRLGTAALLLTFRSDARGHAQGFALTYRGLQDAAEDPEAPEGSAQTPAAPLDGANVSCSPRPGAPPAAIGGEAGARDGSESGSRPLAPILTAAVCPQPGSSRR

SEQ ID NO: 806976 - protein, 400 aa, Homo sapiens
MGTQALQGFLFLLFLPLLQPRGASAGSLHSPGLSECFQVNGADYRGHQNRTGPRGAGRPCLFWDQTQQHSYSSASDPHGRWGLGAHNFCRNPDGDVQPWCYVAETEEGIYWRYCDIPSCHMPGYLGCFVDSGAPPALSGPSGTSTKLTVQVCLRFCRMKGYQLAGVEAGYACFCGSESDLARGRLAPATDCDQICFGHPGQLCGGDGRLGVYEVSVGSCQGNWTAPQGVIYSPDFPDEYGPDRNCSWALGPPGAALELTFRLFELADPRDRLELRDAASGSLLRAFDGARPPPSGPLRLGTAALLLTFRSDARGHAQGFALTYRGLQDAAEDPEAPEGSAQTPAAPLDGANVSCSPRPGAPPAAIGARVFSTVTAVSVLLLLLLGLLRPCADGAGRWGRA

SEQ ID NO: 806977 - protein, 289 aa, Homo sapiens
MKGYQLAGVEAGYACFCGSESDLARGRLAPATDCDQICFGHPGQLCGGDGRLGVYEVSVGSCQGNWTAPQGVIYSPDFPDEYGPDRNCSWALGPPGAALELTFRLFELADPRDRLELRDAASGSLLRAFDGARPPPSGPLRLGTAALLLTFRSDARGHAQGFALTYRGLQDAAEDPEAPEGSAQTPAAPLDGANVSCSPRPGAPPAAIGARVFSTVTAVSVLLLLLLGLLRPCADGAVCWLREKGPRRWGLPGAPGEAGLCGTNSPEGWPCPAPPGTPRLRVLPRATGL

SEQ ID NO: 806978 - protein, 228 aa, Homo sapiens
SRRVLVLRMLTAGPPAVSVGSCQGNWTAPQGVIYSPDFPDEYGPDRNCSWALGPPGAALELTFRLFELADPRDRLELRDAASGSLLRAFDGARPPPSGPLRLGTAALLLTFRSDARGHAQGFALTYRGEPQLRRALPAVPTPLSPPRLTPLSAGLQDAAEDPEAPEGSAQTPAAPLDGANVSCSPRPGAPPAAIGGEAGARDGSESGSRPLAPILTAAVCPQPGSSRR

SEQ ID NO: 806979 - protein, 79 aa, Homo sapiens
SPSANYLSLQALAWLPLQAPGCPPLQAPTVYLSKPRPGYLSKPLATSPCPAWLPLLLPIGPEGQFQPKGIHGSCCSKKT

SEQ ID NO: 806980 - protein, 200 aa, Homo sapiens
TGREKEREREKNQIDTRNNDEWSTSTYNAFTLLLRAAFQSLLDAQADEAVLDHPDLKHIDPVVLKHCHAAAATYILEAGKHRADKSTLSTYLEDCKFDRERIELFCTEYQNNKNSLEILLGSIGRSLPHITDVSWRLEYQIKTNQLHRMYRPAYLVTLSVQNTDSPSYPEISFSCSMEQLQDLVGKLKDASKSLERATQL

SEQ ID NO: 806981 - protein, 119 aa, Homo sapiens
MVNFDVQRLHASPPGGIPESAGRPGGRGRVRVSRSARLGAGSAGVEGRSEKRSRRSEKGKAPGRGSLRALPFAPDGVLGTWLCQDSEQTLSIVLAPLGTCIEPTPRSWPGFPPSLFVLL

SEQ ID NO: 806982 - protein, 119 aa, Homo sapiens; identical to SEQ ID NO: 806981

SEQ ID NO: 806983 - protein, 119 aa, Homo sapiens; identical to SEQ ID NO: 806981

SEQ ID NO: 806984 - protein, 119 aa, Homo sapiens; identical to SEQ ID NO: 806981

SEQ ID NO: 806985 - protein, 119 aa, Homo sapiens; identical to SEQ ID NO: 806981

SEQ ID NO: 806986 - protein, 184 aa, Homo sapiens
RLVEAGVESAENAFTLLLRAAFQSLLDAQADEAVLDHPDLKHIDPVVLKHCHAAAATYILEAGKHRADKSTLSTYLEDCKFDRERIELFCTEYQNNKNSLEILLGSIGRSLPHITDVSWRLEYQIKTNQLHRMYRPAYLVTLSVQNTDSPSYPEISFSCSMEQLQDLVGKLKDASKSLERATQL

SEQ ID NO: 806987 - protein, 119 aa, Homo sapiens; identical to SEQ ID NO: 806981

SEQ ID NO: 806988 - protein, 119 aa, Homo sapiens; identical to SEQ ID NO: 806981

SEQ ID NO: 806989 - protein, 119 aa, Homo sapiens; identical to SEQ ID NO: 806981

SEQ ID NO: 806990 - protein, 184 aa, Homo sapiens; identical to SEQ ID NO: 806986

SEQ ID NO: 806991 - protein, 119 aa, Homo sapiens; identical to SEQ ID NO: 806981

SEQ ID NO: 806992 - protein, 174 aa, Homo sapiens
GGRGSPSDARSSDARSADARGRGRLDHPDLKHIDPVVLKHCHAAAATYILEAGKHRADKSTLSTYLEDCKFDRERIELFCTEYQNNKNSLEILLGSIGRSLPHITDVSWRLEYQIKTNQLHRMYRPAYLVTLSVQNTDSPSYPEISFSCSMEQLQDLVGKLKDASKSLERATQL

SEQ ID NO: 806993 - protein, 119 aa, Homo sapiens; identical to SEQ ID NO: 806981

SEQ ID NO: 806994 - protein, 118 aa, Homo sapiens
TGREKEREREKNQIDTRNNDEWSTSTYNAFTLLLRAAFQSLLDAQADEAVLDHPDLKHIDPVVLKHCHAAAATYILEAGKHRADKSTLSTYLEDCKFDRERIELFCTEYQVTYFKIFN

SEQ ID NO: 806995 - protein, 119 aa, Homo sapiens; identical to SEQ ID NO: 806981

SEQ ID NO: 806996 - protein, 75 aa, Homo sapiens
MLPWLRINNDFFSLMFLHRKDQNVLSPVNCWNLLLNQVKRESRDHTTLSDIYLNNIIPRFVQVSEDSGRLFKKVQ

SEQ ID NO: 806997 - protein, 116 aa, Homo sapiens
MTSPAKFKKDKEIIAEYDTQVKEIRAQLTEQMKCLDQQCELRVQLLQDLQDFFRKKAEIEMDYSRNLEKLAERFLAKTRSTKDQQFKYGALWLLLSETLEYGVQGGGGQGMPLRSS

SEQ ID NO: 806998 - protein, 143 aa, Homo sapiens
MTSPAKFKKDKEIIAEYDTQVKEIRAQLTEQMKCLDQQCELRVQLLQDLQDFFRKKAEIEMDYSRNLEKLAERFLAKTRSTKDQQFKKDQNVLSPVNCWNLLLNQVKRESRDHTTLSDIYLNNIIPRFVQVSEDSGRLFKKVQ

SEQ ID NO: 806999 - protein, 116 aa, Homo sapiens; identical to SEQ ID NO: 806997

SEQ ID NO: 807000 - protein, 215 aa, Homo sapiens
LWRLHPTQAAPFRTREAGGYLSWGDASDCFIVGASGAEDRVPPEVTRKPRLSATRVGRTLEVPRRPRNCAFDLHSRLKPAAQDKWTSQQDPDHPNRLILRQDPDASESDHSPALVTPEADQSTHGRSFVKEVNVVRNLKPSNFPCHLNCFTINLSLCSTPSSGQTSLVHPRYKHATLPFVLAALARSMSEGGICGEFNLTNCCLKIDDNEEDVMN

SEQ ID NO: 807001 - protein, 69 aa, Homo sapiens
GSRLYSQSLGRSRREDRLSPGARDQTRQHGETHISAFKNERLAVTFLGETRPTASLWGPQERRIGSRPR

SEQ ID NO: 807002 - protein, 207 aa, Homo sapiens
MIRIEAIPPKRSWRRALGGAFRGPRASDCFIVGASGAEDRVPPEVTRKPRLSATRVGRTLEVPRRPRRLKPAAQDKWTSQQDPDHPNRLILRQDPDASESDHSPALVTPEADQSTHGRSFVKEVNVVRNLKPSNFPCHLNCFTINLSLCSTPSSGQTSLVHPRYKHATLPFVLAALARSMSEGGICGEFNLTNCCLKIDDNEEDVMN

SEQ ID NO: 807003 - protein, 207 aa, Homo sapiens
LWRLHPTQAAPFRTREAGGYLSWGDASDCFIVGASGAEDRVPPEVTRKPRLSATRVGRTLEVPRRPRRLKPAAQDKWTSQQDPDHPNRLILRQDPDASESDHSPALVTPEADQSTHGRSFVKEVNVVRNLKPSNFPCHLNCFTINLSLCSTPSSGQTSLVHPRYKHATLPFVLAALARSMSEGGICGEFNLTNCCLKIDDNEEDVMN

SEQ ID NO: 807004 - protein, 211 aa, Homo sapiens
VLANRDQLRLWASNPSQQGEAGGYLSWGDASDCFIVGASGAEDRVPPEVTRKPRLSATRVGRTLEVPRRPRRLKPAAQDKWTSQQDPDHPNRLILRQDPDASESDHSPALVTPEADQSTHGRSFVKEVNVVRNLKPSNFPCHLNCFTINLSLCSTPSSGQTSLVHPRYKHATLPFVLAALARSMSEGGICGEFNLTNCCLKIDDNEEDVMN

SEQ ID NO: 807005 - protein, 352 aa, Homo sapiens
LSPWTSQLLEEHTERAPRISQEFGERMAHCCLGGLAEFLQSFQQRVERFHENPAVREMLPDTYISKTIALVNCGPPLRALAERLARVGPPESEPAREASASALDHVTRLCHRVVANLLFQELQPHFNKLMRRKWLSSPEALDGIVGTLGAQALALRRMQDEPYQALVAELHRRALVEYVRPLLRGRLRCSSARTRSRVAGRLREDAAQLQRLFRRLESQASWLDAVVPHLAEVMQLEDTPSIQVEVGVLVRDYPDIRQKHVAALLDIRGLRNTAARQEILAVARDLELSEEGALSPPRDRAFFADIPVPRPSFCLSLPLFLGRLPLSRLARPSLACLPRPRPPSLARPRAQR

SEQ ID NO: 807006 - protein, 295 aa, Homo sapiens
MRKKPGRGRGKQRRQEWFFLRALAERLARVGPPESEPAREASASALDHVTRLCHRVVANLLFQELQPHFNKLMRRKWLSSPEALDGIVGTLGAQALALRRMQDEPYQALVAELHRRALVEYVRPLLRGRLRCSSARTRSRVAGRLREDAAQLQRLFRRLESQASWLDAVVPHLAEVMQLEDTPSIQVEVGVLVRDYPDIRQKHVAALLDIRGLRNTAARQEILAVARDLELSEEGALSPPRDRAFFADIPVPRPSFCLSLPLFLGRLPLSRLARPSLACLPRPRPPSLARPRAQR

SEQ ID NO: 807007 - protein, 138 aa, Homo sapiens
PAASTLGEAPVVPSTPGASPDPLGPPPAGALAPLPGSPGTVDSGPRPPWNERCTDWAVISHRVLTAPRQNAMRIGRRPHCGVLGANPPGHVGSSPTGLSGCSPRVRRREIVINKDTRQRDKGKTAGPRGPLPSRRGDR

SEQ ID NO: 807008 - protein, 230 aa, Homo sapiens [sequence omitted]

SEQ ID NO: 807009 - protein, 121 aa, Homo sapiens
MYSLNQEIKAFSRNNLRKQCTRVTTLTGKKIIETWKDARIHVVEEVEPSSGGGCGYVQDLSSDLQVGVIKPWLLLGSQDAAHDLDTLKKNKNVLNLLKKQKEKMEWFLFIVMQAFPGLLQL

SEQ ID NO: 807010 - protein, 217 aa, Homo sapiens
MYSLNQEIKAFSRNNLRKQCTRVTTLTGKKIIETWKDARIHVVEEVEPSSGGGCGYVQDLSSDLQVGVIKPWLLLGSQDAAHDLDTLKKNKVTHILNVAYGVENAFLSDFTYKSISILDLPETNILSYFPECFEFIEEAKRKDGVVLVHCNAGVSRAAAIVIGFLMNSEQTSFTSAFSLVKNARPSICPNSGFMEQLRTYQEGKESNKCDRIQENSS

SEQ ID NO: 807011 - protein, 159 aa, Homo sapiens
QSIPVPRGYRLARLCCAGAELQLQGFPQRPLFCTLGETTFPKSFVPGLERLWAPESPAAGTAGPTADMAVLAGSLLGPTSRSAALLGGRWLQPRAWLGFPDAWGLPTPQQARGKARGNEYQPSNIKRKNKHGWVRRLSTPAGVQVILRRMLKGRKSLSH

SEQ ID NO: 807012 - protein, 80 aa, Homo sapiens
QAMPRRPSGYFLSSGGAGSGSGRALGEGSGSQSRNSWSSVLTVSGHSSITMWLPSSMSFRNARSRICRRRRAQGENEATW

SEQ ID NO: 807013 - protein, 185 aa, Homo sapiens
QAMPRRPSGYFLSSGGAGSGSGRALGEGSGSQSRNSWSSVLTVSGHSSITMWLPSSMSFRKPGAGSAEDAGLKERMRPLGSGQALGTKPSMEGFLGWSGSGLRNRPQPVLRDPLRIWLSWLDPCWAPRVGRQRCWVAGGSSPGPGWGSQTPGASPPRSRPGARLAGMSISRATSNARTSTAGSGA

SEQ ID NO: 807014 - protein, 185 aa, Homo sapiens; identical to SEQ ID NO: 807013

SEQ ID NO: 807015 - protein, 185 aa, Homo sapiens; identical to SEQ ID NO: 807013

SEQ ID NO: 807016 - protein, 85 aa, Homo sapiens
PAPRLTFLAVLYPRRWLQPRAWLGFPDAWGLPTPQQARGKARGNEYQPSNIKRKNKHGWVRRLSTPAGVQVILRRMLKGRKSLSH

SEQ ID NO: 807017 - protein, 185 aa, Homo sapiens; identical to SEQ ID NO: 807013

SEQ ID NO: 807018 - protein, 138 aa, Homo sapiens
LSRCLGPGDGTSCLPAPYPRLGAAKGLERLWAPESPAAGTAGPTADMAVLAGSLLGPTSRSAALLGGRWLQPRAWLGFPDAWGLPTPQQARGKARGNEYQPSNIKRKNKHGWVRRLSTPAGVQVILRRMLKGRKSLSH

SEQ ID NO: 807019 - protein, 118 aa, Homo sapiens
GRDPVGRLRPMGSRKPGGARAWPMRSCAAPSSPIDAGAADLPSRPPRLPREQCCGECGARGSRWWSTPACRFSVGVSPGHIELSRGTLFPWLHGPEDARLSPLESVFRRPRGERKVLG

SEQ ID NO: 807020 - protein, 118 aa, Homo sapiens; identical to SEQ ID NO: 807019

SEQ ID NO: 807021 - protein, 118 aa, Homo sapiens; identical to SEQ ID NO: 807019

SEQ ID NO: 807022 - protein, 102 aa, Homo sapiens
KMEILQGPFRICLGILLSPPNTLLLYWTLAPIYSLLWNPRGIPKDVTTVLARCTGHRGLNLITPQTYHSGFAKNDTVNVTKLPCLLVNTNSAPLLYSEIRMR

SEQ ID NO: 807023 - protein, 190 aa, Homo sapiens
RSASACGVCLVSTAGSLDPAARAAPRTAAVGLPTVRFSAVAEHSGSALASLHLTSGIGKCTHHGFSGCSNPRTPMGAPRRPQTQRGAPSTWDPLKATRRAVSGRLADPEQRGHGVRGLSRKDPAMVLHNSPPRTTHPSLRARRAAARGTERVLGWFAALFPPPTHIPAGCVRAHLSVRRVLGACAFDAWR

SEQ ID NO: 807024 - protein, 33 aa, Homo sapiens
MVPSLRLPQTKAYTAHLMSLAPLDSRGSSRKGP

SEQ ID NO: 807025 - protein, 950 aa, Homo sapiens
  misc_feature (16)..(16): Xaa can be any naturally occurring amino acid
  misc_feature (37)..(37): Xaa can be any naturally occurring amino acid
EFPGYSLFMTFTSFIXKFQRLLIPPPGLCQPGPNPRXSLNHPISRSHRLLYLAKAKMSQLNSVFPFTSVCFSFLLPPSVPQEGTPLGSPEALAPSSEKLSTSLCWAAEAAAAAAAAAASGRLSGQRGEPGLGSRSRSREPVMEAEGSSAPARAGSGEGSDSAGGATLKAPKHLWRHEQHHQYPLRQPQFRLLHPHHHLPPPPPPSPQPQPQCPLQPPPPPPLPPPPPPPGAARGRYASSGATGRVRHRGYSDTERYLYCRAMDRTSYAVETGHRPGLKKSRMSWPSSFQGLRRFDVDNGTSAGRSPLDPMTSPGSGLILQANFVHSQRRESFLYRSDSDYDLSPKSMSRNSSIASDIHGDDLIVTPFAQVLASLRTVRNNFAALTNLQDRAPSKRSPMCNQPSINKATITEEAYQKLASETLEELDWCLDQLETLQTRHSVSEMASNKFKRMLNRELTHLSEMSRSGNQVSEFISNTFLDKQHEVEIPSPTQKEKEKKKRPMSQISGVKKLMHSSSLTNSSIPRFGVKTEQEDVLAKELEDVNKWGLHVFRIAELSGNRPLTVIMHTIFQERDLLKTFKIPVDTLITYLMTLEDHYHADVAYHNNIHAADVVQSTHVLLSTPALEAVFTDLEILAAIFASAIHDVDHPGVSNQFLINTNSELALMYNDSSVLENHHLAVGFKLLQEENCDIFQNLTKKQRQSLRKMVIDIVLATDMSKHMNLLADLKTMVETKKVTSSGVLLLDNYSDRIQVLQNMVHCADLSNPTKPLQLYRQWTDRIMEEFFRQGDRERERGMEISPMCDKHNASVEKSQVGFIDYIVHPLWETWADLVHPDAQDILDTLEDNREWYQSTIPQSPSPAPDDPEEGRQGQTEKFQFELTLEEDGESDTEKDSGSQVEEDTSCSDSKTLCTQDSESTEIPLDEQVEEEAVGEEEESQPEACVIDDRSPDT

SEQ ID NO: 807026 - protein, 673 aa, Homo sapiens
MMHVNNFPFRRHSWICFDVDNGTSAGRSPLDPMTSPGSGLILQANFVHSQRRESFLYRSDSDYDLSPKSMSRNSSIASDIHGDDLIVTPFAQVLASLRTVRNNFAALTNLQDRAPSKRSPMCNQPSINKATITEEAYQKLASETLEELDWCLDQLETLQTRHSVSEMASNKFKRMLNRELTHLSEMSRSGNQVSEFISNTFLDKQHEVEIPSPTQKEKEKKKRPMSQISGVKKLMHSSSLTNSSIPRFGVKTEQEDVLAKELEDVNKWGLHVFRIAELSGNRPLTVIMHTIFQERDLLKTFKIPVDTLITYLMTLEDHYHADVAYHNNIHAADVVQSTHVLLSTPALEAVFTDLEILAAIFASAIHDVDHPGVSNQFLINTNSELALMYNDSSVLENHHLAVGFKLLQEENCDIFQNLTKKQRQSLRKMVIDIVLATDMSKHMNLLADLKTMVETKKVTSSGVLLLDNYSDRIQVLQNMVHCADLSNPTKPLQLYRQWTDRIMEEFFRQGDRERERGMEISPMCDKHNASVEKSQVGFIDYIVHPLWETWADLVHPDAQDILDTLEDNREWYQSTIPQSPSPAPDDPEEGRQGQTEKFQFELTLEEDGESDTEKDSGSQVEEDTSCSDSKTLCTQDSESTEIPLDEQVEEEAVGEEEESQPEACVIDDRSPDT

SEQ ID NO: 807027 - protein, 787 aa, Homo sapiens
RQATECTNSSRLRPASLDISGTVSEGTTLPWILASCTKLTRKMAQQTSPDTLTVPEVDNPHCPNPWLNEDLVKSLRENLLQHEKSKTARKSVSPKLSPVISPRNSPRLLRRMLLSSNIPKQRRFTVAHTCFDVDNGTSAGRSPLDPMTSPGSGLILQANFVHSQRRESFLYRSDSDYDLSPKSMSRNSSIASDIHGDDLIVTPFAQVLASLRTVRNNFAALTNLQDRAPSKRSPMCNQPSINKATITEEAYQKLASETLEELDWCLDQLETLQTRHSVSEMASNKFKRMLNRELTHLSEMSRSGNQVSEFISNTFLDKQHEVEIPSPTQKEKEKKKRPMSQISGVKKLMHSSSLTNSSIPRFGVKTEQEDVLAKELEDVNKWGLHVFRIAELSGNRPLTVIMHTIFQERDLLKTFKIPVDTLITYLMTLEDHYHADVAYHNNIHAADVVQSTHVLLSTPALEAVFTDLEILAAIFASAIHDVDHPGVSNQFLINTNSELALMYNDSSVLENHHLAVGFKLLQEENCDIFQNLTKKQRQSLRKMVIDIVLATDMSKHMNLLADLKTMVETKKVTSSGVLLLDNYSDRIQVLQNMVHCADLSNPTKPLQLYRQWTDRIMEEFFRQGDRERERGMEISPMCDKHNASVEKSQVGFIDYIVHPLWETWADLVHPDAQDILDTLEDNREWYQSTIPQSPSPAPDDPEEGRQGQTEKFQFELTLEEDGESDTEKDSGSQVEEDTSCSDSKTLCTQDSESTEIPLDEQVEEEAVGEEEESQPEACVIDDRSPDT

SEQ ID NO: 807028 - protein, 507 aa, Homo sapiens
MASNKFKRMLNRELTHLSEMSRSGNQVSEFISNTFLDKQHEVEIPSPTQKEKEKKKRPMSQISGVKKLMHSSSLTNSSIPRFGVKTEQEDVLAKELEDVNKWGLHVFRIAELSGNRPLTVIMHTIFQERDLLKTFKIPVDTLITYLMTLEDHYHADVAYHNNIHAADVVQSTHVLLSTPALEAVFTDLEILAAIFASAIHDVDHPGVSNQFLINTNSELALMYNDSSVLENHHLAVGFKLLQEENCDIFQNLTKKQRQSLRKMVIDIVLATDMSKHMNLLADLKTMVETKKVTSSGVLLLDNYSDRIQVLQNMVHCADLSNPTKPLQLYRQWTDRIMEEFFRQGDRERERGMEISPMCDKHNASVEKSQVGFIDYIVHPLWETWADLVHPDAQDILDTLEDNREWYQSTIPQSPSPAPDDPEEGRQGQTEKFQFELTLEEDGESDTEKDSGSQVEEDTSCSDSKTLCTQDSESTEIPLDEQVEEEAVGEEEESQPEACVIDDRSPDT

SEQ ID NO: 807029 - protein, 585 aa, Homo sapiens
MKEQPSCAGTGHPSMAGYGRMAPFELASGPVKRLRTESPFPCLFAEEAYQKLASETLEELDWCLDQLETLQTRHSVSEMASNKFKRMLNRELTHLSEMSRSGNQVSEFISNTFLDKQHEVEIPSPTQKEKEKKKRPMSQISGVKKLMHSSSLTNSSIPRFGVKTEQEDVLAKELEDVNKWGLHVFRIAELSGNRPLTVIMHTIFQERDLLKTFKIPVDTLITYLMTLEDHYHADVAYHNNIHAADVVQSTHVLLSTPALEAVFTDLEILAAIFASAIHDVDHPGVSNQFLINTNSELALMYNDSSVLENHHLAVGFKLLQEENCDIFQNLTKKQRQSLRKMVIDIVLATDMSKHMNLLADLKTMVETKKVTSSGVLLLDNYSDRIQVLQNMVHCADLSNPTKPLQLYRQWTDRIMEEFFRQGDRERERGMEISPMCDKHNASVEKSQVGFIDYIVHPLWETWADLVHPDAQDILDTLEDNREWYQSTIPQSPSPAPDDPEEGRQGQTEKFQFELTLEEDGESDTEKDSGSQVEEDTSCSDSKTLCTQDSESTEIPLDEQVEEEAVGEEEESQPEACVIDDRSPDT

SEQ ID NO: 807030 - protein, 802 aa, Homo sapiens
RQATECTNSSRLRPASLDISGTVSEGTTLPWILASCTKLTRKMAQQTSPDTLTVPEVDNPHCPNPWLNEDLVKSLRENLLQHEKSKTARKSVSPKLSPVISPRNSPRLLRRMLLSSNIPKQRRFTVAHTCFDVDNGTSAGRSPLDPMTSPGSGLILQANFVHSQRRESFLYRSDSDYDLSPKSMSRNSSIASDIHGDDLIVTPFAQVLASLRTVRNNFAALTNLQDRAPSKRSPMCNQPSINKATITGLYNGIICISLITNEKEAYQKLASETLEELDWCLDQLETLQTRHSVSEMASNKFKRMLNRELTHLSEMSRSGNQVSEFISNTFLDKQHEVEIPSPTQKEKEKKKRPMSQISGVKKLMHSSSLTNSSIPRFGVKTEQEDVLAKELEDVNKWGLHVFRIAELSGNRPLTVIMHTIFQERDLLKTFKIPVDTLITYLMTLEDHYHADVAYHNNIHAADVVQSTHVLLSTPALEAVFTDLEILAAIFASAIHDVDHPGVSNQFLINTNSELALMYNDSSVLENHHLAVGFKLLQEENCDIFQNLTKKQRQSLRKMVIDIVLATDMSKHMNLLADLKTMVETKKVTSSGVLLLDNYSDRIQVLQNMVHCADLSNPTKPLQLYRQWTDRIMEEFFRQGDRERERGMEISPMCDKHNASVEKSQVGFIDYIVHPLWETWADLVHPDAQDILDTLEDNREWYQSTIPQSPSPAPDDPEEGRQGQTEKFQFELTLEEDGESDTEKDSGSQVEEDTSCSDSKTLCTQDSESTEIPLDEQVEEEAVGEEEESQPEACVIDDRSPDT

SEQ ID NO: 807031 - protein, 507 aa, Homo sapiens; identical to SEQ ID NO: 807028

SEQ ID NO: 807032 - protein, 261 aa, Homo sapiens
RQATECTNSSRLRPASLDISGTVSEGTTLPWILASCTKLTRKMAQQTSPDTLTVPEVDNPHCPNPWLNEDLVKSLRENLLQHEKSKTARKSVSPKLSPVISPRNSPRLLRRMLLSSNIPKQRRFTVAHTCFDVDNGTSAGRSPLDPMTSPGSGLILQANFVHSQRRESFLYRSDSDYDLSPKSMSRNSSIASDIHGDDLIVTPFAQVLASLRTVRNNFAALTNLQDRAPSKRSPMCNQPSINKATITGSWMELNPYTLLDM

SEQ ID NO: 807033 - protein, 730 aa, Homo sapiens
TAQRKCPHSATSASCSVRGLRAPEPRTSSDFSWFLGILASSLKMAFVWDPLGATVPGPSTRAKSRLRFSKSYSFDVDNGTSAGRSPLDPMTSPGSGLILQANFVHSQRRESFLYRSDSDYDLSPKSMSRNSSIASDIHGDDLIVTPFAQVLASLRTVRNNFAALTNLQDRAPSKRSPMCNQPSINKATITEEAYQKLASETLEELDWCLDQLETLQTRHSVSEMASNKFKRMLNRELTHLSEMSRSGNQVSEFISNTFLDKQHEVEIPSPTQKEKEKKKRPMSQISGVKKLMHSSSLTNSSIPRFGVKTEQEDVLAKELEDVNKWGLHVFRIAELSGNRPLTVIMHTIFQERDLLKTFKIPVDTLITYLMTLEDHYHADVAYHNNIHAADVVQSTHVLLSTPALEAVFTDLEILAAIFASAIHDVDHPGVSNQFLINTNSELALMYNDSSVLENHHLAVGFKLLQEENCDIFQNLTKKQRQSLRKMVIDIVLATDMSKHMNLLADLKTMVETKKVTSSGVLLLDNYSDRIQVLQNMVHCADLSNPTKPLQLYRQWTDRIMEEFFRQGDRERERGMEISPMCDKHNASVEKSQVGFIDYIVHPLWETWADLVHPDAQDILDTLEDNREWYQSTIPQSPSPAPDDPEEGRQGQTEKFQFELTLEEDGESDTEKDSGSQVEEDTSCSDSKTLCTQDSESTEIPLDEQVEEEAVGEEEESQPEACVIDDRSPDT

SEQ ID NO: 807034 - protein, 499 aa, Homo sapiens
MLNRELTHLSEMSRSGNQVSEFISNTFLDKQHEVEIPSPTQKEKEKKKRPMSQISGVKKLMHSSSLTNSSIPRFGVKTEQEDVLAKELEDVNKWGLHVFRIAELSGNRPLTVIMHTIFQERDLLKTFKIPVDTLITYLMTLEDHYHADVAYHNNIHAADVVQSTHVLLSTPALEAVFTDLEILAAIFASAIHDVDHPGVSNQFLINTNSELALMYNDSSVLENHHLAVGFKLLQEENCDIFQNLTKKQRQSLRKMVIDIVLATDMSKHMNLLADLKTMVETKKVTSSGVLLLDNYSDRIQVLQNMVHCADLSNPTKPLQLYRQWTDRIMEEFFRQGDRERERGMEISPMCDKHNASVEKSQVGFIDYIVHPLWETWADLVHPDAQDILDTLEDNREWYQSTIPQSPSPAPDDPEEGRQGQTEKFQFELTLEEDGESDTEKDSGSQVEEDTSCSDSKTLCTQDSESTEIPLDEQVEEEAVGEEEESQPEACVIDDRSPDT

SEQ ID NO: 807035 - protein, 66 aa, Homo sapiens
AGTVPNYGIQLGGASPCYLLNMASLLDVTSPSPFPLRTLLTDLLSRAGPAHYRAHVSCCASFPQAA

SEQ ID NO: 807036 - protein, 101 aa, Homo sapiens
KLVRSRIMESSWAGLRRVTFSTWRACWTSRRLRLFRCGLCSPTSSVEPALLTTAPTCPVVLHSHRPHKKWVPRLPSHCHSTGPEEASVVFRWAGTLPREVK

SEQ ID NO: 807037 - protein, 66 aa, Homo sapiens; identical to SEQ ID NO: 807035

SEQ ID NO: 807038 - protein, 101 aa, Homo sapiens; identical to SEQ ID NO: 807036

SEQ ID NO: 807039 - protein, 70 aa, Homo sapiens
LGRLRYYRIIFAMALVQNASFLPVPECAPQNMSLWHKDYFELETLEKQQIEEVHVILPFSPQKQEIKTFL

SEQ ID NO: 807040 - protein, 131 aa, Homo sapiens
KLVRSRIMESSWAGLRRVTFSTWRACWTSRRLRLFRCGLCSPTSSVEPALLTTAPTCPVVLHSHRPHKQFYIWTLSYKCSCVCMKEGKIENNPSVRPRGLWLNEVWNPCSEHQPSIMDRGSPSLRIRNNPR

SEQ ID NO: 807041 - protein, 1099 aa, Homo sapiens [sequence omitted]

SEQ ID NO: 807042 - protein, 1389 aa, Homo sapiens
  misc_feature (5)..(5): Xaa can be any naturally occurring amino acid
  misc_feature (34)..(34): Xaa can be any naturally occurring amino acid
SDFCXSKGLRTLYPFGFRFPVFVSYFTNSGTRQXLRLEVLERLLPRTPPPPPPLMESEMLQSPLLGLGEEDEADLTDWNLPLAFMKKRHCEKIEGSKSLAQSWRMKDRMKTVSVALVLCLNVGVDPPDVVKTTPCARLECWIDPLSMGPQKALETIGANLQKQYENWQPRARYKQSLDPTVDEVKKLCTSLRRNAKEERVLFHYNGHGVPRPTVNGEVWVFNKNYTQYIPLSIYDLQTWMGSPSIFVYDCSNAGLIVKSFKQFALQREQELEVAAINPNHPLAQMPLPPSMKNCIQLAACEATELLPMIPDLPADLFTSCLTTPIKIALRWFCMQKCVSLVPGVTLDLIEKIPGRLNDRRTPLGELNWIFTAITDTIAWNVLPRDLFQKLFRQDLLVASLFRNFLLAERIMRSYNCTPVSSPRLPPTYMHAMWQAWDLAVDICLSQLPTIIEEGTAFRHSPFFAEQLTAFQVWLTMGVENRNPPEQLPIVLQVLLSQVHRLRALDLLGRFLDLGPWAVSLALSVGIFPYVLKLLQSSARELRPLLVFIWAKILAVDSSCQADLVKDNGHKYFLSVLADPYMPAEHRTMTAFILAVIVNSYHTGQEACLQGNLIAICLEQLNDPHPLLRQWVAICLGRIWQNFDSARWCGVRDSAHEKLYSLLSDPIPEVRCAAVFALGTFVGNSAERTDHSTTIDHNVAMMLAQLVSDGSPMVRKELVVALSHLVVQYESNFCTVALQFIEEEKNYALPSPATTEGGSLTPVRDSPCTPRLRSVSSYGNIRAVATARSLNKSLQNLSLTEESGGAVAFSPGNLSTSSSASSTLGSPENEEHILSFETIDKMRRASSYSSLNSLIGVSFNSVYTQIWRVLLHLAADPYPEVSDVAMKVLNSIAYKATVNARPQRVLDTSSLTQSAPASPTNKGVHIHQAGGSPPASSTSSSSLTNDVAKQPVSRDLPSGRPGTTGPAGAQYTPHSHQFPRTRKMFDKGPEQTADDADDAAGHKSFISATVQTGFCDWSARYFAQPVMKIPEEHDLESQIRKEREWRFLRNSRVRRQAQQVIQKGITRLDDQIFLNRNPGVPSVVKFHPFTPCIAVADKDSICFWDWEKGEKLDYFHNGNPRYTRVTAMEYLNGQDCSLLLTATDDGAIRVWKNFADLEKNPEMVTAWQGLSDMLPTTRGAGMVVDWEQETGLLMSSGDVRIVRIWDTDREMKVQDIPTGADSCVTSLSCDSHRSLIVAGLGDGSIRVYDRRMALSECRVMTYREHTAWVVKASLQKRPDGHIVSVSVNGDVRIFDPRMPESVNVLQIVKGLTALDIHPQADLIACGSVNQFTAIYNSSGELINNIKYYDGFMGQRVGAISCLAFHPHWPHLAVGSNDYYISVYSVEKRVR

SEQ ID NO: 807043 - protein, 263 aa, Homo sapiens [sequence omitted]

SEQ ID NO: 807044 - protein, 1389 aa, Homo sapiens; identical to SEQ ID NO: 807042
  misc_feature (5)..(5): Xaa can be any naturally occurring amino acid
  misc_feature (34)..(34): Xaa can be any naturally occurring amino acid

SEQ ID NO: 807045 - protein, 167 aa, Homo sapiens
WHEVARVAGVKEAAQGSGLSLAAGSITEQEAHSPPSPHLQVSGLQFWPLSHRAVSRGRCGGAQGRQVLGEVAPALIHGAPFPPKGCSSPQARGQQPDLWSPCLCPHTGVAHACADGTTAGTWGHTHAGGVVSLLCPHTFLTYRQEALPGPGRLRVTPAPSPALSRPC

SEQ ID NO: 807046 - protein, 196 aa, Homo sapiens
TRGLCASCSVMLPAAKDSPDPWAASFTPASWRGVSFFPLTQSCQQGPLWRCTGEAGPWRGSPCLNPRGSFPSEGLLFPTGAGTAARPVVSMPVPSHRCSTRMCRWHHGRHLGAHTCRRRGLPALSPHVPHIQARGTAGSRTAPGDTSPVSSLEPPMLMRPRLTAGPVVQTGAVWTVPPRRGRRACMSSFANRTQPQ
